United States Patent Application Publication US 2005/0228172 A9 - sequence listing, part 47

SEQ ID NO: 185685 - DNA, 570 bp, Homo sapiens
aataaggtaagatatgtttggaaaactcgaaagataaaaaaggacagagatcctggagcatctgagtgaggggaggagtgagctcaactctgacgtgtaaatagcttagaaggcattatttctatcctttcaacaatgaaaacacctggacaaactgaaaatcaatgacttttcttggacctataaactagttgagattacaggcaaatcacaacctcaagctctgcaaaggcaagcttgttcagccaagatctgctacagggagcagattggagtcataaactggtaaaattacttatatgccaattttgataaattgttgaaagctaaatgtagatcactaccaaataaccaaatatcaaatatccagggtaaaagactttaayagagccttatcctagctgaagaggggccgtctttccactccagccctttcaagcttttctgcctcactaaatggaggatctaaaaaaaacagttgataaggagtagggcttcaaggaaatagattgggaacaccacagccaaagaagggagtgggaccaatggacaaagaagttatgccatggc

SEQ ID NO: 185686 - DNA, 570 bp, Homo sapiens
aataaggtaagatatgtttggaaaactcgaaagataaaaaaggacagagatcctggagcatctgagtgaggggaggagtgagctcaactctgacgtgtaaatagcttagaaggcattatttctatcctttcaacaatgaaaacacctggacaaactgaaaatcaatgacttttcttggacctataaactagttgagattacaggcaaatcacaacctcaagctctgcaaaggcaagcttgttcagccaagatctgctacagggagcagattggagtcataaactggtaaaattacttatatgccaattttgataaattgttgaaagctaaatgtagatcactaccaaataaccaaatatcaaatatccagggtaaaagactttaatagagccttatcctagctgaagaggggccgtctttccactccagccctttcaagcttttctgcctcactaaatggrggatctaaaaaaaacagttgataaggagtagggcttcaaggaaatagattgggaacaccacagccaaagaagggagtgggaccaatggacaaagaagttatgccatggc

SEQ ID NO: 185687 - DNA, 559 bp, Homo sapiens
gccccttctgcctccaaaactctgattctgtaagccttcagtcatgtctcacattatacacacaaaccatgctgggtttgttttcttggagtaatacttgagtttttaaagctctttatttcaaccccaaaaggcaaacattacagcaaagtcacatcttatgctgtagtctaatgtcagagaatttaattaaaacagagtactcttgaaaaatccctcgaatttcccaaagtcagtatgataccatttcacagcaagaccagcagacctagtgtttcctctcgtgttgggattatttgcagttgctttgaacaccatagaagccttgcatttacaattgtagtaggcccaaggccctctcagtccaggggaagctcctgagaaacaagagagrctgagggaaccacagatcttatctgccatctcaagctcatgctagggcagaggtacattgatcgcagtaattttatatataatatatatataatatgcaaatttatatataagtataatttatatataagtatatatatcatataattatatgtatatatgacat

SEQ ID NO: 185688 - DNA, 466 bp, Homo sapiens
tgcatttttacataagataaacgtaagtcagagaaagcaactaggtacatatttgtctcaggtgagcagagagatgatttttgagttctgttctttgtcctatacstgtgaagatgagctataaatgtcagggtgaaatttagcagaactgtttgacagtaacgatcttggggcccacaaggaatttcttagtgggaaaattgtggcggaggcatgtagttttgttttgttttttatctttttagctcttgtttaggaataaaatgagaggcaggtttgactgatgcagttcccaacttgagttttccctttggcttagtgattttggggtttgttttcctttcatagtggaaaggtcccttctggatagtcatgatgtgctcagcgattgagcccagcagatgtgctgaattatgccacatgtgcgggacacagccccatcgcatgcacagcattgtttgatgcc

SEQ ID NO: 185689 - DNA, 456 bp, Homo sapiens
aagataaacgtaagtcagagaaagcaactaggtacatatttgtctcaggtgagcagagagatgatttttgagttctgttctttgtcctatacctgtgaagatgagctataaatgtcagggtgaaatttagcagaactgtttgacagtaacgatcttggggcccacaaggaatttcttagtgggaaaattgtggcggaggcatgtagttttgttttgttttttatctttttagctcttgtttaggaataaaatgagaggcaggtttgactgatgcagttcccaacttgagttttccctttggcttagtgattttggggtttgttttcctttcakagtggaaaggtcccttctggatagtcatgatgtgctcagcgattgagcccagcagatgtgctgaattatgccacatgtgcgggacacagccccatcgcatgcacagcattgtttgatgccaac

SEQ ID NO: 185690 - DNA, 467 bp, Homo sapiens
catcctctgaacaagcctctcaggcagccagcctctctcagccaggcagattctcagccagccattctctcagccagtcgctagcccattcagccagccagcctgtcacacagcctcccatacagccctctaggccatcgtcccagtctgcctctttggaagcctctgatgcagccatcctctggaccagcctatcagccagcttctcagtcagcaagactgctagcctctcaaggagcctcccggctagcctctcagccagccttccagctggcttctygactagcctcccagttggcctctcaaccagagagacacctggtctctcagcaagcctcccagccacacccttgggtggcccctcagccagccaacctgccagccagcgtctgagcaagcctctcagccagcctctcaaccaggcagcttctgagccagcctctcaggcagcaagcttctcaaacagc

SEQ ID NO: 185691 - DNA, 542 bp, Homo sapiens
aggcagcaagcttctcaaacagcctcccagtcagcctctcggccagcctctcaggtgtcctcttggccatccaggcagctggcttcttggccagcttccaagacccccttgactggcctctcagccagccagccttcccgccaacctatcaataagcctctcagccagtcaccctctcagcaagcctctaagctagcctctcggtcagtgagattatcagcctgccatcttctcarccagcttttctccaagcctccccagccagtctctcaaacagcctcccaaccagcttcctggcctgccttttggtcagcctcccatgccgccatcctctggaccagcctctcagccagcctctttaccagattgccagctggcctcttggcaagcctttcagccacccccttgtccagcctctcagccagccaacttaccagtcagcatctcagcaagcctctaatccagccatcctctcagcctgcctctaagccagcctttcaaccagtcaacctctgaggcagccagcctctcatacagcctct

SEQ ID NO: 185692 - DNA, 542 bp, Homo sapiens
aggcagcaagcttctcaaacagcctcccagtcagcctctcggccagcctctcaggtgtcctcttggccatccaggcagctggcttcttggccagcttccaagacccccttgactggcctctcagccagccagccttcccgccaacctatcaataagcctctcagccagtcaccctctcagcaagcctctaagctagcctctcggtcagtgagattatcagcctgccatcttctcaaccagcttttctccaagcctccccagccagtctctcaaacagcctcccaaccagcttcctggcctgccttttggtcagcctcccatgccgccatcctctggaccagcctctcagccagcctctktaccagattgccagctggcctcttggcaagcctttcagccacccccttgtccagcctctcagccagccaacttaccagtcagcatctcagcaagcctctaatccagccatcctctcagcctgcctctaagccagcctttcaaccagtcaacctctgaggcagccagcctctcatacagcctct

SEQ ID NO: 185693 - DNA, 542 bp, Homo sapiens
aggcagcaagcttctcaaacagcctcccagtcagcctctcggccagcctctcaggtgtcctcttggccatccaggcagctggcttcttggccagcttccaagacccccttgactggcctctcagccagccagccttcccgccaacctatcaataagcctctcagccagtcaccctctcagcaagcctctaagctagcctctcggtcagtgagattatcagcctgccatcttctcaaccagcttttctccaagcctccccagccagtctctcaaacagcctcccaaccagcttcctggcctgccttttggtcagcctcccatgccgccatcctctggaccagcctctcagccagcctctttaccagattgccagcyggcctcttggcaagcctttcagccacccccttgtccagcctctcagccagccaacttaccagtcagcatctcagcaagcctctaatccagccatcctctcagcctgcctctaagccagcctttcaaccagtcaacctctgaggcagccagcctctcatacagcctct

SEQ ID NO: 185694 - DNA, 392 bp, Homo sapiens
agctagcctgctaatcaggccctcaaaaagcctctcagctagcaagcccctcagcaagccactaagccagtctctcagcaaggaggtctcagagtcagcctctcagacagccagcctctcaaacagcctctaagccagcttttcataaakcttctaagccagtctctcagccatgcagattcagagccagccccccatctgtcctctcacccaggcttccaggcagcctcttagccgactttccaaccagcctctcagcaagcctcccagctggactgtcggccaacctcccaggcgtcctttggccagcatcccagcccggcattggccgatctctcagccagccaaccaactagccaacctctcagtaagcctttcagccagccagcctc

SEQ ID NO: 185695 - DNA, 392 bp, Homo sapiens
agctagcctgctaatcaggccctcaaaaagcctctcagctagcaagcccctcagcaagccactaagccagtctctcagcaaggaggtctcagagtcagcctctcagacagccagcctctcaaacagcctctaagccagcttttcataaagcttctaagccagtctctcagccatgcagattcagagccagccccccatctgtcctctcacccaggcttccaggcagcctcttagccgactttccaaccagcctctcagcaagcctcccagctggactgtcggccaacctcccaggcgtcctttggccagcatcccagcccggcattggccgatctctcagccagccaaccaactagccaacctctcagyaagcctttcagccagccagcctc

SEQ ID NO: 185696 - DNA, 405 bp, Homo sapiens
tcatttacatttcatgactttgagatagacttgggaaaagacatctaggaaataactgaaaaatgacatgagaatacctcacacctgaactgtacacttcaacattgttaagacggcaatggtcatgttataaatgttttattatgaatattttaccacaggttaaaatgtttaacaatttgaaaaggaagtaattatcttcagttctctaagttctagaatttgtaacatttcaccccctgctccttcccgatccggagcagagcatcttattctttccctgctctactcaggattcactttcccttatgtaacaaaaacattgcaaatattttttaaaataattacaaaactttacctagaaatmtgtaattcaaattaaaatggagattaaaaatacaaact

SEQ ID NO: 185697 - DNA, 490 bp, Homo sapiens
ttacaaaactttacctagaaatctgtaattcaaattaaaatggagattaaaaatacaaactcacaatggtcaggaagccaagatctttttttaaatatttataaatttgcattacactatttgtaatatgtccaaaaatatgtccacactgtatggaagaatgggaaaaatataagaaaaaaaggcttacggttatagatgaaaatattacataaagacatgtttatatatacacaaaactgagagaggacagctgctgtaataataatacctgggttatatttcaacaaaataaacacagactgttgtttagcccaagtttataaaaacattaacttttgaaaattaatgttcactttgctgctgaaacagctgcmcttcatgtcagattttcaaagtccataaagatttgcataacatagtcttcctggaattataattcaaaccgagagaattgaagttagttaaaaacacaataccaagacaccaa

SEQ ID NO: 185698 - DNA, 185 bp, Homo sapiens
gaattcgcctctcctttgggcatccctgattgtgtctctatttgtttatgtttctcttaatgtctgtgttctctgtctgtttccctgcctgtaggtctgtgactstgtgtgtgtgtgtgtgtgtgtgtgtgtgatgcacgagtgtccattgtgtgtggggtctgccctgtggggctgtgtctcat

SEQ ID NO: 185699 - DNA, 494 bp, Homo sapiens
ttatgtttctcttaatgtctgtgttctctgtctgtttccctgcctgtaggtctgtgactctgtgtgtgtgtgtgtgtgtgtgtgtgtgatgcacgagtgtccattgtgtgtggggtctgccctgtggggctgtgtctcatggccttgtgtatctgtggtctcctggtgtgtgtgtgtgtgtgtgtgtgtgtgtgtgtgtaagcctgtctgtgggccaaactgctgagtgcccaggtgaagctggggcggttctgtgcctttgtgtctctgtgcttgtggtgtctrtttatttacctgtgagttcctgggtttgtacacctaaaaaattggcagtcacagagggccctctgtgggtgagaaggggacaatatgtgctcctctcattcccaggctaggccctttctgcccctgctcttctgagcctccgttggccccctggtagttccctcttacgccccaaggagggatggagaaaagggtcaggttacagaatt

SEQ ID NO: 185700 - DNA, 494 bp, Homo sapiens
ttatgtttctcttaatgtctgtgttctctgtctgtttccctgcctgtaggtctgtgactctgtgtgtgtgtgtgtgtgtgtgtgtgtgatgcacgagtgtccattgtgtgtggggtctgccctgtggggctgtgtctcatggccttgtgtatctgtggtctcctggtgtgtgtgtgtgtgtgtgtgtgtgtgtgtgtgtaagcctgtctgtgggccaaactgctgagtgcccaggtgaagctggggcggttctgtgcctttgtgtctctgtgcttgtggtgtctgtttatttacctgtgagttcctgggtttgtacacctaaaaaattggcagtcacagagggccctctgtgggtgagaaggggacaatatgtgctcctctcattcccaggctaggccctttctgcccctgctcttctgagcctcygttggccccctggtagttccctcttacgccccaaggagggatggagaaaagggtcaggttacagaatt

SEQ ID NO: 185701 - DNA, 211 bp, Homo sapiens
taaaatctcttttaaaatctcctcaaaggaagtggtagattgtgcatgtcacaataataccacaaatgagtaacccagaatgctagagaccaatgtgtcccaaaagccagttgagtagtctrgattcttgaaaaagttctaaactgtgacaaaacaagaaaaaaaaaaagcattatagagaggtttgttgttgttgtttttgttgtttttc

SEQ ID NO: 185702 - DNA, 483 bp, Homo sapiens
acaggggagcaagatgaagaaatacattttcatgattacattttcctgaaatgctgtcagatttgccactagtgagggtgtaataaagacattttcaggcttggaaaatctcaaacaatgtggcttccatgcaaccttcgacrggaagcttccaacagatgtgctcagccaccatgaggatggagaccacaaaaatagacatggggtctagggaagaggagaaactgcacaagacagaggcaaagtgactccccaggatgatggcaaaggatgatccctggatggcagctgagagtccagactggagcatgtcagaagcctccaggaaagatttcttcaataggataaacttgataaaatataaaatgtatttgtgacttttgagaggagatttatctctcaaggagagagtttatttaatgattaatgaatggaaaatggaaatgaaaacatattacatatagagtaatcaaaaagttacac

SEQ ID NO: 185703 - DNA, 483 bp, Homo sapiens
acaggggagcaagatgaagaaatacattttcatgattacattttcctgaaatgctgtcagatttgccactagtgagggtgtaataaagacattttcaggcttggaaaatctcaaacaatgtggcttccatgcaaccttcgacgggaagcttccaacagatgtgctcagccaccatgaggatggagaccacaaaaatagacatggggtctagggaagaggagaaactgcacaagacagaggcaaagtgactccccaggatgatggcaaaggatgatccctggatggcagctgagagtccagactggagcatgtcagaagcctccaggaaagatttcttcaataggataaacttgataaaatataaaatgtatttgtgamttttgagaggagatttatctctcaaggagagagtttatttaatgattaatgaatggaaaatggaaatgaaaacatattacatatagagtaatcaaaaagttacac

SEQ ID NO: 185704 - DNA, 566 bp, Homo sapiens
aacttctaataacaatgcataacagcacttgccagttgcaccattttacttcagaaggatgtcacatgaatcattgaaggagtgactttagaagaccttgagccaattggagagaagcgctctaagtgcccaataatttctcatttttaatattcagtgaagatttttgaaatgttaaagaaaaaaatagaggaactaggaataacaaatggctagcaggacacatttactggaatgaaggaggattgcaaagctattttctcaattatattttttacattaaaacaacgttgcatttttaagccctgcagataaaatgtcttttatgaagaaaagctaattaagtttcctgaaaaataaggcagctggttaacaatttacrtcttttttgaagcgttaacgcttatggtttttagggcccaagttactaagttaatctataagtgaatccaaaggtgaactaatagatcgaaaaatggttcatgcttaggtgtggatttctgagcactaaaaaaatttaaaaaatgaccatagaactattttgatcttcacttttgaacaaatca

SEQ ID NO: 185705 - DNA, 377 bp, Homo sapiens
tctctatacatcaaaggtatttgccaactatccctcttctgaaaggtcaagaagtcaaaatccccatgaaamcttgaatggcggtacattaaaaaacaagaaccttcaaaatatgtaatagctcttttcagagctgtcatacacaaataaatacaaaatctactcttacttgctttccttcaatagtatcacaaaaggaggtactatgttgattcagtatatagtttgtatactcacaatgcatggaaaaatgcatggagaaccatgcatacagaacgttttacctcacgtattctcaattgattttctaacttttgtttttagcaaccatccttcatcaaaaagatccaagtgttaaataaacaagtctagaattc

SEQ ID NO: 185706 - DNA, 377 bp, Homo sapiens
tctctatacatcaaaggtatttgccaactatccctcttctgaaaggtcaagaagtcaaaatccccatgaaaacttgaatggmggtacattaaaaaacaagaaccttcaaaatatgtaatagctcttttcagagctgtcatacacaaataaatacaaaatctactcttacttgctttccttcaatagtatcacaaaaggaggtactatgttgattcagtatatagtttgtatactcacaatgcatggaaaaatgcatggagaaccatgcatacagaacgttttacctcacgtattctcaattgattttctaacttttgtttttagcaaccatccttcatcaaaaagatccaagtgttaaataaacaagtctagaattc

SEQ ID NO: 185707 - DNA, 377 bp, Homo sapiens
tctctatacatcaaaggtatttgccaactatccctcttctgaaaggtcaagaagtcaaaatccccatgaaaacttgaatggcggtacattaaaaaacaagaaccttcaaaatatgtaatagctcttttcagagctgtcatacacaaataaatacaaaatctactcttacttgctttccttcaatagtatcacaaaaggaggtactatgttgattcagtatatagtttgtatactcacaatgcatggaaaaatgcatggagaaccatgcatacagaacgttttacctcacgtattctcaattgattttctaacttttgtttttascaaccatccttcatcaaaaagatccaagtgttaaataaacaagtctagaattc

SEQ ID NO: 185708 - DNA, 627 bp, Homo sapiens
cctttcctaactgtacaagtcagctatacttattttattttatttttttatccatagtatctggcaaacatatgttattggtcattcacaatggggtccaggaaagcaaatccatgcccacctaaaatataaattctaccatttttctgaatttttattctttgctaggcattcttccagacacttgagaatattaaatgcatatgaaatgggttccagttccacagaagtgtacatacatgtgtctatatgtgcatgcatatgcacacagctgagctcagaagtgtacctactagtgtatgtgacatgtaagtagagtatcagaatacaatgggatctctatagaggcttgtaatcaaggccaaggaaataactatacttgttgatactgtgatggatttccaaggctagatcatcatttagagtagagaaaaagaggggaatgggagaaacagcgggtgtgaaggtaaagaggcctgaatgtgcctggagtgtttgaggwgtggaaagtgtttcagggtgtcaagagtgaagtattgtcagggaggtttggggaaaaggcagcataaaaggctgtagaggtagggaggcgcaagattatgatgggccttacatgttgtgagaagg

SEQ ID NO: 185709 - DNA, 405 bp, Homo sapiens
aggtgacagagttgctggaagatatgaactggttctaggaaagcagttaattagcatgggagtggccagattgattcaattgtagctcctgaatagcaaactaatgtttctcagtctttacctttcaccagcccatagaaatgagccacagaaaatgttattcactcaattgtttggtcagctttgatctaccttgtcatacaacmaaaacaggttcaggaaaaaatgataaaatagtacatatccttgattactttttacttatcctttggatgtcatttctatatttcatgtatctcttgcctattgctgagtgccctcagttgcccttaaagtacctcaggatcaattcctaaaacacgtatacacacatacaacctgtagctgtgctcacaacctaaatct

SEQ ID NO: 185710 - DNA, 565 bp, Homo sapiens
tggctgtaagtatttggttctatttctggattctctattctatttcattggtctatgtgcctattttatatgaacaccatgctgttttggtaactatagccttgtagtataatttgaagttggataatgtgatgcctccaaatttgctctttttgcttagtattgctttggatatgcaggctcttttatggttctatataaattttaggattgtttgttatagttctgtgaaaaatgatgatggcattttaatggaaattgtactgaatctatagattgctttggacagtctggtcattttcacaatattgattctactcatccatgagcatgggatgtgtttccatttgtttgtgtcatatattatttctttyagctgtgttttgtagttttccttacacagatttttcacctgccagggaggcttttaaaacatgctataaaacttcttttttataaaaaaaaataaaacttcattctttccttaccctgtcatcatttctggctcattatccaaaagacattttttgacacagctccaggcagacttttctaagtaatcttg

SEQ ID NO: 185711 - DNA, 494 bp, Homo sapiens
tgtttggcctaaaatagttctgagttaagtctggataaagatataaagggcattttgttgttgctatagttcagattttttttagggtttagtgattgtttttgttttgttttgttgctgtgccattttctgccctagagttcataaaactggaaaggaagagtaagaattaaaattcaagttattcaataagatacaataacccaaatcaagacagcaaaattaaaaaaattaatatgtagattcaaaagtcaaatggacaatggaaaaatgagagaaaacgttytagagattcacataaaaagactagaagtctatgttgaccacagtacccaaatgcaccaaaattacggcatgactggcaaaaaccctaaagaaatcttaggtttatttgctcaaaaacatttgttacacacgtaccatgcatcaggaactatgttctcggctctagcaataagaacgtacatcaccagtaaagaattttaaaataataa

SEQ ID NO: 185712 - DNA, 538 bp, Homo sapiens
tgagtcatagagagatgaacaggtgccatgggattccagagaaggatgtcttggatccctagacttggaataatggagataatcaggaaaggcctctttttttgaggggrtgaaactataatttctttaggatagagtccttactttattggagttcccctccaagacccatccagccctatgccatgtaccaaacagattctccatgggattgttgtatttgctttttggatctcctcccttttttaatgtagtcagtaacatttcattctttccctgatattgagagtgcacttataattgggagtgcattagacaacaagggttgcctaataatacactggaaatctgggttaagatatttcctatgtgggttttcccttttcacttgtgtcacaatcttaatgtcactgcagatgaccatatattcattgcaaaacatttatatgatagataatcattgtagagcagcccattttccctatatagcatttatcatggcttgtgattatgtatgtgcatatttcataaatgtctg

SEQ ID NO: 185713 - DNA, 472 bp, Homo sapiens
cctcactgtgctgctgtgatgatgaaatgccccaatatttgtcaagtgtctggcagagtgtctcccatatagtaagcactcattacatattgtatttaataatagtaagtgttcaataaaatgatagctgcaagcaacattatttattatataattttgttacctttcaatccttatgtcatcaccgtgaataagtgattactgattctgcatctataatcctagacaatcaacaaatgttttgagagttctccttctgtaccaaacattatctgggagaatacagagattgacatagtcctagccctacatgagctttcagtgtagttgggaacataaaatatttttatctacaaataaaatgagcaatattaaagtgctaaacatgtgakatatatgctataaatattagagttcagaaaaagtggatctatcttcatgggctgtgatggaagttgagttatgagctatg

SEQ ID NO: 185714 - DNA, 575 bp, Homo sapiens
ttctgagagggtgaaggcttttgtgcaatatttgaaaaaaaataggagatatgtgctattatcactcgcaggaatacagcctagatatttcctgagcactaaaataagaatggatttgtcatgcaatggctttactctaagctcaggactcttcctttactatcytttaaatgctaattagcttcactgaatgcctctggaaaagtgtcccacaaatcaggaaacattaaattatcacttactctgcattagctgaaggcatcagaagccagcagaatctctggtgtagaagaaggaaccatgttgcaggtctggttagtagcctctcatagcagtttttgtgccagcatactgggtttttggttcctctaccatgataattggtcaattgccttggtagaatcaaaacaaaaaaccattgagagctaaatgaagtaggttgttttgtcaaaaagtagagattaggaagggatggacagaggcaacagatactgaataccttctctgtgccaggtatcctgtttggtgctttatgtaatataacacaaatctttgtgagataagtactaaccaat

SEQ ID NO: 185715 - DNA, 504 bp, Homo sapiens
ctgattttacaaagtactgtgttccaaggaaaaggcattttgtagctatctcatttattctgacattcctctgagaggtaagttaccagccagtcagctatccacatggacccagtgttaattggtaagcctctatgtccctgttttcttctctgtgggtatcccctctcacccacttcttccatcagcagtagggggcagttcattttgattttcagatgtatccctgccagaggctttcagcagttccataccaatattctgtactcattctcaattccccttattgccaggctagccccgacctttcccttccattctcataattggccagctgtcttattctgagagccagtctttactttgtatcttggctctgattaatgtcttgttcccagtgcttaagaccttatcttggtaacctgcccaatgtcttcattyccctaagattgccccaatctagattttgtcagcacttctgccactcccaccacagtgtgaata

SEQ ID NO: 185716 - DNA, 461 bp, Homo sapiens
agcaaatacgtaaaatgcatacataaaagactggaagtaaatagatatgataaaatgtctgctgtggctttcctgaatggtaggattatgttttcttctttgtacctcttagtatatctaatttctatatgttatgccttgttctcctctgtgtgtgtgtgtgcgtgtgtgtgaactctaagagtctgccaaagttcccttagaataaatggtgaccatgaccacaccaggttaggaagaaatctgtgktatagcagtgcggtttctcttccctttcctatagaatattctggttttagcaagaaacacttgagacatgtcttatggggcagtcatttgcatgccctttctgctcagaatggatgacaaggacctgttgaaaacagaagcagctcaggacacaggtcatatttttacagcctggagcaagaggagctagccctagttagaggagtttaata

SEQ ID NO: 185717 - DNA, 607 bp, Homo sapiens
gaaggttgagacataattaagctgaggtctagtcacaaaggtatttctcagcatcgtgaaaaatctaaggacaagtcaatggaaggactatggaggaaacacaaatatgaaatcagtcaagaagaaggaacaccggtttttacattcatattattcattaaatagatctcagtacctttcatatgttggttattaggaagcttttattgatcgtgcttcttttgtatccctgtgtttgagtgttaatctgatatattcccagtgccttggatattcaagatttcataggggcaccaaaagattgcccaaaataagaaaaagcaaacacactataaaatacaacactcaaaatgcaggtgaatatactttgccttcctgcagtgctaagttaagccacaaggaagtattttagagcagcatatttataacttaatttactattttaaaagctctttcaatttgttccttaaaggaaatacaatygtagaattatttatatttctttttacattttttcttcaatttagatgactgctaattaggtatttttcttttcagtatagcagaacctagccaacaacattgtatatggaaatatacgtgaata

SEQ ID NO: 185718 - DNA, 452 bp, Homo sapiens
gacaaatgaagagtgagcaaggtcaggagttttattgagtgatgaaaacagctttcaatggagaggggatgcaaaggcaggaaaatatcctcaatgtggctgagtttggggcttttatggaatcagaataggggagggacaggccataaatagtattggaaaaggcaatattcaattggttaaaaggcaatattcagaaagaattaatcaggaaagggcaggcaaataagaacagaagttctcactctgggtcatgggtttcatctgggaccagcagtcaggtctttcagccttcaggctgtcttttttggcttgaatgtggggtttcaccagggaacctcccctatctgcctaggcatttggctgcttyttgtcactatcaattacaggtgtgagtcactgtgcacgccaatttccatattttaaaactcacattgctttgatacaaggta

SEQ ID NO: 185719 - DNA, 452 bp, Homo sapiens
gacaaatgaagagtgagcaaggtcaggagttttattgagtgatgaaaacagctttcaatggagaggggatgcaaaggcaggaaaatatcctcaatgtggctgagtttggggcttttatggaatcagaataggggagggacaggccataaatagtattggaaaaggcaatattcaattggttaaaaggcaatattcagaaagaattaatcaggaaagggcaggcaaataagaacagaagttctcactctgggtcatgggtttcatctgggaccagcagtcaggtctttcagccttcaggctgtcttttttggcttgaatgtggggtttcaccagggaacctcccctatctgcctaggcatttggctgcttcttgtcactatcaattacaggtgtgagtcactgtgcmcgccaatttccatattttaaaactcacattgctttgatacaaggta

SEQ ID NO: 185720 - DNA, 614 bp, Homo sapiens
ctgccagtgattgcattggtcgattgcctggtagtggggtgaaaggaataaacagtggctatctgataatctttctggttttcctttaaacaagctcactggagtatatgtcctctacactagtttctgagggaggacatgtaagtgttccagtaactctgtcaccagtctggtarttcttattgttgagttgcctttacagccaccttagaatccacccaaagaaaatgaacacaattgctcccccttaacttcccctccttttccaaactgctattgtcttataatcatatctcaactttgatcaagccttctattacgtgatgcttgaatctactaatttgaacttattccttaaatatctcaaattatcttctgacataaggaaacaaatttcggtttcatgaaaccatttctcattataactgtgagcatataagtgaccttaattttcaaaaatatgttgcaatgcttctaaatataactaagattattgaaatcagacatttgtttctttgttgccagtttacatctaataattatgtacaggaagttgttgatttgcagaaaggtaccaagtcaaattttctataatgctctttgagtcatagaca

SEQ ID NO: 185721 - DNA, 577 bp, Homo sapiens
taaaaaaaaaatacagggaggagatttgtgaggtatgatggtcaggggacgtccctgtgaagagttgacatttaaacatacacatgacagctgagaaggagtcattcttgcaaagagcaaaaagaatagcatgtgcagaaagsctgaattaggaaagaatttagcaagtatgttaaaagaagcctgagctgctgtagcagagtgagccatggacagagaggtacgagataaatttggaaaggaaagtaagaaccatagcagccacggacataggtaaaatattattcaaaatgaaggagaaaataccaaagaattataagaaggaatacaaaataaacagacaacaatttataaagctcactttggcagggtgccgtggctcaagcctgtaatcccagcactttgagaggccaaggcaggaggatcgcttgaggccagaagttcaagcttggcctgggcaacatagtgagataccatctctacaaaggtaaaataaataataatcataaaaataaatcactctgattattataggataattgcattagaaaggctatgaatgtaaacagggagaatg

SEQ ID NO: 185722 - DNA, 535 bp, Homo sapiens
aggagggctttccagaagtgagagacaggactgaccacttagaggtggagggaggacaggaaaaaatttaacttatttacctgaagagagagaaaaagatcttcaggtttctcagcagccaagaaacagcaaaacarggcacagaaaggtacctctaaataacaaatggccggatacaatattggaggagggcgaggcaagtgttcacttgatgagaaggtaacactgagaaggatgatttcagtatttcagttttcaaccactatcagcttgtgcctttttctatggtgtcctgctcataattcagcatccagtggtgttctgcttcctttccttctcacttatccaaacttactcttggggaaacctctcacattggccatccaatggctaatattggagatactttgccactgtcattgtcaaaatatacctgtttcacctctaggcatttggaaatggcaagagaagataaaaacaattttatcaaatgtctatgagattttcctgcctcactccatactatagacttgca

SEQ ID NO: 185723 - DNA, 538 bp, Homo sapiens
ttgtgcaaaaaaattactaataacattatcaagttgaattcagcaatatttagaaagtctaaaacataatgacaaagtgagattgatcctagtaacacaagatttgattaatattcaaaaacactccaatgttatacaccacattaacaaaagcagaagaaaaatcacacagccatctcaataaacgcagaaaaacacttggaaatccagcattcatttatgatttaaaagagaaaaacccatcaacaaactaggaacagaggtaacttcctcaacctgataaagggcatctatgcaaaawctgcagctaacttcatacttaatggtgaaaggctgaatgttttctacttaaaaccaagaataagaaaaagagtttgttctcaccacttctattcagcattgtgctagaagtcttatcatgatcaataaaacacagataaataaaagacaaacagatttgaagaaaatataaaatagtaagaaacctacaaaaatactagaagtgataagtcaatttaacaaaattgaaacacacaag

SEQ ID NO: 185724 - DNA, 594 bp, Homo sapiens
tgtctataaatcatacctcaatcaaaaattattgatcaaaaaaatccaatggacagcataatgcatggtacatagtaggtgctcaataaatatttgttggatgatattattcctaggaagaatctcagatagtgatttttttccctgcaaagaactatggccaatattgaggaaacaactcaaagagaatgtcagttgcatcatctttgttcataatggatgtgaaaattatttttgcaatattgacttttgttctgagggaaactaaaacagaccaatttgttcaatcttcagagagatttaggtagtgttaaagtggctcattgggagagtagaaactaaagctaacacagctctcttggcctgacctatacctttatcaaacccaagycaaacactgtggttgcatttttcaaagtccatttgacagacaggaactgtcagtaacagtcatacttagcagaaattcattaacctgtagaccttctccatttgaggaaatattttctcactatattgaaagcatattcatttctctaagaaaaacctctcatgcacttactccttgaagtcttttttttttttaagctttgc

SEQ ID NO: 185725 - DNA, 571 bp, Homo sapiens
gaaaattaacacttgtagtagtaactagtaagatagaaagttttgagtttttcaaactctaaaaaatatgcataagttctctataaaaattctaaggtgatagttgctttctacagcaaacatacctcataaaaaatatttttcaagaagcaaattttatgatactatatgatacaaktatgatagaaagataaaagtaaaagttagatataccaaaatcaagaaaggcaacggttctcctaagaacaagatgttcctgaatcatgtgcagtaattttattgactgagtaaaaaaataatactaatggactagttccattcctggaaatttattacatatggataacaatgttcaaggagtgaaaatacaggtatcctgctgaggatataagaataataccatgttatgaatgttatgctatgaatatggaaatatggcacttcaccaaaaacaaaaaacttcttttcttctttcacaggcaaacaggtttcttttttaaaattttcaacttttattttaagttcggaggtatatgtgcaggacatacaggtttgttacttaagtaaacct

SEQ ID NO: 185726 - DNA, 585 bp, Homo sapiens
agcaatccgtcttttagccatccatctattcttgaaagtcaaagaatccatctgagaatcagcaccctgcaaggtcaaggtgctgtcctacaggctctgaaactggtcttaaacaaacaacaaatacatcaaatttgtatcctccacagcaagattactcagattcaagaatttccttctaattctagtaactttggattaattgaacttgatggattgtatcattgttcataagaagtatctgtcctttcctggatgagaattatttacatcaggcttagtatgtgacttaatttggcctataaaatgtggttagaagagatacgtatcacttatcacttctaagcagtagttttacaaatcagtgattggttcaacatcttctctttttcttctgtctcatgaccaaaaatgttcagatggaggctgctttatcagtctgggtcctgaagtgaaatctctgtgkaacagaggtgcagccaaccagtaatagatatagagaacaaaagagaaatcaaccttgtaagtgactgaaattccatggtcatttgttgccacagcataacctagcctatccatattgac

SEQ ID NO: 185727 - DNA, 616 bp, Homo sapiens
gaggctcattcaagttgttgcacatatttttaacttgctcctttccattgctgagtagtattccagggtatgaattaccgcagtttgtttagaaacacgtgtctttttaaattatcatcattcctccacataacttttacttagggcagtgctttgaatccaaaaccattaagcatgcaagaagtattggaagataagaaagaattacttgcctactgtgctttggtgtgaccctaaagtagctattatctacaaagtttcaaattacataattttccatcctatattttagaaaagtgtgttaattttagagctgtgtattccagaatatctgatttgatgttgtttgaatataacaaaaatatcaarttgattgctttcttcctagttgatcagctaaatccatttgcttgaatgaccaatctaattaaagccaaatagtaaatatgatctttgcaggtcatatggtctctgtcataactactcaactaatcattgcagcgggaaagcagttatagacaatggcaaacaaatgttcataaccagatttggcctacgggccaaatagttatatatagtttgctgaccctgatattagactattgcattgtgcact

SEQ ID NO: 185728 - DNA, 563 bp, Homo sapiens
acaggtgctcgctagcacgcctgcctaatttttgaaattttggtagagatggggttttatcctgttgcccaggctggtctcaaatccctgacctcaagtgatcctccctcctcggccttccaaagtgctgggattacaggtatgagccactgcacctgtccacgcccaaaagtttccttatgacactttgtagtccctctccccgaccccgtcctaactccccacccctagacaacaactggtctgctttacataaattagttttcattttctaatrtctttaaaaaatggaatcttgcaatctgtattttttgttatttttgggtttctgtcacttagcctcactatttaagattcaccagtgtctatagatgtctgaagacttcataccttttgtttctgaatagcattttagcatatagatatattacaattttattgtccatttacctatgtatgacatttgggttgatttccttgaggctattacagaaaaagctactatgaaatttcatgttcagttctttctataaacataggctttcatttctgtttagtaaata

SEQ ID NO: 185729 - DNA, 591 bp, Homo sapiens
agatctgtagttttgtttgttttttcttataatctttttgtctggcttcggcattagagccatgctggcctcatagaatgagttaggaagtatgtcctctgtttctatcttctgggagagaattaacataatttcttccttagctgagcctgatgctttatttttatgaggttattaattaatttaaaaatagatgtrgtcctattcatattttctatttcttcttgtgtgagttttaaaagattagaccttttaaggaattagtccatttcatcaaagttatcagacgtgtgggcacaggtttgttcataatcttcatttattttccttttaatgtccatgtgatctgcagtgatgtcccctctttcactgctgatcttagcaatttgtgtttttcctctttgtgtcttagccaccctggctagaggcttatcaattttattgacccttttagaaaattggcttttggtttaactgattttataaaatcaattttctattttaaattcctttaatttttgctctatttttatgatatctttcattcttcttactttgcatattatttgctcttttttatagtgttctaaa

SEQ ID NO: 185730 - DNA, 361 bp, Homo sapiens
acacctatatgccatatttttcaattcaaattagatttaaagaattttatgtatgtatgtatgtatttttctattttctttcattctttttttgacaggatctcgttctgttttccaggctggagtgtattggcacaattggctcacagcagcttcaacagcctgggctgaagcgatcctcacacctcagcctcccgagcagctgggactacaggtgcatgccacgacacccagctaagttayatattttttgtagaaatgggattttgccatgttgcccaggctggtcctgaactcctgggcgccagcaatctgtctgcctcaccctccaaaactgctaggataacaaacgtgagccact

SEQ ID NO: 185731 - DNA, 565 bp, Homo sapiens
cccatgtgacttaatccaatagttacttctcagttcatatcccacctactttctcttagaacatacaaactattttctcaaatagtacgcaatgttggtttcctttgcctagactgtgtttctttccccaacttcacctatctggtctctactgcgatttaaaccttagcttattktatcctaaatacactactagttttttaattaaataattatacttttttcctccttcattattgtttatttttttgttgattcctttattaaattacacatttcatgacacaagaagcttgcttgtgttatttaattctgtattctcagttccccaaacagctcctggcagatagctgatgctcaataaatatatgctaaatgaattaatgcagctaagttttgacttcaccaaaaaacttcaagcgaaccttacataaggcatataacatttacatattgcttattttttctacatagccaaaaacaaaaaggagcaagaatttccaattatccagttatgaagatgaatgtatagagtcaaataaaacaactcagttaaaaattatgt

SEQ ID NO: 185732 - DNA, 497 bp, Homo sapiens
tcaggtgtggttatattcttggtattacaggtagggaaagaaaaaacaattgttccttttggtaggtgtgaataggcagataaaggagcttcaactttaccatgtgcattgggagaaactgtgagtaagagtgagaaaggaagagactttgaggcttctttgtgtcaataagacaaagtaccatattttgaggtaccggtttctgagtcccaatactatacacaccctcagtaaaattttaaagaggttgtaaaccaaagataaaattctaagggscccctaccatctaaataaaccccttctctcagccaagggaattccagagtaaacctgaaaaactggtttgggccatgatagaagacagggtcgaacatgcctcattgcactcctccagtgttaacatcaatatagacctaaagtctaatgagaaacatttacaatctattctctatgaaggctgttactcctggaaggcttccctcatcctttgagttgtt

SEQ ID NO: 185733 - DNA, 497 bp, Homo sapiens
tcaggtgtggttatattcttggtattacaggtagggaaagaaaaaacaattgttccttttggtaggtgtgaataggcagataaaggagcttcaactttaccatgtgcattgggagaaactgtgagtaagagtgagaaaggaagagactttgaggcttctttgtgtcaataagacaaagtaccatattttgaggtaccggtttctgagtcccaatactatacacaccctcagtaaaattttaaagaggttgtaaaccaaagataaaattctaagggccccctaccatctaaataaaccccttctctcagccaagggaattccagagtaaacctgaaaaactggtttgggccatgatagaagacagggtcgaacatgcctcattgcactcctccagtgttaacatcaatatagacctaaagtctaatgagaaacatttacaatctaytctctatgaaggctgttactcctggaaggcttccctcatcctttgagttgtt

SEQ ID NO: 185734 - DNA, 595 bp, Homo sapiens
tctcttggtagtgagtgaattctcacgatatctgatggttttataaatggtagtttttcctgtactgacacacactcactcttgcatgctgccatgtaagacatgtcttttcttctccttctgctgtgattgtaagtttcctgaggcctccacagccatgcagaactgtgagtcaattaagcctctttcctttttaaattacccagtcttaggtatttctttatagcagtgtgagaacagactaaagcaacctccttggttaagtatattcctaggtattttatgtgtggtgaatcacatgtattgacttgtgtatgttgaatcatcctttcatgcctggaatggaacctacttgattgtggtgagttatcttcttgatatgctattaagtttggtttgctagtatttgttgaggatttttgcatctcagttcattggagatattgatctctatctctttctttttgttgkgtcctttcctggctctgatatcagagtgatactggcttcatagcatgagtcaggtaggattccctccttaatcttttgatagtttcagtagtattggtaccagatcttctttgaatgtttagta

SEQ ID NO: 185735 - DNA, 548 bp, Homo sapiens
tctttattagaaatctgagaggtaaaaaaatcacattctctgtccacatcttccccccaatcttttcaagacctacatttaattctaaaataaaatgatagaggtgaatacctatacaaatagtggaatggtactaccatatattcctagaccctcatttaaacttgctgtttgtgagatctaaaaacagcacagcactttttaatctktttctactcgtctaacactggccttttctcagttttatataaaagtatttggaaacatttaaatataactttcagagtagtaatattagtatccagataactggcttttgctaggaaggaatttgtgtggccttattaaaattctttttaattttttttaaatcactgaatgagcattgagatgttaattgataaattaaaatgagcaaaatttgatttaaacttagtgtctaaccaacttcttagttaatggagcacattactttttattaaatttgtacaaaaactgctgcttcttgaacctttggggaaacattgcctttttactgaagattaaga

SEQ ID NO: 185736 - DNA, 623 bp, Homo sapiens
tgtccccagctaaaagccaataaggtaacagtgacatcagtgcataactgcgaagaactgggttctggcagcaatctgaattgtctggaagtacgttcttcccaagagctttcagataagtgccaatgctagtccacaccttgatttcaaccttgtgagaccctaagcagagaactcaaacaagcccacctggacttctgacctatagaactgcaagacagtaaataggtggagtgttttaacccactaagctatggtaatttattagacaacaatagacaactaacatatagtgtatttgcattaagcrttttataaagtaatgaatcttctttgtattaaccgtcataaaaaatacgtagagaaaattaaaagattcatatgctcatgcaggtgaacaattccatataatctttgcactgtactatcaaactgtggtaccacttttcattgaaactgctcatctatacatttgttgcaatgccaacactaaaaaatacaaataagaatgtccttagctgtgtgtgtttcatgggaaatatggtaatagtttttaaagcacacatttctctatgtgtattttcatcatcagatttacattttgtgcaaatagtttttataac

SEQ ID NO: 185737 - DNA, 616 bp, Homo sapiens
tgctttaatttttaagcctctgattatgagttgatttttcacacctttgaaaggtcaatttctacaagtgtaaacaaacatttttaaatttcttattttcaagtcaatttcacagctcatactatctgtgakgggaaaaaatgtaaattttccccttttaaatagatttaatttttataaataatcagaacccctttagaaacaagtctactaagtaagaaggtgattatactgcaaatcaacatttactgttaaaaaggtttcttttatatttcaaaattggatatgaagactaagtcatagaaaaagcatcgaagtggtctaagtaatggaaacactagaatgagacttaaaaatgactcatttgaaagagtcaacgatacatcaactgccttcctcagagacttatttttccagctctcactatactacacccatgctagtgagcagctttcttctagttccctcagtatcccagaaatgatctcttccaccttccctctccattaccaccctttcacctgcccctactcatccttaaggtttcaaatgtccctcctttagaaagactttgtctgacctaaattaggtcccctattatacattctcattatac

SEQ ID NO: 185738 - DNA, 413 bp, Homo sapiens
gtgtaatcccactgaaggacacaagacaagatgcgaaccaagggaaggagatatcaagttcttggctgggaaggygactatctgaaacgttatttcttctaaattaacttacaaattaaaagctattccaattaaattttgtactggacagatttttaaaattatatttatatggaaaataaattagaatacttatttaaaaaaaggaaaaagatgataagcactagctttcttatcgagtatgaacatcagattcaaaacaatacagaagtaacactggaatagatagaccagaagagaataatagggagataagaaatagacactggcataaatgggactttgatatagcaaaagccatgtttcaattcagtgggaacaagatagattttttgataaaggactggtgcaac

SEQ ID NO: 185739 - DNA, 237 bp, Homo sapiens
ccattcctattcaacaatgtcctagaggttctagccaggctaattaggcaagaaagttgaacaaaaggcatccagattggaaagacagtagtaaaactatttctgcttgcagataatgtgatatatatggaaaatcctcaaaattacagtaaaaatctattagaactagaaacaagttcatcacacagtatacaacatcagttcygaaaatcaactatacttcttctaaacactagt

SEQ ID NO: 185740 - DNA, 425 bp, Homo sapiens
caagtatagctaatgtacccagtggaaaaatgggcaaagaatagatagtcacttcaatagctagtaattttttaaaaaacaaaaacagcataatctcattattcatcaaacaaatgcaacaacaaaggaatttcattttatgcttatcccataagcaaacctagaaaacaatagctggtgtgttggctcatatctgtaatcccagctctttgggaagctgaggcaggaggattgcttgagcccagaagttcaagcccagcctgggcaacaaagtgagactttgtctctacaaaaaatmaaaaataaatcagccaggtgtggtggctctcgcctatggtcccagcgacttaggaggctgagctgggagaatcacttgcgcccgggaggttgaagttgcagtgagctgtgatggtaccactgaattc

SEQ ID NO: 185741 - DNA, 425 bp, Homo sapiens
caagtatagctaatgtacccagtggaaaaatgggcaaagaatagatagtcacttcaatagctagtaattttttaaaaaacaaaaacagcataatctcattattcatcaaacaaatgcaacaacaaaggaatttcattttatgcttatcccataagcaaacctagaaaacaatagctggtgtgttggctcatatctgtaatcccagctctttgggaagctgaggcaggaggattgcttgagcccagaagttcaagcccagcctgggcaacaaagtgagactttgtctctacaaaaaatcaaaaataaatcagccaggtgtggtggctctygcctatggtcccagcgacttaggaggctgagctgggagaatcacttgcgcccgggaggttgaagttgcagtgagctgtgatggtaccactgaattc

SEQ ID NO: 185742 - DNA, 465 bp, Homo sapiens
ctttttattttccataaaaacgatttagctcatctttctcactgaaagtaggcaaataaaaccccaactccatgccttggctatagtagataataaatatcagctgacttttattgcttgaatacttttagaawtatttcttttcttttttttttttttttttttgagatggagtgttgctctgtcgcccaggctggagctggagtgcagtggcacaatctttgctcactgcaacctccaccttccaggttcaagcaattctgtctcagactcccaggtggctaggacgacaggtgcgtgccaccatgcccacctaatttctgtgtttttagtagagaccgggtttcaccatgttggccaggctggcctggaactcctgacctcaggtgatccacctgcctcagcctcccaaagtgctgggattacaggcatgagccaccccgcccagcctcttttcctctttta

SEQ ID NO: 185743 - DNA, 432 bp, Homo sapiens
agaattcttgcaccatgaaaaatctgaatgtagtgacactaccaaaagttcacacagctctccagtaatggttcctaatgaaaatggaaactcagaaatgacagataaaaaaattcaaagcatggattgcaaggaaaatcaattagatccaagataagattgaaaatcaacacaaagaaacttctagagcaatccaggaaatgaagaaagagataaacatcctaaaaagaaatcaaccagagtttctggaattgagaaactcacttaaggaatttcaaatacaattgaaagctttattaatagactaaaccaagcagaagaaagaatttcagagtcttgtcttycaaactaatccagcgagacaaaaataaagaaaataatttaaaaaaatgaataaagttttcaagaaatatggggagcatataaagcgac

SEQ ID NO: 185744 - DNA, 425 bp, Homo sapiens
aagttttgttccttactaaaaaagataatccttacataaaaatgtatttttaagctcaaaatggttcacagcttcatggtacctcagtgactattcgctattaaaattccataatatgacagggctattttagtgtttgaattaaaaaaatataaatagctaaaaatataatgtagtcatatgatagaatcattcaaacttaagactytaatttctctcaatagtttctgcagtcagaggttttgagattagattatactgtcacgtatttactaagaatgcaaacagaacaaaaccagaaacacaccagaccactcataccaatatggtaattctggtcaaaatatagtctacattcaacatagtctatatacaatgttaaaaatctctccaaagaatgactgtaaatacctgtaaatgaattc

SEQ ID NO: 185745 - DNA, 612 bp, Homo sapiens
gaggaagttccgtctgttcacacttacatcagtttatcatccaccgctgactctcagtatgggtttgtgtgtgtgtgtgtatatgtatatatacacacagatgcatacatatatatgtatatatacatatatatatatatatactgttatttctctccctatatctatgacaaaaagagacttgaatactataaatttttaaaattgtgttagttttaattaaccacrttttttgtttatatttaaactcctaattttttttctgcaaaagaaaatcaattctgttctcctcaaattgcccacctcctccatcagtctttttaacaacactgccctaatcttggcttcaaataaacagttatcttgtttatatatagtatacaaatttgaggttgccatgcattttaacaatgatgattcttcatttagtcaacaaattgaatatgatatatatagagagagagagatacacaaaagactccattctaaacagagttaaaaagatagctgtcactcagtccagagtttaaaagatagctatctctgatttataaaccaaagaagataagtaaattaacaattacagcatgataagtactattaaatacctta

SEQ ID NO: 185746 - DNA, 612 bp, Homo sapiens
gaggaagttccgtctgttcacacttacatcagtttatcatccaccgctgactctcagtatgggtttgtgtgtgtgtgtgtatatgtatatatacacacagatgcatacatatatatgtatatatacatatatatatatatatactgttatttctctccctatatctatgacaaaaagagacttgaatactataaatttttaaaattgtgttagttttaattaaccacattttttgtttatatttaaactcctaattttttttctgcaaaagaaaatcaattctgttctcctcaaattgcccacctcctccatcagtctttttaacaacactgccctaatcttggcttcaaataaacagttatcttgtttatatatagtatacaaatttgaggttgccatgcattttaacaatgatgattcttcatttagtcaacaaattgaatatgatatatakagagagagagagatacacaaaagactccattctaaacagagttaaaaagatagctgtcactcagtccagagtttaaaagatagctatctctgatttataaaccaaagaagataagtaaattaacaattacagcatgataagtactattaaatacctta

SEQ ID NO: 185747 - DNA, 455 bp, Homo sapiens
gagcttgcagtgtcagccctgtcacattctgtgggccgcagagggctgcagactcagggccgggcagctgttaygaccatttctttttttcttttttgaggcagggttttgttctgtcacccatgctggagtgcagtggtgcaatcatagctcactgtagcctcaacctctagggctcaagcaattctcctgcgtcagccccccaagtagctgagaacacaggtgcatgccactatgcctggccaattgttagatttttgtagagagggcgtctcattatgttgcccaggctggtctctaactcctgcgctcaagtgattctcctgccttgaccttccaaactgctggaattacaggaatgagctactgacgctacctcttaatgaaagtggctgcaaaatgctgtgttcatgattctcaacaccccacagtggggacaggcgagggctagcaca

SEQ ID NO: 185748 - DNA, 387 bp, Homo sapiens
  misc_feature (1)...(387): n = A,T,C or G
nnnnnnnnnnnnnnnnagaaaaagtgaccagagccacaaccacttcagcttcagactttgttctgagcagtgttccctgcttcaattagtgccacaccccaccygcttcctaactgatccttaatgtcagactggctaccatggcttcagcccccatagagataacccttgagtccttccggatttgctgacttcagctgctctggagaaatcccctgcccactgcgatggccattccacgtttttaccttcctagctgagttctggtctcccaaaagcagtaggactttgacaattagaaatatatgctaacaggataatccaagaagtggaaacaaaggcttggaggtcaatgaggatacatggaaatgaaatgagggcaatggg

SEQ ID NO: 185749 - DNA, 387 bp, Homo sapiens
  misc_feature (1)...(387): n = A,T,C or G
nnnnnnnnnnnnnnnnagaaaaagtgaccagagccacaaccacttcagcttcagactttgttctgagcagtgttccctgcttcaattagtgccacaccccacccgcttcctaactgatccttaatgtcagactggctaccatggcttcagcccccatagagataacccttgagtccttccggatttgctgacttcagctgctctggagaaatmccctgcccactgcgatggccattccacgtttttaccttcctagctgagttctggtctcccaaaagcagtaggactttgacaattagaaatatatgctaacaggataatccaagaagtggaaacaaaggcttggaggtcaatgaggatacatggaaatgaaatgagggcaatggg

SEQ ID NO: 185750 - DNA, 560 bp, Homo sapiens
tatgtgaaaaaaacttacactttaaagaacacaaaaactgggcttattgtgttgactgtaaacataaattaaaaacaataaaataaaaataaagagaataaagaacacaaataccgcttacaataaaacctctgttcaaatcagattccggtctctgggtttcattccacactgaattaccttatagcaaggagaagaaatcaagtgggaaaaaatgtcattaaaatagctgaatagcaaggaggtgcaattctctgacctaatgatgacattggacacttccctgccacaggggtccatacctggcttttcatctcactgccttcctgcggggttgctgcaagggagactggcgggggaagacctgttgcttttcacattcatttgtaggctccacaccatcagttgttacctcygcaccattcaagtccaagataaccccagaggtcatttctgggtagtcatcctctcacagggtaggaggaattcaacacttggacacagagtagaaaggaaaacttccccaggatggtgaaccagacagaatggaaacaacggta

SEQ ID NO: 185751 - DNA, 479 bp, Homo sapiens
ttaaaatattttgtagagatgggatctcaccatgttactattgttcattttttaattgagttgtttgtctttatgttgttgagttgtaagagttcttwacgtattttagataccagattctcctcagatatatgatttaaaaatacattctaacattctgtaggttgtcttttcactttcttgataatgttctttgctgcacagaagttttaaattataatgaagcctaatttatctgtttattttcttttgttgcttgtgtttttggtgtcgcagttcagaatccattgcctaatccaagcataaagatttatatctgcttttttgtgttttacaattttaactcttacatttaggactttgatagagtttgagttaatttttgcatgtggatatacagttgtctcagtattatttgttgaaaagactattcttttcgcattgaattaccttggcacgcttgttgaaaataaatggat

SEQ ID NO: 185752 - DNA, 504 bp, Homo sapiens
gaggtggtaattgctgcggcaaactgccaagtaggaacttacctctctgtggtggatgttctcaactcccagggtgcccttcctgtaaaagcaacagatcaaaccatgcctctgggtgcaagtcttggagaacctgaactatgcagttcagagtcctgagactccggctgctgccacagcttttctggctatcagtggagaaagtgctggtatccgttagcccactgggggtgggctttcaggttatttcakcagcatttatgtgtgatgggggactattatgcagataatggtctgcattcaacagcactagaatcccaagataaaaccagaacttctcaaactgggttccaaagaacactagtgttccctgggatgccagtgggtgtgccactcaaaaagcgttgtggaaacagatggatttgaaatgtcaggataaatttactatatttctttactaaagaatcttcattttttaaaaaatctttaaagacactcatggtt

SEQ ID NO: 185753 - DNA, 657 bp, Homo sapiens
agatttattagcaatcacatgatatatggagttccaattcaacatttaacatatgtcatcttatgttattattgcagcaacccatcatgtggatgatgaaacaaaagcttagaaaagttaatttgccaaagggctcaaagctaaatggtagatacaagactgagacccagatctctctggctgcaaaggctttgttctttccactgtacaatactttcttcccaaaggaatatatttgtcacctcaaatgtggttcagcttcgtaaggcttgagagtgcacattttcctttgtcaaagatgaagaaccaattttgatacttcagagaacagtatcaaagaaaattgcwcccagaagtccattccgagcaatattttccccacacgctgccaactgatgctgagacagctgcacaggctttcctgagaaatgttatcatcaaggctgcattataatgcaaaatacacccggacaccaagatgtaattccacctttgaacatttagaacgttggcttactagtccattgtgcttttggttttactgggggaaagggaaggggaagggaagaaatagtaggtaattattcttgtgtgttcttgaaaaataaaacaaacatgggttattcttttctacctttttgctactttcatgccact

SEQ ID NO: 185754 - DNA, 657 bp, Homo sapiens
agatttattagcaatcacatgatatatggagttccaattcaacatttaacatatgtcatcttatgttattattgcagcaacccatcatgtggatgatgaaacaaaagcttagaaaagttaatttgccaaagggctcaaagctaaatggtagatacaagactgagacccagatctctctggctgcaaaggctttgttctttccactgtacaatactttcttcccaaaggaatatatttgtcacctcaaatgtggttcagcttcgtaaggcttgagagtgcacattttcctttgtcaaagatgaagaaccaattttgatacttcagagaacagtatcaaagaaaattgctcccagaagtccattccgagcaatattttccccacacgctgccaactgatgctgagacagctgcacaggctttcctgagaaatgttatcatcaaggctgcattataatgcaaaatacacccggacaccaagatgtaattccacctttgaacatttagaacgttggcttactagtccattgtgcttttggttttactgggggaaagggaaggggaagggaagaaatagtaggtaattattcttgtgtgttcttgaaaaatawaacaaacatgggttattcttttctacctttttgctactttcatgccact

SEQ ID NO: 185755 - DNA, 599 bp, Homo sapiens
ctcaaataatttaaaacatcagaggcaaaattaagttttttttatgaaatatttatatgattaaatcaaaaaacagacagaaaagaaaataacaaaatattctgaagagaagagaaggataatgagacctgggagagacacactagtggcaatgttctactttatgttaacatggatagtgggcaaataggtatttattttatgtttatgttctacataaattgttttgtatatgtaatatgactcatgattttaaaaaattacatccccacaagagaaagctggggctgactttgggtaaatggtttgcccaagctgtccagctaattaggacataaaacttttgatgacagacattcatgcactgctgtattcccaatgcccagaatatttcatgaagcagattcacaatcaagtttgttgaataaatgaagaagcttggactcagtacccacctrttctttttactcatgacactataatacttggtccagaagtctcaggagtgcatctggtgtccatacaactatcaaggacctttccatttaaatatgaaacttatattctatagtcttccacttcaagaatttcatgggcca

SEQ ID NO: 185756 - DNA, 599 bp, Homo sapiens
ctcaaataatttaaaacatcagaggcaaaattaagttttttttatgaaatatttatatgattaaatcaaaaaacagacagaaaagaaaataacaaaatattctgaagagaagagaaggataatgagacctgggagagacacactagtggcaatgttctactttatgttaacatggatagtgggcaaataggtatttattttatgtttatgttctacataaattgttttgtatatgtaatatgactcatgattttaaaaaattacatccccacaagagaaagctggggctgactttgggtaaatggtttgcccaagctgtccagctaattaggacataaaacttttgatgacagacattcatgcactgctgtattcccaatgcccagaatatttcatgaagcagattcacaatcaagtttgttgaataaatgaagaagcttggactcagtacccacctattctttttactcatgacactayaatacttggtccagaagtctcaggagtgcatctggtgtccatacaactatcaaggacctttccatttaaatatgaaacttatattctatagtcttccacttcaagaatttcatgggcca

SEQ ID NO: 185757 - DNA, 599 bp, Homo sapiens
ctcaaataatttaaaacatcagaggcaaaattaagttttttttatgaaatatttatatgattaaatcaaaaaacagacagaaaagaaaataacaaaatattctgaagagaagagaaggataatgagacctgggagagacacactagtggcaatgttctactttatgttaacatggatagtgggcaaataggtatttattttatgtttatgttctacataaattgttttgtatatgtaatatgactcatgattttaaaaaattacatccccacaagagaaagctggggctgactttgggtaaatggtttgcccaagctgtccagctaattaggacataaaacttttgatgacagacattcatgcactgctgtattcccaatgcccagaatatttcatgaagcagattcacaatcaagtttgttgaataaatgaagaagcttggactcagtacccacctattctttttactcatgacactataatacttggtccagaagtctcaggagkgcatctggtgtccatacaactatcaaggacctttccatttaaatatgaaacttatattctatagtcttccacttcaagaatttcatgggcca

SEQ ID NO: 185758 - DNA, 251 bp, Homo sapiens
taaatggatgataaatatttcatgaagagcattttacaacacmcatcttactaactttttaaaggataactagatggttactagaaagtcccaggtggcaattgtctttggtgttcaaaattcatgatgtgcaggattggcccaaagtaattatagtcattgctagatttatcttgctacctgtaacaacagggttacgtcctagtagactgagcatgttttcctgcaatgggtgagtcattggcaagctt

SEQ ID NO: 185759 - DNA, 661 bp, Homo sapiens
tgacactttttagttttttaattttagacatgaaatataaaaatagttggaggcagaaaataatatgagacacccatgtttaaaatcattaacatttttacatattttctttagaactctttttctttaagaaatacaaactccccartagatgagatttagatttcattttgctttccctttctgctttaaatttcgctttccctttctccttcctcagatggaatcactatcttgaatctggcggtagctttccttcagcatggttttatacttctctacacatgtaaatatccatgaacaataaattgtattgttttgctttatgaaaaccacatattttattgggaattttaatagcaaactcatggtcatgcctggctagcaccgtcttatatcctgagtttggggaactgacaaggttgctaattacccagccctcaggacatgtgttaataacaatggaagacaaatcggttgtgtttttctgccttaggtgcaaggatcctgaaagagaaacattggttgtgtttttattccttgggtataagaatcctgaaagagaaaggcatctgaaccttggaggcatggggttcatctcatcctcatccagcctgtgatgatggagctgttttcaccagaaacgtgaggagactcatac

SEQ ID NO: 185760 - DNA, 608 bp, Homo sapiens
agatttcattttgctttccctttctgctttaaatttcgctttccctttctccttcctcagatggaatcactatcttgaatctggcggtagctttccttcagcatggttttatacttctctacacatgtaaatatccatgaacaataaattgtrttgttttgctttatgaaaaccacatattttattgggaattttaatagcaaactcatggtcatgcctggctagcaccgtcttatatcctgagtttggggaactgacaaggttgctaattacccagccctcaggacatgtgttaataacaatggaagacaaatcggttgtgtttttctgccttaggtgcaaggatcctgaaagagaaacattggttgtgtttttattccttgggtataagaatcctgaaagagaaaggcatctgaaccttggaggcatggggttcatctcatcctcatccagcctgtgatgatggagctgttttcaccagaaacgtgaggagactcataccacttgaggtagtgtggatgtgtggcacagttttggagagggctattcccctacctttacatggaatccagtaactctctgaaaacatagcaatggcaaaagtcctt

SEQ ID NO: 185761 - DNA, 551 bp, Homo sapiens
gctggcatcatttgctcttttaagtcttatctgacttcctccattcattcccgggtagagttttaagctcccttctttatacttcatctctaatttgcttctatcatagtgcttacaacacttacacattctatttgtttgtatatttcctcctaagaaaatcattaattctttaaggatgaggactatcttagtcatcactctacccctagtatctagcccagtgcctgacactaaattaaagtaatttttaaattagcaaataaatggctgaatgagacatgcttatgactctattttttcttatagcacatgaagcatttcactgcagaaattattgacagttttctctgtgcacatcaccatccattaactggggttytgggatatacagcagctcaacatacaggttaatacttggtaaattacatcctttccaaaaagcaagtcatgccagactgcacagagaaaaggaaagacaccatgaagagaggtcagtagtggtaagtccattaagtttgcaaaatactgtgcaaaactgagcaccaatg

SEQ ID NO: 185762 - DNA, 474 bp, Homo sapiens
aaaatgcaaaaactcatcttaaaggtcatagttaccaacttattttaccttcaggtagatcatgtggaggttcagtggtgaygcacccggggaccgggaaggcataggcactgctggctgtgaccaagggaagtggactcgtagggtagcactgcctcaggatctgaagcaccacagagatgacgggctccatgctcttgtcatccaggcagttctgagcaaagggaagattatatcagatgccaacatctgggcacagtcccctagctgtaacacagctaataacactctccaagctgtaacacagcacagtctcctagctgtgtttcagctaatgaattatacgcatggacagaccgtaaacagccttaatgtagaatgtcaaatttgaacattccaacatagaattttgtctaatgtagaatctgcacttttctgtctcttgctcatttcatacatcactgcaatgaattc

SEQ ID NO: 185763 - DNA, 482 bp, Homo sapiens
gaaacatggtcaaaatgcaaaaactcatcttaaaggtcatagttaccaacttattttaccttcaggtagatcatgtggaggttcagtggtgatgcacccggggaccgggaaggcataggcactgctggctgtgaccaagggaagtggactcgtagggtagcactgcctcaggatctgaagcaccacagagatgacgggctccatgctcttgtcatccaggcagttytgagcaaagggaagattatatcagatgccaacatctgggcacagtcccctagctgtaacacagctaataacactctccaagctgtaacacagcacagtctcctagctgtgtttcagctaatgaattatacgcatggacagaccgtaaacagccttaatgtagaatgtcaaatttgaacattccaacatagaattttgtctaatgtagaatctgcacttttctgtctcttgctcatttcatacatcactgcaatgaa

SEQ ID NO: 185764 - DNA, 524 bp, Homo sapiens
aattacttaacagttacgtgcctcagtttcttcatctataaaaagggagataataatagatcctacctcaaaagcttttgaaattatcaatattggagagtctgcataaattgctaagacagccaagggatgtattaatagtaagagttcaaagtaactggcttctccttctcctacttcttctcttcctcttcctcctcctccctctgctgctgctgcttcattaacattgtcatcactatcactggcagtagcaatagcagcagcagcagcaacagcagcataatttgcaaatggcaactgaaataacatcaccaaatccaaggcccctaagttggccatccagtgactcccatgccttctctagcagaagggaraggaggggtgatgggcagctgtaactccagcacacctgcaagggcatctgtgctcacagcactcacctgaggtctgggaggctactcaacactggttatgactgccggggggaagagtaacaagccatttggtttctaagccaggac

SEQ ID NO: 185765 - DNA, 596 bp, Homo sapiens
cccaaaatcgaatgcaaaatggttgatgtgcatactactgggcgatcaaaagcttcctcaaagaggcctgtgacccccagaagtctaagaactacttgagtagaatcttggtgaggatgcatggacatggaggatggtggttggagctaccagtgtgatccagatcgatcacagcttcccaatactacagagccctactggtaccatttttatcctagagataaatataagtgctggatgggcctaaggttggtgactggatgaggagtgagaaaycagaaaatgactttggggaaggaatagaaaggttacataggagagcaggtggctgtccctttccccacaaacccaaatcatttttccctcctggtctgaaaattttatttaggtttataacctggaattctaacaactggggaattcatatgatttaagtcctccctttgttctcactgtttcctttaccctctttgcactttctcaattattaaataaaccctgctggatcagtggtcgtgtgaggccaagagtgggagaagagattgactgaggaaaagctggggggaatatttgcaggcaatggacatgctgttggt

SEQ ID NO: 185766 - DNA, 573 bp, Homo sapiens
aaatctgtaaaatatgtgaagaatgtatatgtttctgcttgtatattcatatttatactgggatgaaagaacaatgttacctcccagtgtgcccaggtccaagtcaatgcataccaaggtttgatcctgccacatgagtaagataggcctggtgtattaccagaaaatactgaatatttcataaagttactatttggtgattctagatactgatgtttttctccttttacatcctgttagcgtgattcatttcaaatcttggtactaccatggagtttttccagaccacgccagtgtgwtatactcttcccatttttctgacatcctgtagcaattattggtaattaaatgtggcctgccttttgctatttttgttgtcttgaactcttacttggggttctttttgttttgattgtttggggctattatttaaaatttaagtcattatgactcgtttcaccaacaagatttttaatgcagggatgatgcttttaaccttttgtgctttccacaggtcccagcacagtgccttacatagcaggcaagcactacatatgttgcctcaccagcaat

SEQ ID NO: 185767 - DNA, 559 bp, Homo sapiens
ataacagtaacaaaaacaaccaggatctaaatccacctagtttttcattttggtgcaatattttcaattgcaagctgggttccacagtgaactctgcatgaagcttgtaattttcccctagaaatatttttcaagccttcagcggccctagaatgttcaagctggtccttcacagttatccacatacatgcacccttttcttcacaattcaaaacttycttctccataaatcctttgctgatcatctctgcccatgacaagttctcttgactcaattcgtatagccctgactgcatatatgtctcctttagatcttaacacatgcagtacatttgcatttacaaaggaaaataggctcaaacgccaaagtttctcaaccctttgcaatgtatttccaaagaaaaggtggtggcagctgaagcacatgtgtgcgtcatggtaggcctaagagttgtagagtgtgttgatagtatgtcgggggaatccccgtggggcccaaagggaacacaccttaaagttggacaaacttagatctgaaacatgtcttttgtagtttact

SEQ ID NO: 185768 - DNA, 559 bp, Homo sapiens
ataacagtaacaaaaacaaccaggatctaaatccacctagtttttcattttggtgcaatattttcaattgcaagctgggttccacagtgaactctgcatgaagcttgtaattttcccctagaaatatttttcaagccttcagcggccctagaatgttcaagctggtccttcacagttatccacatacatgcacccttttcttcacaattcaaaactttcttctccataaatcctttgctgatcatctctgcccatgacaagttctcttgactcaattcgtatagccctgactgcatatatgtctcctttagatcttaacacatgcagtacatttgcatttacaaaggaaaataggctcaaacgccaaagtttctcaaccctttgcaatgtatttccaaagaaaaggtggtggcagctgaagcacatgtgtgcgtcatggtaggcctaagagttgtagagtgtgttgatagtatgtygggggaatccccgtggggcccaaagggaacacaccttaaagttggacaaacttagatctgaaacatgtcttttgtagtttact

SEQ ID NO: 185769 - DNA, 413 bp, Homo sapiens
cattaaatcttagatgtcagaaggggctgagttaaactgaacagggcttttaaaaatccccaaggttgagcaatgtgaggaggaaaaaaaagtaagagaaacacgcatgtgattggccttaatgaaattataagcctccaaggaagtggcctacaactcacatctggaccacaraagtcatcatttcatctgaactgtatatatcaaattatgctttttgttatcaaaagtgaaagtctacaaaagaaatccagtagaccatgctaaattgacttgcatcatttagaaagtgggaagattttcttagaactagccttggagcctcttgtctctgtagagaactaaggaccatacagaatccttttccacttctgcatatgaggacactgttgaacagatagatttgtttgaga

SEQ ID NO: 185770 - DNA, 585 bp, Homo sapiens
cagtatgccagccactcttggactttagcattaattccttacacatccttctttttttcccacttcacatcattcccccaaaaatctcctccttagtagggaaaaccattttccctgctgtagagaaaaaaagagaattcctttttgttagcataggaatctaccacaaaggaggagggaaacactcctgtttttccttggggaccatttttatttgcatggttgctgcaaactctgtccctttcttgatgtgggtttgccttttgtctgtgatcatccagggagtttttttttccttctttggcatcttatcagactgggggcaggtctgggaaaaataatygtgcttcctcaaaaataaaatatatattttttactcaggtagatgaaagggcagaaacataggcacagagacaggctaatgtgggctgggtctcctgggtggcaagtcacattgttcagtgtctgcacctggaaatactaagacagaccagacagacaggaagaaaacttgaaaagtgaccaaaacgaaagagcatatgtttcctttcaatgttataacttgccaccctgcccccatttcta

SEQ ID NO: 185771 - DNA, 562 bp, Homo sapiens
ctcgcttactaggtaggtgaccttggtttaagttatttagcctgttttttttctgaagtttcttcacttgtaaaatrctgataaccacttctaactcatagatttattataagaattaaatcagataataaatgtaaaccagtcagtggcttagtgccaagcattgataagcataatataaatagtagttcttttcatttcattaattgccataccctcatattttctaactttttttattaaaatccacagttgtgggacaacctgttcccttagtcacatttcaatgtgagcaggcacctatatgtttgaattgaaggttgtggtaaaattactttatatttctatgttcaaatattttaaaggtatgttagtaggaagcttatctttgtatttaccatacaagccttcttcagatagtgctttttgtcttttgacttgggacttataagtagaaaatataaaaacaaggtaaatattagatggtatgcaagccacaacaaagaacatctcacttagctgagaactcctttcctcattaaggaaaacatggcatgctgtg

SEQ ID NO: 185772 - DNA, 615 bp, Homo sapiens
ttgttaaaatctggtaattcaggcacaaagacaaaaaccaattttaaatttctattcaaaataccttagatgaagtaaagaaggcaggaaacataatatttcttaggataatcatgtagctagcaagggtatgtgggctcttctttgatgccaagttgacgtgaattctaaactctttaccaagggaatctattaggatatttagggaagctttttcaaaacacttaagcttggamcctgttcctgaaaatcctgattttcccacccaggagaaataattatgctgttgggcagttaactagacattacagaaaagacaaagctttctttagtacagatcaaggtcctgatggagcttgaaggcataaaggtgcaattccaaatacctcaactgctgtagatgaaggggcagcatttgctctagatcctcatcacagcatttcctggtattctttcaggtaggtgaccaaagctcagcctgcagttcctctgaccaggcttccagctcaggtcctgcccatagaggtggtccacctgatgcagctggccaacttctgtctcctaccacaataagctctagtgaacccctgagcccagtagcctcttcatccaagc

SEQ ID NO: 185773 - DNA, 398 bp, Homo sapiens
aacttaacaatggttcaacttagggtttctttactttaccatggtgtgaaagcagtacacattctgtagaaagcatactttgagtactcatccaaccattgttttcccattcagtacagtagtcaataaattacatgagatattcaacgctttatkataaaatagactttgtgttagatgagtttgcccgctgtaggctaatataagtgttctgagcatgcttaaggtaggctaggttaagctaagatgtacagtatgtcaggtgtacagtagttccccttacacaagggcaatatgttcatatgttccaagacccctagtagatagacaaaaccatggatagtaaaacatcctaaatacactgtgtcttttccatgttaaattgagagttttcacct

SEQ ID NO: 185774 - DNA, 362 bp, Homo sapiens
atggcatacagatctcttttatgtaattctcgtaaatatctttgagaatacrgttttaagtaatgaagcataattactataattgctattctgcaagtaacagtcagtcattgtatttcatttgcaaggaaactaaaagacatttagaaaatgaagggaagatatagacgaaaaccattaaaattgctctcttttcctcattgtatccccctttaaccaacttcagctgatatcagacagtagcctagaatgaacactgctcctagtgatggtcactgaattccccactttatgttctgaaatctggccattaccaaaggtaatgagatgtactaagctcaaagattagtacatctgtgagc

SEQ ID NO: 185775 - DNA, 644 bp, Homo sapiens
ccattcacgctccatatctgtgacaaatatcgccactttcaaaaggttgtgttcaaaatgtacgacagctcacctcggacgcagttacatcagccatgtgctggcaacacaacacagattgggggatggggcttaaacctaaaagcactttggactcatgataaatgcacagtgatcacctttctcttcccttccccctcaaggaaaatgtgtaatccttgtgcaaaataaaataaatagttacgcatgacagttttcatccctgcatgcacatttccttcattcttcacccacctctgttcatgctgcccatctgccctggaagggcaggcttgctcatctacttcctccagacagcytgacccccacccccactcccaccctgctaggtggaacagggaggcaatgatcacttctaaaagaagagatgacgtcttcttagtcactgtaaggatgacctgggagaaagggccacaagccttgggggaagccagcgcataccagtggggggctggatgggatgctctgttctttgcgggtcccaaggatgaatatgattatatttgtgttagtgcacatattattatgttctgtaattgcattgctaaattgtatgcatacactatatagagaaattatgcata

SEQ ID NO: 185776 - DNA, 440 bp, Homo sapiens
gaattgacctcctcatcctctaaactttaataccrtgttacatctccttgtaacccttatcataatattttaaattttaatatctgatcttcccagcttgaagataaactgctggagcctggggaatatattaatctcatctttgagtccaccacagctcctggggcaatgcctaaaaatggtagtgagtaaacatttatccagaaagaatgaatgcactgtccttttcctaaaggcaacagtgaagctgaatttgtatcatttgtataaaacactgagtaaggttttaaagactgttacatgcagaatcttttccttttttattgaaagcattgacttagagacgagatgtgcaggcaattatgaagaatatatcttaagatgagtttcaagattttgaaagatatgtttcctaaaaaaacagaactcaaaatattatt

SEQ ID NO: 185777 - DNA, 466 bp, Homo sapiens
gaattctatgatttcatccagacgaattgacctcctcatcctctaaactttaataccgtgttacatctccttgtaacccttatcataatattttaaattttaatatctgatcttcccagcttgaagataaactgctggagcctggggaatatattaatctyatctttgagtccaccacagctcctggggcaatgcctaaaaatggtagtgagtaaacatttatccagaaagaatgaatgcactgtccttttcctaaaggcaacagtgaagctgaatttgtatcatttgtataaaacactgagtaaggttttaaagactgttacatgcagaatcttttccttttttattgaaagcattgacttagagacgagatgtgcaggcaattatgaagaatatatcttaagatgagtttcaagattttgaaagatatgtttcctaaaaaaacagaactcaaaatattatttag

SEQ ID NO: 185778 - DNA, 522 bp, Homo sapiens
gaacaggacaggattctgttcctgcatgtttccctccctagtgagaacagtgctgcaggctcagatccctctggaatatccattackctatgatggaggctttgcctcttgaggtcccaggaattgttggcttgtccttgattcaatgttcatctatctattcatcaaacatttattgacgcttttccttatgtcaaatgctatggtaagtcctagggaaataaagatgcataaccaaaaaaaaaaaaaaaaaagtctggctcacaaagaagttacttaggatggggagaagacagaacataaacaaatgacagtataataatgcaaatggaaaacagatctatacgtacaatgctggaggggcccagtggaaacagataaagagaagctgatgttgttttccacttattagctgtgcagagaacctgaaagcgccccaacacagatatcctcctctggctgcaaatatcctttacgaatttgaaaatgctctttgagaagactgctagccctattacataa

SEQ ID NO: 185779 - DNA, 417 bp, Homo sapiens
ggggcacagggagtgggaactgaatttcatcagcatttccaggatgttaaaaaaaatgcccacaaaaccatccccctcccaaaaccctgtttattttattggcatagacacagaccctacgacctgcggtcctaccctgaaggctcaccaaagaaaagcagaagtccagagatgtatagtatcaagagtgaggcatctgtgattttagatggtttaaaagggtatcttatttgatagcagccaataaagcagagacagagccagatcagataagaagaaagaacatctccggccagaattaaacaggctattttgggatatgtcaaaaggagtaaagctagattggaaatgactgtgaaggtgattaaatasgtgagaacaaagagaacacttcctgagttctggctaagaagggaa

SEQ ID NO: 185780 - DNA, 432 bp, Homo sapiens
tacctgactgagaacttttcatggctagtttccctggctgagctcacagagtgctagcagacgtcctcccctgctctgggtttatcaccacccracaccaatttctgttgctaaacttctcagctcaccacttccccatcccgtcctcacaaaaaccttccactagtagaagctccactttattttgctataattttcaatatcttgtccttttcatttccacatcctacacttatttggatatacatatttggagagatttatctgttttgttcaacacctgctaagacgtttttcaagattagcccataatgtagctcatattttggcaaggttgaagagttcttctaagaatgtagtatctttccttgcattcttgtactttatcttggctcttggtcatgcctaacatgtcatgcattttctcaccct

SEQ ID NO: 185781 - DNA, 548 bp, Homo sapiens
ccaaatgaaattacttcagtgcaaatcatttcaatgcaaatcaaataaacacctgctgtcttcctatatccctcctgctataaggcaaggcaaacctcaaaccgcatcttcagatagtcctgctcactgaagtcagaatgttggtaacrttttactgctaacacagaaaaacacaggcatgagaagcccagtcagggtgatatacatatgttgtaactcagaaatcaattctttttttttttgtcatatgttcatagttgcagagatacagactacattttccagtcttttgtaatgaatatgccaatatgactagactcaggctaattagatgtaagaggcagtgatttgcaaaaagtctctatttatccccaacttaagtcaaacttttatatctactgaggtattataagagagttatttcactgaggagtccaaaagatgttgaccttggaggatttatacattttttattgtttctaaaatatctgactgttttactataataaccaaataataataataaagacagtaataataaatgcata

SEQ ID NO: 185782 - DNA, 481 bp, Homo sapiens
tcagttttccaactcccattttgcaggttaaaaagaagcactgagaaacaaagaacccaaattattctaaccagcttaatcctccacccctggctgatgcaggactacagagctccagcctactggccaggggactaattctcccatccatcccattagccccactcagtgatagcacaccttagacaaatgttttcctgaagtctcttgataaacaaatctgcttttrctcttaaaataataaaagtatagaattttggacttcaaaagactcttaacaatcatttaattgagaacttttcccagtgaattataatgccaccctccacctgctagccctgttctccgttgaaggggacggtgatgtccattctatataacaaatgtcttgtcatttttgtggggctaggaacagtgtcattaaactgggcaataaagacatgctaattgtgggcaatcattctttttgaattttttcact

SEQ ID NO: 185783 - DNA, 607 bp, Homo sapiens
agatgtgaatagaaattttaattcacaatcatgtttgaagcgtgattattacacagcattgaactgcattattactgaactaaaactgtgtttgcaatgcacaggtcaccataccatgggatactactcagcactgaaaatcgatgagcatgcagtagtagggatgattctcacatgaaagaactgtggagtcctatttagggaagaggagtcaggctggagggaccaagagaaagcaaaaagagaaagcagataacttagaagtctgcctttcttcctggtccaggacacatagccctcctgtgcaaataactcacaatctttctgtgctcagccatcaccagacccttcactgacagaaaatgacaagttagcttactacaaccctggtgttatcagtactacgcaaagccctcttcagcayacagcaaaagcaccatcctataaaacctcacagcaaacctttgtctcttggcagttagatcctctctcgccaacttccccatcgctcccttgcaacatattttcctatgttctctaataatatgcctttctttagttgcaactatcttggtaaattctacttactcccaaaccactgacccca

SEQ ID NO: 185784 - DNA, 402 bp, Homo sapiens
agccacaaaattgtcttcaaaaatgaatcttagtcatttgtatttctgtaaacattctatgaagtacattagaaagtattagaatatctgccactcactgtgggtgggtgtttattctgcttttaatttctcacatatcaatttaggtagacctcattcattttccttaactccaatagtgaatataaccagaattgtatgtatcatgttcaaatttagaacccaattgaataacagatattatttttatgtaataagtgctttagtaaacacagcagctgtgcattttcagatgctccatatttactatatttsagttgtgaatctgtaggctagatatagagttgatgatcattataaatatatttacagaactgcaaatcacagaaaatgaacagcccg

SEQ ID NO: 185785 - DNA, 621 bp, Homo sapiens
caggcattttcacttatggttgtaaaaacttattttaacatttctgctaccacttctgcctttctcattaatatttatgaatgtgttaagctctgaatattgtctttcaatatagtgggctagattcccatgcaacactccctatgctaactaatgccctgaaagagtaataccaatagatgttaacacaaccagagtaggtaaaagtcagaagatggacaacactcagttttagcaaaaatgtatggcgctaaaactctaccrtgttgctggtgagagtgtaaaatgctatactttagaaactattcagccatttcttataatgttaaacatagatctagctcgtgtcacaatttcactgctacgtatttactcaagagaaataaaaacatgtcaacacagacatacacaaaaacttgcacaatattttgctagaatttttatttacaatagccagaaactgaaacaacccaggtatttctcagtaggagaatggatatcaatatttttcaacaatgaaagagtacaagccctgttctgtacaacaacatgagtaaattttaaaagtactaagtaaatgaagctagataaaaattaatgcatggaattttatggttttta

SEQ ID NO: 185786 - DNA, 522 bp, Homo sapiens
tttgctcagacaaagcccatcagagtcaaatactttcagattaataccttgcttaagttattacagcatggatggtatgcgatgtttaggctcacctatttaatcataaaaagtgtctatgcataycaactaattaaaactacataagttaaaagaaatatttttatattaaatctattaatctactggtaattatatttaatggtcaaaatcataatattctaattcattattttatgcacaaaaacttggggatagagtctaaatagtggttgaatggatgatgaatatatcactaaacaaaacaaatgaatcaatatgttctcaggggcctcctagtccctaaattcacaaaactcacaaaagagaaagacaaaaagcaaaatttacttagagaatgcttagcatttaaagccccaaattcctataggtcgcatctaataaagttgtactagcattccaaaagtatggaagctgagtagaggaaaatggtaacaccacagcaatgcagtcagccataac

SEQ ID NO: 185787 - DNA, 389 bp, Homo sapiens
ggacatctgcaagccaaagagaggggcctcagagggaacctaccttgccaacctcttgatcttggacttccaccatccagarctgtgctgacataacctgcttttgtttaggccgcccagtctctggtacttcgttacggtagccccagcaaaggaacatggcctctgactctccaccaccattggttggctcaacagacacagcctcctgctccccaccttaatgggactgacagctccatgaagtccctcaggcccctctggagagcccatcgtctcattgccagagaggccacctggatagtgtagctcatagactgctctgcttccccacgtcccagacgaagggctcttctatgcatggccttatttctcatctcactaacaat

SEQ ID NO: 185788 - DNA, 524 bp, Homo sapiens
aaaacattgaatttgcccatttcttcctgtttcattgcctgctctaagaaggtggtgtatagcacacgcgcgtccttttaactaatggagattgtgcagtttctgttgttaagaatttgagattttaaggcctatcataactgtagtcttatattcgaagtgctttattttaccctggtcgttgtcacttagaatcattcatgaagctttggtgtggccttccagaaagagtrgcttaacctttcatttgtcgtgaaaattaaagaaactcagagtagttttacattcaccatgtttgagaaaataaaaataatgattttagctttttaaatatttttgactacacaataaaatatacagataaaggatagagtccagagaattttagacaaaaatcactctgttaattctattatggtaatatttaagtctgaattcctggtttgacttttgcttactcagtttcttttcatcactttaggtctccctaaataagagtaatttactcttattgataaattgtt

SEQ ID NO: 185789 - DNA, 524 bp, Homo sapiens
aaaacattgaatttgcccatttcttcctgtttcattgcctgctctaagaaggtggtgtatagcacacgcgcgtccttttaactaatggagattgtgcagtttctgttgttaagaatttgagattttaaggcctatcataactgtagtcttatattcgaagtgctttattttaccctggtcgttgtcacttagaatcattcatgaagctttggtgtggccttccagaaagagtggcttaacctttcatttgtcgtgaaaattaaagaaactcagagtagttttacattcaccatgtttgagaaaataaaaataatgattttagctttttaaatatttttgactacacaataaaatatacagataaaggatagagtccagagaattttagacaaaaatcactctgttaattctattatggtaawatttaagtctgaattcctggtttgacttttgcttactcagtttcttttcatcactttaggtctccctaaataagagtaatttactcttattgataaattgtt

SEQ ID NO: 185790 - DNA, 445 bp, Homo sapiens
agaattcacgagaaatcccatcaagaacaagccatccttattacctccttttcccactcgctgcagaaaatcttctacaaaaaggcactcctggtatcattttagaatcaaagaaacaaacctctttacttactaggaaaagaaaggtaaacaggcrcatttcaagactaaaatcctgttgagctcagaataatatatccttgttcaaaacaaagaatggtcaaagttaaacatcggtattgccaaatgtcaaaatgttaaggactgacttccacttctggcccaaatagagtagactgtggcagactaacatttctgcagaaaacaactagaaaatctgaattggaaaaagttatctgtctgaaggcatcagatgtcacccaggcagactttatagtctaatatttgggagagaatgaaaatatagagaggtgatcccaatact

SEQ ID NO: 185791 - DNA, 380 bp, Homo sapiens
caatgcctatacccccagtatatcttggaggtaactaacttgtcttttattttataggctcataggtagaagggacttgccttgtctaagatgagactgtggacttttgagttaatgttggaacgagttaagactttagggattagtggaaaggcaagattgtattttgaaatgtgagaaagacataagattgggaggggccagggkcagaatgatatgatttcatttggatgtgtgtccccacccaaatctcatattgaaatgtaatccccagtgttggaggttgggccttatgggaggtgactggatcatgggagtggtttcttatgaatggtttagcaccctccctcttggtactgtcctccctatcatgagtgagt

SEQ ID NO: 185792 - DNA, 533 bp, Homo sapiens
ccacagctccttggagaaatagattctaaaacagagacaggawatgtacaaggtgagccaggaacaattggtaatgtcagaaagcaaagaagttctcaaaataacaacaacaaaaacaagtgatggggatgtatcaagggaccaaggagccaaatgagagggctcctcatgagcaaaggtggaacaatttgagcaataaaataatgttgggttacaacccaaagtacacaatccatatatgggagtctccagcagcataaatgagcagtgtaataaataaataaataaataaataaataaataaataggagaggacaggcaaatctctcatgcaaaataatttaaggcggggagccctggctcacgcctgtaatcccagcactttgggagaccaaggtaggaggatcacttgaggccaggagttcgagaccagcctggccagcatgatgaaaccccgtctctacaaaaaatacaaaaattagctgagcatggtggcgctcacctgtaatcccagctactcaggagactgaggc

SEQ ID NO: 185793 - DNA, 628 bp, Homo sapiens
atgtttacctcaaatttaattaaatcttttgtctagacttatcttcctgtttaaagaaatacaggaatagaggaacaagttgaattacacagtatggaaataaatagacaagtccagagttggtataggacaactggacttttttttatatatttattttaaaatggttttcttaaatttatttttttaaacataacacgaggaagctgttaaaactggtgtaatagctcaaaagaaytaagtattccagatttcgggagggatgaagagggagatattcagaaaccttcaccagattcctcccaacttgatcatagtggattaatgacgtgctttgtggatgtggttagtcaatgacaccagcttgacggatctttctttctgcaccaaaccccattgagttatctggtccccttggctgacgaagagccattaggcgaggatcactggcatcatccagggtgatgttcttcaagcgactgaccaaccgatcaggtcgaggagctgcaacagccttggggccctcacagactcgccaaacattccaggcactgcacttgccagtgcgctgatgaagaatcacggagaactccacctcatctcctgcctggagctcaaggccatcctc

SEQ ID NO: 185794 - DNA, 629 bp, Homo sapiens
tcctgaggcacacatcctcaaccttgacaaaataaactttctaaattaacggagaactgtctcagatatttggggttcacaatgcatatacccaaagccctgcaattccacttctgcaaatgccaccccccaaaaaaatttctcattatatggacaccaggattcaatgagtgttgtttgtggaaaaaactcacaatgaccactgacagaataatgaataaataaattgttgtatagttgcacaatgtatactaaagaacaatcaaaattaagaatttcagtgacatctatcaaaatagttgaatcttacaaacacaatgatgagcaaaacagcaagctgcagaaaattagacagatattttatggatacatatttggaaattttattttttaagaatcagtggaatgacaaaaatccaggaggatggttaccactggtgrtggtggagaatggggacaataataagcaataatgaaaataataataagatgataatgcctaatacatatttagtgtttgctatttgccactgtccgaagtgcttttgatgcaggatttttgctccatagcttagctaagtctgggtttttgtctcacaaccaggaagaattaagcatgcagacagtca

SEQ ID NO: 185795 - DNA, 580 bp, Homo sapiens
atatatcttattttcatatatgggtcccatacactgcaaatttgatgaattaatttattaagtatagtagggttttttttgtacattctgtgtgatttttccaaataaaggatcattcatctctgaatagagagttttacttcttcttttccagtatacatggcttttatttctttttcctgcctagttgctctggatagaacttctggtacaatgttgaatagcagtggtgaaagtgggcattcttgtgttgctcctgattttagggggaaagctttcatcttttaccattgagtatgttagccatgagtttttcataaattccctttactgtgttgaatgagtcccttttttattcctagttttctgagtgtttttattctagaagtatgttcaatttttaaaaartgcttttcctgcattgattgagattgattgagatgctcgtgtggcttttttccttcattctactaatgtggtgagttatagtgattgattttcatatgttgaaccacctttgcatttctgagattaatctcgcatgctcgtggtgcataatcctttttacatgctgctggat

SEQ ID NO: 185796 - DNA, 609 bp, Homo sapiens
gttgcagaatttatatatgtatattacatataattcacaaatcaacatatcattcatttgtatatgtatatattgtatatattgcattaggttgttcttgcattmctataaatatctgagactggataatttataaagaaaagaggtttaattggctcacagttctagagactgtacaggcagcatggtgctggcatctgcctggcttctagagtggcctcaggaaactcaacagtcattgcggaaggtgaagggaaagcacatacatcacatagccagagcaggaacaagagagaggggcagaggaggtgctgcacactttccacagccaggtctcatgggaactctcacaagaacagcaccgaggggatggtgctaaactattcatgaaggattcactcccacggtccaaccacctcttacctggctccacctccaacactggagattacaatttgacacgagacttgggcagggacacagatccaaaccatagcatacagctatgtatataatcaaaactagaaagcagtggtacagtttgtttttagaacccacgtaagcttttctttcctcctctcatcgatcctaaagagtcaaatcaatagg

SEQ ID NO: 185797 - DNA, 581 bp, Homo sapiens
  misc_feature (1)...(581): n = A,T,C or G
cacatttgaatagttcagagaactcttctccccctttctcaccgatacctgaattttctggttataagaagctaatggcaaacaacagcatgcaagtaaacattgtttaaggttatcagtyataagctaccttgaacactgaattctattaacttttaaaagatacttttatatgtattctacccaacagaaatctttactattagttatcttcatcaggatcatacaactgttacaatgtcaatactgtcgagggtattttgaagtactttgccttttttgctgtgaaaagcacacttctacttatcacagtttggggatgcatgatttgaagaactattcattatattatgatcatttcagccagagggggaaaagctttctgtcaatttatctgctacctaaatgttcaaagttgtaattaattaggaggcaagaatgtagagaaaatgcatttcaaagataaatctagtcgctgagaagttcatcatatcttataattttcccatctctatagcaactgtcaaatacatgtctgcctacaaatttagaaacagaagaaattatagaagggcgtaaan

SEQ ID NO: 185798 - DNA, 512 bp, Homo sapiens
tctgaggacagcatgattctcctctgcatggagaaaactaggttctgctgtccagaattatgtccacagaatatccctggttcctccaacattraagggcctagttgaactctagaaaagaaaaaaaagcaatcttttaatccaatctgctaccttccaccaaaagacaactgagaatgatagcagggaagaagaggggaaaatacctgtaatatactcaaaactcttgatgggaagccagtaacgtgcaaggcatgcaacatattttaaatctataaccacatttaaccttcataaaaacacagtgagatgggcatcctctccattttccacacgatgaaaactaaagctatcaaagttaagtagcatatcctgtttatacagctaactcagggccagggcaaactcaaactttagatcatctggcaccagagcccatgtcctttaagtttcattgttttgccaacacgtcaagtgatttttttaaattttaaaataatattatgtatttt

SEQ ID NO: 185799 - DNA, 458 bp, Homo sapiens
ttttcatcatagaatgccatacccagctgacaaagtgtgatagacaaagatattttcagacacacaaggactcagaaaattgacttctctctacccaccctaagacacacacacacaagacaaggctatcataagaaagagtgaagctagtctggggtgttgctaaacggagattccaagaagacatccmcctaaatataaacaaacaggaaagcagaggacagtaaaaagagtgagtttgagaacaatggaatgtactgtgttcaatagatggcaggagcgaaaaatggagggatcagagtgcttttgcaaataaggtatgtatttgcttgtcttcagaaacaaaaggtcaattagaatttctggaaaaaaattagataagtaatgatgcagggcaggcaagcctcagaattggagcttagccctgaggattcttgacttcacccaggaaagaattc

SEQ ID NO: 185800 - DNA, 463 bp, Homo sapiens
gaattcattctttaatgttctcaagcaaaattgttttcatcatagaatgccatacccagctgacaaagtgtgatagacaaagatattttcagacacacaaggactcagaaaattgacttctctctacccaccctaagacacacacacacaagacaaggctatcataagaaagagtgaagctagtctggggtgttgctaaacggagattccaagaagacatccacctaaatataaacaaacaggaaagcagaggacagtaaaaagagtgagtttgagaacaatggaatgtactgtgttcaatagatggcaggagcgaaaaatggagggatcagagtgcttttgcaaataaggtatgtatttgsttgtcttcagaaacaaaaggtcaattagaatttctggaaaaaaattagataagtaatgatgcagggcaggcaagcctcagaattggagcttagccctgagg

SEQ ID NO: 185801 - DNA, 512 bp, Homo sapiens
tctgaggacagcatgattctcctctgcatggagaaaactaggttctgctgtccagaattatgtccacagaatatccctggttcctccaacattaaagggcctagttgaactctagaaaagaaaaaaaagcaatcttttaatccaatctgctaccttccaccaaaagacaactgagaatgatagcagggaagaagaggggaaaatacctgtaatatactcaaaactcttgatgggaagccagtawcgtgcaaggcatgcaacatattttaaatctataaccacatttaaccttcataaaaacacagtgagatgggcatcctctccattttccacacgatgaaaactaaagctatcaaagttaagtagcatatcctgtttatacagctaactcagggccagggcaaactcaaactttagatcatctggcaccagagcccatgtcctttaagtttcattgttttgccaacacgtcaagtgatttttttaaattttaaaataatattatgtatttt

SEQ ID NO: 185802 - DNA, 516 bp, Homo sapiens
tggaaggccaattccaggtctcccaggcattgagcaaaaaataatgcgtaaatgctcttctgtcartgaagctgaggtatataataaaactgtgactcactaaaaaaactgaaagcatccccaactctaagtgtatgtggactccagagagcacctgtctctgcgcacatggaatacaggagaaaaatcagaaaagttcttcatcgtttcaggaaagtgagaagcaaaaaatcagggataactaagagcaaaataggttagtgttggtacgcaaactgttgtcttaaagttaaatgcagtgtaattactgactgaataacgggcatatggattttcttacatctagtattaaaatcacacagctttgcataaaattcattaaaattacattcatagcccaaaatgtttctagttatttattgttccataaaaaattactcctctcaaagtggcttaaaacaataataataatttatgttactcaagaatctggaattgactagatttatctagaaa

SEQ ID NO: 185803 - DNA, 456 bp, Homo sapiens
gagtaacacaaggaagcctgccatcaccaattttccctgatattttactgaaagtcctaggtagcacaataaggcaagcttaggaaatgaagaaataaaactgccattatttatagatgacttgatagcaatagaatgttcaaaataagtcagatataagctattttaattaatatgtcagtttagcaaattcagtttatgtacrcacaataaaaacaaaaatgtagaaatttataaaatcaaaatatatagaagcaggcattggtctattataacgccatgtaagacctctacatagaatattacaaaccactttttttttaaatggtagtctttaaataaagcggttcttaaaccttctatcaggaccttctaagtagcaaactttgaagtctttattttaataatgctaatcaatgctaacacactttttcctaatttcattctgaggcagaa

SEQ ID NO: 185804 - DNA, 456 bp, Homo sapiens
gagtaacacaaggaagcctgccatcaccaattttccctgatattttactgaaagtcctaggtagcacaataaggcaagcttaggaaatgaagaaataaaactgccattatttatagatgacttgatagcaatagaatgttcaaaataagtcagatataagctattttaattaatatgtcagtttagcaaattcagtttatgtacacacaataaaaacaaaaatgtagaaatttataaaatcaaaatatatagaagcaggcattggtctattataacgccatgtaagacctctacatagaatattacaaaccactttttttttaaatggtagtctttaaataaagcggttcttaaaccttctatcaggaccttctaagtagcaaactttgaagtctttattttaataatgctaatcaatgctaacacaytttttcctaatttcattctgaggcagaa

SEQ ID NO: 185805 - DNA, 416 bp, Homo sapiens
attttctgggagctttcctgagtgaaaatgtgcgatcgacctgttgttatagtttacagtgtgactaccacactattgatttttgtgccaaaggatgaaaactcctgtccaatttccatctgccctttgtatttatcatagaaatcccacaaaaatcagattaatccaaagtggaagtaccacataaaattatcccagctaataccttgctgaaaaatatattttaatcaaaaatgcatggtattcccagagcctggttttaccttcactgtaatgcrtttatcacaaacctcaaagatggtggaccagaaagacgcatggagagttgttgaatctcttcagtagctcatttacattacacctgaaatgtatgtttccatgggtgaagtttggaagagccatcagcactaatatat

SEQ ID NO: 185806 - DNA, 452 bp, Homo sapiens
acatatttttgagttccctttcctcatccaggatctcagattttctgggagctttcctgagtgaaaatgtgcgatcgacctgttgttatagtttacagtgtgactaccacactattgatttttgtgccaaaggatgaaaactcctgtccaatttccatctgccctttgtatttatcatagaaatcccacaaaaatcagattaatccaaagtggaagtaccacataaaattatcccagctaataccttgctgaaaaatatattttaatcaaaaatgcatggtattcccagagcctggttttaccttcactgtaatgcatttatcacaaacctcaaagatggtggaccagaaagaygcatggagagttgttgaatctcttcagtagctcatttacattacacctgaaatgtatgtttccatgggtgaagtttggaagagccatcagcactaata

SEQ ID NO: 185807 - DNA, 452 bp, Homo sapiens
acatatttttgagttccctttcctcatccaggatctcagattttctgggagctttcctgagtgaaaatgtgcgatcgacctgttgttatagtttacagtgtgactaccacactattgatttttgtgccaaaggatgaaaactcctgtccaatttccatctgccctttgtatttatcatagaaatcccacaaaaatcagattaatccaaagtggaagtaccacataaaattatcccagctaataccttgctgaaaaatatattttaatcaaaaatgcatggtattcccagagcctggttttaccttcactgtaatgcatttatcacaaacctcaaagatggtggaccagaaagacgcatggagagttgttgaatctcttcaktagctcatttacattacacctgaaatgtatgtttccatgggtgaagtttggaagagccatcagcactaata

SEQ ID NO: 185808 - DNA, 565 bp, Homo sapiens
tcatatgttaaactagtacatgatatttgtcaatctgtttttcatgcacacatgatattaatgttttaagggtcatcaaaaaatagtcaaaatttctttttttcacattctactacctatttaattgagattatctggtcccgtgttaaagtatcaagtttctccaactggattatctgcaggtaattattgcacataactggaagaacacttaaataaagaaccctacaggtgaacagtattcatagcatgagatcgtatagtagtatctttgtattagcttaagactaatgtttatgtataaactttcaaaaaatgaatttgacctttcatttttatgtctttatctcctaccacatttgacacaatgtcttgcacataataggatgaccatttgtgttgaatrgatgaatgagtgaattaagaaaacacaataagccccagccactttcacaatctttggtctaagctaatcaatatgacccattcttattctgtactgtatcatttggtaactagatatttgccagtacaggaaatcaacttcaagtgccaataggcaatt

SEQ ID NO: 185809 - DNA, 416 bp, Homo sapiens
gacctaggcacagagagttccttactgcagtgccccccgacaaatctgccctgacatggccgtatgtggataatggtgatagcacggcactgctttgattcactacagtctttgtaagaccaggtaggacctacagtggttakaagtcatggtcatttttttcctggcaaccaccagctgtttctatttccccagtacactgtacaaatgttatgcctttctattcattcactgaccagggcaaagttggagagcacagtttcattgaacctgacctcccagttgatggctctcaactgagcacagcccttggctgaaaagtactgccatgtttaacgtagcatccccttctggaaacagcatgcattcagcaactagtctatgatttgatagattcatccccaaactcaaggtgg

SEQ ID NO: 185810 - DNA, 416 bp, Homo sapiens
gacctaggcacagagagttccttactgcagtgccccccgacaaatctgccctgacatggccgtatgtggataatggtgatagcacggcactgctttgattcactacagtctttgtaagaccaggtaggacctacagtggttagaagtcatggtcatttttttcctggcaaccaccagctgtttctayttccccagtacactgtacaaatgttatgcctttctattcattcactgaccagggcaaagttggagagcacagtttcattgaacctgacctcccagttgatggctctcaactgagcacagcccttggctgaaaagtactgccatgtttaacgtagcatccccttctggaaacagcatgcattcagcaactagtctatgatttgatagattcatccccaaactcaaggtgg

SEQ ID NO: 185811 - DNA, 417 bp, Homo sapiens
cagctcactttctccctttcctggtcttacttccttcccagtgctataagaacagacaccaagaacccatttcaaattcgtgcagcaaagctgttttatagcctgcatcccagagagtcctacttaagcagacaggaagcacaaatggactggagtagggggtttaaatacaggagctgaaagtagcatcaggcatgacctggccctgtcaattactagctgtgtgcttttgtgccaagtcatttaacctcggtatgcctcagtttccacgactgcaaaayagaaatattaatagcacctagttaattgaattatgaagattacatgatataacaacaaaaaataaagtaaaaatgtcctggtccatagcaagaagtataattgcttaattaaatgaattaataaaatagagcagaa

SEQ ID NO: 185812 - DNA, 573 bp, Homo sapiens
  misc_feature (1)...(573): n = A,T,C or G
agttttttaggattaagtgagttaatatgtgtaagtgctgaagaagggccttgcttgcatatagtaggtaatgaaaaaatattagccatcgtcattatttttgttgatatgttattactaccctacatcacagaaatagaaagtgatgcattactaatcaaaaaataacataaaacaataaataattgatgataaagaacttaaatgatttttttatccctatgattgtcttttttttcatctnacactatggtaaggataattagatagctaaaatttctccaagaagtcataggaattcaattgacactctgctgtgacattttatatctctaaaaccatgattttgtgaggtcagaaaatggtagagtgagacttaacaggtaaatatgtacattttttgacgtctatganatttttatcatcaaagtttttttagatcagggcaagtcttaaacacactgaaaattactctgtgcatgcctcggtgcattaacaatgggcacatatgcatgtgcwtgtagacatacgtatgaatatccatcaaaacccaggccacccgctgggtagatg

SEQ ID NO: 185813 - DNA, 610 bp, Homo sapiens
aaatatatggcaaacaacaagtgcattttattacatgcatacattgtagcttggtgaaatcggggctattaggatatctgtcacccaaataatgtacattgtatccattaagtaatttgtcatcgttcatctctctctcacccccttacccttctatcattccatattgtgtgtccatgtgtacacattatttagctcccatttataagtgagaacgtgctatcttctttgtatgacttgtttcacttacgataatggctgcaaatcctacccatgttgttgcaaatgacatgattatattcttttttgactgaataatattccattttgtayatataacacgttttctttgtttaatcatccattgagggacaattaggcttattccatacctttgatattgtgagtagtgctgcaataaacatacaaatacaggtgttttttgatatgatttctttttctttgggtagatatccagtagtgagatggctagatcaaatggtagttctatttttagtcctttgagacatccccatactgttttccttagaagttttactaatttacattcctaccaatggtgtgaaagagttcccttatctctgcatcc

SEQ ID NO: 185814 - DNA, 625 bp, Homo sapiens
actggaaacatgcttttgatgaaaactcttatttatccacaatattgacccatcttgcatgcctttcgcctcagtactctagtaaatgctttacctaatttgagacatttcatggtacagctcttcatatcaacattcttgacacatatatgttgcgctatattcataatattttgtttctacttatttcrtcttcttttcaaagtatagagctccaaattagaaacccattccatctctgctacattatcaattcctgaatcctgcttctcatacgattttatcatcgagcatgtaatacattatatcatgatacattaataagtccaggatttattttctaatccattgatgttcaacataatcatgttaaaaaattaaacatgaatcgagatctaaacctgtttccactccttaatcttagtccatatcatttcatagtcatcaccacattcttcagcatgtcagtcctgtcacaatacttacttttccatggtctgaaatcatattttttcaggataaaaggaaatatctatttgtttgtactaaataatataatattttattcaataatttgtattgaataatggaaaaatactaattagtgatgaagaaatataatttc

SEQ ID NO: 185815 - DNA, 587 bp, Homo sapiens
aagtcaggtaacacaaattataactatctgccaacaaccagataggtaaataggtcagtaacatggtgaaccaactaagccgataccaactcagtaactggagttataataagactcgaaggttatttcgcaaagacttaagagacatctcagttagttgttgtactattggcatgtattggtgtaaagatagagcttcagactttgaagattctacaaccaataactgaagtgattttttaaaaattccacttaaaaatgtagcatttcagagctacaagggaatgtagggggtttgtttactttataaataaggcaaactgaagcctagaaaagagacatgattttcccagtcatctagtagaggaatccagactctattttgggctttccaatcctaggtcagggtcagggctctttttgtaacagaattattattwttttttttcatctcagtaacatagctcagggaatcataccatgcttgttacttaaaagtgctatagtatggtctcaatctcttaacctcatgatctgcccgcctcggcctcccaaagtgctgggattacaggcgtgagcaaccacat

SEQ ID NO: 185816 - DNA, 487 bp, Homo sapiens
tatttttcattttataaatataaaattgtacaaagtaatgtacattttgttttagagaagtcttttaaatgtttgcagacagcccagatcgtccatccctatttaggcagtggtctccaaacgtttatgtttattcaccctattagtaaaacttyctgagcatgcccctccatgtatttatttatgatatatatgtatatatgtatacactgctatatatgtatatactgttttactgatgtaaacattaaaaaccatagcaaacatagacattttaaaagtatattttctggtcctcaatggagtttagagaatgggacaaggagtctttaggcgtagcacccagatgcctgtaattgattagagaatgtgtatataccatttgtggcaaagcagatataaaacaggcatggacgcatgattttaggtcaaggtatttaattatttttacttaaaataggcatttttggttgggaaagagaaggat

SEQ ID NO: 185817 - DNA, 320 bp, Homo sapiens
tagatctacatctacttcaacgtcagttggttccacacccttctagaacttgtgtggggtcctggacttcccgtctgtcctgttagggaagctttgctgtcctagctttcaggactyatcagagggaagagggtcatttacctttccaatgtgctgtgatctcagagtcgttaaaatacatgttttgctgccatttgtactgtttcttgactcaatgtttcatatttctgttcttctttccttttagaggagaggcggaacagctggtctccctgctctctcagaagctgcttgatttgtttctagatgacgccactggc

SEQ ID NO: 185818 - DNA, 271 bp, Homo sapiens
tactcaggtgaggggtcagcctttttgttctattcaggccttcaactgattggatgaggcccacccaccttagggaggacaatctgctttactcaktccactaattcacatgctaatctcatccagaaacacccacacagacacactgtgctatttttgcaacatttctgtaaatctaaaattattttaaaataaaaatttaaaaaggctttctgccatcaggtattatgaggacttttgaatgatgggaatttttatattctttacattc

SEQ ID NO: 185819 - DNA, 563 bp, Homo sapiens
atacttgtatcaaagcactctgtgcagtgttagactatatgcagttttattaatgcaacttttctggtgttttcagccacygcccagtgagaggagagcaatgctgagaacaagtcttaatgtttttgctgtctcatccccgttctctctctctttccctatagtattcgatgaactgttggcttacccatatttgtgaaggcaccctatttctaaagatgaagtttttgttgttgttgttgttgttgttttgacttaggacattttccagggaaatatggggcagagatcctgggtgatggctgtgagatttgggctaggagagccaagatttacaattgcaaacaatactgctttgcttctgaccaacataaggattgctcattatggggttaaagaggcacttcttaaaatacagcaacttctgagaaatccatgcactttacttgaaaaaaaaaaaacctctttttgaatatagcatttgcaaaacaatcttaaaagactgctgtagattcacaaagaggtaaagggaggagagtttttcagactgcttaccacttaag

SEQ ID NO: 185820 - DNA, 563 bp, Homo sapiens
atacttgtatcaaagcactctgtgcagtgttagactatatgcagttttattaatgcaacttttctggtgttttcagccaccgcccagtgagaggagagcaatgctgagaacaagtcttaatgtttttgctgtctcatccccgttctctctctctttccctatagtattcgatgaactgttggcttacccatatttgtgaaggcaccctatttctaaagatgaagttkttgttgttgttgttgttgttgttttgacttaggacattttccagggaaatatggggcagagatcctgggtgatggctgtgagatttgggctaggagagccaagatttacaattgcaaacaatactgctttgcttctgaccaacataaggattgctcattatggggttaaagaggcacttcttaaaatacagcaacttctgagaaatccatgcactttacttgaaaaaaaaaaaacctctttttgaatatagcatttgcaaaacaatcttaaaagactgctgtagattcacaaagaggtaaagggaggagagtttttcagactgcttaccacttaag

SEQ ID NO: 185821 - DNA, 563 bp, Homo sapiens
atacttgtatcaaagcactctgtgcagtgttagactatatgcagttttattaatgcaacttttctggtgttttcagccaccgcccagtgagaggagagcaatgctgagaacaagtcttaatgtttttgctgtctcatccccgttctctctctctttccctatagtattcgatgaactgttggcttacccatatttgtgaaggcaccctatttctaaagatgaagtttttgttgttgttgttgttgttgttttgacttaggacattttccagggaaatatggggcagagatcctgggtgatggctgtgagatttgggctaggagagccaagatttacaattgcaaacaawactgctttgcttctgaccaacataaggattgctcattatggggttaaagaggcacttcttaaaatacagcaacttctgagaaatccatgcactttacttgaaaaaaaaaaaacctctttttgaatatagcatttgcaaaacaatcttaaaagactgctgtagattcacaaagaggtaaagggaggagagtttttcagactgcttaccacttaag

SEQ ID NO: 185822 - DNA, 527 bp, Homo sapiens
aaaaagtgtttgacatgtgagcacactgatctggtcttatgagagaatctgggaatccaaaatgtatgtaaaatctcctaagtttaaaatattggtttattttaatatatgattcatgtcaragtaaatatgtctgtgggctacataaggcctgggaaaaccagtgggcaaccactgttctaaacaaaaaaatgtgtctttttaagttaattcttgtgccagctgttaagaaaataaaattttcacaagcacccacattatctacattttaaatgccacagaaagcaattcagagagatgtagctagtaatttgtaaaattcagagctgacaaaagaaggagccaatatgaaatggccattgaatttccaagtttgcatcatgcaattcagcttattttatatgtatccagctttaggcttttctttaaagaggcacatcgactattagcattgttatcacaaagatgcattggcattaaggggaagcaataaggcaaactgaccactcttcttgacatagttattt

SEQ ID NO: 185823 - DNA, 537 bp, Homo sapiens
acattttattatacacattggaatgtatcataataactccagaacaacycaaggaacttcccagataatattttttttttgcctgagacattttacatgttcttctatataaagtgttttctacttccactcccttagactcccaaacccttcacttgaataacttgaatttacccttctgtgtttttctgaactatccttctcttctgttagcctgtctttactctccatggtaaatatccttgcttcaggttgttacaattgccctcaatacatcacagcatttatcctaatggataaattttatatattcaataactgttggatgaattaataaatgaatgtattcataactacagtttagaggttacttaacatgatatttatatgctttttttctaactcgtataatggccctgtgaaattgtcagtaaaatattagtaactcagttttatacgtaagtaaataataaagagattccattcttacacaaaaccatatggctagtatattagtccattttcacgctgctataa

SEQ ID NO: 185824 - DNA, 537 bp, Homo sapiens
acattttattatacacattggaatgtatcataataactccagaacaacccaaggaacttcccagataatattttttttttgcctgagacattttacatgttcttctatataaagtgttttctacttccactcccttagactcccaaacccttcacttgaataacttgaatttacccttctgtgtttttctgaactatccttctcttctgttagcctgtctttactctccatggtaaatatccttgcttcaggttgttacaattgccctcaatacatcacagcatttatcctaatggataaattttatatattcaataactgttggatgaattaataaatgaatgtattcataactacagtttagaggttacttaacatgatatttatatgctttttttctaactcgtataatggcyctgtgaaattgtcagtaaaatattagtaactcagttttatacgtaagtaaataataaagagattccattcttacacaaaaccatatggctagtatattagtccattttcacgctgctataa

SEQ ID NO: 185825 - DNA, 531 bp, Homo sapiens
tcataacctgagctgcttaaaatatttgattcttgggcttcaaacaactatcacttttaaaatacatattaaaactggattatgaaatagtcaaagtatttaagttgggaagatacatacaaattaataagtaaaaakctagacaatgtagtaaaaaccaaatcctacttgaatgtggtggccagttcaaaatgtctactgtgcaatgactggatattcacactttctggccctcatcatacatgtgaattatgagcagcctactttccattagcatgcatgttaataaacggagtagattaggatataaaatgagaagaccgcttgcattttcaaatatttcaatttcagttttcaggctcatttttagcctagcttatatatctagtcttttactccctcaaaatacagaggaagtctgaattttaaattaacatataaattactttatgttgatttagaaaatctaagctgaccctcaggtcttttaaccatcaataaagattagtgaaataaagagtaatataagtt

SEQ ID NO: 185826 - DNA, 590 bp, Homo sapiens
cctttcctctgccatcctgttttacttgggtcctttatggattggtgatgcccacccacattgttgagagggatctttactcattccactgattcagatgctaaactctctggagacaccctcagacacaccctcagaaataatgtttgaccagctatctggacatcccttagctcagttaagttgacataaaattaaccatcacactgttgaaatcatgagttcatttgaatctctttttggcatggtagtgagatgaggtaaatgaatatctattttaaactttctcaatgtatatactcattgagacctaatctgaattcttgtacaaattgttgggtgataacagggtaaggsaagtgtgtacttcttagcagccttctatgtaagtttccttggctcatataaatctaggaatataataattattcaactctcaaattgaaatggtgtcacatgtttggtttcttgctcttaaagttctacttttttcctctcacttgtaaaatggccttacctcatacactaagtctctggtaaatgggtcttaagaacaattgagttactttggttaactatcaaaataagtt

SEQ ID NO: 185827 - DNA, 440 bp, Homo sapiens
ttttgtgtgcgtgtgatgtaagtgcacattaacaaaagtaaaagttagactatcctgtaaaattactccttcttacatatagcaactcaatatctcttggggtttttccattatattaaatattataaacactattgtaatgttatagttgcacatcagatggttggaccagaatttatttaaccaatccccagttgtagaaactttaagtcattttctcttttgtttgttttttctttgctcaaatgttggtgcatctatgtgtatgtgggtgtgttgagaataaatcacttgaggttgatttattacatttaaaaaaaaacattataaatactcaaaccaactcacacacgccctagtcatgaatgaaaaaaaattccacaaatccytgccaacctcatataaaatagagggaaaatattttgttttaatctttattt

SEQ ID NO: 185828 - DNA, 440 bp, Homo sapiens
ttttgtgtgcgtgtgatgtaagtgcacattaacaaaagtaaaagttagactatcctgtaaaattactccttcttacatatagcaactcaatatctcttggggtttttccattatattaaatattataaacactattgtaatgttatagttgcacatcagatggttggaccagaatttatttaaccaatccccagttgtagaaactttaagtcattttctcttttgtttgttttttctttgctcaaatgttggtgcatctatgtgtatgtgggtgtgttgagaataaatcacttgaggttgatttattacatttaaaaaaaaacattataaatactcaaaccaactcacacacgccctagtcatgaatgaaaaaaaattccacaaatccttgccaacctcatataaaayagagggaaaatattttgttttaatctttattt

SEQ ID NO: 185829 - DNA, 559 bp, Homo sapiens
tacaggttcctaaatacaccagcctcgttctacctcaagtctttgtattttctgttccactgcctggaatacttttctcccagagttttataacttactctcttgctttctttagatgatgactgttgtaattctcgttccagtttaactcactcagtgaagacttctgtggacatcctcsttatagaaaaaatgccacatgttctctcctaaaatacattgtttagcaaaatatgaggatactaaatacattttccagtgttattttttctaaaaattaagtcagttttagcaagtgtttggttgaatattttataaaatatctaatgactggaggctattgttcaggcaaccagataaaataccacatgctcaccataccctgtaatatttttctccacatatctaatcactgtataatatagattatgtttttattatttattttgtttatccgtttctcctataaaatgtagttttcatcaggataaaaatttttgtctactttgtactctgctgtatccctaggacctagaccaaaacctaacaaatagcaagc

SEQ ID NO: 185830 - DNA, 559 bp, Homo sapiens
tacaggttcctaaatacaccagcctcgttctacctcaagtctttgtattttctgttccactgcctggaatacttttctcccagagttttataacttactctcttgctttctttagatgatgactgttgtaattctcgttccagtttaactcactcagtgaagacttctgtggacatcctccttatagaaaaaatgccacatgttctctcctaaaatacattgtttagcaaaatatgaggatactaaatacattttccagtgttattttttctaaaaattaagtcagttttagcaagtgtttggttgaatattttataaaatatctaatgactggaggctattgttcaggcaaccagataaaataccacatgctcaccataccctgtaatatttttctccacatatctaatcactgtataatatagattatgtttttattatttattttgtttatccgtttctcctataaaatgtagttttcatcaggatraaaatttttgtctactttgtactctgctgtatccctaggacctagaccaaaacctaacaaatagcaagc

SEQ ID NO: 185831 - DNA, 655 bp, Homo sapiens
gtatgaaaagcaagagtcttattatatcccatatgactgaccatgatcaaaaattagaagatttcaccaatgtaattacaaagatagctaaagcttaattattatgtacctaatttttaaattgtttttaatttaaaaatataaaatacattatgtatttttatttaaattgaatatattaattaaagacattattgcagccattcattaccaccatatgctgcaatagtcacgtttgtttttcacttttttcccatggtgttatcatatctgctgatatcatatctgctgctatcatttagtacttacctgagttttataaccttcagtttctaatctgctataacctgaataaatgtataaacatgtgtatcaaaatagtttgaaaaactccgagaaaaatggccttaaaaatgtcatataaatagagtgtatgaagttgaatgtacacasctctctactgtgaaaagtggagttttattatttcatacaactcccattgttaaaagtgtagagtgtatatttactccccctgctacattaacctgaaatgattattttctttttgttttatgaactatgtgaataaactctctcctatgttgctactttccaaaaaaacacagagggatagaactcaccagaaggaaaggaa

SEQ ID NO: 185832 - DNA, 586 bp, Homo sapiens
cctcaaactcttagcttctgcagtgtttccctaagcctaggaggactacctcactgtagcgacggccttcccggtacagtctacctcaaatgactaagcatggtggtggataaaggcccarccagtttgttccactgaggaatgggccatatgcaccagagctctgcatggggttaagtggtgctgtgctgggactgcatcactggtcaactcctcactctgtccaatactgattccttcccttgtcaaattctctaatggttagtctgcatgccaagcactttctcattgtttgcttctggaaaaccaacctgcaacagggagcatatgaaatcatctctgccaggaaaatgtcaagacacaactcctctctgaatatattacaacaaacaggtcagcctgaagaagcctttgatggggccaaaaaagaaccatccatgatatctactgctggacccataaccaaatttctcactaccttgccagaaagagttgtaggttatttcctttttttccagacacttacttataaaatgagaattgttgagaaattttctggatttgaaaaatctggttaaaaaataat

SEQ ID NO: 185833 - DNA, 586 bp, Homo sapiens
cctcaaactcttagcttctgcagtgtttccctaagcctaggaggactacctcactgtagcgacggccttcccggtacagtctacctcaaatgactaagcatggtggtggataaaggcccaaccagtttgttccactgaggaatgggccatatgcaccagagctctgcatggggttaagtggtgctgtgctgggactgcatcactggtcaactcctcactctgtccaatactgattccttcccttgtcaaattctctaatggttagtctgcatgccaagcactttctcattgtttgcttctggaaaaccaacctgcaacagggagcatatgaaatcatctctgccaggaaaatgtcaagacacaactcctctctgaatatattacaacaaacaggtcagcctgaagaagcctttgatggggccaaaaaagaaccatccatgatatctactgctggacccataaccaaatttctcactaccttgccagaaagagttgtaggttrtttcctttttttccagacacttacttataaaatgagaattgttgagaaattttctggatttgaaaaatctggttaaaaaataat

SEQ ID NO: 185834 - DNA, 555 bp, Homo sapiens
gttctttttccaagaccacccatacattcccccattctaagcccataaaaaccctggactcagcctcacagatggctacctgttttcagggtcccctcttgcagctgagagcttttcttatgttactcaatagcattcttctctgccttagtctctctcccctgtctgcataccttattcctcttggtcatgggacaagaacctggaamtcaccaagctgtgggcagtgggaatgaaagaggtgtaaccctcctgtttgccaagcttcaggggcaaaaaggcctctgattgccactccctcctgcttgccaaactatgggaaagaaaaacctgatgagtcccactccctcccactcactgaactacagaaaagaaaaagccacaatattttcatgatggaaaacaagatgaaattagttcaacttgcaagaaataaaatcttgaatggataaaattataactattgtccataagaattgttaaatgttgcaaaaggccagaaaaagagtcagtcagggtgcttaaagaagtaacatgtaaagattatgagaatcc

SEQ ID NO: 185835 - DNA, 555 bp, Homo sapiens
gttctttttccaagaccacccatacattcccccattctaagcccataaaaaccctggactcagcctcacagatggctacctgttttcagggtcccctcttgcagctgagagcttttcttatgttactcaatagcattcttctctgccttagtctctctcccctgtctgcataccttattcctcttggtcatgggacaagaacctggaactcaccaagctgtgggcagtgggaatgaaagaggtgtaaccctcctgtttgccaagcttcaggggcaaaaaggcctytgattgccactccctcctgcttgccaaactatgggaaagaaaaacctgatgagtcccactccctcccactcactgaactacagaaaagaaaaagccacaatattttcatgatggaaaacaagatgaaattagttcaacttgcaagaaataaaatcttgaatggataaaattataactattgtccataagaattgttaaatgttgcaaaaggccagaaaaagagtcagtcagggtgcttaaagaagtaacatgtaaagattatgagaatcc

SEQ ID NO: 185836 - DNA, 555 bp, Homo sapiens
gttctttttccaagaccacccatacattcccccattctaagcccataaaaaccctggactcagcctcacagatggctacctgttttcagggtcccctcttgcagctgagagcttttcttatgttactcaatagcattcttctctgccttagtctctctcccctgtctgcataccttattcctcttggtcatgggacaagaacctggaactcaccaagctgtgggcagtgggaatgaaagaggtgtaaccctcctgtttgccaagcttcaggggcaaaaaggcctctgattgccactccctcctgcttgccaaactatgggaaagaaaaacctgatgagtcccactccctcccactcactgaactacagaaaagaaaaagccacaatattttcatgatggaaaacaagatgaaattagttcaacttgcaagaaataaaatcttgaatggataaaattataactattgtccataagaattgttraatgttgcaaaaggccagaaaaagagtcagtcagggtgcttaaagaagtaacatgtaaagattatgagaatcc

SEQ ID NO: 185837 - DNA, 515 bp, Homo sapiens
agtgaaacacagaaacagagcgggagttrctagtcttatacaagataaaacaaactttaaactaacaagattttttttaaaaaagtcagagaaggacattatataatgataaggggaataagggattcaaatcaacaaaaagatttaagtatccttgatatctatgcatacaacattggagcacccagaatcatcaaaaagtatttctagacctacaaaagacttacgcagccacacaataaaagttgtggatgtcaacacctcagtaacaggattagacagatcatcaaggtaaaaaacaaacagaaattttggatgtaaattaaacacttgaccaattgaacctaagagacatcttcagaatactccatccctcaaacacaaaaacatgcattcttctcattttctcatgaaacaaactccaagatcaaccacatgcttggccataaagcaagtctcgacaaatttttaaaaaatcaaaatcatgccaaccatactctaagaccccatttgaa

SEQ ID NO: 185838 - DNA, 515 bp, Homo sapiens
agtgaaacacagaaacagagcgggagttgctagtcttatacaagataaaacaaactttaaactaacaagattttttttaaaaaagtcagagaaggacattatataatgataaggggaataagggattcaaatcaacaaaaagatttaagtatccttgatatctatgcatacaacattggagcacccagaatcatcaaaaagtatttctagacctacaaaagacttacgcagccacacaataaaagttgtggatgtcaacacctcagtaacaggattagacagatcatcaaggtaaaaaacaaacagaaattttggatgtaaattaaacacttgaccaattgaacctaagagacatcttcagaatactccatccctcaaacacaaaaacatgcattcttctcattttctcatgaaacaaactccaagatcaaccacatgcttggccrtaaagcaagtctcgacaaatttttaaaaaatcaaaatcatgccaaccatactctaagaccccatttgaa

SEQ ID NO: 185839 - DNA, 584 bp, Homo sapiens
ctgaagcaggtgagaaatttaaatcgataaataatggagaaattgaatttatttacagattttctgtgactacatcttcctagtacaatatttatgtaaaatgtrgtaaattttttaacatcaaatttcttgatctatattgaaacatccaggaaaaacaaaaacgatcttagaaagaattctagcaattttttcacttaggaaaaacaaagcatttctattttttgaatctcagggttttacaccattattgcaaataatactttttagttgactacaaaatctatatactatctagccacaataatgtctcagtgatgctatcaacagttgtcaaccaaaactctaaaagctgaaagatgtgtggttactatttttaatgcaatgtttcattatttaaagagaaccatgatatttgtggataataaaggtgccagaaataagacatcttatctgaccaaatggatgtacatgtcaattactgtttgaacctagaagagatgcctagagacttcagtaatgtcaaaacaggcagtttccatgacaaccatgtcaatgatctgtgcagaagggtccacatttca

SEQ ID NO: 185840 - DNA, 497 bp, Homo sapiens
atactgtgaaaagtaaatataaagattttaatatttatttaatgtaatgtgaatgaagaagctgaagatagtgtccattatgcagttatcaatgatgtccatcaaacttacacagcatagcaccgtatgctcttatgccccaacatgtgccaaatgaaaacttgaaattttaaagcactaagctcaaatccttccttagrctatttactaaagactgcaaaaattcaaattgttttgaagcagtgaattttattaaaaatattataattctgtaatggcagaatattggtccctttcaaatagattctgccatgtgagattttctaggaaagtaaaataaaaattaaagaaaaataaaacaagtatcttgcaaaaagcagttgtttcaaagtaaaatataaaaaatgtaaaaagcagctatttcagtgtcattttaaatattttgacaaaaccattatccgtgttggtaaacccagttttgctagatttgttctttg

SEQ ID NO: 185841 - DNA, 674 bp, Homo sapiens
tattgctgctgactcaatttcttcaatacctttttgtgtgttgaaagcaaggtttctaaatttgtatatgggttatttcttgatgttttattagttaggctagtattcctgaccagagagattcacaggccagggactagtggaaacatgattcaaaatcccatgtgtaagtgagctattcagtgcaatgggaggctggcatcctcagttgttctcaattctctgaccactgattttctattctctgcttaaactgcattcattagttctcttggattttggaaattttctgttttattggattgcttttttttatgagacggagtcttgctctttctcccaggctggagtgcaatggcgcaatctcctctctctgtaacctccccctgccgggctcaagcgattctctcacctcagcctcccaagtagctgggattacaggcacctgccaccatgcccagctaatttttgtagtttttagtaaagacagggtttmatcacgttggtcaggctggtctcgaactactgacctcaggtgatccacccgcctcagcctcccaaagtgctgggattataggcgtgagccacagtgcccagctttgctgcctttcttagctttaaagcccttgaaaagaaggagttcaataggctttcagaattttaggaaatattgt

SEQ ID NO: 185842 - DNA, 401 bp, Homo sapiens
actttatgctccatttcttttagatgcttctttttcttacttttttcccctgccttagcaatgctgagagtttttgcctatgattcatttgattaaaaaaaacacatggataagttccttagatgaggcaaaagtgaacatcctatttttctyaaatagcaattgaattattatactactttgtgttctaagaaagcacatagtttaacattttgcaatagttatctgatgtgggcccatagcatggttcttgacagaaaacctttaatatataacttatgagtaaatgaatgatacatagtattagttctgatttattacttgtatgtttctatacccacaaaggagatgataaagaaaatttccacgtaatttgaatttttcttcagataaaagtctat

SEQ ID NO: 185843 - DNA, 476 bp, Homo sapiens
aatttacaaaacgaagaggtttattagacttacagttccacgtggctagggaggcctcacgatcatggcagaaggtgaaaggcaaggaggagcaagtcacrtctttcatggatggcagcaggcaaagagagagcttgtgcagggaactcccatttttaaaaccatcagatcttgtaagacttattcactatcatgagaacatcaccagaaagacccacccccatgattcaattacctcccaccggcttcctcccataacatgtgggaattgtaggagttacaattcaagatgagatttgggtggagacacagccaaaccatatcattctgcccctggaccctcccaaatctcatgttctcacattgcaaaaccaatcatcccttcccaacagtcccccacagtattaactcatttaagcattaactcaaaagtccacagtccaaagtctcatctgagacaaggcaagccccttcca

SEQ ID NO: 185844 - DNA, 586 bp, Homo sapiens
ttgcatgtttagttcttgcaggaaacagttaatacagtctttttctcggtttacagggaatataattttctgatattatagatggctaatatatattatgtgtcaatgttctaaatgcttttacatatatgaatgcatttaatactcacaaaaatcctatataaacrgtagtattagtagcaccacattatgtataggaaacagaagctaagtggtgttaaataacttgctgaaggtaacacacctagagctcagactacaggcttcagtgtccacatccttaccattcactctgtacaacacttcaattagcacaaaggataatttagttaagatacaaaatatactcaagtaatattactaaagatattgataacattttctataaccaaatgcaaaagcacaaaataagaagggcaccttatgagatatgccaaaaacatggactttttgactatgattcaatagcataataatgttgcttatagttctgtatttgtaggatacaaaaataaattattatatgctttaatcatttttgttaaatcttgactaaatatatgtttgaaccagaggccacaagtct

SEQ ID NO: 185845 - DNA, 579 bp, Homo sapiens
gtaaccctccaaatagtagttttcatgctgaatccttttgtcactctgaaggtctctattgtaagtatggggaaataaaaatatagaaatatagggaatatacaggcctaattttccatctttcctctctttggttttcaaaatggtgaagcagttctgctcaatagctaggattgttgatctggtttgggagtctactcaaagaacattttttctacccagaggattcacaaaacttattacttaacctgagcttcctccagcccatatggcacctttcttcttcttctgggccaatgcagatgtgggttgagcagatggcttggtgagtgaaatctggaatgcaattcagctcccaytcactctctgtcctggtggcattgtgcagagtaccccaagacaaactacagatcctagctcagtctttagaccacattagagaggagaaaagtgtgcttattattaagttaggttgctttctgagaacttgatgtcactagatcctggagggttatttaagagtaaacttaacattctcttcatcatacagagcacctcagaagtgctggacctgtctta

SEQ ID NO: 185846 - DNA, 480 bp, Homo sapiens
ctgtgagaatggcaaccagacacttgcgcctctcctttctactgaaagtcttcagcakctcccatcattattgttgtttagatttcaagactttgctgaatcacaatgccactatacagaataattctgaaagtccaaatataagattacaaagcagttttccccaaatgggaatgaggtttttgtttggaaatacttagtccagtggtgtttgttttttgacctctcggcattaatattttcttcctaataatatcacctccttccactgggtataatttagtaggtctgtaatggggaaagctggccatctctagccaagttcatgattcaaggtaagtcaatagaaagctctttctatagaatccaaatctctagtagaggaaccaggttgcccaggtctcagttcacattaggcttttccaaggtcaggctgctcctgcaagacaaggtcattactgcttctgccacccgaccttc

SEQ ID NO: 185847 - DNA, 477 bp, Homo sapiens
gcaaccagacacttgcgcctctcctttctactgaaagtcttcagcatctcccatcrttattgttgtttagatttcaagactttgctgaatcacaatgccactatacagaataattctgaaagtccaaatataagattacaaagcagttttccccaaatgggaatgaggtttttgtttggaaatacttagtccagtggtgtttgttttttgacctctcggcattaatattttcttcctaataatatcacctccttccactgggtataatttagtaggtctgtaatggggaaagctggccatctctagccaagttcatgattcaaggtaagtcaatagaaagctctttctatagaatccaaatctctagtagaggaaccaggttgcccaggtctcagttcacattaggcttttccaaggtcaggctgctcctgcaagacaaggtcattactgcttctgccacccgaccttcaggggtgc

SEQ ID NO: 185848 - DNA, 477 bp, Homo sapiens
gcaaccagacacttgcgcctctcctttctactgaaagtcttcagcatctcccatcattattgttgtttagatttcaagactttgctgaatcacaatgccactatacagaataattctgaaagtccaaatataagattacaaagcagttttccccaaatgggaatgaggtttttgtttggaaatacttagtccagtggtgtttgttttttgacctctcrgcattaatattttcttcctaataatatcacctccttccactgggtataatttagtaggtctgtaatggggaaagctggccatctctagccaagttcatgattcaaggtaagtcaatagaaagctctttctatagaatccaaatctctagtagaggaaccaggttgcccaggtctcagttcacattaggcttttccaaggtcaggctgctcctgcaagacaaggtcattactgcttctgccacccgaccttcaggggtgc

SEQ ID NO: 185849 - DNA, 480 bp, Homo sapiens
ctgtgagaatggcaaccagacacttgcgcctctcctttctactgaaagtcttcagcatctcccatcattattgttgtttagatttcaagactttgctgaatcacaatgccactatacagaataattctgaaagtccaaatataagattacaaagcagttttccccaaatgggaatgaggtttttgtttggaaatacttagtccagtggtgtttgttttttgacctctcggcattaatattttcttcctaakaatatcacctccttccactgggtataatttagtaggtctgtaatggggaaagctggccatctctagccaagttcatgattcaaggtaagtcaatagaaagctctttctatagaatccaaatctctagtagaggaaccaggttgcccaggtctcagttcacattaggcttttccaaggtcaggctgctcctgcaagacaaggtcattactgcttctgccacccgaccttc

SEQ ID NO: 185850 - DNA, 480 bp, Homo sapiens
ctgtgagaatggcaaccagacacttgcgcctctcctttctactgaaagtcttcagcatctcccatcattattgttgtttagatttcaagactttgctgaatcacaatgccactatacagaataattctgaaagtccaaatataagattacaaagcagttttccccaaatgggaatgaggtttttgtttggaaatacttagtccagtggtgtttgttttttgacctctcggcattaatattttcttcctaataatatcacctccttccaytgggtataatttagtaggtctgtaatggggaaagctggccatctctagccaagttcatgattcaaggtaagtcaatagaaagctctttctatagaatccaaatctctagtagaggaaccaggttgcccaggtctcagttcacattaggcttttccaaggtcaggctgctcctgcaagacaaggtcattactgcttctgccacccgaccttc

SEQ ID NO: 185851 - DNA, 459 bp, Homo sapiens
cagcggggtaggagacactagatgggctgttggactctgaaagatgcccttaacttctgttaatgcccctctcacttcacatatccccacccaaacacacatacacatacacgcagcaagagtcgtcctagatggaaaaggataygctgtacaatgtttatatctacagaggaatgctaaatatagtatttatattttactgggcaaagcaagtagtaatcacgccccaagtcacttgatagggttggaaaatgatgaactgagaaagaatacttgaattaaagaggctgaacttaaattacttcttgatatttggcccaattaggagggtccccattatttcacagtggaagttaccaagaaattttaactttagagttaaaaaaagcagacctgaatctctagcttgctgatacttgagaaaataatctatagaattctcatgattctcaggccaaa

SEQ ID NO: 185852 - DNA, 408 bp, Homo sapiens
gcgggaaatctggccactgggtcaaggaatgcccgcagcctgggattcctcctaagctgtgtcccatctgtgcaggacacctgaaaatcggactgtccaactcatctagcagccactcccgagcccctggaactctggcccaaggctctctgactgactccttcccagatcttctcggcttagctgctgaagaccgatgctgcccgatcgcctcggaagccccctagaccatcacagacgaggagctttgggtaacttacagtggagggtaagtccatccccttcttaatcaatatggaggctaccaactccacattaccttcttttcaaaggcctgtttcctttgcctccataactgttgtgggtattgacggccaggcttctaarcctcttaaaactcccgaattc

SEQ ID NO: 185853 - DNA, 391 bp, Homo sapiens
taataatatttgattgtataccatgaaatgattgtattttcccaagtctctgcctttatgagcattccatccttcctgtggtctacccagaagcgttcctaagggccaatatcggaatgcaattatcacagctttgctttcccattcaccttgagcttatcttactctctagcacagtttgctctatttcttctcctttgtgttggcccttttggaactcttcctctacccccaccaaatatgcttgtcccaaggtatcgagactatttttctcagtcctagctccctagcacagtaagccagccccattttcatggcaaatcaaacctgatatccccagarcccctctggttactaggggaaagtcctagtctctcttatgaccatctta

SEQ ID NO: 185854 - DNA, 255 bp, Homo sapiens
ttttgtggtctacttattgccacagttttacatttttgtactttttatcttaatttcactgttcaaaatgagccccaaactgttcaaaatagggccaaagtgctgtttagtgttcctaacaccagaaggctgtgatatgccttgtggagaaaacgtatgtgttagacaagctttgttcagcatgacttacagtgccrttggccatgagttcaatgttaatccattaacaatgtatattaaatagggtgtctttaa

SEQ ID NO: 185855 - DNA, 603 bp, Homo sapiens
ggtctaatttatctttttttttccattctggtttatgcttttggtgtcatttatgtgaactctttgcctaatcctaggtcacaaagatattgttctatgcttttatctaaagattttatacttagtattttagattttgtaaatccatgttccattttgagttaatttttgtataaggtatgaggtagagatcaaattccttttttctgccaatggatctccaattgtctaccactaatttgctgaaaagttatctattcaccattgaaatatctttgtacatttctcgattgaccatttgtgagtctatctctggaccttctgctstgttccacaaatttatgtctccatccttccatcaataccacattttttattactatagatttggagtaaattttaaaactggctaatgtgaatcttccaactttgttggactttgaaaaacattttggctattctagttctttaatctttctacaatacatagattttagaatcagtttgtctatatctgcaaggaaaacttgccagggttttgattgggattgcattaaatctagacagccaattcatttgagaattgacatcttagctacagta

SEQ ID NO: 185856 - DNA, 601 bp, Homo sapiens
aactgaacaagattatttgtctaattaatgaaatgagttacacctttagctcctaattcccgccacaggagaaactgctgatataataaagattaataaacattccctaaagggacaaacctgttgatttttttcctttggagagcagccaatatctactctccaatcctcaagttgggagcacacatcaaacttaaccaggaagagaaaaatctttggcctgcgtgtcacaraaacacctatcaaaaaaccccagggcacagaaaatttaccccaaatccaaggttcatttgaaaaaattcttttacaatgcctaatcagtgatcctcaaagtatgctccctaaacaaaaacattatcacctgaaaatgatttaaaaatgaaattctcttgctctttcccggacctgctggatcagacactctgatcgtggggccagggaacctgggttttaataagccctctcgatggctctgaggcaggctcaagtttatttctcatcagttccatatattcttccattcccctccaaataaacaactggccctggtctcatatcgctgctgcaagtttctcttcctgtcacattatttttttaagat

SEQ ID NO: 185857 - DNA, 508 bp, Homo sapiens
cattcatacccttttcccattcaagccatgctccaggtcactgatagaacatcacagcacactgctgttcatggttctcttcttggtactcaatactcaatatatcactaagaaaatctgatcccataacatttcatcagtaacatgttattctttgagtaacgagctttccgaatagctgactcccctgrggaatcatacaagtgagtatttcttctttttcccttccaaccccctttctatacttttctagtcctcctactcctgtgtaccctgcggggcactgcacccagtgagatacctgttggtgagagggcccacgaatgggttgaccagaagttgcatcacagcctttgaagcaaacagaaccccgacccgggtaatctcttcctccaagaaacctgtgccttgcaagcagttgtttttatgagctgagatggcttcagtggctggaggtgggatggtgctggcagtgtcattcatccatgctattccactaggtacgctt

SEQ ID NO: 185858 - DNA, 508 bp, Homo sapiens
cattcatacccttttcccattcaagccatgctccaggtcactgatagaacatcacagcacactgctgttcatggttctcttcttggtactcaatactcaatatatcactaagaaaatctgatcccataacatttcatcagtaacatgttattctttgagtaacgagctttccgaatagctgactcccctgaggaatcatacaagtgagtatttcttctttttcccttccaaccccctttctatacttttctagtcctcctactcctgtgtaccctgcggggcactgcacccagtgagatacctgttggtgagagggcccacgaatgggttgaccagaagttgcatcacagcctttgaagcaaacagaaccccgacccgggtartctcttcctccaagaaacctgtgccttgcaagcagttgtttttatgagctgagatggcttcagtggctggaggtgggatggtgctggcagtgtcattcatccatgctattccactaggtacgctt

SEQ ID NO: 185859 - DNA, 602 bp, Homo sapiens
atggaaaattaaaaaacatagtgagtgaagtaagtactacaaagagagagaaacacacacacccaaatcccaaaacaaaaacaaacaaaaccaggaatttgccaacaaatcaatagtaaactttacttaacagtcaaaatcctctgacagagacacaaatcacaaggaaagattaaatttgtccggagagagaaaaatcttaccttggagcccatgttggtgtgaggcactcagtgaggtattggcagctgttagcaagacagcagggacactgttctctgaacgtggatgtgctgttggatttattgcctcctgttatctgaggattctgtgtatgtgtgygtgtgtgtgcctttgtccacaaagatttaattgcaacctccaacagggttcattcagacccttagctccctgcgtcaaaggcaggaaggcagggctggagaggataaagagagggcagatattagcctaagcaaagaggcactggactgtactgttttgcatctgtgcttatctatcatcgaactctttaactcttgcctgggtctgaatacaaattggaagccaagatggaaccagtgtgcagttcctgttccttgcta

SEQ ID NO: 185860 - DNA, 543 bp, Homo sapiens
tgattagcttagcttcaagtggatcccaaactctcctcaaacttcaaagctcctctgtgtgtcaagacctggggagtggccagctgggtatcggggctaagggataggaatgctctcaggaggactggaggtggccattcttcagtcacccctctcctgggctcctggcattgtccatcttctacctcttgaccctctaggatgcagcacagggctgctgcccaggtgaatgacacagcttctgagtgcctacaatcttgttggcattggcccaaaagggaaatgaagctcggctagagaagtctgcttttgattcctcctctaggcttcctcttccctaacccaggaagctcattttgctatctgggacagaaaccctaacatctctgggcctcacctacagtccccaattgcagcgtgcgattttagcatggagattgtggcrtttgggcctgggttcgaatcccacctctgtcactggtcactgagtggccagggccacggcatcccaccttgtgagtctgtgccttagcctcccttttt

SEQ ID NO: 185861 - DNA, 510 bp, Homo sapiens
ggtcacacactacctatgtgaaattgggcaagttacttaacatctggcttcagtaccatcattaatagaaggtttttcttcagccacatgagagacacaaccattagcctcctttggacactcaaggcaacttaagttcactaattcttcgtaggagacatggaatcttactcttttccctttgttttgagatcatgagatcataaaatggtttgcatctacttttgattttttttctttctcctttaaaaaaatwtttttttaaacatgtcatccttgtgcaggagccacgctaatcttctctgtatcattctaattttaatgtatgtgctgctgaagtgagcacctactttggatgtctacaatcacccggtgatacagagataatccctgctcagattgctttacagataaggaaactaaggctaaatgacatagtcattgaggcatgggccttgaatctctcaaagctgtgaactcattttatcataaaaatataagacttgtttt

SEQ ID NO: 185862 - DNA, 387 bp, Homo sapiens
tttaggagagcacaccaagactgtggccaagcaacctaaagtgattagtgtggataaaagtgagccaggcaccacttattaagactgtgggagaaagacccaaaggcattttagagaccttcgaagctgtgcttcccattactggcccagagatgtaggagggcagaatggtttgggaataagcctgggacaccctccatgggctcactgcccaggaccaccttgggactctgctctctgcgtttcagtgcagtgcccctcaactgtgccagccrtggctcaagtgggcccagatgtggcctggcctcccactctggagggtgcaagtggtaagccttggtggtgtctatgtggtgcaaattttgcacgtgcgcagaatgcaagagc

SEQ ID NO: 185863 - DNA, 570 bp, Homo sapiens
tcagtgactggcagtcaacagttcactgaatcaaatagtgctttttttggggctgcatgttagcctggggactgtaagggaacatgctctgataaaaataaactgaaatcggtgtaaggagccctgtactgtggaattgggaggtcagggtagagagatggcaaggatgacctggtccagccctttcctgataactgaagggctttctgagcatctgaagcagtgagatccagcttctggtgaaggtgggacggtgtcaggaggcagtctactcacagatgggcatctctggtcgttggaataatcttcctaaaccaagaaacttgcctccctctaacttcacggaggggtatccttgggctgtcccctacggctctcccaggtgttkaccctctaccattctgaagatagttggccacttctaagtcttcagtctaaatatttctagttcgcttaaccatccctccctttatgagttagggagttactgatctctctggtaactgaacaggtttagaagtcagatctagcctcctcccatagtacttttgttattgggtctgtgttgtc

SEQ ID NO: 185864 - DNA, 438 bp, Homo sapiens
cagcctgcacctctgagcacactgaggacatatgcctggaagaatttcctgggcctcaacgsattttcttttaaaatgaaataaatttaattgtgccatgtcactgaaatagtaattatgctaattactttaacataactttcacctcaacagattgattttaaaaattcgtgaaatatctcaagtactttcatctgaaaaacctgattgccagacaatagtgaaacttgaaaggatttgagacttagctgaagttgctctcaggaaaatgcaatctctctgaagttctgtgttattaatcaacagaattttataaatttgttgttctgtattagttttatatttcatataaaataatgatctaaataacaaatgattggataaaattgatgttctgtgaaaacatgttatgttgactactgcctgtccacagttcag

SEQ ID NO: 185865 - DNA, 619 bp, Homo sapiens
attaaatgtaaaaaagggaaacgctactgttttcagaagaaaaccggagagtatctttgtaatattcagtttgtatgcgaagatttattaagcaggattatttattaaacatcattttctcttgatgattacaacacagtaatcatcaagagagaaaaatgataaattggagcgttaagacttttgggttgcagaatcaggcaaattctggaacttcactcggaattggacccttggtttttcttctcyttcctcatcctgctcttcccactcacttacttgtttctcttgggaacacttcctcaatatatcactcacatagcaacctttggctcaaaatttgattctgtgaatatctgacctaagacacgttatgaaaaagtgcttatgctcaaaatatcatcaaggaattaaaaccacactgaaatagcttacataactaagagaatggctaaaatttttttaaaaatgaagtaaatgagagggagacaaaacatcaaacattggtaagaatgctgagcaatcacaattcttattttcaacgctatagaggtataaattggcacaattatctcgaaaaatgctttttaatatcttctaaagctaaatttatcaatat

SEQ ID NO: 185866 - DNA, 541 bp, Homo sapiens
ttcattctgtaatgcagcatagagcaaaaactgctgatgaaattcaaagagtaaactccctcaataattgagttataacaaaagagttttgaaagggtaggtgggtcttttttccccccaagataagtatcttactgttaattaatctggttgggggattatgagatagaataatttaaaatactacatttgctatacaactgatcatcttctactttaaggatttttttcatgatttatgggattttacaggtttaaaagagaattgaataaaaaaaagtttctgtgtggatgaatataaactacctaaatcatacacctttgctgatgcagaagaaatttcagtgcttaggtctggaggtaagaaatttccctcagakgatcagaaacattaatatcccttttgcctctacttttttttaatgaaagacacacatacacacacacacacatacaaacacatacacacacacacacacatacacacacacacacaccccaggttactgcagctgcataacaggctcctgttggccctgag

SEQ ID NO: 185867 - DNA, 568 bp, Homo sapiens
taacagataccaaggcctacttgaggatgaagggtaggaggaggatgaggatcaaaaaactacctatgaggccctatgtttattacctaggtgatgaaataatctgtatataaacccccccgacacacaatttacctatgtaacaaatgtgcacatgtaccctaaacttaaagttaaaaatagataaataaataaaatttagatattaatttggagttcattttagtgtactctgtgggttgacatgtgtatttccccaagcagattttgctattcaaatgctatatactatttatatcattttttatacaatgatttcacttgtgtctcatatcatggaacaaatattttcatgtgcccaaatctattgctagagctactatcctgttttgctkattagtatatatgtttatgcacccgtgtgacactattgtaactaaagaaggttattactatgattaaacatctagtagaactaatcccacctcatgagtctttttatccccctgagggttgttatactaattctgaaatgtttatttttctatatctacttaatagtaagtca

SEQ ID NO: 185868 - DNA, 628 bp, Homo sapiens
agaactggggagttatatcaaaagttgcaacatgtatataattggaatatcaaaaagagaagaagaagaaaatggagcagaagaaacatttgcagaaataatgactgagaagttctcaaattaagaacagatatcaagccacagaaccaggaagcttagacaatatcagcagaataaacaccaaagactccacacggagacacaccacattcaaactgcaaaaaacaaaaataaagaaaaaaaaatttaatgaatctaggattggagaacactttccatactgaggtaaaagaatacaaattaccagagacttctcatgaaaaataatgcaaacaagaagagaatgaaatgaaatcattaaaatgctcaaagaaaaagactacaaccatgagttctatatccatttaaattattatttcttcaaaaagaagaaataaaaactttcttagacaaacaaaaactaaaaattcccacccagtggacttgctctgcaagacatgttaaaagaaggtctttaggcggaaggaaaatcatgtgtagatcagatgcttgaatctacataaagartctatggccataccaccctgaacgtgcccaatctcgtctgaatctacataaagaaaaaaga

SEQ ID NO: 185869 - DNA, 592 bp, Homo sapiens
aatattggggacacccataatatttacaaaaaaatatatttttagtaaatgggacaaatacaacattattctagcactctcagcccatatgaggtggtaggataataacctactgtggtttgagagtatgcacctgttgatttgttctgaagacttgggactgttgttatcccgaaacccaagtatctttcacaggaactggtattcaacatccatgtgttttcctgtccacaataaattgtaataattgtgcctgaaaagagagaatatattggcaattttgatttcatgtttcctcaaagcaagagcaagttcttcttctgaacagatgaatgcactttctaagaaggatgctgtgccagtcacagccaaagtcaacgtgcctgaaacatcccttttgccaaaagttaattatgacacttaagaagagcttcctatatgtttttaaattgtatatttcagttttgcttctctagctcttctgtgcagagagcagacatggagaatcactgtrtatggtatgtgttttaactatgtctccacacagattcaatgattaagttgtgtctttaaaaatcacagatggaaatca

SEQ ID NO: 185870 - DNA, 497 bp, Homo sapiens
aaaaatcagaatggttgcatgggtacctgaaatatagtttctactaaatacttatcacttcatactattgtaaacttaaaaaaaaaaacacttaagttgaagcattgtaagttgggaactgtctaattactgtttgcatcttttccattagaaggatttcttttaatgactatctttttgagttatccctgacttggattgtactgtgccaatagtatgtttttgctatcaccaacccatctgcatgagytctattttcctccagtagtttatcacaaggaactcccattagactaaaggtataagttaagggtactgcttcagcacagcagagataggcaacatggcgttctgagccacatgttcatgtaacttacttctactccctataattggctgggctccatctagaatatgtaatttctccatcaaacaactttccattgttatgtctgctcatctttatgactcgaggaatctgataataaccaggtcat

SEQ ID NO: 185871 - DNA, 548 bp, Homo sapiens
gcttccaatataagactgttttgtataccctgaaaatctgttgtttagtgcagtcaccttcatcaatgatcttagctagatttttctggataacttgctgcagattctacatcagcacttgctgctttaccttgtattttatgttatggagacagctttcttccttaaacatcatgaataaatctcttctagcttcaaacttttcttttgtagttttctcgcctctctcaccttcatagaattgaagacatttagggacttgctctgaattaggctttgattaatggaatgttgcagctggtttaatcttctattgagaccactaacaatttctacatctcagcaataagattgttttgctttctcatcacatttgtcttcactggagtggcacttttgatttctttctagaacttttcccttgaattcatgatttccttaattgtttggcayaagaggcctagattttagtctgtctcagctttcaacctgtcttccttattaagcttaatcgtttctagcttttgatttaaagtaagaggtgtgca

SEQ ID NO: 185872 - DNA, 289 bp, Homo sapiens
aagattgggaaacgggggatacaggtaatgtaaaattgtcccttctgcccctttcgaggtgctttttcttatttctgtgctatacccaggtgctataatctctcatctggtttccttagctcttatgaagacatttttatttatggagagatgttctatttctgaggagggacaggcccttgaaargcctattctaacatcttgctgacattgagatacattaataaattacatagtgtcaaaatcacacagagtatattatcttattctaggacacatacactacaaa

SEQ ID NO: 185873 - DNA, 559 bp, Homo sapiens
atgtaatttaaatcaccttagacttggaaatggactgcaaaacactgcttagaaagaaggataattcttaaaatatgtattttggtaatgggccaacatattccacagaatcatctaaaaagaaagtggacagattctctggtctagtatattttttctcagataagcaaattctttttatttgcttcccttggccattctctaaaattaataacataagcactgaagttagaattgctaagaactaatttttcttgccattgaagcaagattttcttctctctgaaaatgaatttactaacaatgttataaaycaagggtgtcatctcctaaaaagtaaatcttacagatcggccacacacatgacatatatactcaaaagtatgtatccaaatcatacttcttccttttggaaatttggaattagaattaataatttaagcattgatattaatttatttctcaactgtataataaatgaatttctcagatgaattctatctgatcattttagagatagaaataataattttattcaggaatcaatcaccatcattat

SEQ ID NO: 185874 - DNA, 559 bp, Homo sapiens
atgtaatttaaatcaccttagacttggaaatggactgcaaaacactgcttagaaagaaggataattcttaaaatatgtattttggtaatgggccaacatattccacagaatcatctaaaaagaaagtggacagattctctggtctagtatattttttctcagataagcaaattctttttatttgcttcccttggccattctctaaaattaataacataagcactgaagttagaattgctaagaactaatttttcttgccattgaagcaagattttcttctctctgaaaatgaatttactaacaatgttataaatcaagggtgtcatctcctaaaaagtaaatcttacagatcggccacacacatgacatatatactcaaaagtatgtatccaaatcatacttcttccttttggaaatttggaattagaattaataatttaagcattgatattaatttatttctcaactgtataataaatgaatttctcagatgaattctatctgatcattttagagatagaaataataattttattcmggaatcaatcaccatcattat

SEQ ID NO: 185875 - DNA, 188 bp, Homo sapiens
attaatgctgaaatgaattaagacttttggggactgttgggaaggcatgattggttttgaaatgtgaggacttgtgctttggaagggcctggggktggaataatataactcccatgattcccatgtgttatgggacggacctggtgggaggtacccagtgggaggtaattgaatcatgggggctgttc

SEQ ID NO: 185876 - DNA, 571 bp, Homo sapiens
ccacaaaggagacactgtaggagaataaagaggaatccttctggaagccaatagaaaaaaaaaaaaaacaatgtggtcagccctcataaggctagaaccagaaacttagttctctgaagccaaggcactgtaatttccctccctctgatgacagtcacaccacagaaagggagctgtcgggaggaagaagaaggagcccagaggcacggctcatacctccctgctggaaggaggggtaaagggcacgaaagtcctttgagaagagaggaaggagaaatakaaatgaataagacagcaccctacaccaaccaacttagagtttagataggaatggagacatatttctgaaaatactggaaacaatcacagccaaataagaaatccagttcatttcaacactgaatagttgggcactgtagcgtattcaaggataatttttaaaaattaaaaagttaaatcaggctgggcgaggtggctcacacctgtaatcctagcactttgagaggcggagacagcaggatcatttgagctcaagagcttgagatcagcctgggcaacatgggaaaacacc

SEQ ID NO: 185877 - DNA, 466 bp, Homo sapiens
gtatttaaaaggtacacaacagcaaacaatgagaagtccttccgtgagccaccaagacacctccctggaaacaaccagyatgatcagtttcttgtctgtcctcctaaaaatgttcattctgtatataaacaaatccatgtatagattcttctccccttctttttgtaagagaatatcaatgtaatgtccatgccttctaatatttcatagcatatactgcaagaattccatatcagtacatcaagatcattgtttatggctacatagtgtgccttaattgaattaaccagtccggtattgatgaacgtaagagttgtttttccagtcctctgctatggaaggacatgccatagtgaatatccttgtatataaaccattttacacagaagtacatctggaggataaattcctggaagtggagtttctggatcaagtgacacatgcatttatacttttgataagatat

SEQ ID NO: 185878 - DNA, 426 bp, Homo sapiens
cagcccatcgactggtgttgccatgagattcaacagtcaacatcagtctgataagctacccgacaaggtggtacagccatggagatgtcacgatggtaggcaaaacaagcagacagtcaggcaggatttgataaaaaaacaaaaacaaaaacaaaccaaaaaaacccaggcatttctggcctgttaagatcgaaccccaattctattctattctgacataatgctcataatgctcctaaaggaaaaaagtaaaattgtttattttcctcccaagcaaaacaaaatgaacaagttcaatcaaaaacatcccaatggaaaaaartcacactaagaataaaacacttacagaacggcaagaaaactgggttaacatataaatttgtgtctgttgaaaccagagtacatgctagaaaacattaacacaga

SEQ ID NO: 185879 - DNA, 599 bp, Homo sapiens
cccggctaattttttatatttttagtagagacggggtttcaccacattggcctggctgattttgaactcctgacctcaggtcatccacccgcctcagcctcccaaagtgttgggattacaggtgtgagccactgcgcctggcccttgggaggaccttttttttattattatttttttgagacagaatcttgctctgttgcccaggctggagtggaactcccaggcttaggtgatcatcctgcctcagcctcctcgatagctgggactacaggcatacaacaccacactcagctcgagttttatagttttagctcctgtatttaggtctttgctccattttgagttaatttttgtgtatagtgtgaagtagcatatagatatccagttgtcctagcatcattatttgatttgtatgtggatatccagttgttccaacacatttattgaaagattgcctcttgcctaatgaatatttttggcagttttatcaaaaattagttgacaatataaatgtaagagtttatttctgggctctyaattctattctgttgatctatatgtctttctttatgccagtaccacactgccttgatggctgt

SEQ ID NO: 185880 - DNA, 459 bp, Homo sapiens
  misc_feature (1)...(459): n = A,T,C or G
nnnnnnnnntagtctcagctgcccggaaggctgaggcaagaggactggaggatgacttgagcccaggaggtggaggttgcagtgagccatgatctgtcttctgtcactgcagtacaccctgggtgacagagcaagaccccttctcaaaaaacaaaaacaaacaaaaaaccaaatggcaacctttgtttgaattggatgggaaaaaatatctaaggaaggataattcagtcatttttttaaaaaatagagacaaggtcttgccatgttgctcaggttggtcttgaattcctgcacccaagtgatcctcctgcctcagactcccaaagtgctgggattacaggcataagccaccacactggcctcattcatttaacagatgtttattgaacattggaaatgtactagtttgctatttaggtgttgaggatacrgtagtgaacaagagagaaaaaaaatcct

SEQ ID NO: 185881 - DNA, 557 bp, Homo sapiens
tatacagaaaagatagttgcacacgccatgtttatagcagcataattcgcaattgcaaaaacgtggaaccaacccaaatgtccatcaatcaatgagtggataaagaagctgtgagatatatatatatatacacatatatatgtgtatatatatgtgtatatatacatatatatgtatatatatatatacacatatatatatgtgtatatatatatrtgtatatatatatggaatactactcagccataaaaaggaatgaattaatggcttttgcagcgacctggatgagattggagactaatattctaagtgaagtaactcaggaatggaaaaccaaacattgtatgttctcactcataagtgggagcttagctatgatggatacaaaggcatatgaatgatacaatgaactttggggtcttggaggaaaagggtgggaagggcttgagagataaaagactacaaatagggtacagtgtatactgctcgagtgatggatgcaccaaaatctctcaaatcaccactaaagaacttactcatctaaccaaacagcacct

SEQ ID NO: 185882 - DNA, 552 bp, Homo sapiens
tcttttccttcaagttttattttagattcargggatacatgtgcaggtttgttacacagatatattgtgtgatgctaaggtttgatccttaacatcataaacatgcataaatgatcctgtcacccaaatagtgagcacaggacccaataggtcgtttttcaaccctttccttcctccctccccgtctcctccctctagtagtcctcggcgtctactgttcccatctttatgtccatgtatacccgatgcctagctccagaatcttttggttgccttctctgaaattcagagaagtaagctgtgaacagccagttgtggttgcctaatttgtagggctgagggcaaaatgaaaatgtgagtcccgtgctcaaaaattacaactctgaagacagtgacagaagaggattaaaccaagggcaggacccttctgagtgcagggctctgggcagctgcagaggtcgcgtgtccatgaagccagccctgcaatagccacctagtgataggcagagcaggagttacaacctgggattcctgtcactctttccactaaac

SEQ ID NO: 185883 - DNA, 384 bp, Homo sapiens
cctaatggaattccttatcagaacaagcctctgacatcaagatcctgttaataattaggtctctggccagtttacctgagtagcttactaattcacttggcaggtagagcttctcagcacaaattttccttttgaataaaactaaaggcaaatgtatgtctgggtttcctttckggaaatgtactaccacttcctccagtctcagagggcacctcatcaaaagggccatgactcacctttctaaccccaggcttccaacactctccctcctccactgcacttgatctttccccatcacactcattgcttcttggtgtgttatatattcctttattgtctgtgttccttcatcagcatgtatatccacgaaagcagacgttttgc

SEQ ID NO: 185884 - DNA, 581 bp, Homo sapiens
aagcttcatgccaagctatggtaggctaaataagggcccctcaaaacatattcacatcctaatccctgaaacctgtattatcttagatgtcaaaaataaactttgtaggtataattaagttaaaaattttgcgatcggaagacaatcctagatcatccrggttttccctaaatgcaatcacatgtatccttatcaggaggaggctgaggaagattcgagacaaaagcagagaagacaaatgcagagattggacctacgcagccaaaagccaaggaatgacaggtgcccccagaagctggaaaaaggaaggaagaggttgtcctctacggactctggagggggtgtgggacaggagtggacacctggccaccacaactgtgagaaaataaatgtctactgcgttaagctaccaaatttgtagtaatctattatagtaaccacagaaaacaaatgcacagactatccaggaaaaagccagaaacacaaatgaccaatatcaggagtaaatgaggtgaactcaggacagatattaaaataataagagtatcatgaacaactttatgccattaaattcagcatct

SEQ ID NO: 185885 - DNA, 581 bp, Homo sapiens
aagcttcatgccaagctatggtaggctaaataagggcccctcaaaacatattcacatcctaatccctgaaacctgtattatcttagatgtcaaaaataaactttgtaggtataattaagttaaaaattttgcgatcggaagacaatcctagatcatccaggttttccctaaatgcaatcacatgtatccttatcaggaggaggctgaggaagattcgagacaaaagcagagaagacaaatgcagagattggacctaygcagccaaaagccaaggaatgacaggtgcccccagaagctggaaaaaggaaggaagaggttgtcctctacggactctggagggggtgtgggacaggagtggacacctggccaccacaactgtgagaaaataaatgtctactgcgttaagctaccaaatttgtagtaatctattatagtaaccacagaaaacaaatgcacagactatccaggaaaaagccagaaacacaaatgaccaatatcaggagtaaatgaggtgaactcaggacagatattaaaataataagagtatcatgaacaactttatgccattaaattcagcatct

SEQ ID NO: 185886 - DNA, 485 bp, Homo sapiens
gtagctcagttcccccaagcccagctttactctgttcccagctttctcactcttttttcccttgttccttcattttggtcttggcttcctctggggcagatgtcatgcagcttgttccatgtcatcttctctggcaggarcctgctttcctcaactgacagaaggggtcttgttagcaggaatctcacccaaggactcgccttagcacccttaggccaagagtcaggctgaaaggctagcacaagctgccctggtgaaagaccagcctttgtatctcgccaggagcaacaaggactctctctggtcctgcacgatccatgtggcagcatctttagattggccactggcttctccacccacacctggctgtagacttgcaagaccagcaagagcaggaggtgttcagggcagggctttgtgggccccttcttggtcctggcttttaatgcatcgtgtttgatctttgccacgtggtggagggttcc

SEQ ID NO: 185887 - DNA, 568 bp, Homo sapiens
ggtgttaccaattaaactgaggagagagaaaaccctagattacatgagagttttgtgggtaagtggagttgaccttcctgggagagttttcttccagaaccacacaaatcagcacacggggaggagacttttccacttgtcttttaagccgtttgtgtaaacttttatctatctgtatgtggtcyggaaagagtttgatggagcaggtgcatagaaacctcaaaaacagcaatctcagagttaataaattttccttcttaggggggctgggagatcatggagtgtcacaaaggccctcatattataggtaaaaacaacagctaacacttacgtatacctacagtgtgctgggtgctagctcatgtattctacgtacattggtttattaatttttattttattttattttttttagatagagtctcactcagttgcccagggtggagcacagtggccatgatctcagctcactgcaacctccacctcccaggttcaagtgattctcctgcctcagcctcccgaatagctgggattacaggcatgtgccaccatgcctgtctaagattgg

SEQ ID NO: 185888 - DNA, 568 bp, Homo sapiens
ggtgttaccaattaaactgaggagagagaaaaccctagattacatgagagttttgtgggtaagtggagttgaccttcctgggagagttttcttccagaaccacacaaatcagcacacggggaggagacttttccacttgtcttttaagccgtttgtgtaaacttttatctatctgtatgtggtccggaaagagtttgatggagcaggtgcatagaaacctcaaaaacagcaatctcagagttaataaattttccttcttaggggggctgggagatcatggagtgtcacaaaggccctcatattataggtaaaaacaacagctaacacttacgtatacctacagtgtgctgggtgctagctcatgtattctacgtacattggtttattaatttttattttattttattttttttagatagagtctcactcagttgcccaggstggagcacagtggccatgatctcagctcactgcaacctccacctcccaggttcaagtgattctcctgcctcagcctcccgaatagctgggattacaggcatgtgccaccatgcctgtctaagattgg

SEQ ID NO: 185889 - DNA, 473 bp, Homo sapiens
tcagtgtggagtatcacactgcaatcctagcagtaaaaaaacatagttttgtatctatttgcagaaactaagactcagtcaaagcacttagttaatatgatatacagaattaagaagaggttatgattattcctatttataatgtccaaagtcattccagtatgatgtcttcacatctttaartgtgatctggatctatacaggggagacattttctccacattacaaagcatattgtaccagaaatgtctggaaccctggtggtctccattaatcttcaccacaaagtacaaaagaacacattgatccttcaatgaaaataatcccctggtcttggaaaacatcagagtcaccaaaagcaaaatcaagaaacaacacataatggggttttggaaagggaagaacaaagattcaatcaatacgaattgctcatcttaaacaaaatctactgtgcctatacccatatttaactc

SEQ ID NO: 185890 - DNA, 516 bp, Homo sapiens
gctcatgactataatcccagcattttgggaggctgaggcagggggatctcttgaggtctggagttcaagatcaccctgaccaacatagtgaaaccctgtctctgctaaaaatacaaaaattagccaggtgtggkggcatgcatctgtagtcccagctactgaggaggctgaggtgggagaatcgcttgaaccgggaggcaaaggttgcagtgagccgagattctgccgctgaactccatccagcctgggtgacagagtgagaccctttctcaaaaaaaaaaaaaaaagtttaggaaataggttagaaaagaacagtttgaaaataggagaaaagagataagaaaattaaagggggcaatccagacagtcacatgtctgaattcctaaagaaaagacaaagaaagtggaggggagaaaatcatcagcaaaaccatttgagaaagatttcccagaaccaaaggctaccagttgccaggttggaaaggcccatcaaaacaatggaaaaaaagacctgtt

SEQ ID NO: 185891 - DNA, 516 bp, Homo sapiens
gctcatgactataatcccagcattttgggaggctgaggcagggggatctcttgaggtctggagttcaagatcaccctgaccaacatagtgaaaccctgtctctgctaaaaatacaaaaattagccaggtgtggtggcatgcatctgtagtcccagctactgaggaggctgaggtgggagaatcrcttgaaccgggaggcaaaggttgcagtgagccgagattctgccgctgaactccatccagcctgggtgacagagtgagaccctttctcaaaaaaaaaaaaaaaagtttaggaaataggttagaaaagaacagtttgaaaataggagaaaagagataagaaaattaaagggggcaatccagacagtcacatgtctgaattcctaaagaaaagacaaagaaagtggaggggagaaaatcatcagcaaaaccatttgagaaagatttcccagaaccaaaggctaccagttgccaggttggaaaggcccatcaaaacaatggaaaaaaagacctgtt

SEQ ID NO: 185892 - DNA, 619 bp, Homo sapiens
tgcccaggacgctctcttatgtgtcacaagattcataggaatgcaaatctataaagtaaacttcaattctaatttcaggatttctcaaaaatataaatttgtttaaataatgtacttgcattcaaatactgttttcttcaacaatcttttatgtgtcggatactagtctgggcccaagatttataaagggattagtggcttgggtattagctttccaatattttcaaatcaaatccaattttaggttccctgcaaccttgactgtgttacattcttcaagaattttytcagatatcatcttcacagtgatgtcaatcataaccacctctgtgttaggccgtccttgcattgcagcgtacggtggctcacgcctgtaatcccagcactttgggaggccaaggtgggtggatcacgaggtcaggagatcaagaccatcatggctaactcagtgaaaccccgtccctactaaaaatacaaaaaattagccgggtgtggtggcaggcgcctgtagtcccagctactcgggaggctgaggcaggagaatggcgtgaacctgggaggcggaggttgcagtgagtcgagatcgcaccactgcacttcagcctaggtgacagagcaa

SEQ ID NO: 185893 - DNA, 546 bp, Homo sapiens
gtggttcaaggaagggatagttacatttaaaaatttttttgtttgaaataatttcaaacagaaaagttggaagarctgtgcaaagaacccctgtttactctttgctgctattcttcaagtgttaacattttactacttttgctctgtattcctcctcctatttctttttttattaataggctttaagaacagctgtagatttacagaaaaattgagcagctagtacataaggttcaaatacaccccccagtttcctctattagtaacatcttacatgagtatagtacatttgttacatctgatgaaccattattgatacactgttattaactaaagtccatagcttgttcagatgtccatagtttttacttaatgtcctttttctctttccccatcccatccaagataccacacttatcatgtctctttgagttccttttagctatgacagtttctcagactttccttgcttttgatgaccttggcaggcttttaaaactatttttatttttatatatttcttagagatggagttttactatgtca

SEQ ID NO: 185894 - DNA, 546 bp, Homo sapiens
gtggttcaaggaagggatagttacatttaaaaatttttttgtttgaaataatttcaaacagaaaagttggaagaactgtgcaaagaacccctgtttactctttgctgctattcttcaagtgttaacattttactacttttgctctgtattcctcctcctatttctttttttattaataggctttaagaacagctgtagatttacagaaaaattgagcagctagtacataaggttcaaatacaccccccagtttcctctattagtaacatcttacatgagtatagtacatttgttacatctgatgaaccattattgatacactgttattaactaaagtccatagcttgttcagatgtccwtagtttttacttaatgtcctttttctctttccccatcccatccaagataccacacttatcatgtctctttgagttccttttagctatgacagtttctcagactttccttgcttttgatgaccttggcaggcttttaaaactatttttatttttatatatttcttagagatggagttttactatgtca

SEQ ID NO: 185895 - DNA, 623 bp, Homo sapiens
ctccatggctaagaacaaagtgtctgtggtgttgaaagagtttgatgaccttggggtgaccccatggaatagactctagagggagtctagagtctcactgctgcccagtgagaaggtacttggtgaacttcattcaccctggtgaagctgtcctggctgatgatctcgaggagcctataatgatcagtaagggtctcctcatcagcagagatggtcgtaaggccctgccacatggtaaccttctagctacaaatcctaaytaggaatgctaaccaagaatgctacctataaaaacgttgctaactgtgaaaacgaaagacacagctggagttgctctgcacactttcgtgtgtgacctatggatcactccagtgcctgtgactatgtgcccggccaacttcacctggtctgtagctgggtgctggataatggcaccaggaaccacctctgctgacctcttggctatgtttacttccctctgtgttggtgtcattcttgggtgggctttcccttcaaggtgacaagatggcaccaaccattctagcaacctaacagaaatagagcttctgttcccccagggttccaacccggaggtctgacctttggcacccgactggttacgt

SEQ ID NO: 185896 - DNA, 400 bp, Homo sapiens
acatcatgcttccaaacgcctcacgctttgcttgagtgtttaagccacactggattacaaaggcagcctggagaagaaccgcaggtgcggtgacggtctccaggccaagtgaactgagtttagaatttcccatccagagtccacaacgggctgcccgttcggcctgtgattcttttccacacaaccactatcaacatacgggtcaaagtcctcaggggttggggggcgggaaccaggyagaattaactaggaggcccagaagagcccttcccaataccaacccttcccacaaaccagcaatggtatgtgcgacctgtgaggccggtgagcatccacctagcacactctaaatcctgcccccttgtcttcaaataactgcttaatgtctgagcacagggca

SEQ ID NO: 185897 - DNA, 458 bp, Homo sapiens
ttcattaatgttatggtgatgaatctttcataaacaatacttaccattgattgtgcttttcttagcctagttctgtcctgcaatttatttttcttatcatgtgactgtcggctgaagtctggggtyatttggtttctttttcttcttctgtaaattggaaagcagtgggaaaattacaaagtatctttttaaaactcaggtggtttgcatagctatttgtctgtttgagtttgttgttcctgtgatttaaaagattgtctccacttaactggaaataagccaaatgtctatcaatagagaactggttgcatcaactcctgcatctccacacaatgcagtactatgagctgcaaatggaaagcaggatgtttctatattcaactgtggaaggatctccaggatatactgttacattaagaaagaagggtggatgagacggtatgtactgggtgctgcca

SEQ ID NO: 185898 - DNA, 542 bp, Homo sapiens
aagttcttggtcagttctacaaaattctacatctaattgctaaagagcccacttcatgaagtcttgaagggctccccctctcaaaaaactccttgactggcttccaaacaggaaaggtcctcacattcctagatacaagcytttgcaagagccgcacaggctctgtctccaaagagaagccctcagatgggctgccaaacctgacaaacgagtcactggttcccagctcccccaggatcccagagaggagagaggggcctccacagggagaggagcagcacagagaggatcagggtgagtggctgcaggccctgttatcagaaagagagaaaagccagagccctctgcagaaaccagagcctgactctccctcccaggtacaggacatcccaatcaatgttgaagtgacactcatcagagccaggctgatgcatgcaacatacacccctctaagagtttctaattttttcaattcatttaattaactgcagctatctggacaaaaatcagaatagtgacatccttttcttaaggggcttgcc

SEQ ID NO: 185899 - DNA, 542 bp, Homo sapiens
aagttcttggtcagttctacaaaattctacatctaattgctaaagagcccacttcatgaagtcttgaagggctccccctctcaaaaaactccttgactggcttccaaacaggaaaggtcctcacattcctagatacaagcttttgcaagagccgcacaggctctgtctccaaagagaagccctcagatgggctgccaaaccygacaaacgagtcactggttcccagctcccccaggatcccagagaggagagaggggcctccacagggagaggagcagcacagagaggatcagggtgagtggctgcaggccctgttatcagaaagagagaaaagccagagccctctgcagaaaccagagcctgactctccctcccaggtacaggacatcccaatcaatgttgaagtgacactcatcagagccaggctgatgcatgcaacatacacccctctaagagtttctaattttttcaattcatttaattaactgcagctatctggacaaaaatcagaatagtgacatccttttcttaaggggcttgcc

SEQ ID NO: 185900 - DNA, 542 bp, Homo sapiens
aagttcttggtcagttctacaaaattctacatctaattgctaaagagcccacttcatgaagtcttgaagggctccccctctcaaaaaactccttgactggcttccaaacaggaaaggtcctcacattcctagatacaagcttttgcaagagccgcacaggctctgtctccaaagagaagccctcagatgggctgccaaacctgacaaacgagtcactggttcccagctcccccaggatcccagagaggagagaggggcctccacagggagaggagcagcacagagaggatcagggtgagtggctgcaggccctgttatcagaaagagagaaaagccagagccctctgcagaaaccagagcctgactctccctcccaggtacaggacatcccaatcaatgttgaagtgacactcatcagagccaggctgatgcatgcaacatacacccctctaagagtttctaattttttcaattcatttaattaactgcagctatctggmcaaaaatcagaatagtgacatccttttcttaaggggcttgcc

SEQ ID NO: 185901 - DNA, 499 bp, Homo sapiens
aggtggttctaatcccagcgctttgggaggccaaggtgggaggattgcttgagctcaggcattcaaggccagcctgggcaacatagcgagacctaatctctactaaaaatttaaaaaattagctgggtgtggtggtgtgcacccgtagacccagctayttgggaggctgaagtgggaggatcacttgagcccagggggttgaggctacagtgagccatgatcaatcacaccactatgctccagcctgggtgacagagggagaccctacctctaaataaataagtaattaagagtaaagttattttcctagtcaattgttttcttcctcaaatttgtctcacaactgtgagctcaaaggtcataaattatatagttcataatgtttgtcatactcttcctctgcaaatttaaatacgaattcacacgtgtatattttgaaatcatacttttctatcttctggaagacaagacagtagttaataagtatttatgatgttta

SEQ ID NO: 185902 - DNA, 499 bp, Homo sapiens
aggtggttctaatcccagcgctttgggaggccaaggtgggaggattgcttgagctcaggcattcaaggccagcctgggcaacatagcgagacctaatctctactaaaaatttaaaaaattagctgggtgtggtggtgtgcacccgtagacccagctatttgggaggctgaagtgggaggatcacttgagyccagggggttgaggctacagtgagccatgatcaatcacaccactatgctccagcctgggtgacagagggagaccctacctctaaataaataagtaattaagagtaaagttattttcctagtcaattgttttcttcctcaaatttgtctcacaactgtgagctcaaaggtcataaattatatagttcataatgtttgtcatactcttcctctgcaaatttaaatacgaattcacacgtgtatattttgaaatcatacttttctatcttctggaagacaagacagtagttaataagtatttatgatgttta

SEQ ID NO: 185903 - DNA, 499 bp, Homo sapiens
aggtggttctaatcccagcgctttgggaggccaaggtgggaggattgcttgagctcaggcattcaaggccagcctgggcaacatagcgagacctaatctctactaaaaatttaaaaaattagctgggtgtggtggtgtgcacccgtagacccagctatttgggaggctgaagtgggaggatcacttgagcccagggggttgaggctacagtgagccatgatcaatcacaccactatgctccagcctgggtgacagagggagaccctacctctaaataaataagtaattaagagtaaagttattttcctagtcaattgttttcttcctcaaatttgtctcacaactgtgagctcaaaggtcataaattatatagttcataatgtttgtcatactcttcctctgcaaatttaaatacgaattcrcacgtgtatattttgaaatcatacttttctatcttctggaagacaagacagtagttaataagtatttatgatgttta

SEQ ID NO: 185904 - DNA, 583 bp, Homo sapiens
tctctgactcggtgctagtggaagttttggctggcatttgctaagygcagcctgctgctctaaagtgagaacttggcattagattgcattatcacagttagtcctcagaattgccctgtggggagttcgagaccagcctgggcaacatagggagaccttgcctctataaacaattttaaaaattagccgggtgtggtggtgctcacctgtggtcctagctactcgggagactgaggtgggaggatcacttgagcccaagagttccaggctacagtgagccatgattgtaccactgcatagcctgagcaacagagagaaatattgtctgaaaaaaaaagttgtcctgtagggtaggtacaatcatccttcccattttacagagatggaaactgagcttggaaatacttagtgacttgtctagcaagggcaaagactgcaacaaagtcatgaagaaattagagaaagctgtagggtgacagagagtcaaaggcactgtccaggagtgtcactgctgttggggaagtctttgtgaggaaggaggggcttgagccaggcctggggtcaaagtctgagagggagaatg

SEQ ID NO: 185905 - DNA, 606 bp, Homo sapiens
gtcatctggctcaaccccaaaatgttgcactgaggtgagtgagcccagagagactgattaagtcagcatttatttctgtatttaggttttctttagcatgcaagggaacacagggtacttagattacctcaaagtaggagtctatgggtcacctcaaggtaaggacttgggaagtgagaaatacagtgacatagctrggcttcagggacactggatataattaggtcatcaggaggtaattagtgatcaggtcatcttgaagtctctttaatcaccggtggtctttactcactaccccattactttattattacagtgattcaattgctctactgtgactaatcatttttctttactgtccttctctttctctgctggttgtttacttactcatagtttcaactgctctcgggcttccactgtctttctagatatctttcagcatctgtccatactattagtgattatgatctttctacaaatcaaattcaaactcctccaccaccccaaaaagtctgatgggttcaggaagttaacacactgcatagatgctcctcctttgcccattgaaggatgccaggtcaggcaaattcacattttcaaagt

SEQ ID NO: 185906 - DNA, 606 bp, Homo sapiens
gtcatctggctcaaccccaaaatgttgcactgaggtgagtgagcccagagagactgattaagtcagcatttatttctgtatttaggttttctttagcatgcaagggaacacagggtacttagattacctcaaagtaggagtctatgggtcacctcaaggtaaggacttgggaagtgagaaatacagtgacatagctaggcttcagggacactggatataattaggtcatcaggaggtaattagtgatcaggtcatcttgaagtctctttaatcaccggtggtctttactcactaccccattactttattattacagtgattcaattgctctactgtgactaawcatttttctttactgtccttctctttctctgctggttgtttacttactcatagtttcaactgctctcgggcttccactgtctttctagatatctttcagcatctgtccatactattagtgattatgatctttctacaaatcaaattcaaactcctccaccaccccaaaaagtctgatgggttcaggaagttaacacactgcatagatgctcctcctttgcccattgaaggatgccaggtcaggcaaattcacattttcaaagt

SEQ ID NO: 185907 - DNA, 606 bp, Homo sapiens
gtcatctggctcaaccccaaaatgttgcactgaggtgagtgagcccagagagactgattaagtcagcatttatttctgtatttaggttttctttagcatgcaagggaacacagggtacttagattacctcaaagtaggagtctatgggtcacctcaaggtaaggacttgggaagtgagaaatacagtgacatagctaggcttcagggacactggatataattaggtcatcaggaggtaattagtgatcaggtcatcttgaagtctctttaatcaccggtggtctttactcactaccccattactttattattacagtgattcaattgctctactgtgactaatcatttttctttacygtccttctctttctctgctggttgtttacttactcatagtttcaactgctctcgggcttccactgtctttctagatatctttcagcatctgtccatactattagtgattatgatctttctacaaatcaaattcaaactcctccaccaccccaaaaagtctgatgggttcaggaagttaacacactgcatagatgctcctcctttgcccattgaaggatgccaggtcaggcaaattcacattttcaaagt

SEQ ID NO: 185908 - DNA, 218 bp, Homo sapiens
gggggctcctggggatgaggtgttcccagcatctggggaggaggaaagcatcccagaggctcttgctccaggaatgagtgcttgtgcttcaaccctacttgatctgccarggctctcccactttgcaggactgttggtcctggctgtgccaagcactctgtccttttaaaacccctcccttggcatccacctagaccacctccagatcctcccatgct

SEQ ID NO: 185909 - DNA, 546 bp, Homo sapiens
ctgatctcaaagagatgttctttccacatactggccactccctctgcctggccccccagaggttctgtgaatgcactctgtcccatagaacaccaggagttgggatgaggaggacacttttaggaagcaaatcagtttttgtttttgtttttttttttagatatttgaaaactatatataatcaactgaattgaaatgtgaaacagaaaacaataaataagtcactaactttatccacttctcctggtaacccaggggagatgaaacacacccaccagctgaggggccatctggccagatgacactgcgtctggacatakacctgtctcaccactgacctcacaatggcttctgcagggtgctggaagccctcagcaccatttatgtacttctgtaatgtgtataaatcactccccaccagcttaccttttttcctcttcctattcctctggatgccctcgtaaaattttaaaagctttgcatgtcagactgcacttcccaaggctctaaaactggagactggatttgtacctgctgtttcatggt

SEQ ID NO: 185910 - DNA, 431 bp, Homo sapiens
accccaatttactaattcttagttgtaccaacttacataagcttctttctcagacacggtttccaaatttgattttcacaccaacccttatgaagaaggcatatcagaaaactaagagttagtgagagtatggctaagccaacataatactaataatacgaagctgatttagctctcattccatgccaggcatcatgtgttaatmtacacctaaacttataccagctctgtgagggaaatgccatgcttgtcccattttatagataaggaaaccaaggtctaaaaagagtaagcccttttttggtaccatgtatgtcccttaagtgtttcctgaggcaggcagagaaatccttcccactttacagatgagaagctgagacataaagaggaagataaacaatgggctcagggtcacccaataaggagtcagt

SEQ ID NO: 185911 - DNA, 552 bp, Homo sapiens
agattggagtggatgatggggtgcagggtaatcagaaagaggcagcgcagttaggaagctgtaatcatgatccaagcagaaggtcaggatggtttggaccagacaacagccacgggaatggagagagagaggaagaggtggatgagagctttgaagctccaactaccctggtggcagcaatactgggtcactagccagctattccaattattcacagaaatcaattccattccacagaggctyagataaaacttgtgttgccagccgacagtaatggatggggagcttagagtaaggagataagaggaggcccagagtgtggggtgatcaggtggggctttgcagggttggggaggagcggtaagaggttatcaaaacatcccttcaaatagcaaaggctcagagctggcccgcccagttgtgatctgtgacgggacaagtaggctcctttccaggcctggagctgtgagactcaggcctagtggtccttgggcattattcccaagcggaataatggggaagctagatcagtcttgctgccctggggcttat

SEQ ID NO: 185912 - DNA, 357 bp, Homo sapiens
accctcatcctcctccatctcagtttgcactgcagtcctccagtacctggaatgggcccttcttttttgcctccaggccttccttgctgtgctctgtgtctgggaccccacccctttgcctaggacacttgctgttcctttgtctggccagtcagataatcyttcaggtgtaagtttagatgccacatcctctgaaaaggctcccttgtcgccccttgtgccacaggcccatgtgatcccatctatcaacccaggctatagttgtctctgtttccagtcagcctgagagttcaccaagtcagaaactgagtatcttgtattcccagtgcccagcacaaggaattcgttctggaattc

SEQ ID NO: 185913 - DNA, 357 bp, Homo sapiens
accctcatcctcctccatctcagtttgcactgcagtcctccagtacctggaatgggcccttcttttttgcctccaggccttccttgctgtgctctgtgtctgggaccccacccctttgcctaggacacttgctgttcctttgtctggccagtcagataatccttcaggtgtaagtttagatgccacatcctctgaaaaggctcccttgtmgccccttgtgccacaggcccatgtgatcccatctatcaacccaggctatagttgtctctgtttccagtcagcctgagagttcaccaagtcagaaactgagtatcttgtattcccagtgcccagcacaaggaattcgttctggaattc

SEQ ID NO: 185914 - DNA, 481 bp, Homo sapiens
acctttcagcaagtcccaggcttgtgtgacatacacacctctcactgcactaccatgctgctgggagggacagaaggtctgggaacccccactggctttcctcatctgcttgactgcaccctccctctctgtcctctccccgccccagagtcctacacacagcgctagcttcctctccctgtttcctccctgcagagcccatttaaagccagagcctttgcagatattgtgaccctaagggtcctgtcaccagttctgcagcaatctcagaagggagtggatgttagggaaaagatctccctgcaaagagcacatgcaggacatccatggccaaatacccacagtcagaacttcccagcctgggtttcctcagctgagtgatttttyttttttttttcctgaaggatcagataatacacatctaggaggaaatgggcatgaagactgattggttcacgctaacacaaacacaggctgctat

SEQ ID NO: 185915 - DNA, 476 bp, Homo sapiens
ttcttctctctgggattgagaatgggaaatggagaagagagatctcccactttccttttactggaatcatgtgtccctgtctaaaaygatggtgttggactggattcagttcaactccagcaggaagcacacaacatttgagacctgtggggtgaagacagtgcacacagccggagagaaggtcttggctgagaaccagaggactcatttcttctggaagcagggatttgagatagtttcttggcaggaggaggataagaggttgactttaatgggttctgaatctcatacacagaaaagtaagagtgtgtgcatgagacagacagagacagagacagagaggggcagactgacagaggggtgtgaattaggaggaagaaacagcttagggaaagatgagtggcatgcaggaaagagctttccaggctagggtgcctgggataacggtgatgaggaagagaacgaggatcacggag

SEQ ID NO: 185916 - DNA, 616 bp, Homo sapiens
cacctggttcaagaaaaagtgaactacattgagaactgggaaacctgacttccaatttacctggacactgcctagctatgtgaacctggctaagtcatttcacagtctcagttctccatgtataaaccaggctagtaatcaccttgcctacctctccaggctgtctgttacaaggttgaaaggagaggtgtgagaaggtactgatgagctacgctcacttgcctctgtctccttggaagctgatggcttggmagctcagaggcccagccacttgggtttgagtcccttctctgccacatactatctgtgtgaccctgggcaagtaagttcacctctctgtgcttcagtttcctcatctgcaaaaaaggaataattatagaacttagccaccaggttttagtgtgaggattcaatgaattaacacttgtgaagttcttggaacaatgcctgggctattataagtgccaataaatgttagtcaatggaataccattgtcaaattaatacttattaacttagctttgcctggtgcaacacaggagttcagtaaatgtttgtctaatgaatgactaaacactattggaagaggagggtgatgcaatcagatttactcaca

SEQ ID NO: 185917 - DNA, 584 bp, Homo sapiens
ggacaggttatagcatttgatttttcccaagggcaaggtagtttaatacactgaagcaaggctgaatcctgtgtcaatgctggggtttgcagactctgagttcatctgaatcacctggagggcttgttagaagacaaaytgctgggtccactgtcataatttctatgttagatctggggcaggctccaaaatttgcatttttatcaaattccttggtgatactgatgctgccggtcagggattctaaaggcttctattagtcttagactggcaaaactactcacttagtgggaactctcctcatagagtgggggcttctctgaatcataaattaggaaaagcaagggaggtggtaagcttcctttgtaatctttgagtattttctcttcctatcgtaatttgctttaaaagatgtacaaacatccagggtgggccccaccgcagattgcattggatttaagtaaataagtgtttctatatcctcaaaaataagtaaaaacggaagagtgaaagaaatacaaaatatctctttgttatagcagaatttcagaatctctatataatgatcagaacacagagcaaga

SEQ ID NO: 185918 - DNA, 503 bp, Homo sapiens
gaattcgtttatgagttctaatagtttttcggtggagtcttyaggtttttccaaatagaagatcatatagtctgcaacatggataatttgacctcttcctttcctatttggatgtcctttatttctctcccttgtctgattgctgtagccaggacttccagtactgtgttgaataaaagtggtgaaagtggacatccttgtaatgttacagatcttagaggaaagattttcatattcagtatgatactagctgtgagtgtgtcatatatggcttttattatgttgaggtatgttccttctatactcagttgttttagggtttttattatgaagagatgctgaattttatcaaatgctttttcagcatgaattgaaatgatcatatggtttttacccttcattctattgatatgctgtatcaatcaatatgattgatttgcatatgttgaaccatccttgcatcccagggataaatcccacttggtcatgatgaatgatctttt

SEQ ID NO: 185919 - DNA, 486 bp, Homo sapiens
ctgtttcctggatacccttttcttctattttcttcatggagcacgttattcaatggctccctgagaaaagtttcctgagaggaaatttcataatatattgcatgtcttaaaatgttattctgggccaggtgcgatggcttatgcctataatcccagcactttgggaggccgagccagatggatgacttgagctcaggakttcgagaccagcttctgcaacatagcaaaaccccgtctttacaaaaatcacaaaaattagccagacattgtggcatgcacctgtagtcccagctacttgggggtgctaaggtaggaggatccattaagcccaggaagtagagtctctgaattgcgtttgcaaccactgcactctagcctggatgacaaagtgcgaccctgtctcaaaacaaacaaacaataaacaagcaaacaaaaatgttattctatcctcatgtttgattgagcattgggtttactacagaattc

SEQ ID NO: 185920 - DNA, 603 bp, Homo sapiens
ctgctgacaccttgagtttggacttcttgtctctaaacctgtgagacaacaaatttatagtattttaagccactcagtttttgtgttcttacagcagtcctaggcaattaaaaatacagcaaataatgaagatcaacacaaatacaaattaatcctattttttgtgccacacaaggcttcgtgtgcttaaaaaggacctatgtaaccttaaccacatttattttattttagtgaataccaggaaaggggctccgtacagatgtaacaaaacgtctaaaagctgcctgtaatttgaggggtggactcttggcagcaagaatgctggagagccaaatgagcaattccattcctgcccaggcttaggtaattatgaggcatatctggcagagtttgagtgkagctacttcttaagctctctgaggctactgtcgaaccttatcacatccaactccactcagctgcaaatactcagcacctggccagtaagagcctgtcctaacagtgcatggggaatctgttcctcagtaagaggtgggtctaaaggccaccttggtatccagcagtggagggagggtgggcgggcgggggagaagctggcaagca

SEQ ID NO: 185921 - DNA, 665 bp, Homo sapiens
tctgaaaaagcagcaagagcaggaagtaagagaatatgtgcctgtattttccatccctgacactgagttacctcctgttacaacagctcaggactatctatatgttttctctgagagagagaaagagagagagagagagagagagagagcctgttttcccagcatcctcaaatcaaaactctcagaaacgttacaacattcagaagcccttaaatacaacaagggaaggaattttttgtttgttttgttcattgctatatcacttggctggtatacagctagaacaaggtcggatgctcaataaatattttttgaattaaagaatacagttgaaattgtaatttaatattttaggtgcatgattccaaaaatagcatttttggctcctctggaaacctaagcagcatttctcatactgactccaggaccaaaaaatatatatatatacacatacatatatatatatatatatacacatatatatatacacacatatatatatatatayacatatacacacacacacacacacacacacacacacacacacatatatggccagtgatgatgagcattttttcatgtatctgttggctgcataaatgtcttcttttgattgcaaatcaaaacaacaatgagataccatctcacaccagttagaatgg

SEQ ID NO: 185922 - DNA, 609 bp, Homo sapiens
agtttccaaattctagaggaaccaggcagagagaaacaaacatgctccaaattttgtttgcaggagtataccttacttaattattaaaggccataaatagttcaaaataagtttcctcaactttgaaaaacaaaacaaggatcascaatgttttaagcaaaagtccagaaggttgctctaactttctgagtgcagtccattcagttaactcttgttttgcttgatattcatgaacatgccagttctttgtgagtcctgtatgtatttctctattccaatgttataatcttcaaagctattggaaacctgcatttgagaacacctgttaaagtccttaatatatcttgattataaaccatcttttgagaaggaacaaaccaagacaaaaattgtttgcaaattacaaaatttctagggtaattacactcaaaaacatgacgacaaagaagtttagttatctccatagcttacaataactttaccctcaattatgattgatagcatatattcagacaatagaattttagaaatcccatacaattttataaaatatattagtagtattcaccaaaatataacttaaagaagactggacattattttggcaat

SEQ ID NO: 185923 - DNA, 476 bp, Homo sapiens
taggaggcctgtattctgcagtgaaatttactctgatgttaataaatatatattagtttttacaggtcttctctcagcttacagcttatcaaagaactagacccattagaaatcttactttgcaacaatgaagtttgggaggaagattcwcatatttgttattaattcgctataaagcagtggagatgcagtagaaaggataggtttaggcatcaatcaactagatttaaatatttgctccaccatctactggtggtatgacctcaataaccctgttttctcatccataaaatgggaacgacagacttaccttgctattttccttctcatatacaagcatgcaaatgatatataaaaggcctaacaaggcaagaggcatgtattaagtgctcgttggatttatttttacttcttttttttttttttgagacggtgtcttgatctgtcacccaggctggagtgcagtggcgagatct

SEQ ID NO: 185924 - DNA, 476 bp, Homo sapiens
taggaggcctgtattctgcagtgaaatttactctgatgttaataaatatatattagtttttacaggtcttctctcagcttacagcttatcaaagaactagacccattagaaatcttactttgcaacaatgaagtttgggaggaagattcacatatttgttattaattcgctataaagcagtggagatgcagtagaaaggataggtttaggcatcaatcaactagatttaaatatttgctccaccatctactggtggtatgacctcaataaccctgttttctcatccataaaatgggaacgacagacttaccttgctattttccttctcatatacragcatgcaaatgatatataaaaggcctaacaaggcaagaggcatgtattaagtgctcgttggatttatttttacttcttttttttttttttgagacggtgtcttgatctgtcacccaggctggagtgcagtggcgagatct

SEQ ID NO: 185925 - DNA, 592 bp, Homo sapiens
tgctgacaagtgatcataacactttttgttatacagtatgtttaatatttatttttcttattaaaaagacaatgcaaccttgttgaagaaaaactaggaaaaaggtcagcaagaagagtaacataagatacccatgaccccactgtctaggggtaatcactgttaacagcttctgcgtatcaactcagctctcttctttttaataaatatatatacacttatccactacagtggcaccattcactacaaattggtttttcacctgatttttaaattatcagtctactacaaagttcttcccatgtcagtaaatatttgtcctcaatatggttttcaatgataaaaatattttatatgtgtaactatatwtgtagaatgttaaaatgcaggtctgaactatcagcacaaatgttgtaggtttaggaaattcatacatgctttcattcatttttttttcttctgtgttacattttaatgcaatttttaagaaaggatttagcccttccttaatcccttcacagctgcattttgactaacatagccacagctgatcaaggctgtgtgtattgttaacacatttgcctataaggta

SEQ ID NO: 185926 - DNA, 552 bp, Homo sapiens
cctactctttgaagctgacacaactgctctgtgccagaccatcaccatatttaggtctctcaaaacaattcaaattyctgagcacttgatggcttatgctagttcatcaaatattgggcccttcctggagaagaggctatatccctatgccagagcagaagtcagcatccagtattgcagctatccctctcagcaaatggctccttggaagcaaacctgccagtggtcattaggctccttacatacccagcaccaacccccaggactggctcaccaaaaagcagaccttggagaatagacagacttcttccagagcctgcaatttctttactaatgtctggggaaacctaaagggcttagaaaacttgctcctcaagagtcagcaacaggaagttcctgaaaaaccaagttatcaaaagtgtaacagccattccactactagttctttctccattgaaatggaaaaggttgaagatctagagcttcctgatcgagatgagatgaacctatcagattggctagtgactctccaggaatcccataagctgggga

SEQ ID NO: 185927 - DNA, 515 bp, Homo sapiens
accccatacatcaacttccttatttacttcacatacaacctttttctaaggtaattttctgcatgaaataatctctgtgtaagtaaacaatctgccaaagctatactttaaattactatcctatagatcccatcacactgaagtaaacattaggaaattactttccyatgtcttagccagaaattccaaaactgttaattgtagactctcacgaaggtctcaaagctatcacagggggtctgtgaatttaaagcacaaaaaagattgactatagaccaaaaaactaatgcttctcaaactttaatgtaatgctgtttttcaagtgtatgcactgatacaataaggtagaaatttatattcatagtgttttgtctatccttgtatttttttctttcaaagtctatataattttttgcctgagaaagggaccactattttttgagaaaggttaggaaacacatagctatgtaactttaatcacaggctattttatgacattatttttgtctattatt

SEQ ID NO: 185928 - DNA, 598 bp, Homo sapiens
aaatgttaatacttattttagctgagtggaaaaatacacatgatttttacatcatatattcttttattttttaaaaaaatttacaatgaatatatgtaacataatcagagtcaaaatgttattttacaaaagttaaagcaaattgaatatatcaacatataatctgtattaggctattttatgttgctataaaggaatacctgaggctgagtaatttataaagaaaagagatttaattggctcayggttctgcagactgcacaagaagcatagtgccggcatctgcttctggtgaggcttcatgaagcttcactcatggaagtggaagagagagcaagcacgtcacatgacgagacaaggagcgagaaagagaagtgggggtaggttccaggatcttttcaacaccagatagactgtaaactgattatggcagggcaggccctaagccattcatgaggaatctgcccctatgacccaaacacctcccaggatgcctgacctccaattttggggatcacatttcaacatgagatttggaggggacaagtattcaagccatatcataatcaatcactcacatcttgcaagaaatctcttg

SEQ ID NO: 185929 - DNA, 580 bp, Homo sapiens
ttattttagctgagtggaaaaatacacatgatttttacatcatatattcttttattttttaaaaaaatttacaatgaatatatgtaacataatcagagtcaaaatgttattttacaaaagttaaagcaaattgaatatatcaacatataatctgtattaggctattttatgttgctataaaggaatacctgaggctgagtaatttataaagaaaagagatttaattggctcacggttctgcagactgcacaagaagcatagtgccggcatctgcttctggtgaggcttcatgaagcttcactcatggaagtggaagrgagagcaagcacgtcacatgacgagacaaggagcgagaaagagaagtgggggtaggttccaggatcttttcaacaccagatagactgtaaactgattatggcagggcaggccctaagccattcatgaggaatctgcccctatgacccaaacacctcccaggatgcctgacctccaattttggggatcacatttcaacatgagatttggaggggacaagtattcaagccatatcataatcaatcactcacatcttgcaagaaat

SEQ ID NO: 185930 - DNA, 540 bp, Homo sapiens
tatggtagctggtcttcaaagagtgcctcaatgaaccacatctcttgatattcacagccttgtatcatgccctcctgtgttgaatctgagctggtcctctgactcccttgaagcaatggaatatggcaaaaggggtgctgtgccagttatggatccaagatggatccaagccctaagaagacctggtaactttcacttttgggagccttaatctgcctcgtatgaagtgtggctgaacttaccaatttggaagggagaagccctgagagtacatgaagagagaagatgctcagctatcttagtgttcttgccatctctgtcaaggtaccaagtgtgtgagtgaaccatcttggattttccagcccagctgaggtcttaggggactgccttaccagccaacatcctgtggagcagaagaaccacagagcagaacctgcctaacccacagaatyatgagacataatagaatggtggttgttttgtcccagtaaatcttagaatgttttgcttatagcaatagacaaccaatgcagtgagaga

SEQ ID NO: 185931 - DNA, 608 bp, Homo sapiens
aacagaccaggatgaacgtgctaactcaaaatttcttttctttttttttttttttttttctgaaacagggtctggttctgtcrcccaggcgctgaagtgcagtggcatagtcacggctcactgcagcctcaacctcccaggctcaagtgatcctcccaactcagcctcgtagctgagattacaggcacatgccaccatgcctggttaattttttaaaacgcttttgtagagacaaggtctccctatgttgcccaggcttgtctcaaactcctgggctcaagcgatccgcccacctcagcctcccaaagtgctgggattacagagatgagccacagtgcccagccctcaaaatttcatctctttcccaaaatggactataagaccagaatgtattaaaaattatatttttcaaaattaacaaagtgaattgttgaagggaatatctctgcaaaatcaggacctgtggaatactccctggaaataagacattcatgaccacacattagagggggcaagcaacatgttttatttaaagaataggattgtcctttctttgcactgaatttttacactgaattccactgaagttttacagtggaaacagagaa

SEQ ID NO: 185932 - DNA, 431 bp, Homo sapiens
tttgttataaaacaaacaaagggtgcatcttcatgcaatggtaaaatggtttctaggggaaggctaacttattattattattgcaaattattatggtggtaagatatggttgtatcagatctaccagtctgctaacatcacacagatgaatggcaagactaaaccaattgaaacctaatcaaaatagttctaagaactgttttaactgagaatgttatttacattacacrttgcggtgccatagggcctgtcatctgtgtttcctattgtctcattacaacagattgggaagcattgacaaggagcctgacccacacagcagtaatgggcactattgtgggtcttggcccgtaacctcaaatttaatgatttgatcattcaattacagcagattcatggcaacccagttatctttgagtggttgacccata

SEQ ID NO: 185933 - DNA, 578 bp, Homo sapiens
cttttaataagccatccactataaaccccaaaagagaactgatctttctgggaaaatcaaagaatggcctacaaaggacttcaacttcctgaacaaaatgtatgtgctaattttcgtcgatcttcttcytatattcatgcctgacaagattgtcatagtattctattgacagaaaaatgatgattttgaagtctatttctttcccataatttcttttgttgatagtgtttgttttccagtcatagcaacttgagaccctgtgagtgtggaggccatagtacagagcagccatcagctttatccacaccttcccaagtcaaccacttctttcaactcccaaaattattaactaagtgcctagacatagaaggatgtgaaacatacattttaacttaataaaataatacaatggaaatgaatctaattgaaacaaatacatttaacttatgccacaaacacagatttttaaatccaggaagacctggagttaattccttattctaacactaattatctgtgcagtggtggacccattaattaatctcaaggcctcagtttcctaacgtgtgaaggcgaga

SEQ ID NO: 185934 - DNA, 578 bp, Homo sapiens
cttttaataagccatccactataaaccccaaaagagaactgatctttctgggaaaatcaaagaatggcctacaaaggacttcaacttcctgaacaaaatgtatgtgctaattttcgtcgatcttcttcctatattcatgcctgacaagattgtcatagtattctattgacagaaaaatgatgattttgaagtctatttctttcccatamtttcttttgttgatagtgtttgttttccagtcatagcaacttgagaccctgtgagtgtggaggccatagtacagagcagccatcagctttatccacaccttcccaagtcaaccacttctttcaactcccaaaattattaactaagtgcctagacatagaaggatgtgaaacatacattttaacttaataaaataatacaatggaaatgaatctaattgaaacaaatacatttaacttatgccacaaacacagatttttaaatccaggaagacctggagttaattccttattctaacactaattatctgtgcagtggtggacccattaattaatctcaaggcctcagtttcctaacgtgtgaaggcgaga

SEQ ID NO: 185935 - DNA, 563 bp, Homo sapiens
attatttaccaagcacaatgctttgcattgaagatgcatatatgaatatgttgtgttccttctcatgaaaaacctcagaatctactgagagagaatcacayacagatacatgatgatagattaagtcttttagggtattaagtacgaactacttaatggaaacagaatttctgcttttggaaacagaaataagggagtgattaggcaagtaggaggcgtaagaaaagtatggggcactgtcaggggctacagggagaaagtgaactttaagctggtattattaccggataggtaagtttaagaaagaacaccctccacccacaggagacattgatgattcttatttttgaaaagttattgcttactctagaaatgtcaccatgttttgctagatgcctatgactgggatgtattgacaataaatattaaaagtcgattactttatcaagttatgttctctgacaaagtaatgaccttaagaaaaactagaaaagtgactaaatatccaggtttataagcccttatctcctccacaaacatattgattgggtttttaggtgatt

SEQ ID NO: 185936 - DNA, 563 bp, Homo sapiens
attatttaccaagcacaatgctttgcattgaagatgcatatatgaatatgttgtgttccttctcatgaaaaacctcagaatctactgagagagaatcacacacagatacatgatgatagattaagtcttttagggtattaagtacgaactacttaatggaaacagaatttctgcttttggaaacagaaataagggagtgattaggcaagtaggaggcstaagaaaagtatggggcactgtcaggggctacagggagaaagtgaactttaagctggtattattaccggataggtaagtttaagaaagaacaccctccacccacaggagacattgatgattcttatttttgaaaagttattgcttactctagaaatgtcaccatgttttgctagatgcctatgactgggatgtattgacaataaatattaaaagtcgattactttatcaagttatgttctctgacaaagtaatgaccttaagaaaaactagaaaagtgactaaatatccaggtttataagcccttatctcctccacaaacatattgattgggtttttaggtgatt

SEQ ID NO: 185937 - DNA, 563 bp, Homo sapiens
attatttaccaagcacaatgctttgcattgaagatgcatatatgaatatgttgtgttccttctcatgaaaaacctcagaatctactgagagagaatcacacacagatacatgatgatagattaagtcttttagggtattaagtacgaactacttaatggaaacagaatttctgcttttggaaacagaaataagggagtgattaggcaagtaggaggcgtaagaaaagtatggggcactgtcaggggctacagggagaaagtgaactttaagctggtattattaccggataggtaagtttaagaaagaacaccctccacccacaggagacattgatgattcttatttttgaaaagttattgcttactctagaaatgtcaccatgttttgctagatgcctatgactgggwtgtattgacaataaatattaaaagtcgattactttatcaagttatgttctctgacaaagtaatgaccttaagaaaaactagaaaagtgactaaatatccaggtttataagcccttatctcctccacaaacatattgattgggtttttaggtgatt

SEQ ID NO: 185938 - DNA, 653 bp, Homo sapiens
tgatcagcatttgtgaaatagtcagtgcttaatacataggaacttttatgattgactttttatgaatttagttgatgcttttgaataagtgttaatttcctttcttctttatcctggaattcttagtggcttataagttggtgcaacagcagccacagtggcaggttgagaaaggctaatttcatcccataattatctaggaaaaggaaggaaaataccatggggattgctgggaaatagagagatttttgtttcmtatctgtgctatctttctttgtctctgctcccttgcaatccctgggagtatttctgcacaggaatgtctcaagatatataaaacctgaaaagtatgaaaccaactctttcctctctgttacagatgggggatgagaggagagattctgctttattttgtgggagccgaagagtatcattaatctaattgttctgcacataatctctactctacaccccatggagtactaatgagatctcggtccttctctggaggcctctgctttctcatctgaaaaatgaaggggttggaccaggtgatctctaagggtcccttctaaatttaacagtctgagttgaagaaaagctttgagcaatttagcagaagcctaaacaaaaaagtcagggaaaaaataccc

SEQ ID NO: 185939 - DNA, 578 bp, Homo sapiens
gtaggaattataagctatgagaatttctcaaatatgctgtgagtatagcctctaacatttacaataaaagccattatttaactatttaacaaatgcaatattataaaacaccccattcttttaaattcttaggttgtaaaaattaagggccatatctatgtagtatttgtcatatagcatcaagtacgataccacacataattaagtgctcaatagtgctttttgatgagcaggataataatgacttattaaacaasgtctatcaatctcaatggaatggagaaagtgatgggtgtttgaacgctaatagatttctgagctatgagagatacgtaaacactgtccacattcaggcctttaaaaacattatttattttagtttgaatttattttatctattccttgttttttttccttcatagaattgcatacttttagtctgagaaaaaaggaaatgcatttttatctcactctattattaactgttcatactgtatgttaaaattttggtctatcttttgccttttttgttggaattattcagaaaaactcagcttggcttttgttagattcttaca

SEQ ID NO: 185940 - DNA, 578 bp, Homo sapiens
gtaggaattataagctatgagaatttctcaaatatgctgtgagtatagcctctaacatttacaataaaagccattatttaactatttaacaaatgcaatattataaaacaccccattcttttaaattcttaggttgtaaaaattaagggccatatctatgtagtatttgtcatatagcatcaagtacgataccacacataattaagtgctcaatagtgctttttgatgagcaggataataatgacttattaaacaacgtctatcaatctcaatggaatggagaaagtgatgggtgtttgaacgctaatagatttctgagctatgagagataygtaaacactgtccacattcaggcctttaaaaacattatttattttagtttgaatttattttatctattccttgttttttttccttcatagaattgcatacttttagtctgagaaaaaaggaaatgcatttttatctcactctattattaactgttcatactgtatgttaaaattttggtctatcttttgccttttttgttggaattattcagaaaaactcagcttggcttttgttagattcttaca

SEQ ID NO: 185941 - DNA, 529 bp, Homo sapiens
gcttttcaaataactgacacatttggaaatttttggaacctctcctcggtaaataatgttgtagagagcaaactgaggcagaggaagtaccccacacagactgatgtaaatccacatcaaagttctgccttcaaatgaagtggcattcctattcaaatgtaaagctttatatgcataaaaattaggtgatcaccagaggaaaataaagtaattttcaaaatctaatttaattcacttaataagaccataaaccaaagaaaatgaaagatgccaaggaaaagagaagatatataccaaccaataacaggtttcatttcctactaagaaaaaaaaaaaaagagtgctcagtaagatttgaacagagaatgaggccaattcattttgatcctgtggcaatactttgaagcttactttttaacctactctattttacatttccagatgytatgaatggcgatgtatgcagaaagccagaccaatgggaatttgagtatttcattttcccaactatagtgatgatttggatctt

SEQ ID NO: 185942 - DNA, 580 bp, Homo sapiens
acccaaacctggtctcctgattccttccaacctcaaaatcttctcagcttcatcctagaccttatgccctaatatacttgatcaaagtacagagtargaaaggtccaggagtaaaaatcataccccaatactctgcaaatataaaagttcctttgactgcaaacaggcatgagagacttttttggggtgacaaaaatgtcctaaaatgggattgtgatgatgactgcacaactctgtaaacttactaaaaatcttggaattatatacttataatagttcatttttattctagacaaactatactataataaatttcttttagaaaaaacaaatctttccaacatatgatattatagactaatgattatgattctggaataagaatacaaaaaaaacagaaggtatatatacaagccattttatttttttccatgttaaatctgacaatactttaagagagtgcctaataaagccaatattttatactgtatttatcctaataatttaaatctcctcctctatcactttaatagataataatcattgggtacatatatgctatgggcctagcattacgtta

SEQ ID NO: 185943 - DNA, 594 bp, Homo sapiens
ctctttgtatcttctaagaccactacggttgttaattctaacaaaaatttcacaatggtaggtcataaattggattttctattttactgaaaacatgacggcatgaagatagtttgatactcatgccatctgatgatttacaaacatataaatgtgtcattatgtacattgtgaagttatgtaaatagataaattaaggatacacatgtataaacacaaatgtrtattttagtatatgcaatttcccattttaatgtatgaaaaagttttcctataaatcccacacatttctaaaatatttttttgaaatgtgtatactgaccaaatatgatttactcacaattcaccactgaatgaatgattagtagcatttctgttagctaatgcctcagtttcaatattctatttgtaaatcatgggcctatttatgatacttttaaaataaataccgaaattccttttgatattttccaaaaatattttgttaatatttgtttttattttattttcctttcttttaaaaatttatttaatgaaatactgctttagttaatgttttacattctaattgaaaaatataaagtggccaggcgt

SEQ ID NO: 185944 - DNA, 474 bp, Homo sapiens
catggacataattgatattagcttccctatcctactccacacctctgtggcagggctacatccctgtatgtgttttaaaaaacttttcttactatctatccaaccatccatttcactcgtggcagctgagggaggggaccagaagaccagcactggacactgggctgcacgcagtcttgcccacactatcaactgctgtaggcacaygtagagccagatttcccagacagtagatcatttctgccgacatttttttcgttcataccatgaagtcaaatggttctgtacacgtagtcttccaccaagaggtgtcaagacaaacctgtctaccagtgtgtcactaaccttgtgttatctttgagaatttcccaagttcaaaggtaaaacccacttgtctccctataaaaggatgctatgtaaatggcttccaatatgtatcttcatcaaaatctctatttctaggtgtgaatagaa

SEQ ID NO: 185945 - DNA, 564 bp, Homo sapiens
gatctgggtcctgagaaagatgccaagtctttggtaactctggacctccaggagatataataatgaaacctaatgaaacaaaatgggagaagaaaggcagcttgggggtgaagccractaaagcactccattcccagagtcaagttcccctattcaagggccccacaaggaaaactactgtactgatgtgtgcccccaaccacacagactccacatccaggcctcttcaaaagcaaggccttctgggtgagcagccacccacatctacctgtactaatcatacagttctgcactcgtgaaaataaacaaacaaaagagcatctaacacccagggaaatccaaaagaataggaggacaaagaccaggatgtaccacaaaaacaaaaaacactgactcctagtggagtcatttctcctatggagaaaacagacttttaaaatatttaattgatatcctaaaaaatattcaagaagacattttatccttaatataaggataagctgccacaaaaaaggaataatccaagagcttaaaaaattagaaatttgatggtcaacttaaaat

SEQ ID NO: 185946 - DNA, 564 bp, Homo sapiens
gatctgggtcctgagaaagatgccaagtctttggtaactctggacctccaggagatataataatgaaacctaatgaaacaaaatgggagaagaaaggcagcttgggggtgaagccgactaaagcactccattcccagagtcaagttcccctattcaagggccccacaaggaaaactactgtactgatgtgtgcccccaaccacacagactccacatccaggcctcttcaaaagcaaggccttctgggtgagcagccacccacatctacctgtactaatcatacagttctgcactcgtgaaaataaacaaacaaaagagcatctaacacccagggaaatccaaaagaataggaggacaaagaccaggatgtaccacaaaaacaaaaaacactgactcctartggagtcatttctcctatggagaaaacagacttttaaaatatttaattgatatcctaaaaaatattcaagaagacattttatccttaatataaggataagctgccacaaaaaaggaataatccaagagcttaaaaaattagaaatttgatggtcaacttaaaat

SEQ ID NO: 185947 - DNA, 570 bp, Homo sapiens
gacctgcagtgtccaattgggcagcctttaaaacatggctagcctgagcaaaagactgaatgtaaattatttgtcgataatcgttttggttattgaaaaactttttagtgtgtttggaacaacgtaagtaagtgaatctacttttttaactgtaagttttatgaaatctacgtagatagcaattatctctgatgaaatgttaccatacaaaaagataggctatgaataaaaaagaatgtaaacacctcaattttttacaagaattttatgttgaaatgataccattctgaatatagcatgttgaattaaaggtattactgaagttaatttcaccttttttaactttttgaaagtggctactaaaaattttaaagttgcatctatggtttgcrtcatacttctactggaaagcacagctctaggttcttatttctcatacccgcaatgttcatgtttttcatctaaacacattgtatttgttactgttcatttgttagcatataacaaaagccaactctggatagcttaataaaaacaaattgcaagatacacagacaacaacagcaagca

SEQ ID NO: 185948 - DNA, 570 bp, Homo sapiens
gacctgcagtgtccaattgggcagcctttaaaacatggctagcctgagcaaaagactgaatgtaaattatttgtcgataatcgttttggttattgaaaaactttttagtgtgtttggaacaacgtaagtaagtgaatctacttttttaactgtaagttttatgaaatctacgtagatagcaattatctctgatgaaatgttaccatacaaaaagataggctatgaataaaaaagaatgtaaacacctcaattttttacaagaattttatgttgaaatgataccattctgaatatagcatgttgaattaaaggtattactgaagttaatttcaccttttttaactttttgaaagtggctactaaaaattttaaagttgcatctatggtttgcatcatacttctactggaaagcacagctctaggytcttatttctcatacccgcaatgttcatgtttttcatctaaacacattgtatttgttactgttcatttgttagcatataacaaaagccaactctggatagcttaataaaaacaaattgcaagatacacagacaacaacagcaagca

SEQ ID NO: 185949 - DNA, 578 bp, Homo sapiens
tgtgtggtgttttaggccaccaaatttgtggtaatttcttacwgcagtaataggaaactaatacacccatatctaaacaacagcaagaagtaagcacccagcagcttcaaaaacaattccaagctgccaagtattcctcagcaaaggggttctctcagagccttgagccatagatctcacaagttccatatgcacccattgcaagacccaaaggaatgcacaattcaccctgagaaaagagttagtacaggaagcccatccgcagtggaaaatgatcaaggtgaactgaatatataaatactgagatgacacagaatatattttcaaagtctctttatgagtcaggaaagataaaataccaccaaaatttatgaaataatgaaactttaagaaaggatagaaaaataaatgaaaaaagaaatgttcaacgaatggaagacataggaagaaaaaacgtcagtataattatgcccaggataggtactgatcaataattctaaagaaatttccagtttccttgtgaaatcctccctaagggtgaatcaaattttcttttttatcttcttcacaatgcaccg

SEQ ID NO: 185950 - DNA, 483 bp, Homo sapiens
gtttctgaaacccaagtgtccttttaaaagtatccagtaagcaaaaatcgaactagtatttaatcatttgacgtatatttatggagcaactactgtttgaaatcattctaattggccatgtggaggattaaaaaaacattaaaatgtagcttttgctttcaaaatttatccctgcctttactcagagcagggatataaagtttaaaatctagtaaggtaaagaacacaaagrcctgaaagtcacacaggaatgcatgaatcatgcctggtgcagagtacaggtaagcatcaccaaggcgcacagacaaagaaggcatttccttaagctgaagactgggtgactagaaaaaaacaggtagcaagtaggatttgatgtaagtcataagggggaaatttgctatacttactaaagaaagaaagagatgagtcgtttgaaggaattttatatcatctcaccaacttccctttcccctttgcgcccat

SEQ ID NO: 185951 - DNA, 616 bp, Homo sapiens
gcattccccatgggatccagccttgccttatcaagctgctgtaccacaagttctacctgaggtttagagccaaaaccaccagaggttaaaaaatgttctaccttatttaattcctctttccytatatccttgtacaacaattcagaaacaagaagcaaatacagggaggacccaggtatttatgagtcaagtgaccctctatcaacaaattctctcagctgccatcttcaacaatcatgctgaaatcattgaaaaggagagaaaaaaaaacctgcatttaaaaacaacctgattttattcattattactggtaataagaaatatgacataagtctctgtagctattcattgtattgtatttttatccaatttaaacttcccaatcatgcttaatcaagtcccctcactctaccagacactttgcttaaatctgaatatattcttttctgaattgcaaattaataaaaatttagattagttattcctaatactctattccaaagaaaaatctgcaatgagaatagtactaccttaagatatgtagtaagcatcagcttaggtatagcttagaagcacaagtgaaagtgcccatcaaggtgtctggtaccaaacagtt

SEQ ID NO: 185952 - DNA, 616 bp, Homo sapiens
gcattccccatgggatccagccttgccttatcaagctgctgtaccacaagttctacctgaggtttagagccaaaaccaccagaggttaaaaaatgttctaccttatttaattcctctttccttatatccttgtacaacaattcagaracaagaagcaaatacagggaggacccaggtatttatgagtcaagtgaccctctatcaacaaattctctcagctgccatcttcaacaatcatgctgaaatcattgaaaaggagagaaaaaaaaacctgcatttaaaaacaacctgattttattcattattactggtaataagaaatatgacataagtctctgtagctattcattgtattgtatttttatccaatttaaacttcccaatcatgcttaatcaagtcccctcactctaccagacactttgcttaaatctgaatatattcttttctgaattgcaaattaataaaaatttagattagttattcctaatactctattccaaagaaaaatctgcaatgagaatagtactaccttaagatatgtagtaagcatcagcttaggtatagcttagaagcacaagtgaaagtgcccatcaaggtgtctggtaccaaacagtt

SEQ ID NO: 185953 - DNA, 616 bp, Homo sapiens
gcattccccatgggatccagccttgccttatcaagctgctgtaccacaagttctacctgaggtttagagccaaaaccaccagaggttaaaaaatgttctaccttatttaattcctctttccttatatccttgtacaacaattcagaaacaagaagcaaatacagggaggacccaggtatttatgagtcaagtgaccctctakcaacaaattctctcagctgccatcttcaacaatcatgctgaaatcattgaaaaggagagaaaaaaaaacctgcatttaaaaacaacctgattttattcattattactggtaataagaaatatgacataagtctctgtagctattcattgtattgtatttttatccaatttaaacttcccaatcatgcttaatcaagtcccctcactctaccagacactttgcttaaatctgaatatattcttttctgaattgcaaattaataaaaatttagattagttattcctaatactctattccaaagaaaaatctgcaatgagaatagtactaccttaagatatgtagtaagcatcagcttaggtatagcttagaagcacaagtgaaagtgcccatcaaggtgtctggtaccaaacagtt

SEQ ID NO: 185954 - DNA, 392 bp, Homo sapiens
tcatttagctcatccttttagaggggacctatgtttacccaatattgctttataatttgtaaatttatctaaatatcaagctgtgatgttaaccaaatatctcagagaagtccctccacaacttcccaatagatccagagtgaagtaaaaataagaataagtttttatamccggaatgttaaaaggtaccaggaaaagccatgctggagtttttgtgtcctggggcaacaaaagggagctggggccaaggtgttcacctcagggctacccctgtggattaaatattaagtaacctttttttttggccccctctcctaaactgggatctttccatgttgggggtggtcttttgcccctaaaggaagctgcaaaggttcaacaaatcactacat

SEQ ID NO: 185955 - DNA, 525 bp, Homo sapiens
tcactcaggagctttaccatgtcargacattgggttggtgtctctaacattcttttgactcttttttggctcaccgtatagctgctgtaattccgagcatcacatccccatacaattgtgtcccaagcaggtgtgtgtgttgggggaggagttgggacgaaggtatcaataaaggaagaaaagtcttagatgggtagatagttcttgtaagaaatgctcccgctttatgcctgttaaaaatcgggctggctgtgactgtagttagcagcctgcctgtgcacaggcactaaacttcaaaatgcaatacaaaggtagaagacagtccaggcaggaatgcagaggctcttgacgtatcactttatagagtctcacagcagctatttcctatagtcatttatgtgtctggtctctcttgccaggctgtacacttcttatggatggcgactgagactgtcaccttttatagccccgacacatggtggactctgttctgttcatttgaaggggcttgtttggagacaatgg

SEQ ID NO: 185956 - DNA, 544 bp, Homo sapiens
tacggttggttcactcaggagctttaccatgtcaggacattgggttggtgtctctaacattcttttgactcttttttggctcaccgtatagctgctgtaattccgagcatcacatccccatacaattgtgtcccaagcaggtgtgtgtgttgggggaggagttgggaygaaggtatcaataaaggaagaaaagtcttagatgggtagatagttcttgtaagaaatgctcccgctttatgcctgttaaaaatcgggctggctgtgactgtagttagcagcctgcctgtgcacaggcactaaacttcaaaatgcaatacaaaggtagaagacagtccaggcaggaatgcagaggctcttgacgtatcactttatagagtctcacagcagctatttcctatagtcatttatgtgtctggtctctcttgccaggctgtacacttcttatggatggcgactgagactgtcaccttttatagccccgacacatggtggactctgttctgttcatttgaaggggcttgtttggagacaatgggcttcgtct

SEQ ID NO: 185957 - DNA, 520 bp, Homo sapiens
tctacggttggttcactcaggagctttaccatgtcaggacattgggttggtgtctctaacattcttttgactcttttttggctcaccgtatagctgctgtaattccgagcatcacatccccatacaattgtgtcccaagcaggtgtgtgtgttgggggaggagttgggacgaaggtatcaataaaggaagaaaagtcttagatgggtagatagttcttgtaagaaatgctcccgctttatgcctgttaaaaatcgggctggctgtgactgtagttagcagcctgcctgtgcacaggcactaaacttcaaaatgcaatacaaaggtagaagacagtccaggcaggaatgcagaggctcttgacgtatcactttatagagtctcacagcagctatttcctatagtcayttatgtgtctggtctctcttgccaggctgtacacttcttatggatggcgactgagactgtcaccttttatagccccgacacatggtggactctgttctgttcatttgaaggggc

SEQ ID NO: 185958 - DNA, 621 bp, Homo sapiens
aaagggtaggtgaaagaatgtgaggttgaaaaatactcaaagaaataatggttgactacttaccaaatttggcaaaaggcttataagtctatcaatttaagaggctgagtgaatgataaataggaggtatccaaagaaagctttaccaagaaacacaataaataaactttagaaaaaaatacaggccaggcacagtggctcaagcctgtaatcccagcactttgggaggccgaggtgggtagatcatttgaggtgaggagttcaaaaccagcctggccaacgtggtgaaaccccayctctactaaaaatacaaacattaaccaggtgtggtggtgcgcacctgtagtcccagctactcaggaggctgaggaaggagaatctcttgaacccaggaggtggaggtctcagtgagccaagatcacaccactgcattccagcctgggcaacagagcaagactctgcctcaaaaaataaaaataaaataaaaatacaaagaaaaaaacttgaaatcaagtagaagaaaaaaatgtattactaaagggaaacaccaattcaagtgacagtgcatttctcatctaaaatcgctgaggccagaggaagtagcataacatttataaaaag

SEQ ID NO: 185959 - DNA, 621 bp, Homo sapiens
aaagggtaggtgaaagaatgtgaggttgaaaaatactcaaagaaataatggttgactacttaccaaatttggcaaaaggcttataagtctatcaatttaagaggctgagtgaatgataaataggaggtatccaaagaaagctttaccaagaaacacaataaataaactttagaaaaaaatacaggccaggcacagtggctcaagcctgtaatcccagcactttgggaggccgaggtgggtagatcatttgaggtgaggagttcaaaaccagcctggccaacgtggtgaaaccccatctctactaaaaatacaaacattaaccaggtgtggtggtgcgcacctgtagtcccagctactcaggaggctgaggaaggagaatctcttgaacccaggaggtggaggtctcagtgagccaagatcacaccactgcattccagcctgggcaacagagcaagactctgcctcaaaaaataaaaataaaataaaaatacaaagaaaaaaacttgaaatcaagtagaagaaaaaaatgtattactaaagggaaacaccaattcaagtgacagtgcatttctcatctaaaatcrctgaggccagaggaagtagcataacatttataaaaag

SEQ ID NO: 185960 - DNA, 600 bp, Homo sapiens
tacaatagccaaaaagaagaataagtacttaggaatacagctaactaaggaggtaaaatatctctacaagaagaactaaaaacactgctgaagaagatgagacatgacacaaagaaatgaaatgaaaaaaaaaaaatctcatgctcatggattgtaagaatcaatattgtgaaaaggccctactggccaaaacactagtcctatcaaacttccaatgacattcttcacagaattaagaaaawctattctaaaattcacatggaatcaaaaaatgcctgaatagtcaaaacaatcctaagcaaaaagaacaaagccagaggcatcacactacccaacttgaaactgtactgtacggctacagaaaccaaacatcatgcatctggtacaaaaacaaacacacagaccaagacaacagaatataaaacttggaaataaagccacacaccaacaaacatctgatctttgatttttgacaaggctgacaaaaacaataaatggggaaaagactccctattcaataaatggtgctgggataactggctagccatacacaggatattgaaactggactctttctttacaccacatgcaaaaattaac

SEQ ID NO: 185961 - DNA, 600 bp, Homo sapiens
tacaatagccaaaaagaagaataagtacttaggaatacagctaactaaggaggtaaaatatctctacaagaagaactaaaaacactgctgaagaagatgagacatgacacaaagaaatgaaatgaaaaaaaaaaaatctcatgctcatggattgtaagaatcaatattgtgaaaaggccctactggccaaaacactagtcctatcaaacttccaatgacattcttcacagaattaagaaaaactattctaaaattcacatggaatcaaaaaatgcctgaatagtcaaaacaatcctaagcaaaaagaacaaagccagaggcatcacaytacccaacttgaaactgtactgtacggctacagaaaccaaacatcatgcatctggtacaaaaacaaacacacagaccaagacaacagaatataaaacttggaaataaagccacacaccaacaaacatctgatctttgatttttgacaaggctgacaaaaacaataaatggggaaaagactccctattcaataaatggtgctgggataactggctagccatacacaggatattgaaactggactctttctttacaccacatgcaaaaattaac

SEQ ID NO: 185962 - DNA, 628 bp, Homo sapiens
tcaaacatgaaggataaataaacattttcccagacaaacaaaagctgagggatttcataaattacagacctgtcctacaataaatgctaatgggagtataycaatcataaagaaaataacaataaatattaataatcactggaaggtataaaactcactggaaatagtaagtacatagaaaaacatagaatattatagcacggtaactgtggtgtataaactactcatcctaagcggaaagactaaacaatgaatcaatcagaaatgataactacaacagcttttcaagacataatcattacaataagctataaatagaaatgataaaaatttaaaaagtgggaggacaaagttaaggcataaagtttttactagttttctttttgattgtttatgcaaatagtgttgttatcaggttaaaataatgagtataagacagtatttgcaagccttatggtaaccccaaagcacaaatcatacaatggatacacaaaaaataaaaagcaagaaactaaatcatgtcaccagagaaaatcatcttcactataagaagacaggaaggaaataaataaggaatagaaggtcagaaaacaaataagaaaatagcagaaataagtcctcatttatc

SEQ ID NO: 185963 - DNA, 628 bp, Homo sapiens
tcaaacatgaaggataaataaacattttcccagacaaacaaaagctgagggatttcataaattacagacctgtcctacaataaatgctaatgggagtataccaatcataaagaaaataacaataaatattaataatcactggaaggtataaaactcactggaaatagtaagtacatagaaaaacatagaatattatarcacggtaactgtggtgtataaactactcatcctaagcggaaagactaaacaatgaatcaatcagaaatgataactacaacagcttttcaagacataatcattacaataagctataaatagaaatgataaaaatttaaaaagtgggaggacaaagttaaggcataaagtttttactagttttctttttgattgtttatgcaaatagtgttgttatcaggttaaaataatgagtataagacagtatttgcaagccttatggtaaccccaaagcacaaatcatacaatggatacacaaaaaataaaaagcaagaaactaaatcatgtcaccagagaaaatcatcttcactataagaagacaggaaggaaataaataaggaatagaaggtcagaaaacaaataagaaaatagcagaaataagtcctcatttatc

SEQ ID NO: 185964 - DNA, 628 bp, Homo sapiens
tcaaacatgaaggataaataaacattttcccagacaaacaaaagctgagggatttcataaattacagacctgtcctacaataaatgctaatgggagtataccaatcataaagaaaataacaataaatattaataatcactggaaggtataaaactcactggaaatagtaagtacatagaaaaacatagaatattatagcacggtaactgtggtgtataaactactcatcctaagyggaaagactaaacaatgaatcaatcagaaatgataactacaacagcttttcaagacataatcattacaataagctataaatagaaatgataaaaatttaaaaagtgggaggacaaagttaaggcataaagtttttactagttttctttttgattgtttatgcaaatagtgttgttatcaggttaaaataatgagtataagacagtatttgcaagccttatggtaaccccaaagcacaaatcatacaatggatacacaaaaaataaaaagcaagaaactaaatcatgtcaccagagaaaatcatcttcactataagaagacaggaaggaaataaataaggaatagaaggtcagaaaacaaataagaaaatagcagaaataagtcctcatttatc

SEQ ID NO: 185965 - DNA, 190 bp, Homo sapiens
gaattcggtctcccctattagactaagggctctcccaagccagagctatgactccttcatcagaccggttattacccaaggataacactgtctcccccatcagactagctaatccctgaggataatgctatctcccccatcaractgagtagagtctatatcccctccagccagtccccatcctgggcat

SEQ ID NO: 185966 - DNA, 400 bp, Homo sapiens
taatacgggcagcgaagaaacgattttagcacagaagacaaaatcattaaggcaacatctgttcattcctagatgaaaaatgacaattgctgaatactgagagggtccttgttttgcctggaaatttgtattgaagcaataagtggaactaataagttggtagtggggattctttaaaattttaaagygacaccttatttttcacaagatttggtaggttccatctaatctatcaagcatttcagcactgtgcagcaccgaataggtcatgcctattcttatctgagagagtgcaaattttatatggccactgagttatccaaagagaattaattatattgtatgtagtttcagtagatgtaatgataatatatttgagttatttggctatggcaatcaa

SEQ ID NO: 185967 - DNA, 560 bp, Homo sapiens
ctccacctttttatagtcagtctctggtgtcttatcttatccatttggtgaggtcatattttcctgaatattcttgatgcttgtagaagtgtgataatgcctgcatattgagggattaagtacatactttagtcttcacagtctggctttgtttgagcctgtccttcagaaggccttccaaggattctaagccaattggctattaagttcccagagcctgtgaccactgcaatcatctcagcactagaggatgttctacgtccaggctttctgcaagggctctgaggctaacatggctttccagcccagatagacctggaggaggcccaaggagtataccggggttgtgtgggaatgctgacaagggaactgagtccagaaaagtgtcccagtagcccagatgggcatgcccctcagtagatctttgtataggtggaatgagtcyccaactacattgacaggagattgagttgagactgggtgcctttggaattttctgtgagaagaaagctgatgggcctatctcattagctcagatgggtgtgcatgacccatcaaat

SEQ ID NO: 185968 - DNA, 614 bp, Homo sapiens
ccggggttgtgtgggaatgctgacaagggaactgagtccagaaaagtgtcccagtagcccagatgggcatgcccctcagtagatctttgtataggtggaatgagtccccaactacattgacaggagattgagttgagactrggtgcctttggaattttctgtgagaagaaagctgatgggcctatctcattagctcagatgggtgtgcatgacccatcaaattcttgcacaagtagggtagttcttcaactgcaagaggaggggctggagctaagactaggccctctcaggatctactctggaacagaagctggagagccagtcttgttgactcagaggacatgcttcccccaggaggaccttacacatctgaaatagttccctgactgcagcaagaggatctggagctgagactgggtgctctcaggatctcctgtgtgatgaagtcttgatatgctggttctgttggctcagaggtgtgtctgtcacccaggaagatactgtatacatgggataatgagtgcagcagaaggggctagagctgaacttctcactttcagaatctgctgtgggacagaggctgaagagcccatctcattggcccagacaggtat

SEQ ID NO: 185969 - DNA, 614 bp, Homo sapiens
ccggggttgtgtgggaatgctgacaagggaactgagtccagaaaagtgtcccagtagcccagatgggcatgcccctcagtagatctttgtataggtggaatgagtccccaactacattgacaggagattgagttgagactgggtgcctttggaattttctgtgagaagaaagctgatgggcctatctcattagctcagawgggtgtgcatgacccatcaaattcttgcacaagtagggtagttcttcaactgcaagaggaggggctggagctaagactaggccctctcaggatctactctggaacagaagctggagagccagtcttgttgactcagaggacatgcttcccccaggaggaccttacacatctgaaatagttccctgactgcagcaagaggatctggagctgagactgggtgctctcaggatctcctgtgtgatgaagtcttgatatgctggttctgttggctcagaggtgtgtctgtcacccaggaagatactgtatacatgggataatgagtgcagcagaaggggctagagctgaacttctcactttcagaatctgctgtgggacagaggctgaagagcccatctcattggcccagacaggtat

SEQ ID NO: 185970 - DNA, 573 bp, Homo sapiens
tatttttgctatactttagaaataaaattccacttttattcaaaatcccaatggaatcaattcccagaaaattccaccgggattttcttcattccacagcatttatttgatcaacaaatctgccttaatcaactactgtgtccctggtgctatattaagagtgaatgttgtagaggtgggattggaataatcctcaaggagacaaaaaacataagaaaaaaagtaacaaggaactgagtataatactaatgagagtatcaaagaccagaatcttggtgcaaatagcttatttagatgattccagaatgtgctaagatgaagtggaatagcaagatgggaaagggaggaaagccaataggtgtgttattgagcaagtctctaaaatgagtaatgagctcaatctactggagaccctctgagaggaagtggaacacacctgaagattatcccattgcatgataaacgagttcactatttatcaaytcctatgccccatatgttgcaggtagctcctgggacattaatccccatacacttccaacccaaccctgtgtatggaccagagaggcaccc

SEQ ID NO: 185971 - DNA, 543 bp, Homo sapiens
cccacaaaatgcctaagtgggttttaactcagattgcacattaaaatattattataataaataataagagaacattaaaaagagattctgatttcattggaatgggatggggacatcagtatcagtatttaaaaagctacccaagttctaataagtagccaggtttgaaatctgaagtttagcaggtattgacattttttttaatgttactgtkgacaaggcactgtactaagcaccttgcgtgtagagcttactctatccttagagtgtctggtggggtggatattacaatgcctcctttactgatgactggttagtttacttttgtaaagcaaatagagtttacaagagagacaggattctaacacagatctgttttaaccattgtgctgcaacggctttgaaatacagtttgtgtgaaatagccacaaataattaaagtaaaagttaatgcaataagagcttatcagaaaccagataaaatatttctgaaaaaatgatataaatcaatggagaaatatgaagtgatattgatttataaaa

SEQ ID NO: 185972 - DNA, 593 bp, Homo sapiens
aaatcagcatccaagggacacaccttcatgtaatagaagccatctatgacaaacccacagccaacataatactgaatggggaaaagttgaaagcactccttccgagaactggaacaagacaaggatgcccattctcaccactcctcttcagcatagtactggaagtcctagccagagcaatcagacaagagaaagaaataaagggcatccaaattggtaaagaagtcaaactcactgtttactgacgatatgaacatttaccttgaaaaccctaaggactcctccagaaagctcctagaactgataaaagaattcgacaaagtttccasttacaagattaatatacacaaatcagtagctcttctatgtacaccaacagcaaccaagcagagaatcaaatcaagaactgaacccattttacaatagctacaaaaaacaaaaaaaaaaatacttaggaatatacctaaccaaggagtcgaaggacttctacaaagaaaactacaaaacactgctgaaagaaataatagatgacaccaacaaatggaaacacatcacatgctcatggatgggtaaactcaatattgtgaaaatga

SEQ ID NO: 185973 - DNA, 550 bp, Homo sapiens
ccatctatgacaaacccacagccaacataatactgaatggggaaaagttgaaagcactccttccgagaactggaacaagacaaggatgcccattctcaccactcctcttcagcatagtactggaagtcctagccagagcaatcagacaagagaaagaaataaagggcatccaaattggtaaagaagtcaaactcactgtttactgacgatatgaacatttaccttgaaaaccctaaggactcctccagaaagctcctagaactgataaaagaattcgacaaagtttccacttacaagattaatrtacacaaatcagtagctcttctatgtacaccaacagcaaccaagcagagaatcaaatcaagaactgaacccattttacaatagctacaaaaaacaaaaaaaaaaatacttaggaatatacctaaccaaggagtcgaaggacttctacaaagaaaactacaaaacactgctgaaagaaataatagatgacaccaacaaatggaaacacatcacatgctcatggatgggtaaactcaatattgtgaaa

SEQ ID NO: 185974 - DNA, 555 bp, Homo sapiens
aggggcctggtgggaggtgattggatcatggggtggacttctcccttgctgttttcatgactgtgaatgagttctcatgagatctggttgttttaaaactgtgtagcacctcccccttttctctcttcctcctgctctggccatgtaagacgtgcctccttcatattcatcttkcaccatgattttaagttttctgaggcctccccagccatgcttcctatatagcctgtggaactgtgagccaattaaacttcttttctttataaattacccagtctctggtagttttgttgttgatgtttgaccaaggctggagtgcagtggcgtgatcttgtctccctgcaacctccagctcctaggttcaagcaattctcctgcctcagcctcctgagtatctgggattacaggcatgcaccaccatgcccagctaatttttgtatttttttagtagagatgaggttttgccatgttaaccaggctggtctcaaattcctgaccccaggtgatccacccgccttggcctcccaaagtgctgggattataggtgtgagccac

SEQ ID NO: 185975 - DNA, 555 bp, Homo sapiens
aggggcctggtgggaggtgattggatcatggggtggacttctcccttgctgttttcatgactgtgaatgagttctcatgagatctggttgttttaaaactgtgtagcacctcccccttttctctcttcctcctgctctggccatgtaagacgtgcctccttcatattcatctttcaccatgattttaagttttctgaggcctccccagccatgcttcctatayagcctgtggaactgtgagccaattaaacttcttttctttataaattacccagtctctggtagttttgttgttgatgtttgaccaaggctggagtgcagtggcgtgatcttgtctccctgcaacctccagctcctaggttcaagcaattctcctgcctcagcctcctgagtatctgggattacaggcatgcaccaccatgcccagctaatttttgtatttttttagtagagatgaggttttgccatgttaaccaggctggtctcaaattcctgaccccaggtgatccacccgccttggcctcccaaagtgctgggattataggtgtgagccac

SEQ ID NO: 185976 - DNA, 570 bp, Homo sapiens
ttgcagcaagttttagggcattaaggaaaaaaaaaggattgtggcaaaggatacgttgctaggtgaagtaaatacttatagatagaaaagaaatcctgtggattatktgttgtttgtttttttttttactattaaagcacttcaaggtcagagaacaaccagatcaatgtgaaatcaaatgaactattaaaaataatagaatttagtaaggcatttgtttacaagataaagatatgaaaatcaacagtttttctctgttctggcaaaaagcatctaaaagtggaaatggaagaaaagttccatgtttgatatagcaacaatatccataaaatacttagcaataaagataataagatataggacttatatgaagaaaatcataaaactgttattgaaagacataaagcaagagctgaacaaatggaaagacacaccatgttctgggatagggaggcttaaaatcacaaaacatcaatttcatcaaaattaatagataaatgtacaattctcagtaaaattctaaatgcgttttttctttatataattgaaaaaataatcttaaattttata

SEQ ID NO: 185977 - DNA, 570 bp, Homo sapiens
ttgcagcaagttttagggcattaaggaaaaaaaaaggattgtggcaaaggatacgttgctaggtgaagtaaatacttatagatagaaaagaaatcctgtggattatgtgttgtttgtttttttttttactattaaagcacttcaaggtcagagaacaaccagatcaatgtgaaatcaaatgaactattaaaaataatagaatttagtaaggcatttgtwtacaagataaagatatgaaaatcaacagtttttctctgttctggcaaaaagcatctaaaagtggaaatggaagaaaagttccatgtttgatatagcaacaatatccataaaatacttagcaataaagataataagatataggacttatatgaagaaaatcataaaactgttattgaaagacataaagcaagagctgaacaaatggaaagacacaccatgttctgggatagggaggcttaaaatcacaaaacatcaatttcatcaaaattaatagataaatgtacaattctcagtaaaattctaaatgcgttttttctttatataattgaaaaaataatcttaaattttata

SEQ ID NO: 185978 - DNA, 633 bp, Homo sapiens
gaaaaacctacaaatttacatgaaaaggcacagagtctgggtcctaatcaatagtaaacagcaagtcaaaagtgctacatcttctggtctctagggccaagagatttaaataatactctaatggacctgttagcatgctagtatgacagtgaaagcataggcagtcattcttttgctgtatttccaagttttggmtattaaaatgaataccagatatattaaagaattaagtatagacaataaagcaattaaaaaaaaaacacctgcagggagtgaggagatttaaaacaagacaacattcagaagctataaaacataagctctataaagttggggaaaaagtttttgcatggaaaaagatactataaacaatatcgatcaataaaagttagatttggaaaaatatttataatgtagggatgagcagagggttaagtaaaaagagttcttacagattgctaagactgtaaacactcaatggaaaaatgggtaaagggtattcagaggcaactactgaaaaaatgaagatgttcaaattcactacagaccagggaaatacaaattaaagtaacaatgagataacattatacctgacaaaataccagaactttaagagtgctatttcctgctggt

SEQ ID NO: 185979 - DNA, 555 bp, Homo sapiens
ctccctccatttaactccctgaggttgaatgggtggtgccattttcttgcagatctacttcttggccactcttgattttgccaggacaagcaacagagacaagctgaayccaaaaatgtccttcctcaggatttttgaattgagagccagtgagcatttccaatctggggatggagataggagactttgaagggtgcagcagtcagatctgttgttaagctggcataggagaaaatgagactgaaagatagacattggtacaagtgtgtgtgtgtgtgtgtgtgagagagagagagagatggacagagagagacagagggagagagagagagagagagagaaagagtagaaaaagagagagattcagagggaaagaagaagagatatatagagagagatagagagagagatattgaggccaggcatggtggctcatgcctgtaaacccagcactttgggaggccaaggcaagaggatcacttgagggcaggagtttgagaccagtctgggcaacatagtgagacctcatctctacgaaaacaaaaacaaaaaaca

SEQ ID NO: 185980 - DNA, 410 bp, Homo sapiens
ttattgttttgttccaaaaaaaaaagagaaacagaggcatcacacttactagaaaaacatattctatttcatatattatggtggtatgacgtgatgttttgacatatgcaggcattgtgaaattattaaatcaagtaaataaacatgcccatcacctcacatacttattttttatggtgtaaacgtgtaaaatctactctattatcagttttcaagtatatagtacattagtaycatggaagtcaccctgctgtgcaatagatcttcaaactaattccttctgtcaaaccaaaactctgtaccctttcaccaatgcctcagctttcacatgcccctgacaccagcccctggttggcaccattcttctctctacttctctgagttcaacatttttagattgcatgtgtaag

SEQ ID NO: 185981 - DNA, 599 bp, Homo sapiens
ggccttctcactgtgtcgtctcacagcagaggtgggtgagcaakagatcatttgtccacgagagaaaggagactatcttttattagaaattcactcctgtaataactaacccactccaatgacagtgacattaatccattcatgaggacagagccttcatgacctaatcacataataaaggtcccacctctcaacactgttgcattaaagattttttccaaatcctaaactttgggagacacatttaagtcatagcattccattcctaatatcaaaatttatgtccttatcacaatgcaaactacattcattccatcccaattgtctccaaagtcttatccagcatcagtgcaaaagtctgaagtctaaagtctcatctaaatcagatgtgagtgtgactcaaggcacaatttagcctgatataaattttttcccatctgtgagcctataaagtcaaaacaagttatctactttcaaatacagtgaacaatggggcaggtatgggatagaaattcccattccaaagctcagagacagggaaggagaaagcagtgcctagttcaaaacccaacagaggaaaaaaacattaagtcttatag

SEQ ID NO: 185982 - DNA, 599 bp, Homo sapiens
ggccttctcactgtgtcgtctcacagcagaggtgggtgagcaagagatcatttgtccacgagagaaaggagactatcttttattagaaattcactcctgtaataactaacccactccaatgacagtgacattaatccattcatgaggacagagscttcatgacctaatcacataataaaggtcccacctctcaacactgttgcattaaagattttttccaaatcctaaactttgggagacacatttaagtcatagcattccattcctaatatcaaaatttatgtccttatcacaatgcaaactacattcattccatcccaattgtctccaaagtcttatccagcatcagtgcaaaagtctgaagtctaaagtctcatctaaatcagatgtgagtgtgactcaaggcacaatttagcctgatataaattttttcccatctgtgagcctataaagtcaaaacaagttatctactttcaaatacagtgaacaatggggcaggtatgggatagaaattcccattccaaagctcagagacagggaaggagaaagcagtgcctagttcaaaacccaacagaggaaaaaaacattaagtcttatag

SEQ ID NO: 185983 - DNA, 519 bp, Homo sapiens
taccctgccagctgcctatcagcctccacctgcacagtgatcattccttcagctttcactcaggccggagggctttccacccaaaagggcctttcacacccactcccagcacagttctaggaccctgtatacctcccagatacaggtacatatccttcccctttgttgttaattttgtttaatttatttaaaattcactgggaaatcactgatgatgggagtgaccagcctgtccattccattttctgtccaccatctgacggcaccacctgtgaggttggccaccctagtgtgctgtgctcatggggccatctggacatacacaaacaccaggtgtgtgagttattagaggaggcccgggrtcagcaggtggctgtgccccacaggacacaggtctgtcctgcagtagagcccgcatgacctggaatcatacgtgtgcatgacccgtggtctcagcacatcagctgaggccagcttcaggcaattcctgtgtaacctgccctgggcgcccacagagga

SEQ ID NO: 185984 - DNA, 478 bp, Homo sapiens
tgacagctcactttcacctctgcgaaaacttcagagcacagactaagagcagacagtgaacttagggcaagtgggggccagatgtttgaggaggctagagagtgagctggaatccttgtgagccattcggagaagcagcagtgtgcaagggtgtattgagtcctcctgagttaacagatgctgaatagataccagtttcactgccytcattttgatttatcctcaagactctattggatttctagatttgaacactggaaaagctgatgaaactcaacatgactaggaatatttctgggaagatttatgtaatgatgtgagtgtatttaaaattaggttatgaaaatttcattatctaaaatgttggtatcagtatctattaatttgttctttttttcttagagacagggtcttgctctgtctctcaggctggaatgcagtgtcatctatgaattttatagtattaaaaatgatcacc

SEQ ID NO: 185985 - DNA, 523 bp, Homo sapiens
atagacatccgtaaactaatatggatattaatagattattaaataaataaataatgggaagaagaacacatctctttgcagaagtattccaaatatgttagcttgatagtcctgtaatcaagtragtgaagcttaaacactcatgagttgattgtggcctgagattagagacatggaaaaaaaatcactattattgtattttataatgggatttcagatataatgccaaagacatgatctgtggatgaataaaattttacatttttaaaatctaaattggtataaacatgcacacatatttttctgcaatacacgctaagggtgtaaaagacagccacagacttggagaaaatacttccaagtcacgtatttgttaaatgagttattttagtttgttaaatcacttttataattaatatgcaagttaacttacaactaatcaaaagaaaacaatgcatttaaaaatgaactagatctcaggcaaggtacctcaccaaagattatttgaacatttttaagtagg

SEQ ID NO: 185986 - DNA, 588 bp, Homo sapiens
tgaacatttttaagtaggaactttttattagggacatgtacgtgtaaataaaaattagataccattactcacctattaggatgtttaaaacacacaattctcataatgaaaaatggcaatatgaatgtggaaaatcaagaaccatcatgcattgatggtgggaattcaaaatgctacatgcacaaaatgaggttttggggggcatttttaaaatagagataaaagtagagttaaaatttgattcatttgtgtgttccaaaatatttacaacagtgattcagaaattgatgtttacaaagatacctacaaaggaagttctgtatcagttttattaattcaatccctgaaatttgcttacagaataaatgttgtatgaaaaatctttcaaataattaaaatttctcaaatacacatttatattgttccttttctttagtgacttaatgtyattttctgagaaagtcttcaatctaataatctttgtcatctcctccatgccagcacagctgcctcctccctggggtttctgacactctcaggatgtgggttttcactctgtgtctctcgcacagtaatacacggccatgt

SEQ ID NO: 185987 - DNA, 520 bp, Homo sapiens
cctgtagctgctgccaccaagatgttcctccaggtccagtccacggtgaggcrctgagctctaaggagattctgcagaagaggcatgtggttgttggatgatgtgcttagggcacagacacatccatatttacctcagtgcatctcaggttatttgcatattcatgagacagacgatttcatagctcaaagcctgatacatgataagaaagggaagataaatgacacatcagccttacaagagtgagatgcaaatggtctaagccctaatcttacttgagaaaatgcatgccctgctctatttaccaacatttgtgtacagaggtcctttcactgaagaataagccctctcagaacaggctcctcactgtgaacctacatgtgattagtatagaggccgcctggattatttttgggaccatcactgtctatgacactgagcacgtgccttggccctatcctggacctgtcaggcaccagcacagctcactggtgactctggaaaggtgactgctgatgtc

SEQ ID NO: 185988 - DNA, 546 bp, Homo sapiens
catcactgggacttgggagtcccttacctgtagctgctgccaccaagatgttcctccaggtccagtccacggtgaggcactgagctctaaggagattctgcagaagaggcatgtggttgttggatgatgygcttagggcacagacacatccatatttacctcagtgcatctcaggttatttgcatattcatgagacagacgatttcatagctcaaagcctgatacatgataagaaagggaagataaatgacacatcagccttacaagagtgagatgcaaatggtctaagccctaatcttacttgagaaaatgcatgccctgctctatttaccaacatttgtgtacagaggtcctttcactgaagaataagccctctcagaacaggctcctcactgtgaacctacatgtgattagtatagaggccgcctggattatttttgggaccatcactgtctatgacactgagcacgtgccttggccctatcctggacctgtcaggcaccagcacagctcactggtgactctggaaaggtgactgctgatgtc

SEQ ID NO: 185989 - DNA, 546 bp, Homo sapiens
catcactgggacttgggagtcccttacctgtagctgctgccaccaagatgttcctccaggtccagtccacggtgaggcactgagctctaaggagattctgcagaagaggcatgtggttgttggatgatgtgcttagggcacagacacatccatatttacctcagtgcatctcaggttatttgcatattcatgagacagacgatttcatagctcaaagcctgatacatgataagaaagggaagataaatgacacatcagccttacaagagtgagatgcaaatggtctaagccctaatcttacttgagaaaatgcrtgccctgctctatttaccaacatttgtgtacagaggtcctttcactgaagaataagccctctcagaacaggctcctcactgtgaacctacatgtgattagtatagaggccgcctggattatttttgggaccatcactgtctatgacactgagcacgtgccttggccctatcctggacctgtcaggcaccagcacagctcactggtgactctggaaaggtgactgctgatgtc

SEQ ID NO: 185990 - DNA, 546 bp, Homo sapiens
catcactgggacttgggagtcccttacctgtagctgctgccaccaagatgttcctccaggtccagtccacggtgaggcactgagctctaaggagattctgcagaagaggcatgtggttgttggatgatgtgcttagggcacagacacatccatatttacctcagtgcatctcaggttatttgcatattcatgagacagacgatttcatagctcaaagcctgatacatgataagaaagggaagataaatgacacatcagccttacaagagtgagatgcaaatggtctaagccctaatcttacttgagaaaatgcatgccctgctctatttaccaacatttgtgtacagaggtcctttcactgaagartaagccctctcagaacaggctcctcactgtgaacctacatgtgattagtatagaggccgcctggattatttttgggaccatcactgtctatgacactgagcacgtgccttggccctatcctggacctgtcaggcaccagcacagctcactggtgactctggaaaggtgactgctgatgtc

SEQ ID NO: 185991 - DNA, 569 bp, Homo sapiens
cagctgtgggactccccatgggttggcagctctaccggcatccagtttgccttctgcttggtcacatgcgtcaccactttaactctcagttggaattccctggcagttgtttggagggtcacgcctaagaagatatccattctcatgtgttctaagatggaagctatgtatactaaacagggtctgggtggcagtcccccaggtcgtatcactagttcaacctgtctgacttctgtggcccttccataatcacctattgmtgctatgggcccagataactggtaggtgttgccagttagagcacatttgttgtctggccacgctgactggctccttggctgtctctcttcctttggtgccattgtttttcatcacagtagggtgcatcccttgcttactcagtttcttcttttctcctaagtcagcaactacctggggcacatgaaatgttggctgccctcccagggggcttaacatggaaatcagtgcaccatgccatttggtaggcactgaatacataattgtagcttttattttgcagtaaacaattcattgttgggacttcaata

SEQ ID NO: 185992 - DNA, 458 bp, Homo sapiens
ggaattccctggcagttgtttggagggtcacgcctaagaagatatccattctcatgtgttctaagatggaagctatgtatactaaacagggtctgggtggcagtcccccaggtcgtatcactagttcaacctgtctgacttctgtggcccttccataatcacctattgctgctatgggcccagataactggtaggtgttgccagttagagcacatttgttgtctggccacgctgactggctccttggctgtctctcttcctttggtgccattgtttttcatcacagtagggtgcatcccttgcttactcagtttcttcttttctcctaagtcagcaactacctggggcacatgaaatgttggctgccctcccagggggcttaacatggaaatcagtgcaccatgycatttggtaggcactgaatacataattgtagcttttattttgcagtaaacaat

SEQ ID NO: 185993 - DNA, 614 bp, Homo sapiens
aaatgcaaattataaccacaatgagatatcacctcrcagctgctcaagcagcttttatcaaaaaggcaaaagctaacaagtgttggtgagggtgtggataaaagggaaccactgtacattgttggtaggaaggtaaattagtacaggcattttggaaaatattatggagttttctctaaaatctaaaaatatagaactcccatataattcagtaattcaatttctgggtatatatcaaataaaatgaaatcagcatgttgaagaggtatctgcattcccatgttcactgcagtgttgttcacaatggccaagatatggaatcaacctaagtgtccatcaacagaagaatgagtaaaaataatgtggtatatatacacaatgaaatactattcagccttgaaaaataagtaaatctatagatgaatctggaggacattatgacaaataaaataagccaggcacagaaggataaatacagcatgttcccacatatatgtggaatctaaaatagtcaaacttacagaaaaaaaagcagaatggtagttaaaagggattgggggagatgggaagatattggttaaagggtataaagtttcagataggaagaataaatt

SEQ ID NO: 185994 - DNA, 614 bp, Homo sapiens
aaatgcaaattataaccacaatgagatatcacctcgcagctgctcaagcagcttttatcaaaaaggcaaaagctaacaagtgttggtgagggtgtggataaaagggaaccaytgtacattgttggtaggaaggtaaattagtacaggcattttggaaaatattatggagttttctctaaaatctaaaaatatagaactcccatataattcagtaattcaatttctgggtatatatcaaataaaatgaaatcagcatgttgaagaggtatctgcattcccatgttcactgcagtgttgttcacaatggccaagatatggaatcaacctaagtgtccatcaacagaagaatgagtaaaaataatgtggtatatatacacaatgaaatactattcagccttgaaaaataagtaaatctatagatgaatctggaggacattatgacaaataaaataagccaggcacagaaggataaatacagcatgttcccacatatatgtggaatctaaaatagtcaaacttacagaaaaaaaagcagaatggtagttaaaagggattgggggagatgggaagatattggttaaagggtataaagtttcagataggaagaataaatt

SEQ ID NO: 185995 - DNA, 614 bp, Homo sapiens
aaatgcaaattataaccacaatgagatatcacctcgcagctgctcaagcagcttttatcaaaaaggcaaaagctaacaagtgttggtgagggtgtggataaaagggaaccactgtacattgttggtaggaaggtaaattagtacaggcattttggaaaatattatggagttttctctaaaatctaaaaatatagaactcccatataattcagtaattcaatttctgggtatatatcaaataaaatgaaatcagcatgttgaagaggtatctgcattcccatgttcactgcagtgttgttcacaatggccaagatatggaatcaacctaagtgtccatcaacagaagaatgagtaaaaataatgtggtatatatacacaatgaaatactattcagccttgaaaaataagtaaatctatagatgaatctggaggacattatgacaaataaaataagccaggcacagaaggataaatacagcatgttcccacatatatgtggaatctaaaatagtcaaacttacagaaawaaaagcagaatggtagttaaaagggattgggggagatgggaagatattggttaaagggtataaagtttcagataggaagaataaatt

SEQ ID NO: 185996 - DNA, 536 bp, Homo sapiens
gaattcatttacacaaatatgggaagaaaaggagctcctggtraaatgagaggagaggtttgcagggccctgaggaagaggcaggggatgccacccaagggtcagggacctggagacgctgcaggccctgtggagggaggggcagctggagtcaaccagagaggacaccaagggggcagtgggcacaaggagtgagagaagagggaggtgaggcaagagtccccccactcttaggggttgggggaaaaaaggtaaatatgtgagtatatataaaagacaatattttcctcgtaatttttttaaaggtacattcatactgaagcaaacaacaatactatatatattgtgatgtctatagcatagatgtaatatgtacacttgccacagcaaggaccgggaaggcacctggttgcaagacagtgaccagcttcttacactgcacaaggcggggtacagtattaactctaagcagactgtggaaagttcagtatctacagtgtcatctccagaccagccactaaaatcatgcaacaaag

SEQ ID NO: 185997 - DNA, 547 bp, Homo sapiens
tgctttgcagaagtgagctcattgttagaagaggcctgcccaccaagaagtcagtctctttaactaaagcacttgaaaaatggtgtcctgagaccttgtgaaaattcatttcctggagtaaagaaaggggaaagctattcttaaatcattggaagamaccatatcagaaattttatcaacacagcagtcaaattccagtaagtcaatgcttgggtttatgtttcacaactcaggaagcaataaagaaatctacataatcggaaggctactccaacagagggaattttgacctatttaattaataggccagtattcactcaaagacacactcctgtgagatctccaacttaaacagatctctgtaacctgaagaagttttctcaacagattctttttctctagacactcgcaaatgcaaaaatacattttgtatatttgtgcatgagtgatctagagaagtccttgtcttgttaatgaaagttcatggaaatatgataactgcatcacttactgtgaactcacacttcactagtctcaaaaatttctc

SEQ ID NO: 185998 - DNA, 490 bp, Homo sapiens
gaattcaaggccacgccggagctgtaccttggaaggaggagccaaaaattatgctgagagtgatcacagtgaagacgaggacaatgacaacaatagtgccaccacagaggagtccacgaagaagaacaagaagaaaccaccgaagaaaacgtctcgttatgaaaggacagataccggcgagataacatcctacatcactgaagatgatgttgtctacagaccaggaggtaaggagccttacatttgggtcttgccagtgtttacartgggggaatgatcttagcattaaggtgaaataaatacactttgtacactttaaggaaggcttggaatctagaagagtaggaaacttaatttggtaaacatgtgacccacttttggtcagttaggtttacccacttcttgcttgtgtctgccttaatttggtcttgtgtcctggtttatgcattcatgagttcttttcttattttcctatgctgcttgttctcta

SEQ ID NO: 185999 - DNA, 622 bp, Homo sapiens
agctaccaatctcttctgacttgtaagctacctgctgagaggtctgctgctagcctgatgaagttccttgtatgtgactttaccctgcctttaagacttttttctttagtgttgaccttgatgaatattgtactatgtgccttggaggtagtcatttcatgtcatatctatctggggttctgcgtgtttcttggatttgtatgtaaatctccctaaagagataagaggaattttcatgaactgtatcttcaaatatattttccaagttgcgtattctctctcctctctcaggaatgacaatgagtcatagattttttcgctttacaaaatcccatattcttggaggtgtcacttttttttcccatttttttccttatttttgtctgagttgacttaaagaacaagtcttcaagttttgagattatttcctcagcttggtctattctgctgctaatactactgattatttgataaaattctgatagtgagtttttcagctctagaatttaagtttggttatttctgaaaatggctaytttatcattcagctcttggattgctttactaaattatttgaattccttgcactgaatttcactttctcctgaatctcaatgggttt

SEQ ID NO: 186000 - DNA, 603 bp, Homo sapiens
catttcatgtaaagttgtaagcctttgaagcatttgagaatttcatacaaaacatttctgaaagataaattttctcatattttcttggacacgctgattgatcattttagttagtctctgaagaaatccatgaaaaagtacttgttactatttttacccacagcagcataatttaaatttgagttaaataggcttataaacaaatttgtataaccatgatgaaaaatcatcttcccaatagtatagctaaactaataaagtaactgtggtagggatgagcaattatagtccaagcaatgtaaactcaattcatacgtggaaaaccacaggggcaaggggaatacagtatatagacagtgtcagaacaagagactgctaggagttctgggttttatcctcctctacagatacacattgtctacccagcttcccaagagaccaccatgtaaatgtcttctttcaactcgtcatgattaaaggttaataatattttayacaaaaataatgtgttcttttaaaaggtagtaaaattttctgggacagagattgaggatgttcttcagcaatcttacaaatgatttattggtttatttacataaaatc

SEQ ID NO: 186001 - DNA, 586 bp, Homo sapiens
catggaatgggcattcgtttaaaaggaggtaaatcttgcattggagcccttttttggttgcggggggtgggcaggaaggtccacataatttgaacatggctaattcagartttaggatctgttattctgggattgagatgagggatggtagattgcccaggttcagagctcggacttcgacatcaggttgtctgagttcacgtactccgtccatcagttgccatctttcctgaccttgggaaatacacttaaccctcttaactttctttagttacctgtgaagttgggatataaagtaccaaccttgccaagtagattgtttttagattaaaaggtcaaacttacaaagtgtccagtgccccatagagtgacactgattgtgatgttgatgtttagttggtaccttaggtttatgctttttattcactgatgtatatattgtgtgcttatcacattggctggctgtattgtccacagtaagtatttattgaatactgaatgaagtaacatttaagtggaatcaattcactggataagtatttttaaaaaactttagtagtagttgtttgatacagtgcatacatca

SEQ ID NO: 186002 - DNA, 586 bp, Homo sapiens
catggaatgggcattcgtttaaaaggaggtaaatcttgcattggagcccttttttggttgcggggggtgggcaggaaggtccacataatttgaacatggctaattcagaatttaggatctgttattctgggattgagatgagggatggtagattgcccaggttcagagctcggacttcgacrtcaggttgtctgagttcacgtactccgtccatcagttgccatctttcctgaccttgggaaatacacttaaccctcttaactttctttagttacctgtgaagttgggatataaagtaccaaccttgccaagtagattgtttttagattaaaaggtcaaacttacaaagtgtccagtgccccatagagtgacactgattgtgatgttgatgtttagttggtaccttaggtttatgctttttattcactgatgtatatattgtgtgcttatcacattggctggctgtattgtccacagtaagtatttattgaatactgaatgaagtaacatttaagtggaatcaattcactggataagtatttttaaaaaactttagtagtagttgtttgatacagtgcatacatca

SEQ ID NO: 186003 - DNA, 565 bp, Homo sapiens
gcgaggcttttctccagtgctagatgcagaataagcccttcacgaggcttgggtcgggctgtagctatacttcttaacggctatcccttggttactcctctgttactagtggtggtcctgagggatgtgtaagaggcagcaggatgaagtatctgtagtgctttatcccttaaagcacagggacccgtgtgggtgatcataggggttattatcgtgtagtgcatctccctttttaggaaagttcacacttgtcttccttttttttcctgtaatggtaggacttaatggaggatttaatggtaatggtttctgaaagtcgagtatttattmttctgagtgactactgggttaatatgaaagaagtgtggtttcagttaagcattgacgtcagtgtgaagaagtgactgtggcaccccagttcatactgaattagcaaataatacaagaggatagcaagctctctcacacttagacacacacaatgcgggatactgtcaatatacggtgagttgttcagttgcagtgtagaatattaatatcttggggtgaagaaaagaaagtgctc

SEQ ID NO: 186004 - DNA, 642 bp, Homo sapiens
cttgttgcttttatgaaggagatgtttttgtatgtccttactttgccattctcaatgacatgtagcagcatttcttgagatggcattcttcttgttctccaggggtttttgacggaaacaagttatagtcagtagtatatattaacataacaaatatttttataataaaattgtatttttatttgtttatttttttctaagacaaatctttgttgaaattaaaaacttcctaaaaacaaagcttttgacatgttaatagaatccaaatgagttttaaaacttttagatataacatcttgatctatacaagtctccaaatgatgaattggccttgaaaccattagattgaaaagagaatgactgtccaaggcacagtcactgttattattcttatgttgattattattgattataacaactatgtattgagttttgctatgtgaaatgttcaatgctattttctgggagaaatacaaagcagaaaaaacctatatttgcaatttaatacaaaaaattccattacattattaawcactatagttatcagtcactaatatttaaacatataaaatttattattacagataagtgaatatatcagattccctttttacttaaagaagaaacatatatgacatatta

SEQ ID NO: 186005 - DNA, 525 bp, Homo sapiens
catgggcatgtcacaaaggacacagcatcaatatctttgtctttatttaaaatgttatgattttccagatagatgctgtactcagactttgagatatattttgtgagacaaagtttcagaatgtctgtcacagctgccactcattcttgtgtttatttctaattgttgtataggtgcctcttcaaatagtgtgctgaaagtttgacaaatttctctattttctgagtgccgggttcacaaaaggatagtgtaaaaatctcaattgtccttggttttttccataatgttcactgtcttgcctgccgattcaamtgtctttaaaggttaaaaaaggcattttctatacttaaagttctagaactttggaaactcctacgaaacttctataagggacaaatttcactcatatatataactggatatagttgaagactttgctctatgaaaattgatttgtagtatatttttccacttgttttccttcacatagtttaccttctccaatgttaccatttcagaaatacg

SEQ ID NO: 186006 - DNA, 544 bp, Homo sapiens
aatcagggtatttaggatattcattaattcattacctcaagtatttgtcatttctatgtattggaaacatttcaaatcctctcttcttgccattttgaaataaatagtacattgttgttaactatagtcaccttattcgaagattagaactttttccttctatctaactgtatatctgtacctrctaaccaaccaccccctgcctcgttgcccacatccttgccagtctctggtatctatcattttactctctacctccatgagattaactttttaagctcccacatggaagtgaaaacatgtgatatttgtctttctgtacctggtttatttcacttaacataatgacctcctcttccatctatgttgcagcaaagtgacaggatttcattctttattgtggctgaattgtattccattgtgtatatgtagcacattataattttttaattttttattttttaacttttattttgagttcaggaatacatgtgcagtattgtgcaggtttgttacataggtaaatatgtatcatgggggtttg

SEQ ID NO: 186007 - DNA, 544 bp, Homo sapiens
aatcagggtatttaggatattcattaattcattacctcaagtatttgtcatttctatgtattggaaacatttcaaatcctctcttcttgccattttgaaataaatagtacattgttgttaactatagtcaccttattcgaagattagaactttttccttctatctaactgtatatctgtacctactaaccaaccaccccctgcctcgttgcccacatccttgccagtctctggtatctatcattttactctctacctccatgagattaactttttaagctcccacatggaagtgaaaacatgtgatatttgtctttctgtacctggtttatttcacttaacataatgacctcctcttccatctatgttgcagcaaagtgacaggatttcattctttattgtggctgaattgtattccattgtgtatatgtagcacattataattttttaattttttattttttaacttttattttgagttcaggartacatgtgcagtattgtgcaggtttgttacataggtaaatatgtatcatgggggtttg

SEQ ID NO: 186008 - DNA, 438 bp, Homo sapiens
tgtaagtattcttcccgcggggggagggggcccgggccgctggagattcgagaaaacaggagccggcggggaatggggttcggcgtgcagtcccctttttgccgtatagctccttctggcccaggccgcgatcggcgctccgtgggcgtggaaaaagaactgtccgggcytcagtttccctcccacgtgctttgcgggcggcgcaggtgggctcttggcgcgtcctaactggctgcaggtagaccagggttgggggccagtaacgacgccagagattggggatgaagtcctgcgccctaagctagccaaggggttcaaatgcttgctcctgccaggcccaggggagataagcggcaacctgcacacatcaggagtttgcagttctcgctgagttatgagtctggttcagttttagtttctagctgcgtcagactcctt

SEQ ID NO: 186009 - DNA, 342 bp, Homo sapiens
ccttgtagtatagtttgaagtcatataatgtaatgccttcagatttttgtgtgtgtgtttttggttttattggktttttttttcttagtcttgctttgactttggaagctctctttttattttacataaattttaggattttttttagttctgtgaagaatgataatgttattttaatggaaattacattgaatttgtagattgtttttggtaggttgatcattgtcacagtaggattgctacccatgcccataagcatgaaatatgtttccatttgtttttgttgtctatgatttcttttagcagcattttgtagtttttctcatagagatctttcaccac

SEQ ID NO: 186010 - DNA, 606 bp, Homo sapiens
tttttggaattttcagcctttttacactggcttctccccatctttatggatttatctacttttggtctttgatgttgatgaccttcagatggggtctctgagtaaacatcctttttgtagatgttgcttctgttcctttctgtttgttagtttttcttttaacagtcaggcccctctgctgcagatgtgctggagcttgctggaggtccactccagaccctgttttcctgggtatcaccagctgaggctacagaacagcaaagattgctgcccattcattcctctggaagcttcgtcccacaggccacccgccagatgccagccagagctctcctgtatgaggtgtctgtcagcttctactgggaggtgcctcccaattaggagacatgggtgtcagggacccacttgaggtggcagtctgacccttagcagagctcaaacrctaggtgttgtttttttatgttacgttattttcagtggtaagaactgctttcagcatctttcctatggaagacatatgcagtgccgatatactttttgtgaatttgattattttgaaaggttttttttctattaggacagatttgctgatttggtattattctc

SEQ ID NO: 186011 - DNA, 518 bp, Homo sapiens
gcagtgaatgactcgcatgactttagggcttttctaactcccagaatggagcaataaggatcactgctatatatatatatatatatatatatatatatatatatatatatatayatacacacacacacacacacacatatatatacacattaaatctaacaggaggtatttcacagtctatctttatttgcatactattctagacataatttacagggcagataagtctatatatatattgaagtttttatattactttctgtatgaatacctcccaatacatctatcttctatgtctttattctatatgaatataggtaccaagatgaatacatctgaatatagacatacatgggtagattttaaaaaacacagaaacagaattatgtgagtatgttaatgaggtaactggctgactgtaaccacctgggcttagctaaatggctatttggaaccacattggtttagataactggctgattgtattcacctgggctgagttaactggcttattggaa

SEQ ID NO: 186012 - DNA, 558 bp, Homo sapiens
ttttagttctttaaggaatctgtgtactgttttctgtagtggttgtacagtttacattcccaccagcagtgtaraagtattccctattcaccaaatttcttggagactttgttcatttttgtttattcttttttctttatctttttcagactgggttaattcaaaagacttatcttagagctctgaagttctttcttctatttgcacaattctattgtttaaactttccagtgtattttgcatttttctcagtgtgtctttcattcccagaagttgtgattgtcttttccttatgatatctatttctctggagactttttcatccttatcctgtatttttaaaaatttctttaagttggtttttacctttctctagtacctccttgagtaacttaataatcaaccttctgaattctttatctggcaattcaaagatttcttattggtttggatccattgctggagagctaatgtgatctttcagggagtgttatagaacctcattttgtcatattaccagaattacttttctaattccttcttatttgggtagactct

SEQ ID NO: 186013 - DNA, 529 bp, Homo sapiens
tactgttttctgtagtggttgtacagtttacattcccaccagcagtgtaaaagtattccctattcaccaaatttcttggagactttgttcatttttgtttattcttttttctttatctttttcagactgggttaattcaaaagacttatcttagagctctgaagttctttcttctatttgcacaattctattgtttaaactttccagtgtattttgcatttttctcagtgtgtctttcattcccagaagttgtgattgtcttttccttatgatatctatttctctggagactttttcatccttatcctgtatttttaaaaatttctttaagttggtttttacctttctctagtacctccttgagtaacttaataatcaaccttctgaattctttatctggcaattcaragatttcttattggtttggatccattgctggagagctaatgtgatctttcagggagtgttatagaacctcattttgtcatattaccagaattacttttctaattccttcttatttgggtag

SEQ ID NO: 186014 - DNA, 661 bp, Homo sapiens
tgactcatatgtagaaaatgtggtgtggtagctgtgcgaatgtgccactcagatctcctgcagaaggcataattgactgacaatcccagctacttgttctgaatccatcactgcatttgtgtcagagccacatttcccacagactactcccagccaagccagtgattaaatgtgtcagggatactaagacaggcctatttctaccatggagaatttttggaagcataactttggtttaaggacttcccattggtctgctccaaaacttaragttttgctgtaagttgagtaacttcctatccaaccctttcttccctttctccttcacaggggtgagagaagaatggtattttcaaggttctctctgttgccactggtgcccttcctttttccctagtaggcatttcccccaatacatctattgcacatctacagtttcctcagagaacccaaactaacacattggtaattaatgcccactgtcctttgttttgaagacttagctaaaattctaacttgaggcaacagaaaaaatcccatttaatgtcttgctatgtatgctgtagtttcaaattttggaatatttgatttaatgccagatttttaaaacgaaaacatttttgggtggttgaatgggggagtaaacttgaatcaatagaat

SEQ ID NO: 186015 - DNA, 639 bp, Homo sapiens
aagtatatttgtacgcattattattaatctttttaaaacttatctcacaaatactgaatattgcttctggcagtgggggcaggggaggctgaaggagggagagatgaacaatttgaaacagaaacagtgtaatcccaataagaaatctttaataatcttgaacttactttccccccaaaataaaatagcctgaaccttatatgttcttcatgtggcgaaraggggcagggagcattgtcaagagagacctggtatgggaagattttagcctacagtgaatgttcacagttgctggcagaccattaacaatcaggtttctaaaatgcatttcaggaactctcactttggtcatgcaagggaataagtcaaagactcagaatctttactattggaatttctacctaaaaatgcacttgtcatcaggaagtgaaatctgctgattttttcccatttagatcctaacagtgacactgtgtggataaagctaggagtacacacgaagtgtcgcatgaagaacgccttggctagaaaagagagcaggttctgacaggctgaccaggtgtcacggtgaggaaggaaccagatcataaaaagtgaaaaaaaactgaattttagacaagaaaatgagttcaccaaagg

SEQ ID NO: 186016 - DNA, 424 bp, Homo sapiens
gtactgtgatcatcgttcagggatgaagtaaaggagatgaaaactaggccattctctttgacttagcgtcagttatgaaagatgaataagttcagcatgtctactgtatagtaatgtgactatagttaaaaaccctttatcatgtacttgaaatttgccaagaaggtagattttaaatgttcataccaaaaaaataaaaaggaaatggtaactaagtgccctaataaatatgttattcccaatgaatatatgtatcagagcatcmccttgtatacctgaaatatacccaaatttttatttgtcaatcatacctcaatacagctggaaaaaaaaagtagttggtctagttaattattacaaaaatatttttattttcaacattaaaattagaaattttttgaaccaaaaaaaaaaaaaaaagttc

SEQ ID NO: 186017 - DNA, 424 bp, Homo sapiens
gtactgtgatcatcgttcagggatgaagtaaaggagatgaaaactaggccattctctttgacttagcgtcagttatgaaagatgaataagttcagcatgtctactgtatagtaatgtgactatagttaaaaaccctttatcatgtacttgaaatttgccaagaaggtagattttaaatgttcataccaaaaaaataaaaaggaaatggtaactaagtgccctaataaatatgttattcccaatgaatatatgtatcagagcatccccttgtatacctgaaatatacmcaaatttttatttgtcaatcatacctcaatacagctggaaaaaaaaagtagttggtctagttaattattacaaaaatatttttattttcaacattaaaattagaaattttttgaaccaaaaaaaaaaaaaaaagttc

SEQ ID NO: 186018 - DNA, 424 bp, Homo sapiens
gtactgtgatcatcgttcagggatgaagtaaaggagatgaaaactaggccattctctttgacttagcgtcagttatgaaagatgaataagttcagcatgtctactgtatagtaatgtgactatagttaaaaaccctttatcatgtacttgaaatttgccaagaaggtagattttaaatgttcataccaaaaaaataaaaaggaaatggtaactaagtgccctaataaatatgttattcccaatgaatatatgtatcagagcatccccttgtatacctgaaatatacccaaatttttatttgtcaatcatacctcaatacagctggaaaaaaaaagtagttgrtctagttaattattacaaaaatatttttattttcaacattaaaattagaaattttttgaaccaaaaaaaaaaaaaaaagttc

SEQ ID NO: 186019 - DNA, 424 bp, Homo sapiens
gtactgtgatcatcgttcagggatgaagtaaaggagatgaaaactaggccattctctttgacttagcgtcagttatgaaagatgaataagttcagcatgtctactgtatagtaatgtgactatagttaaaaaccctttatcatgtacttgaaatttgccaagaaggtagattttaaatgttcataccaaaaaaataaaaaggaaatggtaactaagtgccctaataaatatgttattcccaatgaatatatgtatcagagcatccccttgtatacctgaaatatacccaaatttttatttgtcaatcatacctcaatacagctggaaaaaaaaagtagttggtctagttaattattacaaaaatatttttatyttcaacattaaaattagaaattttttgaaccaaaaaaaaaaaaaaaagttc

SEQ ID NO: 186020 - DNA, 510 bp, Homo sapiens
gaatctatatcaattgatggtctgtggttaatagtttggctggatgaccatggactactaaggggcatggttagaaaattgatgaaaaggaggtctggggaagacaaatatgtattgcccattctkaatgggcaaaaaatgaagatatttgtgtctcatattaaaatttaccaaaaggtcacctctgcagaagaagattttagaaatcaagtgggtaagatggtccattcagtcaattatgaattagcctcttttctcaaccacgcctggcattgtccaatgagcttctgaacaaaatggccatggtgtttatggcaattaatgggatggaggttatgcatgggctcagcaacattgacttccactcaccaaagctgacctggatacagccactgcagagtccttaatctgccagcaacgtagaccaacttgagtccctgatatggcaacattccctgaggtgaccagtcagctacctggttgcaggttgattacactaaactgcttcgt

SEQ ID NO: 186021 - DNA, 559 bp, Homo sapiens
ttttccccttcctcatggtgagttttctgatcttatttgctagatttataaaacagtcatttgtacagactggtataaaaattctaaagggatctttcaagtttgctgtaatagacaacaaaaatcagttacattggatcacaggctctgtaaacaagaatctgtgtctattaccagaagaaggatatgggaaaccttgcagggcagaccaagagtcagtctgtcacacggggtaaatgtcagggtcagtgccctattcttcccatcagcaagctaggtgggctacccaaaaattgttgaaattaggcagatttttaaaatgagtcatgcaaagttcawaacaagttcattcaatagcattggtgaaaccgctcatgcaatcaaagatagctacatgcaaaaaagataccatatatctgaaagttatcacattaaagaaacagactagatcagttacaggtggttatcactttgtgacttttactttcttctcttaactgtatatatttctatgtaattctatgtaattgtgtgataatagttacttttgtatcagcaa

SEQ ID NO: 186022 - DNA, 378 bp, Homo sapiens
atgaagatttgaatgcagtgtcaaagagagaatgctggagtggagcaggggagtggagaggcaactstggtaattggaagtccaagagagcagcacgaaggcacctggcctctgcagccccatctcctgttcctgaatcagatgggcccaaaactaggggcaacttccctttgcaggaaaaaggtaaacagaggaacctcatcagcccccactgccactgtaaatacctacagtatttactacaagataattccacagtcctcataagccctgagcccagtttggagagctgctgaaaatttatactgttgcattgcttcaaattagaggaacaacttatgcactcccccaactcccacccacctcctgtgagccaag

SEQ ID NO: 186023 - DNA, 534 bp, Homo sapiens
aatcccaaaattcaagtattggatgactttatggtgttccatgtgtcacatargctttcttcattctttttctttttattattataaaaactgacacattgtaattgtacacatggggtataatttgatgtttcaatccatatatatgttgtataatgataaaatcaggatatttaatgtgaccatcacctcgtgcctttatcatatatttgcggtgaggacccaaagcatctagctattttgtagtacaccatatcttactgttagccatgtcaccctactgtgcaatagaacaccagaacttattttttctatctaattgctactttctattcattgaccaacctctccccttcctttttttttccctcccctcctcagtccctggtagcaactgctctactctttgcttctacaatgtcaactcttttttttttttttttccaattccacacatgagtgagaacatgcagcatttgtctttctgtgtatggcttattcacttgatgtgatgtcctccagttcaatccatgt

SEQ ID NO: 186024 - DNA, 635 bp, Homo sapiens
ctagtgccattttgttgaacattatggtatgattttgctgatgcagctgtaacaactaccacaaagtaagtggctccaatcaatacaaatgtattctcttacagttccaaagatcagaagtcagaaagaaatcttatggggctaaaatcaagaggttagcagagctagttccttctggaggctccaggaaaagaatttgctttcttggctagtagccccaaatcacgtctcactttccattatcatgtcacctttttccttctgttgtcaaatctctgtgcctctctcttataaggacatttgttattacattttgggcctgctcaaatagatccgggtaatccccttatttcaaaatccttaatttaatcacatctttagagtccttttttccaagtaagattacattcacaggttctggtgattaggatgyagatatcttagggcaccattatttagtctaccagaattaatactaattttaagacatatgtttgttctcatttaaatagtatctatctggaggtagaaataaacaggtttttaaatacttaaattatctttttgggtagttatttaactctaacctatacagaaaacttctaacaggacagatgaccccttgacttagtaac

SEQ ID NO: 186025 - DNA, 501 bp, Homo sapiens
  misc_feature (1)...(501): n = A,T,C or G
nnnnnnnnnnnnnnnaagattattgtaggtcttctcttgttctctgagaagaaanccagacttcatataacaagaagtgagacagaagaacagttttcagaagcatgtgtcactctgctattttaggaaytgttccaataagagatgtttatagtaagcttggtgtgacccagccaagaagcttaatataacaaggttaactgaattgtgggaggaaagtttctagcctgtaccagcttgcatttattaataatcagaaaggttgcggatgacagacttgctgagcatttactaaatctggtacttgtggtttgcaaatcatgtgattaacagctgctatcatctatcctagaaacggcaggaagaagtgttattattttatcacataaaatagtagtcacaaagagaatgaaaacagtttaatttggcagatataaaattcactggttaagcagaaaaccatgctctgccctcccactgagctcactaaagatgggtttc

SEQ ID NO: 186026 - DNA, 501 bp, Homo sapiens
  misc_feature (1)...(501): n = A,T,C or G
nnnnnnnnnnnnnnnaagattattgtaggtcttctcttgttctctgagaagaaanccagacttcatataacaagaagtgagacagaagaacagttttcagaagcatgtgtcactctgctattttaggaactgttccaataagagatgtttatagtaagcttggtgtgacccagccaagaagcttaatataacaaggttaactgaattgtgggaggaaagtttctagcctrtaccagcttgcatttattaataatcagaaaggttgcggatgacagacttgctgagcatttactaaatctggtacttgtggtttgcaaatcatgtgattaacagctgctatcatctatcctagaaacggcaggaagaagtgttattattttatcacataaaatagtagtcacaaagagaatgaaaacagtttaatttggcagatataaaattcactggttaagcagaaaaccatgctctgccctcccactgagctcactaaagatgggtttc

SEQ ID NO: 186027 - DNA, 532 bp, Homo sapiens
agaggagtgtattttagacttcacgttgagagatcattcttcttcttcttcttcttttttttttttttttggacagagtcttgctctgtccccccggctagagtgccgtagcatgatctcagctcactgcaacctctgcctccaatgttgaagcrattctcctgcctcagcctcccaagtagctgggattacagtcgcctgccaccatgcccagctaatttttgtatttttagtagagatagggtttcaccatgttggccaagctggtctggaactcctgacctcaggtgattcactcaccttagcctcccaaagtgttgggattacaggcgtgagccaccatgcccagccaagagatcattcttgaatagagggaaagaagggtattgtcaggaaacaatgtaaaggttgagagatggtcattaccttaagtggtaaaggattctgttggtggaaactgcactggctagaactggtggtcctcatattgaagatcaagtaagattcagaggattttgagtattttcttctt

SEQ ID NO: 186028 - DNA, 532 bp, Homo sapiens
agaggagtgtattttagacttcacgttgagagatcattcttcttcttcttcttcttttttttttttttttggacagagtcttgctctgtccccccggctagagtgccgtagcatgatctcagctcactgcaacctctgcctccaatgttgaagcgattctcctgcctcagcctcccaagtagctgggattacagtcgcctgccaccatgcccagctaatttttgtatttttagtagagatagggtttcaccatgttggccaagctggtctggaactcctracctcaggtgattcactcaccttagcctcccaaagtgttgggattacaggcgtgagccaccatgcccagccaagagatcattcttgaatagagggaaagaagggtattgtcaggaaacaatgtaaaggttgagagatggtcattaccttaagtggtaaaggattctgttggtggaaactgcactggctagaactggtggtcctcatattgaagatcaagtaagattcagaggattttgagtattttcttctt

SEQ ID NO: 186029 - DNA, 552 bp, Homo sapiens
gcttagtaccatgcctggcacttgataaatactttatacatgttagctgttattttcctgaaatttgagggccaaagttaaatgcatggaaaatttgcttagagaaactgaacatcttgtcatgatcccgccaaagttgatttgggaataaattgcctattgctaaattattgttaggaaaatactgacttttaaacatgtatctacttttgcctatactttagccacttcatctgtatactaggaggaaagtcaacaatggcctctccaaggaaggtaactgagaagcggcataacccagtggaaagcatctgtagaaagatcagagccatccacaagaaaaaaagcaatttcaaatccaattcagcagattatcaaataccaatctagcagttttgatagcccacagacgaacaccaagaaatattttgaagagrtactgaggaaaatgactgctgcttgtgttcctacgcccggctctcattggtcaagttctgaggaagtcgatgccttcatttcatcgcctcaaataatatctccaagaaccccatc

SEQ ID NO: 186030 - DNA, 334 bp, Homo sapiens
ccagcataaagtcaattgtgttaggcacaaaagaaccaaattagattttaaatatggctatttattcaggctacttactgaactgcctttatctgtctatgagatactttgccttttctcctaacttcctcgcatttctggatagacagtgaaatgtccgcaggacttttcccaaatcttattaagccatgagttctgagctcattagaagattttgttttaagctgtagctccattgtccagctgggtgtaagttctagctttattgtcagatagacaattatstagtatctagtagataaagcttgggtaaaccacctaatgtctctaaacc

SEQ ID NO: 186031 - DNA, 562 bp, Homo sapiens
tcttagtcttaatccctgccttctaggacatttggtgcttctgacttctgagcctctcaggcattctgtgaggaaactggatggcttctcattgtcgtaatcctttttgacacttgcatttccatttacttactctactcagtcagttactactcatccaaccacttttccaagttttyccatcacttatctgctgtttcttctttttcactttatttcattttgtggatttatgccatctgtattcttttgtgaatagctctggaacatttttcaatgggtaaaaaaatattagtgagtgttctgtctagctcattcattcaggttctctctgcctctggctgtctttgagtaagctatttcccaattctgtaaaaagacaagttaacttgtggaactgagcataatataaatattttcaatctataggtattttatttaaatcctgaccacaatgcaaagaggttttctccagtagggaatgtaaatctcttcaagtcaaatcctcatttgaatcaattgtaacatctaactggttcccccattaattaatgagttaatt

SEQ ID NO: 186032 - DNA, 573 bp, Homo sapiens
ttgttatgactatttatgggttttgtgctgattgtagaatcctgggtaagataaaactccattgggtcttcattttcagaagagcatgaggtttagagaggttttataactwgctcaaggacacatgggtagagtggcagggccggggactcagtttgtccctggctttgtctgatcctaaagcccaatgtcttaactacctattgcttctggaatgaagcagagatccatgggatcctggcctgctggacctgataaatgagcctgcagaaggaaatcccagagagaaaataagtctcccaagtcatcatcaatatgggagtagaacttgaatccccaagtgaaatgaaagcacagggcatacattctaaacagaaaaatctataaacagttaaagattaatgcaccttagtgaggctctggccagatttaaaaagaacaaatcttgccatagcaatgtttttacgttcttggggcagaattatacaatgaagagatgaaaggggagcagctggtcaaacacgcattgatttccaggaagcctgggatcaagtcctctaaggccctccctgt

SEQ ID NO: 186033 - DNA, 573 bp, Homo sapiens
ttgttatgactatttatgggttttgtgctgattgtagaatcctgggtaagataaaactccattgggtcttcattttcagaagagcatgaggtttagagaggttttataactagctcaaggacacatgggtagagtggcagggccggggactcagtttgtscctggctttgtctgatcctaaagcccaatgtcttaactacctattgcttctggaatgaagcagagatccatgggatcctggcctgctggacctgataaatgagcctgcagaaggaaatcccagagagaaaataagtctcccaagtcatcatcaatatgggagtagaacttgaatccccaagtgaaatgaaagcacagggcatacattctaaacagaaaaatctataaacagttaaagattaatgcaccttagtgaggctctggccagatttaaaaagaacaaatcttgccatagcaatgtttttacgttcttggggcagaattatacaatgaagagatgaaaggggagcagctggtcaaacacgcattgatttccaggaagcctgggatcaagtcctctaaggccctccctgt

SEQ ID NO: 186034 - DNA, 573 bp, Homo sapiens
ttgttatgactatttatgggttttgtgctgattgtagaatcctgggtaagataaaactccattgggtcttcattttcagaagagcatgaggtttagagaggttttataactagctcaaggacacatgggtagagtggcagggccggggactcagtttgtccctggctttgtctgatcctaaagcccaatgtcttaactacctattgcttctggaatgaagcagagatccatgggatcctggcctgctggacctgataaatgagcctgcagaaggaaatcccagagagaaaataagtctcccaagtcatcatcaatatgggagtagaacttgaatccccaagtgaaatgaaagcacagggcatacattctaaacagaaaaatctataaacagttaaagattaatgcaccttagtgaggctctggccagatttaaaaagaacaaatcttgccatagcaatgtttttrcgttcttggggcagaattatacaatgaagagatgaaaggggagcagctggtcaaacacgcattgatttccaggaagcctgggatcaagtcctctaaggccctccctgt

SEQ ID NO: 186035 - DNA, 603 bp, Homo sapiens
gttgctttggaccaaggcagagtgctctaaaggtggctgtgctgtacccagtactgtgtcttctgatagaaggtaaggttctgaaagctctgagaccaacaagccatgggccttggacaagtcactgccttatttgaaatccatttcagcccttgtgttactaggarctagtacctggcacttttatataacaatctcactataaagattaattataaaggctctttggataaacaaaaggtctctaagactccagctggtggccttttcattgcagtttccaataaaacaaagctctagaacaatgcttaatgtggataatcctttggaatgtgttctaacagaatgctaattgtgataatgaaataatacataacatttattgggagattactgtgggcactactactaagctctttatgtgtataataccatatgcaccccagaacaatttatgaggtgagtattgtgcccattttatggagggggcaactgaggcagagagagataagtgacttgcctgaggtcactcagttaggcagataagtcaggtgtcaaacccaggcagccatcctccaggtgtggcatttgtaactgctgggt

SEQ ID NO: 186036 - DNA, 565 bp, Homo sapiens
tggtcatgtttccatttagtccagcctcagagcaggccgagctgctgcctgctgcccttggtgcccttcatgtatatggttcaggttagtcctagtaacaaatgtccttggctgttcatcttgtgaatgggatcttttttccactatatttttgtcatgtgtgtrtatatatatatatatatatatatatatatatatatatatatatatatttttattacattgcattacaaccattatataggaaatcccatactttgattggtttattttgaatctgggctaccttactgaacttattagttctaatagtttttcaaatgcttctcctggactttctaaggacacagtaacaccacctgcaagtaatgaaaactgaatctcctttctataactatatttcttatttttgactgataccattggaaaataatggtggtgagtaggcattcttttctattcccttgcttctgtggggatgcttttgaagtgttatgccattatgcatcatgctaaggaaggatccttacagttctaatttactgagagcataaaaaaaatcccc

SEQ ID NO: 186037 - DNA, 590 bp, Homo sapiens
agaagacaatatattaatgtcagttccttctggtatttttcaaagtgaagtctgcattgatgtcattgacaaaaatgcaaattccagattgtaaccaaatctgcttactggcagtgaggtttaggcactttaattattcacaagcatcccaggcaattcttatgtgctagtggagaaccacagattggcattggctatagagagaccacttcctttcagtcatccaaggttattttattaacttagcactgggctccaacgtaaacaagggctacttttctataatgatcaaattactaattttataagtatagaataaaaggatatgggtttcttagattgtaaatgtttgatgtagttaatgcaatttcatttttgaggtttgtttctaataatactcttaatttacatgtctaatggattccttgtacacaattctgatyatgtaaatttaagatgatcttttccactttgcaatacaagacatttaaaataacctaaagttgcccattctcactaagcacctgaaaattagtccctgtggggaaacttttttcaagttttatttttctttttatttcaagtgttgt

SEQ ID NO: 186038 - DNA, 523 bp, Homo sapiens
gatcagccccataggagcaatggcagaggaacacgcaggacttaggagtgagctgtatcacttgaatggagctggaacttaattgtagcttcattaaatagatccaaactaaggctagctacattttctaagtatcacatttcccaagtcttcattttcctcattagaggggtttcagttgctcacaaaagactcagcagatgcctgaacaattcattatactcttgtacacatctggcttaatcaattttgtaaaatgaagatgtcttgtccaactttacatgtagaacagayaaaaactttctttcctactggaaaatatatttggggcctgcttacatcctgattcacagaatggtccccttacttcctgtctaccttatatctgaatacctctggttcacagagtaacaacacctttcagaaatgttgaaatttttttttcagggtaaggcatttagattgggagacaaacaaacaaacaagcaaaagaatcaattcatcctccccaccctcaccaagg

SEQ ID NO: 186039 - DNA, 499 bp, Homo sapiens
tcaaggtagtatctttgagtgttgttgattcacgcgttgtgaaatttttaattagttgtgttacaaaggaatattctggcacttccaaggcttgagcataaaacatcttagagattctacttggttttctgsaaaaacctattcttagaacccttagccactttgtaagaagagtgaataccctgttgaagaggccacacagaaaggccttgcgaatacctggagagggaggggaacccagctgagactgattatctagctgtcccatccaagacatgaggcatgtgattaaacctgtcttggaccttccagttaagtccagttggtgtgtggagcagaagtatcacccagctgagagccctgactcacaaaatcataatattcaataaagtgttgctttaaaccactccattttgggaaattaagtaataacagcaatatataaccaaaacacgtttgtcaaatctttgacccatttgattaaaaccgttacacatgt

SEQ ID NO: 186040 - DNA, 537 bp, Homo sapiens
atgggaaatggtaatagattagtttggagaagataataacaacccaactatggaaaaacaaaactatacactatgtctgctagtctgctcaggccaccgtaacagaatattgtacaatgggtggatttaaccaccraagtatgtcttctcacagttctggagtccagaaagtccaagaccaaggctccagccaatttgatttctagtgagggctctcttcctgtcctataaatggccaccctctcactgtgtactcacaaagccttcccactgcctgcaagtagaaacagagtgaacactcttgggtatcacttcttctaaggacactaaccctatctgattagagtcctgtcctcatgacctcatttaacctcatttacctccttgtaggccctatctccaaatagatgagtttggagaggacacaattcagtctactccaccatgctgacaagttttaattgtaaattaagtgcaatggcaatcattgaaaagaacattagtaggaagacagcaatgatcagaggtgtgttctga

SEQ ID NO: 186041 - DNA, 608 bp, Homo sapiens
ggcagaagcaattgaagcctacctgccctacctaactccgcataacaccagaggttgcctagaacattatcaataaaaaaaagaagaaaagaaatgaaaagaaagatgcagggatgtcgggtaaggtagrgagagagagagaaagctattggggcagtaaaatgttatacatcaatttatattgacaatcttaaaaagtaatcacattgaaaaagtaaatcgcaaatttattcttttcttgatgaaaattactcagatttgctgggcgtggtggcatgtgcctgcagtcccagctacttgggaggctgaggtgggagaatcgcttgagcctaattgcttgagcctagcagtttgaggctgcagtgagctgtaatgtcactgctgtactccagcctagcaacagagcaagaccctgtctcaaaaaaaaaaaaaattattcaagcgatttagctgtattatatccctctagcctggtggaaccatatataacactttcattttaagagttctggatgaatcagggactgtcatacccttcttttgtatctttagcagtgtcaacatgagagctaaattaataaaattactcaaaaaacagttcattgaat

SEQ ID NO: 186042 - DNA, 539 bp, Homo sapiens
ttcactctctaatccaaattgctaattttctcattcccatgggaccagggatacatctctctgtcctgcctcggtattcctagattctctcttctagttctgggtactgctatttctgtctgggaccatggtccttcctaagttggcgctgtcttttactttctcatgcactgatttttttttttwaaaaaaagcttctaagcaaaaaataatgtcaaaaatttaaaaagatataaatagcaaggtaaggtgttattataattgcaataaagcctaagaaacaccagcataataaaaataatattgaacttgcagttatagaacattggtctcataagggatgtgtggccacacatttcctgttggaatttaagatgttttgtttaattttcctgagtgtgctacaatgcttcattacccccacctgcttctatgtctccctacatatcccagagaagaggtctggaactacgtttcccagaatccccttctcaatgacatcccaggtttgtgtctggtaagtacaggcagtcatggtc

SEQ ID NO: 186043 - DNA, 591 bp, Homo sapiens
taaagtgaaagcaaatttattaagaaagtaaaggaataaaagaagggctacttcacaggtggagcagtggcaggggctctttgactgaatatatttatagttatttcttgattatatgctaaacaagaggtggagtactcatgagtgttctgggaaaggggcagggatttcccagaactgagggttcctcccctttttgaccatataggataacttctgggcattgccaaggcatttgtaaactctcatggtgctggtgggagtgtcttttagcatgctaatgcagtataattagcatataatgagcagtgactacaaccayagatcacttttgttgccatcttggttttggtgggttttggctggcttctttactgcaacatgttttgtcagcagggtcttcgtgatctgcatcttgtgccaacctcctatctcatcctgtgaataagaatgcctaaccacctaggaatgcagcccagtaggtattagctttattttatccagcccctattcaggatggagtgactctggtttgaatgcctctgacaagagtaagttgacatactgagaacaattaaagtctacacatgg

SEQ ID NO: 186044 - DNA, 568 bp, Homo sapiens
taccaagggtgaaaaaatacaggccaggcatggtggctcatgcctataatcccagcaccatgggaggctgaggcaggcggatcacttgaggtcaggagttcaagaccagcctggccaagatggtgaaaccctgtctctactaaaaatacaaaaaatagccaggtgtggtggcgtgcgcctgtagtctcagttactcaggaagctgaggcaggagaatcgcttgaggctgggaggcggaggtggcagtgagccgagatcatgccactgcactccagcctgggtgacagagtgagactctgtctcaaatatatatatacatatatattatatatatgtatatgtatattacatrtattatgtgcatgtatattatatatacatttatactacatatatgtatatattacatatatatgtatatatattacatatatacgtaatatatatatttcctcttttttgcaagtaatgcaaaacaacatttttacattaaaagagatatagatctattttagataggtttcaaaatttacgctgttctaaacacgtccaagaaatttcctgcttc

SEQ ID NO: 186045 - DNA, 547 bp, Homo sapiens
tcacatattcttactatgtgggagctaaaaacatagatttcatggaagaatgagagaatggtagaatgatagtctctggtaactatcattctgctctctactaataccaaagaagactggagaggaggaatgaagacaggttggttaataggtataaaaatgcagttacatagaagaaataagttctaatgtttgatagcccagaggatgactacagttaacaacaaaatattgtatatttcaaagtatatagaaattttgaaatgttctcaacaaaaaaatgataaatgttcaaggtgataaatatcttaaataccctgatttgaacattacagattgtatgcatgtatcaaaatatcacatgtaygccataaatatgtaatatgtaaaattgtgtatgaataaaatacttttttaaagcacaccagtagagacatcaacatgaacaaaagccttaagtggccaagaactttacttgctccaagaactaaaagaagcctagtctgaccagagcattgtaggcaatggaaaagcacaaggggaggat

SEQ ID NO: 186046 - DNA, 547 bp, Homo sapiens
tcacatattcttactatgtgggagctaaaaacatagatttcatggaagaatgagagaatggtagaatgatagtctctggtaactatcattctgctctctactaataccaaagaagactggagaggaggaatgaagacaggttggttaataggtataaaaatgcagttacatagaagaaataagttctaatgtttgatagcccagaggatgactacagttaacaacaaaatattgtatatttcaaagtatatagaaattttgaaatgttctcaacaaaaaaatgataaatgttcaaggtgataaatatcttaaataccctgatttgaacattacagattgtatgcatgtatcaaaatatcacatgtacgccrtaaatatgtaatatgtaaaattgtgtatgaataaaatacttttttaaagcacaccagtagagacatcaacatgaacaaaagccttaagtggccaagaactttacttgctccaagaactaaaagaagcctagtctgaccagagcattgtaggcaatggaaaagcacaaggggaggat

SEQ ID NO: 186047 - DNA, 556 bp, Homo sapiens
tatttaaacaaatagatggcagaaaacttcccaaacctggaaggggaaattaacatccagatccatggagcccaaagaacacaaaatgacttcatcctaaaaaaagtatttgtggaaacaaattataatcaaattgttaaaagagttaaaataaaaaaaaagagaaaatttcaaaaacagcagatgaaaaataacttgtcacaaacaaggaagccctcctaagactatctgtcactttcttaacagaaaccttgcaagccaggagagagtgtaatagtattcaaagtgttgaggagaagcaaacaaataaacaaacagccaattaaggatactatacacagcaaaaccatcctttagaaataaaggagaaataagscttttctaaaaaaaaagcaaaagagtgagtttcttaccactagacctgccttacaagaaatactaaatggaatacttcaagttgaaagaaagaataaaaatcagtatcattaaaatgtacaaaggtacaaaattcagtggtaaagtatataatgaaatttataatattctagtgctacaa

SEQ ID NO: 186048 - DNA, 559 bp, Homo sapiens
gctggttacaaaatcaacatgaaaaataggtttctatacactcacaaaaaactattcaaaaaagaaaataataaaacaaaatgttcaggcatacatttaatcaaagaggtgaaagagctttacactgaaaattataataccttgaggaaataaagtagacataaataaatggaaagatatcacttgttcataacttggaagaatttatattgttaaaatgtctatactacacaacctgatttacagatttaatgtaaacctattcatatttattacaatgccaatgacatatagagaaatagaaaaaaaamccttaacttttatatacaaccacagaagatcctgaatagtaagagcaatattaaacaagaagaacaaagctggaggcatcatactttctgatttcaaattatgttgtaagcttacagtatttgaaacagtatgattctggcgaaaaaaaagtagatacatagaccaatgaaatagagttgagggctaaaatataaactcatacctacaaacttcttaattttctacaaagataccaagaaacataatg

SEQ ID NO: 186049 - DNA, 579 bp, Homo sapiens
gaaaagctcctaagattatgagtgcatattacaattgtggaaagtcagggcattttaagagagaatgtcctgaatggaagaaagaagaaaaggtgattcccctcatgaccattaataaagactaggggggccaggggttcctcctgagtagatcccactaggaacccttgataaatttgaaggtgggacctgagggagaagaagtgacagttttggttgatactggggtggctygctgctccctaattcaccaaccaagggatacagaactctctaaggaaaagttgacagtatcggcgctaaaaggggagggattttgtgttccaatattcaagaaaatgttaattaagttgggaccagaacaaattgaggggtcactcttatatgttcctgaagtagaaactaacctcctgggtcaagacctgattgtgagattgggtttagaattggggatagaggagggacacataaaagtaatgatgggcttcctgactgaaaaaagaagagaataaaattaatcccattgtgtgggttaagaaaggcaataggggagggttaaaaatcacatccttacagatt

SEQ ID NO: 186050 - DNA, 473 bp, Homo sapiens
tggctgacccttgtaattccagcactttgcaaggctgagatgggtggaagtcttgaggtcaggagtttgagaccagcctggtcaacatagtgaaacccagtgtctactaataatacaaaaattagctgggcatggtgctgtgtgcctgtagtcccagctactcaggaagctgaggcacaagaattgcttgaacccaggaggcagaggtagcaatgagccaaaaatcatgtcactgcactctagcctggacgacaccatgagccctcatctcaaaaaaaaaaaaaaaaaaaaaaaaaaaggccacccacaaaagatccctctgagttcctttatcctcarattaaagttttacaatatgtaaacataattatcctttgttccccagttgaggaaaactctcaaaaggctcttaattttctggctaacacaggatataacatctcaaaatctaaaactcagctccatcaaacttc

SEQ ID NO: 186051 - DNA, 473 bp, Homo sapiens
tggctgacccttgtaattccagcactttgcaaggctgagatgggtggaagtcttgaggtcaggagtttgagaccagcctggtcaacatagtgaaacccagtgtctactaataatacaaaaattagctgggcatggtgctgtgtgcctgtagtcccagctactcaggaagctgaggcacaagaattgcttgaacccaggaggcagaggtagcaatgagccaaaaatcatgtcactgcactctagcctggacgacaccatgagccctcatctcaaaaaaaaaaaaaaaaaaaaaaaaaaaggccacccacaaaagatccctctgagttcctttatcctcaaattaaagttttacaatatgtaracataattatcctttgttccccagttgaggaaaactctcaaaaggctcttaattttctggctaacacaggatataacatctcaaaatctaaaactcagctccatcaaacttc

SEQ ID NO: 186052 - DNA, 473 bp, Homo sapiens
tggctgacccttgtaattccagcactttgcaaggctgagatgggtggaagtcttgaggtcaggagtttgagaccagcctggtcaacatagtgaaacccagtgtctactaataatacaaaaattagctgggcatggtgctgtgtgcctgtagtcccagctactcaggaagctgaggcacaagaattgcttgaacccaggaggcagaggtagcaatgagccaaaaatcatgtcactgcactctagcctggacgacaccatgagccctcatctcaaaaaaaaaaaaaaaaaaaaaaaaaaaggccacccacaaaagatccctctgagttcctttatcctcaaattaaagttttacaatatgtaaacataattatcctttgttccccagttgaggaaaactctcaaraggctcttaattttctggctaacacaggatataacatctcaaaatctaaaactcagctccatcaaacttc

SEQ ID NO: 186053 - DNA, 473 bp, Homo sapiens
tggctgacccttgtaattccagcactttgcaaggctgagatgggtggaagtcttgaggtcaggagtttgagaccagcctggtcaacatagtgaaacccagtgtctactaataatacaaaaattagctgggcatggtgctgtgtgcctgtagtcccagctactcaggaagctgaggcacaagaattgcttgaacccaggaggcagaggtagcaatgagccaaaaatcatgtcactgcactctagcctggacgacaccatgagccctcatctcaaaaaaaaaaaaaaaaaaaaaaaaaaaggccacccacaaaagatccctctgagttcctttatcctcaaattaaagttttacaatatgtaaacataattatcctttgttccccagttgaggaaaactctcaaaaggctcttaattttctggctaacacaggatataacatctcaaaatctaaractcagctccatcaaacttc

SEQ ID NO: 186054 - DNA, 611 bp, Homo sapiens
ggtctctgctgcaactacttggttctgccaatgtattgtgaaaacatccataagacaatacataaatgagtgggcagacatgtgttcactaaaattttatttataaagtcagcaatctataagtcataatttgctgaccctttaaatcagtgtagttcaatagaatttttacattaacggaaatgttctgtctgtgttgtgtaacatgaaggatactagccacatttggccactgaacacttgaaatgtgtctaacgtggctgagaaacttaatttttaattttatttttatcaatcactttaaaaagaaatttaaataaacacatttttaatgactacccaattgaatagcttgtttatatttgcatattaaacattagtaagcaatacgtcagctttccttattagaatgatttctattcttatttaaataaaagtttatagtctttaattaggtctctatattgcaaatatgrtacaatcatctatgaatatttaaaaataggtcactatttattaaatacaagttactgtttttctttttataaaatttgagaccaaggagtttttatgtgctaaaataatatctttgtggccacaggatgattata

SEQ ID NO: 186055 - DNA, 645 bp, Homo sapiens
ttttgcttacaattagtaaaatcataactttgtcacatagtcttgtgtaaagaaggttggccatgcagtctttcattctagggggtattttcctaatagaaaattagggctctctctctgtaagaaaagatgatggatgctttgtttggcagctcatggtctgtgaaaccatagataacattggctgaaatgacaagtaggtatcactaaggtaaaattcatattaaagaatgaattttcctaaaatatggatctgattgtgtatattagacaaacacagttatttttttccattattttcttatgcctaaagggtcagattctaaaattagcaaactttttgtatcatcaattatattagagagtggaagcacagttatctcaaattaaacctcagtgtatctgcattggaaatcctcttctaataataggctggtgaaaagctacatcatctgtcacacaaatgccacaatcacaaagacaaagaccatcactatttacaatctcaaaacactctatgtatgtctttttcatggccaatttgatgtgatagcacatcatatacctatgaaacttcttcttcctctagtcatttcccttttttagtaatmtaaatgatgaatgaggaagcatataccacattaa

SEQ ID NO: 186056 - DNA, 628 bp, Homo sapiens
tacaaaataaatggtctaaaaataacttgattttctttaatgtaccatttcagtacaatgaagaaaatttataaaaatactctcaaatataaagcagagacttggattctgcaattcaacttactgatattattactttgacactaggagccccttaaagacattgaatataatgcaatcaacagtgtacgaattaccaaaacaatttaaattgtaagtaaaacattctgatgtgtgcataggaaggaatacattacttagtgatagctaatggacaagctctggaagtgaaaataaaggtaatgaaataaaggcaaaacaatatttaattaaataattcgaacaaaaacctttacataatgtctaacaaatcccaattttgagttaagtgtattggtaagagtcttaactccccycaacataaataggttgcccatctctttcttgctcaccccactctatttctctgctcaactcactgtctagtccctacctatatagaatcatcttcttataaaacaaccaaatgtattaataaggcatagaattgtggtaagtgttgatgatggaacattgcagggacaaatacggtaccagtttctctcttggcaccacttttaactacctg

SEQ ID NO: 186057 - DNA, 493 bp, Homo sapiens
tgtcaaatagcacatgaatagatgtggaaaacacttagatattagctaaataaaaatttaaattataatgagacaccatcatgcatccactagggtaagatyaacaagaacaaggacaacagcaaaaattacaacaaagtctaacaatacaaaatactaatgaaaaagcaaaactaagtaaaatgtcatatgttgctggtaggaaaatagcttcttagaagaaaattggttgtttcttataaagttaacccacatataacgtaagaacatgaaatgtgactgcaaggtatttctttccaagaaaactgagtgtatgtttccaaaacaaagaactgtatatgagtggcatccctatttataataataaaacatagaaacgataaaaatttccatcaactgggaattgatgaaaacattctggaacatatatatatatatagagagagagagacagagagagagagagagagatgaaatatgttgcaggactata

SEQ ID NO: 186058 - DNA, 493 bp, Homo sapiens
tgtcaaatagcacatgaatagatgtggaaaacacttagatattagctaaataaaaatttaaattataatgagacaccatcatgcatccactagggtaagattaacaagaacaaggacaacagcaaaaattacaayaaagtctaacaatacaaaatactaatgaaaaagcaaaactaagtaaaatgtcatatgttgctggtaggaaaatagcttcttagaagaaaattggttgtttcttataaagttaacccacatataacgtaagaacatgaaatgtgactgcaaggtatttctttccaagaaaactgagtgtatgtttccaaaacaaagaactgtatatgagtggcatccctatttataataataaaacatagaaacgataaaaatttccatcaactgggaattgatgaaaacattctggaacatatatatatatatagagagagagagacagagagagagagagagagatgaaatatgttgcaggactata

SEQ ID NO: 186059 - DNA, 564 bp, Homo sapiens
cagacatcacatgcaaacacacacacacttatagacagatgcacatattttccttgtaccatcacagcatttttagtggatatatatttttttctgctgctcaagattgaaccatgcaccccactcctaatttttctgtctcagttcctttaattwtcattctctgccctcactatttaattgctccattttcactgacttccctcctttgcctacaacatattctaaaacctaataaactaatgacatattgaaacaggcagaaaaacagaacatgcaacttctgacatttcattacccactaaggtccacaaatatgatgtctgtttcttcatttctcacacaatcttagacccatcaaaacctaggtacacattttttttatatgtggctctgtgatttggggataaacacaaaagcatgcatgcaatagaaaggttatagagtaaacttactccacctacactgtatccatcaacttgcccacatagtcatagtgacagagagatttgagttttttgactattggcagaggtcatagaaagagaaaggtatattttctaa

SEQ ID NO: 186060 - DNA, 564 bp, Homo sapiens
cagacatcacatgcaaacacacacacacttatagacagatgcacatattttccttgtaccatcacagcatttttagtggatatatatttttttctgctgctcaagattgaaccatgcaccccactcctaatttttctgtctcagttcctttaattatcattctctgccctcactatttaattgctccattttcactgacttccctcctttgcctacaacatattctaaaacctaataaaytaatgacatattgaaacaggcagaaaaacagaacatgcaacttctgacatttcattacccactaaggtccacaaatatgatgtctgtttcttcatttctcacacaatcttagacccatcaaaacctaggtacacattttttttatatgtggctctgtgatttggggataaacacaaaagcatgcatgcaatagaaaggttatagagtaaacttactccacctacactgtatccatcaacttgcccacatagtcatagtgacagagagatttgagttttttgactattggcagaggtcatagaaagagaaaggtatattttctaa

SEQ ID NO: 186061 - DNA, 588 bp, Homo sapiens
ttagttggaatatgcaatattctgttttcaataatggattgaagaggtagacaaaagaccaagaacgaatataaatgaacaaaactacaaaccatctaaacctaatcaacaactatagaacattttacatgagaatatgtattctctccatgatagatcataccataattggatcctaaaacaatctaaataaatataatggaattaagaagatacaaattatgttttctgaccccaactaaataaaattaattgaggatttggaaaattgacaaatatgtagaaattaaacatatttctaaaatatattcaattaagacatctaaaaagaggctgggcagggtagctcatgcctataatctcagcactttgagaggcctaggtgggtgggccacttgacatcaagagtttgagaccagtctgaccaacatggtgaaatcycgtttctattaaaaatacaaaaattagccaggcatgctggtgggtgcctgtaatcccagatactcaggaagctaaggtgagagaatcacttgaacctgggaggtggaggttgcagggagccaagatagtgctactgaactccagcct

SEQ ID NO: 186062 - DNA, 564 bp, Homo sapiens
gtcactgtgtgacctcaggcaaaccacataggcacatagcctatgggcttctrtttcctcatctggaaatgggtgacctctaaatgcagcatctaagcatctaactcaggggatttttaataagaataaattgaggccaagaataggaaaaccaaagtgtgaattatgaagtagtctgtatgtatatggctttttattcatcttacagattggtcctgttggcagataaatattagaaattagttatcaaacatcacatcatctagacagccctggctctagaaatgttgacatctacttgtttcactccatgatggaaaagaagaaaaaataaatcctaaattactaatttagacttccccctattcctctcattaacagctcaaaacccctaccatacagcagccttagtgatgaacatgtatggtagaaccttcaagatgtagctaattcccccccaagtgcaaccagctgtgagaacaaattcaactccagtaaccctgcaaaggagcatagattttcatatgttagagacacaatgttcatctcgttcagaggaatcca

SEQ ID NO: 186063 - DNA, 429 bp, Homo sapiens
gactgtctgttttaccttcctcragaaacatagtgttttagaggtgcacatttccttagaaaaaaaaattaggctctttcacatactcttctcagagcccagagcaagcctagaatctctagttccaatgacattttctgttactgagagatacctcatgtttttataaaataactgtgatttaatacacacaaatgttgaaatattaattaaactttaaaagcggttgcagccaacatttactaaatattttctatataacagatggtatactaagcctttaccacagtaacacatgaaatcctttaaaattatcatgatatagggattgtgatcttagtccatttggtctgctaaacaaaatgccttacacttggtggcttataatcaagaggaatttttctctcacagttctggaggctgggaatt

SEQ ID NO: 186064 - DNA, 548 bp, Homo sapiens
atactcaatattttaactgagaatggaaaggtccatgcttcccattttgtcaagccaacttgtaagtgccaaagatttaatttaatttatttctcatatatttaaagtgttcatgtctgctttgggatatgctagggaaataagtgctatgaccaacacaataatttcaatagtcaggtgagggacacatattttagtttgagtaattcccctaaaactatgacccatacttgtggtggatagaattgtgtctctcagaaagacacattcaattcctaactttttatatttgtaaatgtgacttcatttgcaaatagagtcttttcagatgtaatcaagttaacatggggtcacagtggattaygatgggccccaatctaataacttccgtctttatgaaaaggtgaatttggacacggacacatagacaaacagcagagatggcatagccttgtgaatatagaggcagaggttagagtgatgcttctataagctgaggaacaccaaggattgtgggcaaccacaagctagaagagacaagaaaagat

SEQ ID NO: 186065 - DNA, 438 bp, Homo sapiens
gaattcaaaataatcaactcaaagaagctcaatgtactagaaaagaatacagatagacaactaaatcgaaccaggaaaacaatgaaagaacacaatgacagcatcaactaggacatataaactatatttaaaataaaaccaaacaaattctggcacgcaaggacacaataactaaatttataaattaactagaaggaatcaacagcagacttccaagcaaaagaaagaattagaaagttcaaagtcagatcatttgaagtaatcaactcagaggaacaaaatgaaaaaataacaaaggaaagtgacggaagsctaaggattttatgagacaccagcaagagcctcaggacaaaaaaaaaaaaaaaaaaaagagggagagaatgaggcaaagagcttatttgaagaaataatggccaaaaactttccaaatctgagtaa

SEQ ID NO: 186066 - DNA, 545 bp, Homo sapiens
tatcatttctgtgcttctgcacccactaatactgattcctatgaggaaaagaatcatagacaagattttaccttactggtctaaataatatgcctatttatccccttcctgatgttgttctataaattttggaatatggagaagtatgttaccctgtcccattctggaaaataaaagattttagttaaagaaggccttcagccattgactgatccaaggatctatgaaaatatctcaaataacatctgtagttttataataatcacattttcaaatwctaagataagcatttctttccttttttctatttctttaaaatgaaaatatatcttctgattaattgcatctgacacttactgttgggtgggcaagaattgtgatgcagtggtcattgcctgtgcatgtgggaacagcaaacatgccagcaccaaaacttgtagaattggggagagcagtttgaaaacattcccataaataccagcagaggagccttttcactcctacaaaccaagtggttgtgggaaggcagcgaattgggtgtgttt

SEQ ID NO: 186067 - DNA, 463 bp, Homo sapiens
atgtggttgctgagttgagtggaggatgggtggcatcagaactcaaatccgttggtgcatgtggttctcgaaccacgactatctctgagatggctctgttggggatcgtcagagagcaaaygattaacctcatcggaatctgactcccctgtttaaaacctttcaatggccccctctccagggtcctgtgacctgtgcagccacacaggtggccttgctgagaagaaccccctgatgagtttaatgctctgctgtcatggtcctgaatctcattttttaagcaaggggcctgagttttccttttacactgagcccagcaaattgtatcacgggtcttggctttcccatggcctccaggaaatattcaaactttaaggtagttacaagataaataaattctggggagctaatgtatagcatggtgactgtggttaaaaatacagtattgtatactcgaaatttt

SEQ ID NO: 186068 - DNA, 454 bp, Homo sapiens
aaattcttaatcacagcattcataatatgagggaattttaaggacgactagcccagttccctcattttactgaaaatgaggatgaagaggaagtagataataagagttaatgttatttaagtaccttccatatgtcaggtattgtgctaggtattatttaatccgatgaggttggtaaaaattgtatccccattttgatgatgaggaagtcaaggcccagagaratggagattcattcaaagtggcacagctatttaggggtagaggtagggttgggattcaagcacctgatgcctaatcctggctatttttctctgtactgcatagccagtttctcttccaacgagaatgcatgcaaatagtctttggaagaaccaggcaaatccacacctaaatccctctttaccttggattgtatgaccatctctctctgagttcaggatccctcatgaaa

SEQ ID NO: 186069 - DNA, 572 bp, Homo sapiens
attataaaatgaaattgaatcctcattatttttgcaggtaggtaaatacatacatagaaacaagtactagaagcaaaagtagaaaaacaatgatttactgtgttcaaggaggtggaattttaggagatctgtgtttcttcattatgtttccattgtggtttttaaataatcataatcagaagaatgtaaaaggggaaaatcagaaactttactgaaggagactagataaaaatgttgtcattgcaagtatgtggcaaggaaagaacagcaaaaaagcaagtttagaataaccgtcaggctagcaggggagaggctgagtgtcaccaaggatgagtaagcagaggaggaattgtgaagggaaatcaattggttggagaagatgattagtttacatattttaggggtagaggaatcttgtgtagaccctacatgaaacgatmgaccccagtgaaatggggctttagtaaaggtgagggaaggagactcagatgttgaagtcattcagtgctggtggtccttcaaaacacatggatgcatgaggtttctccaaatgtaaaattagagagtcagaa

SEQ ID NO: 186070 - DNA, 573 bp, Homo sapiens
ggcagtgctgcacttgattcatctttgcatgcatttcacagtgaatgttatgctgcatttcatgtggtaggtactcmaatatttgttgcataagtggatggaaatcttacatctatctttataattaatagatcatttcagaagattttgggggagagcagattttcaagatctccaataagctataatttatttttattcatttttaaattttacacacagtaaaatttatttctctttgtatgtgttcagttttaccaaatgtgtagattcatgtaaccactatcccagtcaggacacagaagagttccatcagctcaagaactcccaccaatttcattttacacagctgactgattgatagtgggctgtgaagtctgagcattatatagccaaatattcatgctctgcatttatgttaacagcttcaagtttgcaggccagatttctttcctttctttgcacatgggtacctttagttctagagctggatgaagcacttgctttgcctctgtatgaacccacttcattggagtaaagagttggggaaaggattttgatccagtgaaataa

SEQ ID NO: 186071 - DNA, 573 bp, Homo sapiens
ggcagtgctgcacttgattcatctttgcatgcatttcacagtgaatgttatgctgcatttcatgtggtaggtactcaaatatttgttgcataagtggatggaaatcttacatctatctttataattaatagatcatttmagaagattttgggggagagcagattttcaagatctccaataagctataatttatttttattcatttttaaattttacacacagtaaaatttatttctctttgtatgtgttcagttttaccaaatgtgtagattcatgtaaccactatcccagtcaggacacagaagagttccatcagctcaagaactcccaccaatttcattttacacagctgactgattgatagtgggctgtgaagtctgagcattatatagccaaatattcatgctctgcatttatgttaacagcttcaagtttgcaggccagatttctttcctttctttgcacatgggtacctttagttctagagctggatgaagcacttgctttgcctctgtatgaacccacttcattggagtaaagagttggggaaaggattttgatccagtgaaataa

SEQ ID NO: 186072 - DNA, 602 bp, Homo sapiens
acttcctataatatgttgaacaggagtggtgagagagttagccttaccgttttctcctggatccaatctcaagtggaatttaaacttgcaaagccctactgatattctagaaatttctaaatttttaaaaaagtattagcaggttaaatctctataaatctgatttttctctgtrgagtatatctttttaaaaattacccatgatctttcctcttgtgaagttagataaaatggatagagttattagttgctcacattcccctattttattacttttaatagtttaatatattatcatttatttattattatattatttagtattagtattatttattagttttattgctggcagagaccctctgtctactatagatggatttttttccttctctgctacattattccaatcaggagagagaaataaaacaactttctgacctagattttcagctactccttcatttcttggctcccatatagcaatctcctagggaaaaaaaacattgtctatatttgctgtctccagtgcctctcctagcattctttcttgagataatcccagtcacatttggattcctactactctcctgatattgctc

SEQ ID NO: 186073 - DNA, 602 bp, Homo sapiens
acttcctataatatgttgaacaggagtggtgagagagttagccttaccgttttctcctggatccaatctcaagtggaatttaaacttgcaaagccctactgatattctagaaatttctaaatttttaaaaaagtattagcaggttaaatctctataaatctgatttttctctgtagagtatatctttttaaaaattacccatgatctttcctcttgtgaagttagataaaatggatagagttattagttgctcacattcccctattttattacttttaatagtttaatatattatcatttatttattattatattatttagtattagtattatttattagttttattgctggcagagaccctctgtctactatagatggatttttttccttctctgctacattattccaatcaggagagagaaataaaacaactttctgacctagattttcagctactccttcatttcttggctcccatatascaatctcctagggaaaaaaaacattgtctatatttgctgtctccagtgcctctcctagcattctttcttgagataatcccagtcacatttggattcctactactctcctgatattgctc

SEQ ID NO: 186074 - DNA, 366 bp, Homo sapiens
ccatatagattttcttttcatactatttacatcagaaataggtactattttgtctgacttgtggctcaccctctacttggcctaggattttacagttctagactgtctaaggaatgaacataaacttgtttcttactccaataaggaatttctctctcttgaagttgattcccaaagcacatgaagagcagtcaaatgcacaatatttggaattgcacaggttctgcctgtctgcsaggtatctatcagggaggcttttccttaggtctgttctgttcccgggagctgcagtgattattgggtcagtggggatcacgtccagtactgggcacttcctatacccttgtaaaatgctcattgatatga

SEQ ID NO: 186075 - DNA, 402 bp, Homo sapiens
tgctggtgctcccagttcaaggaccactagctataatatgattagctagcactgtggccatccaaagccatgaaacacaaggtgcttgtagatcaatttatgtcatactagaaaaactttttgtattgcagaaataccagccgctgagaggaaaaaagataatttgtgttgtttactagtctattcttatgatatccatcattctggactcttatctattctttgaaagagattacaaatagtcctcttgtgagccagtcctctgcacagctattgttcccaacacaggaggtgagaacttccttatcatcagcagcctttgtgtggagggcaactcctagttattgyaggatttacaatccaaattcatcttgggaagtagaacctgtggagaaggagaga

SEQ ID NO: 186076 - DNA, 297 bp, Homo sapiens
acagatctgcctctcatctttgtcttgcatctatgtcatctgcaaagtatcgtccacattactgcaagtaatatttctaaaatgtaaatctgattgtgattcttctgcttaaaatctttcaaaggctccccattgccttayggttaaaaaccaagctcttccacatggctcactagtgccctcccaatctcttgatctcttcccaccaccacctcttgaacctcacctcccagtacctgtattctaatgctccctccaggaagtaaaatttggcagtgccctgaaccctcatgtttt

SEQ ID NO: 186077 - DNA, 557 bp, Homo sapiens
tgcccatagaacaagcttgtgtgtgctaaatttttctaggtggaaattcttkaaaattacataattacccccttgcttcaatcagatatgcagcatacattcagtagcaataggccttcattatgtggttaagtcagttgtaaattttatcccctataaccactgacacacagcagttaagactgtctctgtcaccaaattctccttctttgaagtattgaaaagaaaagtgttacctgagatcctggatcacctttttctccttttattccaggaaatccatgacagccctaaaagaagacaagaaaaacaaaattcccacttaaaaaaaattttagcaacctcatgacagttttatgatacttgaagaaatatggcttacctcttccccatcaagtccatcaatcccatcgtctccatgacctccctgagagatgacaatagacaggcatcaggtaaaagcaggtctctgccacacgcttattcggaaactaatcccatttggaaatcaaattaaactaagaaaaaactccagtaccttaggtccagaaaatcct

SEQ ID NO: 186078 - DNA, 568 bp, Homo sapiens
atataggccaatgttttgtttttataaaagtcttgcagggacatccttttacctgtatttttatgcacaatcacggttattttctgacatttaratcctgtctatttttttcttctatcattccagtgaaggatctcctagttaagattctttgtgaatctgctatagttttactgagctcttttcaaaggtacatgccaagagatacttaatatgactttgagctcatctaattctgagatatctgctgtcctcacacattttctctgtagagaaaatgcttccaggcaattgaaactggaatttggcagcacacaacatggaaaggaattttaatgttccaatgatattaaaggctaattttgaactcagaccagcttcaatctaatactgttactacaccataggagggatatgtggcatagtctctttcaggagtttgcaatgatgccacaaaaaattattattgtcattatagaaattgtaaatgggaagatatgggaccaaagctagggcacaaggcctcactatgtaactccttagtaatccaattgttttaaaatgttgg

SEQ ID NO: 186079 - DNA, 568 bp, Homo sapiens
atataggccaatgttttgtttttataaaagtcttgcagggacatccttttacctgtatttttatgcacaatcacggttattttctgacatttaaatcctgtctatttttttcttctatcattccagtgaaggatctcctagttaagattctttgtgaatctgctatagttttactgagctcttttcaaaggtacatgccaagagatacttaatatgactttgagctcatctaattctgagwtatctgctgtcctcacacattttctctgtagagaaaatgcttccaggcaattgaaactggaatttggcagcacacaacatggaaaggaattttaatgttccaatgatattaaaggctaattttgaactcagaccagcttcaatctaatactgttactacaccataggagggatatgtggcatagtctctttcaggagtttgcaatgatgccacaaaaaattattattgtcattatagaaattgtaaatgggaagatatgggaccaaagctagggcacaaggcctcactatgtaactccttagtaatccaattgttttaaaatgttgg

SEQ ID NO: 186080 - DNA, 562 bp, Homo sapiens
ttctgtgatctagagtgtggtggccagctttgcaatttcagaatgatcaacgctcagagaaacaatctatatctggcttagtccctgctatatctactacatctggcacatactaagtgttcagtttttattccataaaacttcattaaatcaaggcaaaattcacattaaccaaactcaagcgactratgtatagaaaaagaatgacaattatctatgtaaaaatgagagctatcaatgcccaggggcttggacattcacatcttccaagtggtacattctctccctatagatatgccaaattagaagctaaattgtaatcaaaactctgcttggggtggtggaatcacaacaagagagttactgtagttttacaattgaaatgtttagtagcatccaattgggcagatgtttctactttaaaatcaaatacatacatctatatttatatatgtatctgtatatatgaatgcacaggtgaggccttgagccaagggacacattctttggcagtgtttaattgaaattttgtaatgatagaaatattctgtatctatgctaa

SEQ ID NO: 186081 - DNA, 562 bp, Homo sapiens
ttctgtgatctagagtgtggtggccagctttgcaatttcagaatgatcaacgctcagagaaacaatctatatctggcttagtccctgctatatctactacatctggcacatactaagtgttcagtttttattccataaaacttcattaaatcaaggcaaaattcacattaaccaaactcaagcgactgatgtatagaaaaagaatgacaattatctatgtaaaaatgagagctatcaatgcccaggggcttggacattcacatcttccaagtggtacattctctccctatagatatgccaaattagaagctaaattgtaatcaaaactctgcttggggtggtggaatcacaacaagagagttactgtagttttacaattgaaatgtttagtagcatccaattgggcagatgtttctactttaaaatcaaatacatacatctatatttatatatgtatctgtatatatgaatgcacaggtgaggccttgagccaagggacacattctttggcagygtttaattgaaattttgtaatgatagaaatattctgtatctatgctaa

SEQ ID NO: 186082 - DNA, 568 bp, Homo sapiens
tctatgttgccacaggaacaacacaaaacaaacttacttgggtttgttttcttagttgtatccaaaacacagaaaatagcacatgatagatttaaaaacataggtgttttagtctatgtgtggaytgagagaaagctctcattcaaaagacattaaaattgataggctcaaactgaaggttgcacaatacaattttaaaagcactacaatttgtaagaataaaatgatgaccccaagtaatcagaaaagtgacaaattacaatttttcaaagggatggatacacgaacaggcaaatataaaatatccagttgatagaggttaagaataataatgtgaagtaatgaaaataaactatctttaaaatacccagggttttcttggtgggtggtgcttaggatactagatataatttaactaaaagaaagacgaatttgtatttctagttattttctgcttaacaatggtcatagatagccaagaaacaattctagaaaatcatttgggattaaaaactggctctggaaaatccaggcatgtgggtattaaagatttgtaagtttaaagtaa

SEQ ID NO: 186083 - DNA, 499 bp, Homo sapiens
atatataatatgcaaatatattgtctttagcatgtatctttttagtcttaatcccttttgtctatctgtaatctctgccatcctcttacagtttctccctcaacattctgaagtctatcccatacttcttgaaaataaacatagcatcagccatatattaaaaaaatgaaaagatgttaactattacttaataaacgtgtaaggtcacattctgatccaccaggaggactacaccaccattttaagattcaagctgccrtggaaccatcttgaaagtcatgagaggagaaattgctgaagatgtttgtggccttgacagagtggccttgaccactgtagtgaagtgtgaaagattctcttccatgtaacacatataaaagaaataggcttctacatacagtttagtattcacaggatctacttcctggtatctatttgtgacagaaactacttaatgtccctgaatatctatctttccattcttctatgttaataaaat

SEQ ID NO: 186084 - DNA, 557 bp, Homo sapiens
acacactatgcgtggaatataatcaactagtattatccctatttgaattatctaagtttgatcatctatttgacaattaaaaatataaatccattatatcaaattatcactttatgttgttttgttcatgttttgttttcctaaagagattgaacttttcttttcacctgtccatttgtttgaaattttcattatatatttctactaaaaggacagattttctgtttgcttattataaagtacattttcaagaatttaatgtagatatttttaagtggaactgtatcttttttctttatgtcaaacccaaggcttgtttcttatttatttttccaatatcaactgtagtgtttctcaaagtatgatccctggaccagccacatcagcatcgtctgggaactcactagaaatgcagattcttggattgtaccccagacctaccgaatcmgaaattctggaggtggagcctccagaggttgagaaccactgacatagtattataaatatcaagtctaaatcagacttctttaataggggtcctttcattggatattaat

SEQ ID NO: 186085 - DNA, 598 bp, Homo sapiens
tcgtctgggaactcactagaaatgcagattcttggattgtaccccagacctaccgaatccgaaattctggaggtggagcctccagaggttgagaaccactgacatagtattataaatatcaagtctaaatcagacttctttaataggggtcctttcattggatattaataagtatttgggaaaaaatcatttctctagaaatcactgataagtagatatgggtttttctgcaggactttttattgtctttaatggaatattaaattctattaatattctgagaaaacagctataatcaaaccaatttggccacagaatcttttaacagcattttatagggctagtattttgtrgaaaacacttcaggaaacaggagttgaaagagttaatcctggagccagctgtaaatttgaatcctatttctgcaattactggtcatgtgatcttgggcatgtcacattgcctctctgagcttccatttcctcatctgcaaaatggggataataatataacctatgacattggctaatgtaagcagtaaatgagtatgaagtgcttcaaacagctcttagcatagagtaaaagcttcataaatgtt

SEQ ID NO: 186086 - DNA, 398 bp, Homo sapiens
gaattctaagagtttgccactgggttcctggtggagagtaggaggcccataaatttcaaacatgcttgtgtgatgcaaaatcctggtcaattactataaatgtatgtattgataaaggaagaatgtggtgtatatatgaccagttcttagtcctttgcaagaagcaaaagaagcatctcaaacaagatggtcagttgtcatcttttaraactgcccaagatggagtaaagaagttggatttacctcacaactgtaataaacaaaagaaagcaaacaaaacatttgaaataacaacttttaagacactggacattaggaaatgaaatacagtaatctttagagaaggaaaacaaatgagatgaacactacaagtgctccagcttatagccttgagtgtt

SEQ ID NO: 186087 - DNA, 512 bp, Homo sapiens
gtctaagtttccttcagaatattagaaaattkcacaagtcaaatttcattcatggactgaacttggactattccaatcacatacataaaatggattcctcttatattatctggtggtattcacatttaatcttgcaggggacttggctaactaattttttatctctcttctctattacctcagacttcttcctgggatatatgaaataaagacagaaaatggtgatctgtttgatgaatttgattcccaggcacaacatctccttgtattagggaacaatcatagtagtggttctgagacagctactgatttgatgcagaagttatatctgctcttttcaactgagaaactggcaatgaaagacaaggaaaaagcacatttagaagaaatttcagctctagtggttgataaacagcaagaaaaagaaggtaatcgtgagtaccatagagctgaagaccctcaagtacctttgtttggattttcccctggtggaagatgagcagttagaattc

SEQ ID NO: 186088 - DNA, 649 bp, Homo sapiens
taaattgaccatttctccatttctcagccagttcaactgattgtgcatgcagatagttgccaaataagagctgtcaaacttcctagaattccatatrgaagccgataatggaaatgtaataaaatagaggattaaaatattgtatccaaatgggcagtgaactcactttctctaaaaagccattattttacatagtctttagaaatatattttgcaaataaaatcattttttaatattaagcataatttgcaggacaactgttctgcaagaaattaaaaacatgaaaccctgtccctattaaaaacacaaaaattagccaggcttggtagcacgtgcctgttagcccagctactcaggaggctgagacaggagaatcacttgaacttgggaggttgaaggttgcagtgaactgagatcatgtcattgcactccagccaaggtgacagagtgagagtctgtatcaaaaaagaaaaaaaaaaatcttgaaaacacattccttgaatgccatggccaagttttactgtgtcagtgttctctattttgtactgttgttagtatattttaaaaagttttccatcaatacattaccctaatctttactaaaatattttagtaaacattttgctctttagtcactgttgttgctaa

SEQ ID NO: 186089 - DNA, 561 bp, Homo sapiens
tgtgcaatttacttagtaaagtcagttaagagatcacactggagatgctacctgaagcagcaaatgcctactgcacctcaggggcctcagtgaaaagaagagcatatatactgtcagaggagggatattcagtcccaccaatacaatatgaacagcccatttatctctctacactctggaattcagtgaatattttagaagtcttcaaaaactaggaataagatattacagattaatcttttgctgacttgactaatgtcagtaacgacaagtgttcagtagcgagtgaattaagtaattaatatttaaatgagtatataatctttcaatataagaggcactaggtatatgtcatatagcatctctgtaccgctgcctgaccactagcaaggaaatccaggaggctccctggagrtagcctactagaataattcagaaattcttttcacagttaatgatctaagctgtatgggagaaaggcaggcatttttctcatattcttcacttttaagatgaaaacacaagcctattgtttcttcccaaggaggaggagaaagttta

SEQ ID NO: 186090 - DNA, 607 bp, Homo sapiens
tgttcagtagcgagtgaattaagtaattaatatttaaatgagtatataatctttcaatataagaggcactaggtatatgtcatatagcatctctgtaccgctgcctgaccactagcaaggaaatccaggaggctccctggaggtagcctactagaataattcagaaattcttttcacagttaatgatctaagctgtatgggagaaaggcaggcatttttctcatattcttcacttttaagatgaaaacacaagcctattgtttcttcccaaggaggaggagaaagtttatcatatacagagcatgagttaaattatataaaaatatgttcagaaaaaaaatgtccagagatttgcccttttcctctccccttcattctccattactatttctgggaatgacatgttcttaactagagcyggaaaggaagggatcattaggattaaagaggagaaaaggcagagagagagagagagagagagagaaggagacaaggtacaagggtagtaagaggtgtggaatattttctagttgatttcctactgccttgtgccccaatggggtaatattgaatccctctctcttctaactgaatatctcactgcaca

SEQ ID NO: 186091 - DNA, 396 bp, Homo sapiens
cctgtacattttactgggtttttgagataatcaagtgaaacaacaatatctgtgaatgcaccttatcacctaaaaactatttatattattaatgtttttgcagactgatacaaagtgagaawattggaaggaaacaggtcctaaagagaaaaaccttgaaaatgttatgagtttatatttcaacaagtgctaggataatgctaatatagaagacaggataaagttgctcttaaatcgcataaaacatatgatttatcttgatagattgcactcactccaaatttcatcttccatatctttgacctctagttataataactcagaagatgattacattgtatgtgaattttccaagattcatggcctatatatttttttttttgctgtagtgtacac

SEQ ID NO: 186092 - DNA, 625 bp, Homo sapiens
ccaacctgtttttccgatgggaagctgatgctctcaggcaacatgggattgtggcaattggagaggagaggaattagggcactgcacaggagagagcagagcctgccagccaagtattctgtagctaaactggagttaaatgtcagttaaaatattattgatgtaaacctatttctatgcacttttggtttgttttctctgagttttgagctttaatttagggaaaccagaataaaaagggggttttatttacaggatagagtggtggaacagaatccctaagaataagtcccaggggtgattttaggtagccagatcaacttcagaaccggaaaagaacagcagcaaagaaaatgagaataaaagagggtgaaaacagaggtcagctgaggacactgactctttccctcctgacttgttctttcccaggaaatgatgggaatggagaggggctttaagatacactgtggaagtaaagtcaaataggaaatgtactctcagcattgtgtatagctgtttactcctcctgattgcttttttcctaacactgagtcacaaagtttattatgaamttcaggtcctttccaagtatagaaatgtagggctcctttcttctccttaccag

SEQ ID NO: 186093 - DNA, 612 bp, Homo sapiens
aatgtttctattgcttacttttaaaatgtttggattgcctgtaagttattaatttctctcaaatttaccttccttgaattactcacttctactacaaactaagtaatatagtcaaaactgacctcattttttccatcaccttcaccttacctaaaatgctagaacctatagaatcattctagatggcttcctttcaatcatttccttcatttctattctctcaacaaatgctgtatgctctggtcatttactgtctatcatgtgcatccctacytctttactttcactgcctattcctaaattcagaattcagactatgatctttgcttggttgtaacttagtgattattttccacttgtctagaatgcactttccaactctccttcatatagctaattccaactcatcaagcatggttcataaaacatctccaagaagtcctccttgacttttccacgtgataaatttcttttccatgcttccttaatcctctatatcatagtacttatgccattgaaccgtaactgtcaatttatataaccctctcctatttgccttgaaggtagatagggtctatattattttaattttaacttcttttccaaacaaat

SEQ ID NO: 186094 - DNA, 398 bp, Homo sapiens
gcaaatgtcaaccgtacaaatatataataaatcatatgccaaacattctttaaagatttatatatatatgttcacaaactcaagttagaattttaaccaatttgaggcttgtaagaaattaggtagtgcctctagaaagtgaaagcaaacttagttttcagtttattcaccaggaatacatatgaakaatatagggaatataaataaaattattagattataacaaggtgctgtaggtttggcataccagttcattttacagagcatatggataagcgtccctcattatttgcaaagcataaaaaaagttacgtggatgaaagtcttccacttagaagtcatcaagttggtcttagaagttgtacatttaaagagagattgctttcctctaaaaataa

SEQ ID NO: 186095 - DNA, 597 bp, Homo sapiens
tgcatttccaaatagcttaaaatttaagtgtttgaacctttttcctctatcctactcaycttaaaatgatttaattttgatcctaaatgttttaaattgtagtacatatttaccttgaatcacagtagcatgaaaagtaaatgagtcataacaataaaaagcaagaaaacacgaaagcttacccagagcgcaactgtataatctgaaaacctcatccccaaatccctagggctacttcttgaagctcctgggggatctttcagctatagcatgctgctccttagatgcccccaagaaaggctgaaaagctcttgagtctctgtggtgacatcttttgaaacttcctaaggaggtgatgttgtcacttccctcatctggactgctcactaagctgaagcgcaggaattggaaaggagagctctccttcacatctgtgttcaattaactattagattagcatcaagcgccgcctcagctctgagtacttcattggctcagccaattatcattttcttaagttaattataatttgactccatctttattataatggctaggccagaaggtaatcagattggcagggtttcctgctactct

SEQ ID NO: 186096 - DNA, 597 bp, Homo sapiens
tgcatttccaaatagcttaaaatttaagtgtttgaacctttttcctctatcctactcatcttaaaatgatttaattttgatcctaaatgttttaaattgtagtacatatttaccttgaatcacagtagcatgaaaagtaaatgagtcataacaataaaaagcaagaaaacacraaagcttacccagagcgcaactgtataatctgaaaacctcatccccaaatccctagggctacttcttgaagctcctgggggatctttcagctatagcatgctgctccttagatgcccccaagaaaggctgaaaagctcttgagtctctgtggtgacatcttttgaaacttcctaaggaggtgatgttgtcacttccctcatctggactgctcactaagctgaagcgcaggaattggaaaggagagctctccttcacatctgtgttcaattaactattagattagcatcaagcgccgcctcagctctgagtacttcattggctcagccaattatcattttcttaagttaattataatttgactccatctttattataatggctaggccagaaggtaatcagattggcagggtttcctgctactct

SEQ ID NO: 186097 - DNA, 544 bp, Homo sapiens
aaatgacagcttcaatcttccagctgttcaggccaaaacacttggaatcatccttggtacctctctacctcccatatcctacaagaatctactggcaaagcccatcagttctacctttaatatccataatatcttttctttcttccttcatcaatatcactcattcaagcaaccatcatgtcctacataaactattaaaatcccctacagatttatttccctgtttcaagccttgcccataaaatctatcatctgccagccaggattccggccttttcagtytgagagtcagaccaagtcattcctcacttcaaaactctttaatggctttccatcatacagcttatgtcttacctttagcatggcagcagaggcccacatgatcagctccccaattgccttgctgctttcatctcccactgtcctccctgctccctccactgttagaattcacagaaggtattctaatgtcaatgcctttgcaccagtcagtctctctgtccacaatgctttccttccaggtttccaaattcctgtaattctc

SEQ ID NO: 186098 - DNA, 481 bp, Homo sapiens
tggcagaataagtgattccattgttaagggaaatcacacccataaagaaaatcagagttgatggttttcttacatagatttgggcttcgtgttaaaattctagctgcaattttgccaactggagaaaaattagaaaagtttatagagcaatgattctactracagcatctcgatgaactagtctcagattgttagacttgtgtggtatttatgggtgaataatatgaagtcccatcaactgtgatgtctgactctgcctaaatgctaattaataataacttaaaatattacttcataaagattaccaaaaggtgttattcagaaataaaattataatgtttattaaaatacacttacgatgttaaatcagtattctaagaaaatttggctccagttaacatttggtggtttttcaaaactctcaggatgtatcacataggcaattggttgacattttaggaaagacagcttattagttcat

SEQ ID NO: 186099 - DNA, 457 bp, Homo sapiens
aaccatcctgtcagttttcattttatgttcatgatcaaggacctgaatgatcatgttatatttcctctgtccattaccggggccagtctcttggacctgtgattctcaaaaytgaatccacagtgccttgagagttcccatgacctttgcaggggatcttgagatcacaactattttcatgccaatatttacatgttgtttgcttgctttactatgttgacattagcttcaaaggcataaaagcactagagggtaaaattgtttgtgtcttaacacagttaaggcactgggaccaaactgtagttgaaatctccaaaaagcacattcacttaaattttataagtcagtttcacttaagaaagtcctattagaagcagtaaaactattaatattaaatctcaacccttggatatatgtctttttaatattctttgagacacaaagtatttctgctgca

SEQ ID NO: 186100 - DNA, 457 bp, Homo sapiens
aaccatcctgtcagttttcattttatgttcatgatcaaggacctgaatgatcatgttatatttcctctgtccattaccggggccagtctcttggacctgtgattctcaaaattgaatccacagtgccttgagagttcccatgacctttgcaggggatcttgagatcacaactrttttcatgccaatatttacatgttgtttgcttgctttactatgttgacattagcttcaaaggcataaaagcactagagggtaaaattgtttgtgtcttaacacagttaaggcactgggaccaaactgtagttgaaatctccaaaaagcacattcacttaaattttataagtcagtttcacttaagaaagtcctattagaagcagtaaaactattaatattaaatctcaacccttggatatatgtctttttaatattctttgagacacaaagtatttctgctgca

SEQ ID NO: 186101 - DNA, 528 bp, Homo sapiens
aattgagggtctgaaaatatgacctctctatattcccatgtaaaaaaaaaatatttgttctattcagtattttaatcagactgtttatcagttctcacttgtgcatccttttacatttcttacatatatatgagttgaatatgaagtaattttactttttgctctagacattgggaaaaaaaatcccaaatctcaaatttaaatgtttttttaggctaggtgcaaaggctcatgctgtaatcccagcaatttgggagaccaaggcaggaggatcatttggggccaagagttagagaccagcctaggcaacataccaagacctcatgtctataaaaaaagaaaataaatagccagktgtgttggcacacacctgtagtcctagctacctgggaggctgaggcaggaggatcacttgagctcaggagttcaaggttacagtgaattatgatggctccactgcactccagcctgggtgataggctgaggccctatccctaaaaaaataaaaactttaaagtttttcactta

SEQ ID NO: 186102 - DNA, 579 bp, Homo sapiens
attcaagctaagggcctgcatgygcactaggaggacagggcagagctgccagaaattagcaccttatgcaaatgagctgcccagtcctcactggtttattataaaagcccttgcattcaactgtaaaaacagcaaccttcttctaggcccactctccacagcagagagctttcttcttttgcttattaaactttcaccctttcaccttctaacctcaccctttttgtctatgctccttaattctcttggtcatgagacaaaaactccaggtgataccttacaagtagagactgctacattgtggtgcactggtgagactgtaacacttagagtgttaactgcttcaaaaatggaaagtccttagaaataagccatccaaccaagttttctctgtgactttccccacaatctctgtctttcaattctctctctctcccaaagcacaggaggagcctgttctctgaagtttcttcatttacctagatcctcaaaagatctccaaagagaaacacaattgtcttctattcctttgctgaaaggtgcagtgaagggggaagatttcttcactcctacaccacc

SEQ ID NO: 186103 - DNA, 573 bp, Homo sapiens
ttcagatattaagaagtcacattaaaggaccacgtttttatagaagagccaattacatgtgttaggtattcaaagtaagattggtttctctcctacaccaaataaatgtcataaaactttccagtaagaatttgttaatattatrtcaaattgtaaatagatcagcttatgacctgattttattttaagctttgcatttcattgcatttcacaatttacctgctggttaacactagcacagaaaggtgtaggaattcaaataacaaatgccacacatatctcagccttttgatttccgtttggatgacccaggtattttagactttcaggcaaccaaattatttgctttaatgaagagagattgaaactatttttgcaatgtagcaaagatttcaccctatgagccacagttgtgcttaacacaaaacacactagtcatcatctctcttactcctaaatggttcttcaaaatgtttattttaggtagagaaatcttcttaaatatttctgaaacaaaccatttaaacaaagagtataaacaatatagtttggaatgaatattacagacacaca

SEQ ID NO: 186104 - DNA, 520 bp, Homo sapiens
aacatctgaacagggagttgaatattatagaaatccgcttgatggaaatgaaagacaaggtaaatctacagggtcagtgtgggagtctaccacatactattcaggtagctcaaacaaataaataacgttgtaagcctgacaagtgaaaaggaaacaactaaaagaaatggcaagcaaaatgaaaactgagtcaaytttctaccatgtgtcaaagcaggaatgcatttttaatgtgacttactaaaatacataggatcaattagcaaggcaaattccatttctatttgtttaggatgaacatccaataatgtaaaaaaattataaatgcaatcaaagaggttagaaatgatgaaatgtaatatcaattatggtatgtccaattggaagttaaaatgtgaagtatgattgttgtggacagttgtatacattcaaaacaagatttataatggttatgctgaggacgtggtttgagaggataagaggaaaatttgaattgaatttagtatgaatattactctga

SEQ ID NO: 186105 - DNA, 520 bp, Homo sapiens
aacatctgaacagggagttgaatattatagaaatccgcttgatggaaatgaaagacaaggtaaatctacagggtcagtgtgggagtctaccacatactattcaggtagctcaaacaaataaataacgttgtaagcctgacaagtgaaaaggaaacaactaaaagaaatggcaagcaaaatgaaaactgagtcaactttctaccatgtgtcaaagcaggaatgcatttttaatgtgacttactaaaatayataggatcaattagcaaggcaaattccatttctatttgtttaggatgaacatccaataatgtaaaaaaattataaatgcaatcaaagaggttagaaatgatgaaatgtaatatcaattatggtatgtccaattggaagttaaaatgtgaagtatgattgttgtggacagttgtatacattcaaaacaagatttataatggttatgctgaggacgtggtttgagaggataagaggaaaatttgaattgaatttagtatgaatattactctga

SEQ ID NO: 186106 - DNA, 520 bp, Homo sapiens
aacatctgaacagggagttgaatattatagaaatccgcttgatggaaatgaaagacaaggtaaatctacagggtcagtgtgggagtctaccacatactattcaggtagctcaaacaaataaataacgttgtaagcctgacaagtgaaaaggaaacaactaaaagaaatggcaagcaaaatgaaaactgagtcaactttctaccatgtgtcaaagcaggaatgcatttttaatgtgacttactaaaatacataggatcaattagcaaggcaaattccatttctatttgtttaggatgaacatmcaataatgtaaaaaaattataaatgcaatcaaagaggttagaaatgatgaaatgtaatatcaattatggtatgtccaattggaagttaaaatgtgaagtatgattgttgtggacagttgtatacattcaaaacaagatttataatggttatgctgaggacgtggtttgagaggataagaggaaaatttgaattgaatttagtatgaatattactctga

SEQ ID NO: 186107 - DNA, 551 bp, Homo sapiens
tgctacatatactcaagtgtatattagcaatctaagcatttctgagtttttgatatgaaatcgacataaaaatccttgcaagcaactggaaggtgccttctattttcaatgttagaaacacaaatctgatacccatgttttgggattgttttggtgttttgttgttttgctcttgtaaactgtgcatgcaatgcctggctctctartaatgaagaatatgtggattttattcttatttctttttttcacatgcagaaaaataaattataaatttaacagtaaaaaaataaatgttctgcttcctaaaacagcaaatttattttgtcatttccattgatatatttgtaaacaattctatcatttattttaaaaaaataatgtattccacttgaaataggattttttttgttaaaaagaccaaataactttaagaaagtctcagatacatgcttgtatttgagctatttatattttttgtagagagaaatattttgggattggtgtttccaaatgtattcattcatttagatcccagatacatttgcacattt

SEQ ID NO: 186108 - DNA, 588 bp, Homo sapiens
ttcttaatatactgatgccataacacagtactacaaactggtggcttaaaacaacaaaaatttatattctcacaattctggaggttaaaagtcaaaaaaacatggcagggccatgcttcttctgaaacccatatgggaggacttctttacctctcgctggctactaatggtagctgtcaatccttggcattcgttggcttgcagctgcatcactgcaagctccacttctgttgtcatgaracattctcccttgtctgtttctgttttcacatggctgtcctcctcactatgtgtatctatgtccaaattttcctattagaagaacatcaaccatattggattagggctcatccataaatcacctcactttaacttaattggactgtaaaaatgctattttcaaatacagtcacattcataggtattcagggttgagacttcaacttatctttttttggttggggattggggggggcggatcacaattcaacccataagggctaataatgcatgtcacatagtaggtattcacatatttgaataaatggaaaaacagtctacatgtgtattccataatttaatagtacc

SEQ ID NO: 186109 - DNA, 516 bp, Homo sapiens
atctcagctcatcataagctccgcctcccaggttcacaccattctcctgcctcagcctcccaagtacctgggaccacaggtgcccacccccatgcccggctaactttttttgtatttttagtacagatgggttttcaccgtgttagccaggatgatcttgatctcctgacctcgtgatccacccacctcagcctcccaaagtgctgggattacaggcgtgagccaccacacccggcctttcttttcaatttctttattgacccactggtcattcaggagcatattgtttaatttccatgtatttgtttagtttccagagttcctcgtgttatttctagttttacttcattgkggtcagaaaagatgcttgatattatttcaacttttaaaaatcttttaagacttgttttatgactaataaatggtctatccttgagaatgggccatatgctgaaaaaaatatattccgcaaatcttggattaaatgttctgtaatatctattagatcaattttgt

SEQ ID NO: 186110 - DNA, 593 bp, Homo sapiens
aaaaaatccctatttataaaaataaactaattatgatataacagtagtgtaaaatacagcaattgaaaattttttatattcaaagtgtgtatatatgtatacacccaaatacacgcatgcgcgtgcgcgcgcgcgcrcacacacacacacacacacacacacacatacacgcacagtactttcctgtgaataaaaatatctcttaaagtatacataagacaaagttaatagttgttacctatggaaaatggattgtgaaatggttaggtgggtgagtgaagtgtatcaggaaagtgactattgcttttcttttaaagagttacttcttaactctttaatttcttatgaatatatttgcattaaatttatcaatgttaaactaataaagtattaaccttatatattggccttttctaccaagttaaattctttatatatctggctttatgtacattaactacaaaataagtttgaaataaattttgatttgtgcacagacaacaaaacatgtattttagaggcatttgttagccatataactattaaatacaaatgcctgaatacataatatgatttgaaattgatgacataaa

SEQ ID NO: 186111 - DNA, 522 bp, Homo sapiens
tgacttgtagtaagtttggattggcatgaacaattaaatatatgtagatggmtagatttgctagattaggtagctaggtaaatacctaggtagataaaatagattaagtagattagatagatttgccagattagataggaagatggattagacacacatattaattcaaatgaagactggactctccaatatgcatttgttgccaatactctctatgcaacatactggtttactgtacttcattatttgttgtaatccttgaaaatgtgtatttgggactacatatctaacactttaatattaggtccaaaattttgaatttttgaacctgtctagtttgattctttgaatttctggattacctccttcaaataacaatttttctcgtttgtttttgttttactttgtgttttcatttcctttattaaaacatatctcacacagaaagctgcagaatgctacataaatctgcttttgtctagtaaggacatttgaagtagggtgtgggcaggaagaaaatct

SEQ ID NO: 186112 - DNA, 522 bp, Homo sapiens
tgacttgtagtaagtttggattggcatgaacaattaaatatatgtagatggatagatttgctagattaggtagctaggtaaatacctaggtagataaaatagattaagtagattagatagatttgccagattagataggaagatggattagacacacatattaattcaaatgaagactggactctccaatatgcatttgttgccaatactctctatgcaacatactggtttactgtacttcattatttgttktaatccttgaaaatgtgtatttgggactacatatctaacactttaatattaggtccaaaattttgaatttttgaacctgtctagtttgattctttgaatttctggattacctccttcaaataacaatttttctcgtttgtttttgttttactttgtgttttcatttcctttattaaaacatatctcacacagaaagctgcagaatgctacataaatctgcttttgtctagtaaggacatttgaagtagggtgtgggcaggaagaaaatct

SEQ ID NO: 186113 - DNA, 423 bp, Homo sapiens
agggcttctgaccaacaaataataaagataagcagtgtctttttaaaaactcaaagtcattatcagacaactgatttacaatgagactagttttgacttaaaggtctaaaaacggttcacttttaatgtgaaaaagtaaactttgtgcaaaaatcaatacatgaaaattgaggactgygtatcaacaaatttagctcaagtgccacttttgaatggggcattgtagggcatcaagctgaaagaatggtgtgggagcaagttagaggaggcctggagcatcaggccgagacattttcagtaagcaatgaaatacacaggaaagtcaaagtagcacaattcaatgctttcaatgtggcaaccacttcctttctacttatctgaacttcacaagaaacatatgaaactgatgtcattatcattctg

SEQ ID NO: 186114 - DNA, 642 bp, Homo sapiens
agtcagtatcttctactccattctcccttccagtgtaatttggctacatgtactttagtgtaaacagccaaaagctgattataaatcattctacctatcttcctactgacagtctgcaaccaggttggtagattttccccaagggaaaggaaagcagggcaactaaggggcacaatatgcattccaactacaagtgcttacagctagaatgtgcctgcattttactgaacagaaggaaatgtccacagggagtgatttttaaaggatgcaattcaattttaaatgtagccatgcatttatgtttaraggctttaaattaaattatcatttaaagttcacatagatatcctattaatggcattgagatcatcagcagttgagtgtttaaagatcatgccaagaatgttacagcaaaggagcagtgtctgtcattgcaagtgtgtgcaaatatgattaagcaagtctatctcatctcacttgctgagtgttttgtcaatcctttatgaaagcaagacatactcatgatgaaaaaacatactctataaattatgtgttaaacaatgtgcttaaacaaatgtactgtcctttattatgatataccttaaatttgcataaagcttttaatttttctaagtacattca

SEQ ID NO: 186115 - DNA, 636 bp, Homo sapiens
tatcttagggtgtggcgaagacttaagaggatgatcaagagtttcatggtaccaggaatataaagtttgaagaatttaaggaactcagtcagggttacataagggagtagaagagccaccttcaaatccatatcttctagatgccttcttactgagaaaccacaagcctactgaaatatctagcatgtttagcatagattataaaacttgaatacattataaacaggctagatattattcattaccatagcatrgtaatattcctaataaaaggaagcaatatcccccagagtactcaactaacatatttaatgcatgttatcactcatactatcatatcacgtgtgctatcatagcaagaaaagagaaggagtttggaaaaacataccaaactttagttgacctattctttttttattttttagctgtattttttacccatttatttttcataatgaagacacattacttgaatttttactcaaggaatatgatctgaagtaactacattctgagtctcaattttatttttctaaacaagctttttaaaaatttcatttaattttgaaaactgaaatgttcttaaataatttgtattggaatttgattttttttcttctgtggtcatcacttact

SEQ ID NO: 186116 - DNA, 643 bp, Homo sapiens
gccttttattacatgattctcagggttccataataagacatccatgttaggagctcagatactcaaagagtggacattaaaaaaaaataaggcaaagtgaaaactttgatttaaaagataaaatggaggataaaaattgcaaaaatgaggtccacaagatctgaaaacaaaaataaaagaatttataacaaaaatgcaaactttgtctctgtacttttcacttactttttctgtaaacctaaaacttctctaaaaacaaagcctatttttgaaaaaatgcaaccatcaattgcctataatgagtatttaagagtgtcatatctataaagtgaatgcaaatgaaaaagttgctgctcttaacttccatattacaaattacttgtgcacacacacttataaatgttaaatgtgttcatgacatctgaaaaaaaagattgaagcatatggggagatgaactggaaaaatactaaaatgttctctacctcatcatatattttaagtgatttgagggtttctaatgcattaraaaagtcccaggcccaaatatcttcccccaaaattaatatttctacctgtggtgatatctgcatattttattaaaatacatcgatttgtattaaataaaatacctaacctgttatt

SEQ ID NO: 186117 - DNA, 602 bp, Homo sapiens
tactagttttctattgctgtgtagcaagataatgtaaacctagtggcttgtggacataagtctctatgtaccacacagtgggagctccctgaccaccagttatcacaaacatagtgacttcaaaagacacattatcccatattttctataggtcagaagcctgggaatggtgtaactgggttctctttttagggtctcacaaggctgaaacaaaagtgtcagtctagctgtgttctcatctggatctcagcatccatttccaacctcatctgttgttggcagaatttagttcttcatggttgtaggattacattctcagctttcttgctggatgttaactaggggcccttttgaggccttagaakttcttaacacataacctctccaaaacatggcagcttgctcctttaaggccaacaggagaatctcactttgaacctctctggccacttttaagggctcatctgattgtttcaagccacctaagattatctctccttttaataattaaaaatcaatggattaagtaccttaattacatctgtaaaatcccttctgccgtataacttaatataatcaccagagtgatttctcaccagatg

SEQ ID NO: 186118 - DNA, 564 bp, Homo sapiens
acttgctggattatttgtactgtctctccccagttaagtttcctcttaccagtgaatgttggagaactatacgctaggagacaggagacttcacttctggccttttttgtattagctctgtgatatgggcaagtcagtgttggctccctgggcctcaatttcctcatccccagctaatgagaaagcagctggcccttgcctacctgcaagtaggtgttggagcagacttggtttcacaatgctgcctggtttacaaagcattttcccatccagagcctgagataagcctgagagtagagaatactattccattttcatagatgagaaaacagatgctcaatgtggtcacatcacttgcccaaggccatccagacagtatgaaatggaaacagacagatgtcagttcagatcctatcaatgtcacttccaaactcactttgactagttcattaacatttctgcacctcagtttcttatctgtaaaatggacrtaagtaccacccattgccttcccacagagtgattgcaaggaataaaaatgatgaccaggcagaacttgtggag

SEQ ID NO: 186119 - DNA, 568 bp, Homo sapiens
cttttcaagttccccttggccttcagaataaagttccaaccctgcagtggtctctgggagtgctgtcaagcatataaagacctaggtttgaatatcgattgtgcatcttattgcatatgtgaccttgggtgagccatgcaatctctcctgctttgtctccttatctttaatgtggagttaataatattgatactgtagatttctgtaaataatgaaataagtgagagcaatataggtaacctgttaaacctggtgtatagtgcctggtgtatagtaaacaagctttgaatggtagccattcttaaatggcagcattctaaactgttattgggacttttagtggggtgacacaggaagtatcatggtgtccaggtttctctgtaatgagagaatttcatttcaccatggatccaagttaggaagtgacctttctgccaaatgtagtctgttgttcttctctcaaagcacagtagagaaagcatcgtggaacccacccttagagccaatatggcagacatyagagaggacccagatgcagatcacttaaggtccgcaagatcaagcacag

SEQ ID NO: 186120 - DNA, 518 bp, Homo sapiens
ccacagacaatatgtgaaagaatggctgtggctagtgactgtgttccattaaaacttcatttacaaaaacagaagggggctggatttgtcctgcagagtatagtttgctgatccttgaaagaaaccaaattgtttctaagtaacttaattgcatcccaggacaaggcccccaaacatttaaaggaactgaaaaaatgataacatccaacaacatgacattcataacgcctgacagccaatcaaaartggtcagggatgaaaaaaaaaaaaagaaaaaaagaaaaaagaaaaaaaagaaaaaacagaaaactatgacctgcaatgagggaaaaaaatcaatccacagaaatagacatcgaaatgacacaaataatcagtttagtagtcaagaacattaaaacagctgctataatcatatattatttgctcaagaagatagagaaaagtgtgtgtgagcatgctaaggagacaatggaagacataaaaaggacccaaagaaaagttttagagattaaaat

SEQ ID NO: 186121 - DNA, 442 bp, Homo sapiens
agataaaaatgaaagcagacgtctcagaaatgaaagccagaaaacagtggagtgatagctttaaagtactgagagaaagtaactgttaacctaaaattatatatctggtaaaaatatatttcaataacaaaagtaaagatttttttcaaacatacaaataatgacagaattcatcaccagaaaacaattaccacatgaaatactgaaataagtcctttaagcataaaataaaatgataccagatggaagtttgaatttacataaggaatatgtgagtaaatataaaatattttttcttatttttaaagtctctttaaaagattattttaaaaagtagaaataacaatgtgttgtgggrtttatagcatatgtagaagaaaaatgtatgacaaaaaagatggggtgtgggagagggaagtacacttttgtaagtttctgatac

SEQ ID NO: 186122 - DNA, 591 bp, Homo sapiens
gcctttgcattggctgttccctctgcctggaatgctccttccccagagtcacatggctagcttccttcctccaggtctttcccagatgccaccttctcggagagacctcctctggccaccttacctaaaatttcacctcccaacacatattcccttctcctgatttatttttcttcttagcacttgttcatcatwctgtatgttttacttatgtatcttgtttattttctatctcctccaagcagtgaggacatggattttgatctgtgtgttaagttctgtgtcctctgttcctacagcagtgctcgatccacagtaggtggtccattaaacactagtttgttggctcaatgaatgaacgaatgtcttcttcaggggagaagccaactccggcagccctccagtagcctgggactgagggggaggtgggactcaactctggaggcagggacttgactctagaccagattgaagactagctgaaacagcaaagaggcaaaagcacctctccatgagacgtgcccaccaatgccatgtcagtttactgttgccatggcaacatctaaacgttaccaccccctttcatggcaa

SEQ ID NO: 186123 - DNA, 538 bp, Homo sapiens
tgcagaagaatatattaactcttcctttctgctcttcttgtgggtagacagggaagataaactaggagtagagaaaccagaggaagtggtttggccaggtcttttacargggaaagagagtaaacaaccccttagtgggtgagacaggagagctgtggctaggaggaaatgcagccagcctgaatggaggcttttgacacatcagcttggccttaaatctctaagccactgcagagggcctgtatgcaagacagattaggagctggttagtgagtgctccctgaagcagaggtgagagccaggtgagagccatgattaagtcatgactgaagacagttaaggggacagtaaaggaattgtgaataaaatgcctcattctaccttgggttttatatttcattaaatcctattttagctgcatatcttttcgtcacatgagtggatggttactgctggagaaggttattacgcttaactattttaacgagagttttgttatgtgtatgggacagcaaattgggtagaaaagtgtgcaaga

SEQ ID NO: 186124 - DNA, 574 bp, Homo sapiens
ggtcagcctttttgggagggcagaccagcgttctatcaaaatgaaaaacccttgatggctttgattcagcaatcctggggaaatcgttgcatatgttgaataccaagcctgtgctgtggcaatgtttgttatagcaagaaactgaaaacaatccacgagtgcatcaacaggtgatggttcagcacaatgccctgtacagagaggtgagatattgatcccatctctgccatttactgtctgcgtgattggagtaagttactaacatttctgaatctcagttttctcgtctgtaaaatggggatgataacagtaacttcctcacagggttattgcaaggattagtatgtgtaaagtgcttagaacagtacctggcatctagtcagaagttagtaaatgtgagtaattaacaatgccccacaaatacaaaatcattaataagagtaagccytctgatacctaggttttgccctctggcccagtggctatctagtcatttctgctcccaaggggtcgctgaccccatggaggttagggggactgggactgtgccctaatcttacagctcagaaagtga

SEQ ID NO: 186125 - DNA, 328 bp, Homo sapiens
  misc_feature (1)...(328): n = A,T,C or G
nncccaggttccttttgccttataaggtaatattcacgatttcagggattaggacgtggatatctgtgcrgacagttatccagcctaccactcatagtaacaaaatgtaattcaaagattgggagccttagagacagacagggagtcccatcctagctctggcgcttgctacctgtgtaactttgggcaaagttctgcccttcctgagactcctgtttcctcttctgtaaaatggaagtcacccttcctgggccatagtgaggatcgataggatccacaccaggcacccagcatggagctggtgtactgtaggtgtttaatgtaggca

SEQ ID NO: 186126 - DNA, 591 bp, Homo sapiens
attgccatgaaaggggtggtaacgtttagatgttgccatggcaacagtaaactgacatggcattggtgggcacgtctcatggagaggtgcttttgcctctttgctgtttcagctagtcttcaatctggtctagagtcaagtccctgcctccagagttgagtcccacctccccctcagtcccaggctactggagggctgccggagttggcttctcccctgaagaagacattcgttcattcattgagccaacaaactagtgtttaatggaccacctactgtggatcgagcactgctgtaggaacagaggacacagaacttaacacacagatcaaaatccatgtcctcactgcttggaggagatagaaaataaacaagatacataagtaaaacatacagaatgatgaacaagtgctaagaagaaaaataaatcaggagaagggaatatgtgttgggaggtgaaattttargtaaggtggccagaagaggtctctccgagaaggtggcatctgggaaagacctggaggaaggaagctagccatgtgactctggggaaggagcattccaggcagagggaacagccaatgcaaaggc

SEQ ID NO: 186127 - DNA, 544 bp, Homo sapiens
tcattaaaggagtgaggggcatctgtgggattcaaattcaggtctgcctggatccagagctcatgcatgtccattgtgtgacactgtttgcctcctcttctcctacttctctctgcagcggctwcaggtgtgggaagagcatcctagaagatagaaaactttgctgttgaactggcttccagcatggaccaactgtccttttgtgaccacagccatctagtctgtcccaaagagaccctatcagtaatgtgtcatcctcaagttgagaggaagtttaaccaaagagggcattcttacagaaagggagtatctttagctctcacagaagaggggagataggtaatgcaattggtcagggttatttagaatgcaagcaactgctcctccttccaagatgagcaacccaacccaagaccacatgatggcttgtgtgtcatcctctcttgacatgtactgacaaagggtcctgtgtattccacaggtgatgggggtcgtctttttgcaggcaagcgcaagactaatgatgctttcagcagaagatgga

SEQ ID NO: 186128 - DNA, 544 bp, Homo sapiens
tcattaaaggagtgaggggcatctgtgggattcaaattcaggtctgcctggatccagagctcatgcatgtccattgtgtgacactgtttgcctcctcttctcctacttctctctgcagcggcttcaggtgtgggaagagcatcctagaagatagaaaactttgctgttgaactggcttccagcatggaccaactgtccttttgtgaccacagccatctagtctgtcccaaagagaccctatcagtaatgtgtcatcctcaagttgagaggaagtttaaccaaagagggcattcttacasaaagggagtatctttagctctcacagaagaggggagataggtaatgcaattggtcagggttatttagaatgcaagcaactgctcctccttccaagatgagcaacccaacccaagaccacatgatggcttgtgtgtcatcctctcttgacatgtactgacaaagggtcctgtgtattccacaggtgatgggggtcgtctttttgcaggcaagcgcaagactaatgatgctttcagcagaagatgga

SEQ ID NO: 186129 - DNA, 593 bp, Homo sapiens
agaggcctggaagatggggtgcaaaaagagagagggagccctgcttctcactcttcacccttatctatgacccgaatatttttagccacgtgtgtataacttacaacaaatcaacgcataagacaaaagaaaaatactgtttctaaaaatctcatctcttctatggttatctcaggccactcttccatataaatcatctgtaggcaaagggatgctttccaccctttcaaccacgcaaaactcactttgtttatgcccctctgatgaccctttcctttctcggtcttttattgcaatcccgtgcattgastcaggttccccttcctcagctgtcatctccttgagggcaagggccatgtctggctttatcctgtagctgtcccagcacctaacgctgtgccttgtaagtgacaagttccctgtctgaatattgaattgtcgaaacaggaaaaaggatagttccaccaaaaaaaaaaatatatgtggactcattcattcgttcattcattcattcaataaagagttatggcaaacgatcataggccagggatcccgggaaatatgggatacagagggaaatggagctgaccctc

SEQ ID NO: 186130 - DNA, 593 bp, Homo sapiens
agaggcctggaagatggggtgcaaaaagagagagggagccctgcttctcactcttcacccttatctatgacccgaatatttttagccacgtgtgtataacttacaacaaatcaacgcataagacaaaagaaaaatactgtttctaaaaatctcatctcttctatggttatctcaggccactcttccatataaatcatctgtaggcaaagggatgctttccaccctttcaaccacgcaaaactcactttgtttatgcccctctgatgaccctttcctttctcggtcttttattgcaatcccgtgcattgagtcaggttccccttcctcagctgtcatctccttgagggcaagggccatgtctggctttatcctgtagctgtcccagcacctaacgctgtgccttgtaartgacaagttccctgtctgaatattgaattgtcgaaacaggaaaaaggatagttccaccaaaaaaaaaaatatatgtggactcattcattcgttcattcattcattcaataaagagttatggcaaacgatcataggccagggatcccgggaaatatgggatacagagggaaatggagctgaccctc

SEQ ID NO: 186131 - DNA, 621 bp, Homo sapiens
gagatctgatagcaggctgtctctgaggagaggcctggaagatggggtgcaaaaagagagagggagccctgcttctcactcttcacccttatctatgacccgaatatttttagccacgtgtgtataacttacaacaaatcaacgcataagacaaaagaaaaatactgtttctaaaaatctcatctcttctatggttatctcaggccactcttccatataaatcatctgtaggcaaagggatgctttccaccctttcaaccacgcaaaactcactttgtttatgcccctctgatgaccctttcctttctcggtcttttattgcaatcccgtgcattgagtcaggttccccttcctcagctgtcatctccttgagggcaagggccatgtctggctttatcctgtagctgtcccagcacctaacgctgtgccttgtaagtgacaagttccctgtctgaatattgaattgtcgaaacaggaaaaaggatagttccaccaaaaaaaaaaatatatgtggactcattcattcgttcattcattcattcaataaagagttatggcaaacgatcataggccagggatcccgggraatatgggatacagagggaaatggagctgaccctc

SEQ ID NO: 186132 - DNA, 572 bp, Homo sapiens
gctgcctctctcgcccacacagtatgaaagaacagcctgattctagcagctctggaaatattgacctccggaatgctaatgtaacatagctttaggtccttaggccgaactttccttcaaaaaataactccaagtgaatgggaaaaaactgcagcaggaggaacccaatcacatatccctgtctaagggcagctcggtgagactgactgagccaggcccttttctttggagtattccattctgggyaattagcaccacattcctctgctgattaatcttcaccagggcaaaggtcttaagcctttgatgttcagatagagtttcctcattcagcctccaaaacgttaggtcaggatggctggttgcccacagcaaaaacaggccctttccctggcattgtgttccgcagagaacttgcacatctttcacgtctgttatcttcatgataaccatgtggtgcagtaaagccaattgaattgttcctgttttacagatggggcagctaaggcccagagaagagaattgacttgcccgaggttacccagctggtaccaaagccaggtcggttctga

SEQ ID NO: 186133 - DNA, 585 bp, Homo sapiens
atcttggcccactgcaacctctacctcccggattcaagcgattcttgtgcctcagcctcccgagtatctgggattacagatgtgcaccaccatgcctgagtaatttttgtatttttttttttttagtagagacagggtttcaccatgttggctaagctggtctggaactcctggcctcatgtgatccacctgcctcagcatcccaaagtgctgggattacgggtgtgagcccactgtgcccggccccgtctccccattttcatgagtggtcatggtggtggttttccgcctgccatatcacaggaasccctgagtgggagcagagggggaaaaccaagcctcctaccctgccaatcaggaaatcctgaaaccctagcataattcattaccttatatagctggggggaatggggaagccctttctctagcaagtcacctcacctggatctataatctgggcacgaagtgtaattttattgctgtgcccccagcactgtcttgctacattgctagcaggttatgcataaagacaaggcctcctgcatacactctctcactacctctgtgtagtgaggacttgtctgc

SEQ ID NO: 186134 - DNA, 410 bp, Homo sapiens
acacacacacacaccaaaaaaaaaaaaaaaaaaaaaaaaaaaaagtttaaatagcaaggcacaccatacaccactaggagctaaractggtcaggagctgaggactactcaggaggctgaggcagaaggatcacttaagctcaggaggattttgaggctgtaggagccaagattatgccactatactccagcctgggcaacagagcaaggccccatctctaaaaaatatatatatacatatataaactgtagcagatgctgtcagtgccccacccatacaacccctcaccctgatcacacttcagtgcccactggtctgacttccacctaccagcatctgcatgtcttggcctgaccgcttcccctggccactgaacctcctctgcccacccatggggcaggctagaaag

SEQ ID NO: 186135 - DNA, 514 bp, Homo sapiens
ttaaatcccttaaaattacattgttgtaaatgttttaaaactttataaaaatgctgacataatatatacatataaatactatatacatatatacaccatatatatatatatatagagagagagagagctatttatctatctatatatatatacatagtcatctcttggtacatgtgggagattgattcaaggagcctctcgtataccaaaatccgagtatattcaagtctgttagtcagccctgaagaactcacgtatagaagtcagccctctgtatatacacgcgggttttgcatactatgaacactgtagcatcaatctgcagttggttgtaaaacaatccctgtataagtggacttacatggttcaagcccatgatgttcaagggtcaaccgtatatccttttgcaatttgctttcttattaagggctttmtacgtgcaaggcaccatgttgggcagtgtggatgaaaagacaagttagataacattttgcattgacattagctaatattg

SEQ ID NO: 186136 - DNA, 510 bp, Homo sapiens
taactttgacagatattaaacaatttgtcagtaagatacatagtcttggatgttaaccaagtaaagagaaatattcagaagaaacaattcaagattatttagcgttttcaattatctttccggtggtatttaaatttgacacagccctagcaaggatatttctaaagtacttaaataaaatagatatgtttctcaataatgtggagcaaatgagccttccagtattagaaaattggcttttggttcaaaacagccttaggtttaaaaagcagtaagggcatattgggacataraatttcagtaggtactaaattagatcacaccttatcaaagcatgtttttatgaccatgtgtcaaaaccataaaccaagagttaagttaaacaaaaatatgatgattgtgagcctttccaaagccctgaataggaaataaataatacaatttaaacaacagcaaattaggattgttccatctgagaatacgcaattaaaataatgttttaagttgtaa

SEQ ID NO: 186137 - DNA, 502 bp, Homo sapiens
tttttggttttctcttgtgttttcttcaatcttaagctcactcaaaacctcctgagtatgcctgtcatttagacttcagatctacattagcatcttcaaaaaatcattttggcgtgcccamgttcctggtataataaggaatataaaataacaatagataataacatgcaataagtttttgctatttgtcacatgcttcatgcatttttttcacttaaatctcaacctaaacaatgacgataggaagttggtttccatattatttccatttagagattataaaaactgagacttagaaagatttgtaatttgctctggtcgcacatctagtatagggtgttgggattcaaacccaaatacaaatttgcacaaattatataatgatagataccttgcctgaaagaactgataatttaataaagttaggaccatgctggaggtttaatagacctttgatacagagatgtttaaggattcttagaagtagagaataaagctgatt

SEQ ID NO: 186138 - DNA, 465 bp, Homo sapiens
aggttgcttaacaccttaccaataaaactaataaacaaagataaccagagagataaaaatatctggtttccattgtttccaggcttgctctttgaggtatttgacacttcagcaaataactccgtagttatcagtgaaagcaggtcagagagatcaacagataattcttatggaaatgtatttaaagactactactcactcagaaaccaataacgtactgtgttttggaagatatctaattgccttaaggagatataactacagtttttgagttttttgtttgtttctttggtttttctatttttattttttaaagttttattatagattcaggggtacatgtgcaggttagttatgtaggtaaactyatgtcataggcagttgtacagattattttatcacccaggtactaggtctagtatccaatagttcttttttctgttcctctccctcccatgcttcacc

SEQ ID NO: 186139 - DNA, 408 bp, Homo sapiens
tctggaagtgaaaggataagaacacagatgagaatataaaactcactggtagaatggatacactaatgagcagaagaaaggyatctaacttaccactacagaaatacatccaaccaaaaggatatacaatactagaggaagaaagaaaggattcacaaaacaataagaaagcaattaacaaattgagaggagtaagacctcagctatcaatagtaaccttgaatataaatgggttaaattccccaattaaaagatataaaatggcttaaaaaaccatttggattaaaaaaaggatggattttttgaaatgaatggattaaaaaaacaacacccaactatatgcttcctataaaaaactcacttcacctttaaaaacacacatagatttaaagttaaggggtggaaaaa

SEQ ID NO: 186140 - DNA, 408 bp, Homo sapiens
tctggaagtgaaaggataagaacacagatgagaatataaaactcactggtagaatggatacactaatgagcagaagaaaggtatctaacttaccactacagaaatacatccaaccaaaaggatatacaatactagaggaagaaagaaaggattcacaaamcaataagaaagcaattaacaaattgagaggagtaagacctcagctatcaatagtaaccttgaatataaatgggttaaattccccaattaaaagatataaaatggcttaaaaaaccatttggattaaaaaaaggatggattttttgaaatgaatggattaaaaaaacaacacccaactatatgcttcctataaaaaactcacttcacctttaaaaacacacatagatttaaagttaaggggtggaaaaa

SEQ ID NO: 186141 - DNA, 408 bp, Homo sapiens
tctggaagtgaaaggataagaacacagatgagaatataaaactcactggtagaatggatacactaatgagcagaagaaaggtatctaacttaccactacagaaatacatccaaccaaaaggatatacaatactagaggaagaaagaaaggattcacaaaacaataagaaagcaattaacaaattgagaggagtaagacctcagctatcaatagtaaccttgaatataaatgggttaaattccccaattaaaagatataaaatggcttaaaaaaccatytggattaaaaaaaggatggattttttgaaatgaatggattaaaaaaacaacacccaactatatgcttcctataaaaaactcacttcacctttaaaaacacacatagatttaaagttaaggggtggaaaaa

SEQ ID NO: 186142 - DNA, 582 bp, Homo sapiens
gtccacatcaaaaagattgaaagagcacaaatagacagacaatctcaagtcacacctcaaggagctagagaaacagtaacaaaccaaacccaaacccagcagaaaagaaataaccaagatcagagcagaactaaatgaaattgaaacaaaaaaatacaaaagataaattttaaaaagctgtttctttgaaaaataatattgatagaccattgacaagattaaccatgaaaagaagayggacgatccaaataagctcaattagaaatgaaatgggaagaattacaaccaataccacaaaaatacaaaagatcattcaaggctactatgaacaagtttttgtgcataaactaggaaacctagaggagatggataaattcttggaaagatacacctggcctagattaaaccaggaagtaatagaaactctgaagagaccaataacagccctggaccagacggattcacagctgaattctatgaaacattcaaagaagaattggtaccaatcctatcgacactattccaaatgatagagaaagagagaatcttccttaagtcattctatgaagccagtgtcaccct

SEQ ID NO: 186143 - DNA, 582 bp, Homo sapiens
gtccacatcaaaaagattgaaagagcacaaatagacagacaatctcaagtcacacctcaaggagctagagaaacagtaacaaaccaaacccaaacccagcagaaaagaaataaccaagatcagagcagaactaaatgaaattgaaacaaaaaaatacaaaagataaattttaaaaagctgtttctttgaaaaataatattgatagaccattgacaagattaaccatgaaaagaagacggacgatccaaataagctcaattagaaatgaaatgggaaraattacaaccaataccacaaaaatacaaaagatcattcaaggctactatgaacaagtttttgtgcataaactaggaaacctagaggagatggataaattcttggaaagatacacctggcctagattaaaccaggaagtaatagaaactctgaagagaccaataacagccctggaccagacggattcacagctgaattctatgaaacattcaaagaagaattggtaccaatcctatcgacactattccaaatgatagagaaagagagaatcttccttaagtcattctatgaagccagtgtcaccct

SEQ ID NO: 186144 - DNA, 540 bp, Homo sapiens
tctgcgcttactctttgtcccaccttctaaacgtttagatgggcaggtgggaagagcagttgccacattattgaaagccagtgttctagtatcaragggccatagcaggccctatggagcaacatctggaatgtccacaggtaaccctgtcaatctctggggatcacagggcatcactttcctctacttctctctctatgtgtgtctctgcaagccaacctgattctatattacattttcacaaagtaccatattctaaatttagcttatccagggagatgatatacttgattcactttgggggagtgatcctctgcctggtaggcagaataatggccctcaaagaagtccgctcccaatccctggaatctagaaatatgttgctttacagggcaaaaatggattttgtagatatgattcagttaaaggtcttgggatgggaagattagcttggattatccaggtgaacctaatctaatcttatggcttcttaaaattgatgagcttttccaggctgagatcaaagacggagatgtgcct

SEQ ID NO: 186145 - DNA, 611 bp, Homo sapiens
tgtgtgggtcaaagaccatttatcttgttgcttggtgagtgtggctacttccttgaaccacatggagacacattgtacaggaagaagtgcctccttctgctcgtcatctgcgattctcatctgacaccatggtcagcttctgttgtagctctgtctgctctgaatagagctgtggccaaggcctctgccagacctgctgctgctgcagttgctgccagaccacctactgcagaaccatctgctaccatcccagctgctctgtgtccagctgttgcaggcccccgtgctgccagtccctgtgctgccccagctgctgcatttctagcygctgccactcaagctgcagtgtgtccacctgctccaggcccagctgttataatccccagtactaccagccctcctgctgccacccttctgctgcacttctagctgctgccaccctggctgctgtgtgtccagctgctgctgtccagtctgctaccagaccacctgctgtggtccagtctcctatgaatcctcttgctgttgaacttcattcctgaccaccagccctggttcaaccaccttgttgtcagtgtaccagtcattctcattccccttctccactggac

SEQ ID NO: 186146 - DNA, 578 bp, Homo sapiens
acattatctccctttcaaacatactatttgtctgtcagcctttcagtcattcttttcttttggaaaggtaggaggctgcccctcccgtgctctcccgctttctccctgctccctctttctctcactgttcaagtttgccagaatttttctattttattagttctttatctttattgkgttcacaaaatatattgtattaaacttttcatttagaaatcttttattgttttttgcattttttgtgataattttcactgagtttactgattcatgggggtgaggtgggaatgcagtagaaggggattctcaaagcatgattccaaagtaagacttcagggatgaaatcatagtgccaaactgctccaatgtcacacataaactaaaataaaatagaagcttttgattgtttcaatttgatatacggaatggtttgggatatgtataacccctagtaatgtcacagataaactaaaatagaagagaagcttttcattgtttcaatttgatatacggaatgctttgggataggtaaagcccccagtattgttgtttgtaagttcatccattattttagaact

SEQ ID NO: 186147 - DNA, 558 bp, Homo sapiens
cagagtgaacagaagcaggttccaagctgttacggggttaaaaccctggtgagcccctttatggtgtatgagaacaactctaagatttcatcgagaacttgaattatgggaaaagaatcacatccttgaagaaccctgatgactggtacctaccgatgacccggtggagatcacttttattcacatgaattgactattttttttctttgtaaggtgagcgtgtgtgttttgcttaatgtaaatttgccttatgtttagaaatctctcaagatttcttctagagctccagcactttcatttttccccagctttattgaggcagagttggcaaataaaattttaagtataccaagggtccaacatgatgccttgatatgtatatattgtgagatgattatcmcaaccaagttagttaatacctatcccctcacgtagttattgtttccctgtgtgtgtaatgagaacaattaagatctactttttcagaaaatttcaagtactctatacagtattattaactataatcaccatgctagttactagatccctagaacttag

SEQ ID NO: 186148 - DNA, 562 bp, Homo sapiens
ccgtgaaggtggccctctctacatggcagcatgaactccccawtgaaactctgccagtcagaatgaaggagatccactgtgtttgtgttgaggattcattacacatgactcagtagaaaatacatggactttgctaaaccacctaatagctgcttttactggaaaaaaaaagaaattgaaatacagtgttttaaaagatcacagctctgtgcacaatagtaaagacatggaatcagtctaggtgcccatcaacagtgcattggataaagaacatgtgacattttcacaccatggaatactacacagccataaaaaagaatgaaattttgtcctttgcagcaacatggatgtggctggaggacattatcttaagcaaatttttccaggaacagaaaaccaaatattgcatgttgtcacttacaaatgggagctaaacattggatacacatggacacaaagatgagaacaattggggactccaaaaaggggggagagagggagagaggaagggctaaaaatgacccactgctcagtacctggtgacagaatcatttgtagccca

SEQ ID NO: 186149 - DNA, 562 bp, Homo sapiens
ccgtgaaggtggccctctctacatggcagcatgaactccccaatgaaactctgccagtcagaatgaaggagatccactgtgtttgtgttgaggattcattacacatgactcagtagaaaatacatggactttgctaaaccacctaatagctgcttttactggaaaaaaaaagaaattgaaatacagtgttttaaaagatcacagctctgtgcacaatagtaaagacatggaatcagtctaggtgcccatcaacagtgcattggataaagaacatgtgacattttcacaccatggaatactacacagccataaaaaagaatgaaattttgtcctttgcagcaacatggatgtggctggaggacattatcttaagcaaatttttccaggaacagaaaaccaaatattgcatgttgtcacttacaaatgggagctaaacattggatacacatggacacaaagatgagaacaaytggggactccaaaaaggggggagagagggagagaggaagggctaaaaatgacccactgctcagtacctggtgacagaatcatttgtagccca

SEQ ID NO: 186150 - DNA, 590 bp, Homo sapiens
cccgtactccccatgtgtcatggtgtcgtggtgtcgtggtgtcatgggagggacccggtgggaggtaattgaatcaagggggctgatttttcccatgctgttctcataatagygaataagcctcatgagatctgatggttttataaagaccagttcccctgcacatgctcttttgccttctgccatgtaagaaatgcctttgctcctccttcaccttctgccatgattgtgaggcctcccctgccatgtggaactgcgagtcttttttagagactcacaattaaacctccttttctttataaattacccagtctctggtatttcttcatgcagtatgaaaatggatgaatacagagaacattttcattatactagaaagttcccaaatgtcacttcagtaaactcatcacttcatagaggcagccatatggggaaattattagccatgttctaataatttttccaccataggttagttttgatttgaacattcaaacaaattatatatagcataattgttttttctgtctgtcatctttgccttgatatgtggctgtgagagtcgcaatgttgatgcatgcatcactagt

SEQ ID NO: 186151 - DNA, 590 bp, Homo sapiens
cccgtactccccatgtgtcatggtgtcgtggtgtcgtggtgtcatgggagggacccggtgggaggtaattgaatcaagggggctgatttttcccatgctgttctcataatagcgaataagcctcatgagatctgatggttttataaagaccagttcccctgcacatgctcttttgccttctgccatgtaagaaatgcctttgctcctccttcaccttctgccatgattgtgaggcctcccctgccatgtggaactgcragtcttttttagagactcacaattaaacctccttttctttataaattacccagtctctggtatttcttcatgcagtatgaaaatggatgaatacagagaacattttcattatactagaaagttcccaaatgtcacttcagtaaactcatcacttcatagaggcagccatatggggaaattattagccatgttctaataatttttccaccataggttagttttgatttgaacattcaaacaaattatatatagcataattgttttttctgtctgtcatctttgccttgatatgtggctgtgagagtcgcaatgttgatgcatgcatcactagt

SEQ ID NO: 186152 - DNA, 590 bp, Homo sapiens
cccgtactccccatgtgtcatggtgtcgtggtgtcgtggtgtcatgggagggacccggtgggaggtaattgaatcaagggggctgatttttcccatgctgttctcataatagcgaataagcctcatgagatctgatggttttataaagaccagttcccctgcacatgctcttttgccttctgccatgtaagaaatgcctttgctcctccttcaccttctgccatgattgtgaggcctcccctgccatgtggaactgcgagtcttttttagagactcacaattaaacctccttttctttataaattacccagtctctggtatttcttcatgcagtatgaaaatggatgaatacagagaacattttcattatactagaaagttcccaaatgtcacttcagtaaactcatcacttcatagaggcagccatatggggaaattattagcmatgttctaataatttttccaccataggttagttttgatttgaacattcaaacaaattatatatagcataattgttttttctgtctgtcatctttgccttgatatgtggctgtgagagtcgcaatgttgatgcatgcatcactagt

SEQ ID NO: 186153 - DNA, 321 bp, Homo sapiens
ccagttggagtgagcctaatgagagaaacagctgcagctgagcagtgccagaggtggactacagggctccctatcctgatcccatttaccagaaagatacccccatccccaagctagtgtaagtaggacagccagcagctccctttgttcaccttcacacttctccagayagttgtcctcagcttacaggagccacctcatctggaggattccgccctcttcgcatcctcttcctctcccacagggtgggccatagctagtggtaactgatgtaggattgtaaagttccaacgaccttacctctcagaaagatgggtctgt

SEQ ID NO: 186154 - DNA, 543 bp, Homo sapiens
ctgctgcagaccccagtgctgccagaccacctgctgcaggaccacctgctgccaccccagctgctgtgtgtccagctgctgcagaccccagtgctgccagtctgtgtgctgccagcccacctgctgcagaccccaatgctgccagactacctgctgtaggaccacctgctgccgccccagctgctgcaggccccagtgctgccagtctgtgtgctgccagcccacctgctgctgccccagctactgtgtgtccagctgctgcagaccccagtgctgccagaccacctgctgcagaaccacctgctgccgccccagctgctgtgtgtccagstgctacaggccccattgtggccagtctctatgctgctagcccatctgctggcaaaccacctgctacaggaccacctgctgccaccccagctattgcatttccagctgctgccagccttcctgcagtatctctagcagcagtagctcctcctgctgtggcttcagctgctgcaggctctcctgctgcatctccagttgctgccgccccaactg

SEQ ID NO: 186155 - DNA, 485 bp, Homo sapiens
cttatagtatactgtggttacatttccttcttgtgcaattttttttccctagggttaataattgctctttatttctttgtttgcttagtttcatgcccaaatcttctgcagaactgaaaatctcctttcgttacattcaaatgcattagataatctagtaatacatttttctgtcttggagtcatttctgcctgagtcctccacttttcgcttcaagttgcgggatgctcttggtgcttgctgcacagctgctatcctgggacttcctgtcaccatcctagaaatttcccttatactgtcctgatttggatttcctggacctcctgttttcctgtttattggttttctctctctttttagtggagtrcacccttcaaaagcttcctgagaaagggtgaatgtttggtaaagttttgagacttcacatatctgaaaatgcacctttatcttgcctcacagttaagggatggcttgtttaaatgcat

SEQ ID NO: 186156 - DNA, 525 bp, Homo sapiens
tactctaagtaaaattgaagccattggaagatcttaactaggggagtaaagaaattacatttccatttttagaagactggcttttccatcaggtggagactgagcagggacaagaatagaaacagactcacgaggacttgcctgctggcgcaggtgagagttcacagtggcttggaattgaaggacagtggtggggatggaaaggggtggtgaaattcagaatatgttttcaacctacaacttacaggacttgatgatggatttaatgtaaggttagagaaaaagaagaatcaagaaggcattatggtttggggatttgagtaactaagtggatggtggtgtgctttatggagatagataccatgggggaatacaatatttggggggacaaaagtaaagatttaaaaactcaggttctggccatcttaaaawttttaagataacctcctaaacaagcgagtggtgttatctggtagccagttgaatatggaagtagaaagctctgtggaaaagtgagagcaagag

SEQ ID NO: 186157 - DNA, 569 bp, Homo sapiens
ctctcccaaccctggtggcttttgattttacagaaagcaaaagcatctgataaacaaagccctgaggtagtcctgattcctcaattacccctaagtagcaacagatgctgcacagagggacttgcttcagtgaccaatgctctcagtaattagacaatggagggagaaagtaattaggtaaaccacaaagaagtagaaataaactgtatgggatatgttggtcatggatgaaagacaaattaaaaaaaagtataaaggaaacatctaggaaaaaataactaataaataatttgcttaatccatgttgaataatcaatttaagcctgtgaagttaaacctgattaaagatatcccttaattaaaaagttcctacaatgtattacttagaaagaaacatgacaagaagaatagatctattttatgtcaacaacagttcagttaaatgatatagtcctggcaaggagaagtgggagagaaaagtttgaggtcttatatacttctcatttattaattgatgtatcatwtctcatatctgcggggtgcaccaaatgtgaatttaaaccagtgtc

SEQ ID NO: 186158 - DNA, 624 bp, Homo sapiens
  misc_feature (1)...(624): n = A,T,C or G
catttgcttgctgccagatattctataaatataaaaacagatctcggaagctgctgtttagaatataagtaatgaatttcttgatggggtgttcagtaaaattttccagacatgagcttttttcntttggttggccaaatagtgtgtttttccctcctgtctgcccagggaatgtgtttytaaagcccgctttgtgttcttgaaaatcacaggaattcctgtatagtacaacgaaggccctggcagcaaagcctaatcaagttgaagaaagcaccacaaatacttcccaaatggctttcttccacaattggcagtattaagacaacaaaagaaagtgaaaacaaaggctacaaaaataatacatcaactttccttcttctctcctcatttgcttccaggtcctcaagactgaaacacacacacatagattaaaagtacaattatatctgtagtacctatcatattctgtatgatgtgaaaatgatatttgtaattataaattaatatatatcatatatatatattacttttctacaccaaaaatattcccaacccatatgtgtacatgtcttaccaggagtttaacaaattcacttgctactttaatataataggatcatactt

SEQ ID NO: 186159 - DNA, 624 bp, Homo sapiens
  misc_feature (1)...(624): n = A,T,C or G
catttgcttgctgccagatattctataaatataaaaacagatctcggaagctgctgtttagaatataagtaatgaatttcttgatggggtgttcagtaaaattttccagacatgagcttttttcntttggttggccaaatagtgtgtttttccctcctgtctgcccagggaatgtgtttttaaagcccgctttgtgttcttgaaaatcacaggaattcctgtatagtacaacgaaggccctggcagcaaagcctaatcaagttgaagaaagcaccacaaatacttcccaaatggctttcttccacaattggcagtaytaagacaacaaaagaaagtgaaaacaaaggctacaaaaataatacatcaactttccttcttctctcctcatttgcttccaggtcctcaagactgaaacacacacacatagattaaaagtacaattatatctgtagtacctatcatattctgtatgatgtgaaaatgatatttgtaattataaattaatatatatcatatatatatattacttttctacaccaaaaatattcccaacccatatgtgtacatgtcttaccaggagtttaacaaattcacttgctactttaatataataggatcatactt

SEQ ID NO: 186160 - DNA, 624 bp, Homo sapiens
  misc_feature (1)...(624): n = A,T,C or G
catttgcttgctgccagatattctataaatataaaaacagatctcggaagctgctgtttagaatataagtaatgaatttcttgatggggtgttcagtaaaattttccagacatgagcttttttcntttggttggccaaatagtgtgtttttccctcctgtctgcccagggaatgtgtttttaaagcccgctttgtgttcttgaaaatcacaggaattcctgtatagtacaacgaaggccctggcagcaaagcctaatcaagttgaagaaagcaccacaaatacttcccaaatggctttcttccacaattggcagtattaagacaacaaaagaaagtgaaaacaaaggctacaaaaataatacatcaactttccttcttctctcctcatttgcttccaggtcctcaagactgaaacacacacacatagattaaaagtacaattatatctrtagtacctatcatattctgtatgatgtgaaaatgatatttgtaattataaattaatatatatcatatatatatattacttttctacaccaaaaatattcccaacccatatgtgtacatgtcttaccaggagtttaacaaattcacttgctactttaatataataggatcatactt

SEQ ID NO: 186161 - DNA, 562 bp, Homo sapiens
tacaatcattatatgcatagaggaaggtaaaaataaaagcagaaaatatcatatgcattgggttctacaatggaaaagacagagagggttgggaagcatttcaatgatgggcacatctctcttcccaaggtcttatttcatttccagtacgacttctgacagctggtagaaatgtgtgcctctgacagagcagtttcacacattctcaagtgcaaaaagtaagattgacggcatcctttccatttccatcatcagctgaagtgtctcctctctaggaaggagtaattagctcagtcttctagtactggaagtcaaactaaagcatcttgactacactgactcctgctgcctwcctagtctcacaaataggaattcatatgattaagcacattttacttcaatctaggccttgaaccaatgacctaccttctataactgcctacacaatacatacatacatacacacacaggggcatgtagtgcacttttttttctggacttgaaatacagatggttttaaactgaatcatttatattctatgccagaatagaaatcagtctc

SEQ ID NO: 186162 - DNA, 424 bp, Homo sapiens
ttcaagtgcttcataaagataagggctgcacttttccctcagagcactggccaaataataatcaggtaattggaatgtatgtagcactttcatctgaaaaactcactcctcagactttttttatgttatccctattaagaggttggttgaagaattttgggtctgggtggagggaacatagtaaatattcaatagatgtttaataggttgacatcatcttttatttaagtcttgctaggttaayttgaaaaaaattactatatgaacttacagttgaatgacattaaatgtgatgaaataaaatgaaaccaaaactacatctttttcttatcattttaaagatacggttggttatctaggcatcccaacacaacacattagttaacagagaggttgtttcaacattcttataaggaaggactgg

SEQ ID NO: 186163 - DNA, 616 bp, Homo sapiens
tcagtctctgcccaaaagctccgagatctgatagataaacttagctacattttagaatacaaaatcagtgcacacaaatcagtagaattggccaggtgcagtgggtgcctataaccccagcatactgggaggcctaggtgagcggattgcttgagctcacgagttcaagaccagccggggcgacatggcaaaaccccatctttactgaaaatacaaatattagctaggtgtggkggggcatacttgtagttccagctactcaggaggctgaggtgggagaagtcccttctctttaattttttggaatagtttcactacaaatggtatcagctcttctttatatatctgatagaatttgtctgtgaatccatctggtcctgggctttttatgtttggtaggatttgtattactgatgcaatttcagaactcattattggtctattaagagattaaatttcttcctggttcaatcttggaagctgtatgtttccaggaatttaacaatttcttccagggttttaagtttgggtgtatagagtttttcatagtattctctgagagttttttgtatttctgtgaggtcaagtggtaatgtctcctttgttgtttcttatt

SEQ ID NO: 186164 - DNA, 616 bp, Homo sapiens
tcagtctctgcccaaaagctccgagatctgatagataaacttagctacattttagaatacaaaatcagtgcacacaaatcagtagaattggccaggtgcagtgggtgcctataaccccagcatactgggaggcctaggtgagcggattgcttgagctcacgagttcaagaccagccggggcgacatggcaaaaccccatctttactgaaaatacaaatattagctaggtgtgggggkgcatacttgtagttccagctactcaggaggctgaggtgggagaagtcccttctctttaattttttggaatagtttcactacaaatggtatcagctcttctttatatatctgatagaatttgtctgtgaatccatctggtcctgggctttttatgtttggtaggatttgtattactgatgcaatttcagaactcattattggtctattaagagattaaatttcttcctggttcaatcttggaagctgtatgtttccaggaatttaacaatttcttccagggttttaagtttgggtgtatagagtttttcatagtattctctgagagttttttgtatttctgtgaggtcaagtggtaatgtctcctttgttgtttcttatt

SEQ ID NO: 186165 - DNA, 616 bp, Homo sapiens
tcagtctctgcccaaaagctccgagatctgatagataaacttagctacattttagaatacaaaatcagtgcacacaaatcagtagaattggccaggtgcagtgggtgcctataaccccagcatactgggaggcctaggtgagcggattgcttgagctcacgagttcaagaccagccggggcgacatggcaaaaccccatctttactgaaaatacaaatattagctaggtgtgggggggcatacttgtagttccagctactcaggaggctgaggtgggagaagtcccttctctttaattttttggaatagtttcactacaaatggtatcagctcttctttatatatctgatagaatttgtctgtgaatccatctggtcctgggctttttatgtttggtaggatttgtattactgatgcaatttcagaactcattattggtctattaagagattaaatttcttcctggttcaatcttggaagctgtatgtttccaggaatttarcaatttcttccagggttttaagtttgggtgtatagagtttttcatagtattctctgagagttttttgtatttctgtgaggtcaagtggtaatgtctcctttgttgtttcttatt

SEQ ID NO: 186166 - DNA, 507 bp, Homo sapiens
atttgaccctttaccattttgtaatgcccttatttgtcatttttgatcactgtttgttaatgtctggtttatctgaaattagaatagcgacccctgcttttttctgtttgcttggtagatatttctccatcccttttctttgagcttatgggtgtcactgcatgtgagatgggtctcttgtagacagcacagttgggtcttgtttctgtatccaacttgccactctgtgctttttaattggaacattcagyccatttacatttaaggtttgagcctgtccttgtgttgttagctggttatcatgcagatttgattgtgtggttcctttacagtgtcaatggtttatgtacttaagtgtgttttgtggtggctggtaacaatctttcctgtcaagatttagcactctcttaaaaacctcttataaggcaagtccggtggtaataaattctcttaccatatactttgctgaaaaggatcttatttcttctttgcttatgaagcttagtt

SEQ ID NO: 186167 - DNA, 562 bp, Homo sapiens
tgaaaaacactatcttcttctctatttctatgagttcaactttttaaaattctgcgtgtaagtgagaccatgcagatgtgtctttctgtgcctgccttatttaacataatgtcttccaggttcatccttgttgtcacagatgacagaattttattttttagagatgaatagtattccattgtgtacatataccacatttactttattcattcatccattgatgaactcttaggttgctaccatatcttagctattgkgaataatctattgggataatgctacaatgagcatgggagtacagatacttcttcaatatactgatttcaatttctttgtacatatattattaaagaaaactaaatagggcctgaaaaggactccatgcttctatatttgagtccttatggatgaactgcaacctaacttaataggtagacaagactgaaaacctaacttaggagtatgcacctgtaacaacagctgagtcttggccaatcccagcagcaatacttcaaccacttgaacactgctgagtgttcaaaccacgttcaaataaggcaaa

SEQ ID NO: 186168 - DNA, 562 bp, Homo sapiens
tgaaaaacactatcttcttctctatttctatgagttcaactttttaaaattctgcgtgtaagtgagaccatgcagatgtgtctttctgtgcctgccttatttaacataatgtcttccaggttcatccttgttgtcacagatgacagaattttattttttagagatgaatagtattccattgtgtacatataccacatttactttattcattcatccattgatgaactcttaggttgctaccatatcttagctattgggaataatctattgkgataatgctacaatgagcatgggagtacagatacttcttcaatatactgatttcaatttctttgtacatatattattaaagaaaactaaatagggcctgaaaaggactccatgcttctatatttgagtccttatggatgaactgcaacctaacttaataggtagacaagactgaaaacctaacttaggagtatgcacctgtaacaacagctgagtcttggccaatcccagcagcaatacttcaaccacttgaacactgctgagtgttcaaaccacgttcaaataaggcaaa

SEQ ID NO: 186169 - DNA, 478 bp, Homo sapiens
ggaaaaagggtttttttttttccttctcagttgactaaattatttttctctatttgtcttgccactcttaatgcacacatgagaggccctaagataacttctagtagcccgggtctccttagaaaaaacagagkaggagccacagaacccattttgggaaaaacctgttttcctcatggaaccctaggaattgaaaatgaatagatcccactcagagtctaaggctctgttctgttttgtattgagttatctgatgtttttgacttgggaaggtattagagattgctttgcattttgagagagctttaatttagtgtacaataaataggtagaaaatatacttttagggatgggctaattaaaaaataggctgattggctttgggctgccatgcaataaaatgcacagtaaaagaattgcactatcttctccttttggggatccaggatacaatgtaaaaatgaggccctcaattttg

SEQ ID NO: 186170 - DNA, 461 bp, Homo sapiens
tttttttttccttctcagttgactaaattatttttctctatttgtcttgccactcttaatgcacacatgagaggccctaagataacttctagtagcccgggtctccttagaaaaaacagaggaggagccacagaacccattttgggaaaaacctgttttcctcatggaaccctaggaattgaaaatgaatagatcccactcagagtctaaggctctgttctgttttgtattgagttatctgatgtttttgacttgggaaggtattagagattgctttgcattttgagagagctttaatttagtgtacaataaataggtagaaaatatacttttagggatgggctaattaaaaaatrggctgattggctttgggctgccatgcaataaaatgcacagtaaaagaattgcactatcttctccttttggggatccaggatacaatgtaaaaatgaggccctcaa

SEQ ID NO: 186171 - DNA, 588 bp, Homo sapiens
tgccattatgtgactgcataaacatcaccacattttgacaaaatcaccaccatcaacaaaaataaactataagctccatcttgcaaataatatgcttcttgtagcttttgcttatgatacaggggtgaagtggacaacggcattagagctgaagagggcgcatggtagatccctaccctaaccctgctactacaacaaggtcattgaagagcctgtctccacaagcctctaaatcaatcctttcattattgattggcttggcaggagataaaaatgcagtgacctttgccattttgagggagtaaggcatccaccattcagtcactttactatttggtcttgtttaaggaaaatatttttttccagaatattttaccttaaacagagaagtcattaaacctgactcaaatcaggttaattactgagttccagcaccagcttctccctcctgcccctccaattctccccagatatagatggtgaagagacactaaaaatcatcagtatgtgggaggccccttctctaacctcttttcttcatccacacaattgacaagtgcaaawccagcctataaggaaataaaagaa

SEQ ID NO: 186172 - DNA, 546 bp, Homo sapiens
agtggccacacggggattaaagaggccttttgttttgatgtgagctttttactctgctgttcagtgtgtgacacttttggttgcttctcacatgtcatctaaaggatagaaactttcacrggatgttctcaaaaagacaaacttcatggaaactttttcttctataaatacttcacctgacacattggattttgcctacttaacaaaatattgtgaagccttgagccccaaatatacttgaaaatataaaattgctatcacacaacaacggtttaaaaaaaaaatggaacacgagcattatataacagtttgctggatggataaagacttttcagtgcctttctctgacatcttctggaaatctaagtaaaggaaaataatatattgtccacacctaaggtgacaggtttttttctgatacttttcttcaaacaaactgaaaattccaaatacagtgacttctagcatcctatctcaggaagcagaaatacataaagaaaattagaatttggctggagattcttttttcgcatgcaccaaagtaga

SEQ ID NO: 186173 - DNA, 520 bp, Homo sapiens
cattatcttgcctggcagctgcctcaggcgcctcaggcagtgcagggtttatcccctcagacaaaggtggaaaggctgaccgcagcgtgggtcggggaggagacgttgccactactggggatggggaacctgtttcttctggcaaaaaaggtttatcagcatttacragctcagtgtccctagcttcagcagggtcctcccacacttccccattcttttccaatcaatgccctcactttaataagtagacacctagcgaggtgtctgtgcatgcaccttcattgcaggtcagccacttgcatgagaagagcttgtgtctgtttttccacaatttcagctctttctctacaggagataagactcactcatgataatcttagcagatttgaggctcagtatctgcttctgaagccggaagttagaatccctgagttcatcattttctttcatcactttgtccggtgaacttagaagcaaccaatcagcttcattatgttccttggttctccacatatagtca

SEQ ID NO: 186174 - DNA, 539 bp, Homo sapiens
gatgttggggttggctcctgaggagaatcagcattatcttgcctggcagctgcctcaggcgcctcaggcagtgcagggtttatcccctcagacaaaggtggaaaggctgaccgcagcgtgggtcggggaggagacgttgccactactggggatggggaacctgtttcttctggcaaaaaaggtttatcagcatttacgagctcagtgtccctagcttcagcagggtcctsccacacttccccattcttttccaatcaatgccctcactttaataagtagacacctagcgaggtgtctgtgcatgcaccttcattgcaggtcagccacttgcatgagaagagcttgtgtctgtttttccacaatttcagctctttctctacaggagataagactcactcatgataatcttagcagatttgaggctcagtatctgcttctgaagccggaagttagaatccctgagttcatcattttctttcatcactttgtccggtgaacttagaagcaaccaatcagcttcattatgttccttggttctc

SEQ ID NO: 186175 - DNA, 406 bp, Homo sapiens
gaaaggccatgtgaggacacggccaggggcagccacctgcaaaccaaagagaggccgcagaggaaaccaacgctgctggcaccctgatcttagacttycagcctccagaactgtgaggaagatatctctgtgggttaagtcacccagtctatggtattttgttagggcagccggagcttagacagaatggccttgagcccaccaccactcagagtgtgatctggggactggcagcattcgcatcaccaggatcttgggagaaattcacagtccctggccccaacccagccttgctgagcccgaaattgcattttggcaagctcctccctccttcccgcggatgggggtggaggtctccaccaggccctggctgtcagcatctctgtgtatatgagacatcctagca

SEQ ID NO: 186176 - DNA, 406 bp, Homo sapiens
gaaaggccatgtgaggacacggccaggggcagccacctgcaaaccaaagagaggccgcagaggaaaccaacgctgctggcaccctgatcttagacttccagcctccagaactgtgaggaagatatctctgtgggttaagtcacccagtctatggtattttgttagggcagccggagcttagacagaatggccttgagcccaccaccactcagagtgtgatctggggactggcagcattcgcrtcaccaggatcttgggagaaattcacagtccctggccccaacccagccttgctgagcccgaaattgcattttggcaagctcctccctccttcccgcggatgggggtggaggtctccaccaggccctggctgtcagcatctctgtgtatatgagacatcctagca

SEQ ID NO: 186177 - DNA, 406 bp, Homo sapiens
gaaaggccatgtgaggacacggccaggggcagccacctgcaaaccaaagagaggccgcagaggaaaccaacgctgctggcaccctgatcttagacttccagcctccagaactgtgaggaagatatctctgtgggttaagtcacccagtctatggtattttgttagggcagccggagcttagacagaatggccttgagcccaccaccactcagagtgtgatctggggactggcagcattcgcatcaccaggatcttgsgagaaattcacagtccctggccccaacccagccttgctgagcccgaaattgcattttggcaagctcctccctccttcccgcggatgggggtggaggtctccaccaggccctggctgtcagcatctctgtgtatatgagacatcctagca

SEQ ID NO: 186178 - DNA, 406 bp, Homo sapiens
gaaaggccatgtgaggacacggccaggggcagccacctgcaaaccaaagagaggccgcagaggaaaccaacgctgctggcaccctgatcttagacttccagcctccagaactgtgaggaagatatctctgtgggttaagtcacccagtctatggtattttgttagggcagccggagcttagacagaatggccttgagcccaccaccactcagagtgtgatctggggactggcagcattcgcatcaccaggatcttgggagaaattcacagtccctggccccaacccagccttgctgagcccgaaattgcattttggcaagctcctccctccttcccgyggatgggggtggaggtctccaccaggccctggctgtcagcatctctgtgtatatgagacatcctagca

SEQ ID NO: 186179 - DNA, 545 bp, Homo sapiens
gtgtgtttactggaatgagggcaaggaacacttggcccgcccagggcagaaaaccgcttaaaggcattcttaagccacaaacaatagcatgagcgatctgtggcttaaggacatgctcctgctgcagttaactagcccaatatatccctttaatttggcccatcccttcttttcccataagggatatttttagttaatttagtatctatagaaacaatgctaatggctggcttgtagttaataaatacatgggtaaatctctgttcggggctttcagctctgaaggctgtgagacccctgatttcccgcttcacacctctatatttctgtgtgtgtgtctttaattcctctagcgccactgggttaggctctcccggaccgagctggtctcagcaagtggtgcccaacatggggctcgaatccaggtcgaagggtcaccagagcgatggttgaaatggaaaactaactggaggacaccygagtactcttaaagcaatccccgtggtgagtaagaaggggagctcggaagcatcagggtaacagtg

SEQ ID NO: 186180 - DNA, 333 bp, Homo sapiens
gacagttgaaggcctgtgaagacagctccagggcccygtgggccttccctttcccggctcagggtctctagggcccccagctgccactgagccatctccttagcgtgtgctctgcttgtaaacagccccctggaagagtgatggatcgtggctctcgggcggacagcccagggccacccgtgagaaagctaagcagagggcctgtagggccagcgcatccacctcccctgaaccacccctgcctctccccgctcaccccatcagtgccattgggatacgatcctggctccctcttacaacaggtgtgatcttgggcaagtgactcacttctcc

SEQ ID NO: 186181 - DNA, 467 bp, Homo sapiens
cccccgtgggcagatccttgcaaacagagtaygactcccttattcatctcaatgtcccagaacctggtccagtgctagccctgggcagatgctgttaaactccaggcaggagttttcaaattgaatggatcccaccattatctgctctgggcagagaccccagaggttcaggtgggccaaatgccacccagccaggcagctcccggctccgtccatggaactgaagtcctttgcaacagggaccaccgggaagctcactgtggttctctctccactaaatcctgttctggaaaactcagtgcctgagagaaccttcaattacaaagacatcaggccactgcagagcatttcttctctggatgttgatcgtatctctttattacaaaagctaaaaccaggttcatttgtaaaattctacaaacttgagagaaaacctggagtcaggagaaatggtaacgccctgaagt

SEQ ID NO: 186182 - DNA, 467 bp, Homo sapiens
cccccgtgggcagatccttgcaaacagagtatgactcccttattcatctcaatgtcccagaacctggtccagtgctagccctgggcagatgctgttaaactccaggcaggagttttcaaattgaatggatcccaccattatctgctctgggcagagaccccagaggttcaggtgggccaaatgccacccagccaggcagctcccggctccgtccatggaactgaagtcctttgcaacagggaccacygggaagctcactgtggttctctctccactaaatcctgttctggaaaactcagtgcctgagagaaccttcaattacaaagacatcaggccactgcagagcatttcttctctggatgttgatcgtatctctttattacaaaagctaaaaccaggttcatttgtaaaattctacaaacttgagagaaaacctggagtcaggagaaatggtaacgccctgaagt

SEQ ID NO: 186183 - DNA, 499 bp, Homo sapiens
accagcctgttctgtagcaagcctgggctggctccgttcttccctctctcctttaatctacccgtaactcttccaggtaaacagaggacatcctaccacggacaaaacaggcccagggggtggaggaacttgtccaagctcacagggcatttttttcatgggtctgagtcgtttactgcaggatttcatcaggatcattgaaagtcctttcaaatgccagtcatccctggggtaagagctgcatgcctgaaacgggaatccgagastaaggaaggagaagcgacgcctgccaaacaccggtgcctcctgcgtgcttgctgggtgccaggacctgacatatgctatgccatttaattttcacaaacacctgtgggctaggagccattgacagttctggtcttatagaaaaggaaattgaggctagggccattaagtgagggaagcagtatcatatagtagttaagagaatggcaacaggaattcatgtcccagcttagtg

SEQ ID NO: 186184 - DNA, 298 bp, Homo sapiens
caaaaaaaaaaaaaagaattaggttggcaaaccgttttgtaaagggcagataagtattttggattgtgtgggccagcccatctmtaacacagttgttcaactcagctgttggtgtgaaacattcatagacaatacacaaacaaatgaacatacatagctacgttccagtaaaactttatttacaaaatgagtggtggcctagatttggctgcctaaagagttttcctagtatgttgttctagggtgttggtgagaatatattaaactaaaaacatatatcttatttcaattgtacgta

SEQ ID NO: 186185 - DNA, 298 bp, Homo sapiens
caaaaaaaaaaaaaagaattaggttggcaaaccgttttgtaaagggcagataagtattttggattgtgtgggccagcccatctctaacacagttgttcaactcagctgttggtgtgaaacattcatagacaatacacaaacaaatgaacatacatagctacgttccagtaaaactttatttacaaaatgagtggtggcctagatttggctgcctaaagagttttcctagtrtgttgttctagggtgttggtgagaatatattaaactaaaaacatatatcttatttcaattgtacgta

SEQ ID NO: 186186 - DNA, 592 bp, Homo sapiens
atactatgcagccataaaacatgagatcatgtccttttcagcaacatggataaatctggaggccattatcctaagtggagtaacacaggaacagaaaaccaaataccgaatgttctcacttatacatcggagctaaacaatgagtacacacagacacaaagaagggaattatagactccagaggctacttgggggtggagggtgggaggagggtgaggatasaaaaactacctatctggtactatacttattacttgggtgacaaaataatctgaacatcaaatccttgtgacatgcaatttacctgtataacaaacctgcacatgaactcctgaaaccaaaataaaagttaaaaaaaagaaaagatcttgtcttatgggtataggaaataaaaagagtaactttacatcaaaaaataatgttagagctttcctgcataatttagaaaattactacacctttaaagtcaaccgattgcttattgtatgcttaccttgttaattatgagaaagaacattcttaagccaatttatccctgagctgagaataaaagctaacatttatgaattcattcatgcattcattcaacagg

SEQ ID NO: 186187 - DNA, 541 bp, Homo sapiens
attcatgtgaccttctcacacattcataaaaatgaatcaagaggaaattatcactcaaaagtagtcagaacatataatgagataagaaggtcaaaaatcttctgacaatttgaggggaaaaaagcaaatgcttttaaaagtcaatttcataaaattagaagctacatgtgatctttagaaaaagggattgttggctgggcgcggtggctcatgtctgtaatcccagcaatttgggaggctgaggcaggcgaatcatctgagatcaggagtttaagaccagcctggccagcatgtgaaacctcgtctctactaaaaatacaaaaattagccaggtgtggaggtgcatgcctgtaatcccagctactcaggaggctgaggcaggagaatcacttgaatccaggaggcggaggwtgcagggagccaaaatcttgccactgcactccagcctgtgtgacagagcaagactccatctcaaaaaaaaaagaaaagaagaaagaaaacggattgtcctcaaacaagaaattttgtattaaaacatatc

SEQ ID NO: 186188 - DNA, 579 bp, Homo sapiens
agggcctgtatatatagccctagtgtcttatagtgtcttacatggttggatctcagtaaagccttcttattttattaactgattagcaagttggactacatgatctctaaggtgtctttcaactcagtgttaagtgattctattgaagatgtgagaatctggctgtgaaagagtaattagaytggctatgtgagcactgagggagaactcttattccaggtctctttagaccagttcaatttctccaaaacaatgaaataaacttttccagcaacaatgaaggaaatagtatttcttgttggttaaaaaatatcctaaactcaagcagggacaacatcttatgcatctctgcttctctcccaaccaagaatcacagtacccagtatgttgtgtatgtttagtaaataattattgaaaaacttagttattttcatttcttcaaaattatctctctgtggaaaaaatagttttgtagaactgatattttatctattgaaaggtataattgaaatacctctggaatacacttgcaaaaatgtttggtaaataaatataggcatgttgtatgaatgttttagc

SEQ ID NO: 186189 - DNA, 461 bp, Homo sapiens
agaggaaaaggccatgtgagacaaccatgagaaggtagctatctgcaagccggatgagaggtctcagtagaracctattccagtggcacctcaatcttaaacgtctagcctccaaatgtacaaaaaaaaaaatctgttaattaacccaaccaatgtgcggtattttgttatgtcaacctgagctgactaagacagaaatgtaggaggatgtaataacaataacagtacctactactcagtgaatctattatttgctaacatgcacattgctttgcatatagcatctctatttttaaaaacccctacatgttaagttttaccttataggtgagaatataaagaaagaagaagatttggcagcttgacctcaatcacataactcataaatagtataacagaattccaaactgacttcagcacacccaggggcattctgggctggcttgtataaaatattgagt

SEQ ID NO: 186190 - DNA, 559 bp, Homo sapiens
aaaggtggagcaggcattgatctcacgtcaatccactgaaacttaagacagaaatcctcactgagagcctttgtacattgggttctacataacatttcaacttccgtggagtaagaaggtgagattatttgagattatttttctacattaaaaagcaagtttgtaactttctttattacatagtcatcttacacaaaacattttaaaaactcttcttactactaaaagtaatttgtttgtgtatatcttaattaaatctaaatatagtttaaaaataataattatgctaaattagacaccatagagggaatatctcctttcctcatagcctagataatcacggtatgaaaaaatgctttttcctataactcctataatcatatcatttgcagaatatgtcctgtgttaaaaattgtcagtgcaatgttgataacaaattgcatattttaatccactaaagaaagagagatytatatctccatcattgagagtttatatctataatatttttctttccaaaggtgtgattattccaacacactatgataacttaaaaatt

SEQ ID NO: 186191 - DNA, 549 bp, Homo sapiens
atatatatgtacacatatatataacagtaaaccctgtaggcaagcaggaaaacttcagaattctcaatgaatccatcattagctgttagtaatgacaacactattagaagtatttcaataatcaaacattgttgtggtctgtatgtgcacccccaaaagtaatatcttgaaattctaacacctgagggcatagtatttggaacttgggagtggaattcttttttgtgctattatgaataagatgcttgcctcttccatcaaatgaggacacagccacaagttaccctctaggagctaggaagttagycttcaccagacacaaaatctgcttgattttgaatttagtctcctgaactgtggaaaataaatttctgcttttataagccactcagtttatgctatttggttatagtggcccaaagagagtaaaaagacacattatttacctcctttgtggactctctggagttgttgctttaaacttgctttagtgcctaacactgctccaactccctgtcctttagcacacacggataaataattctgctg

SEQ ID NO: 186192 - DNA, 382 bp, Homo sapiens
tgtatgacaaacacctacattaaagaaaaaacatctcaaataatctatcattaaacctcaaggaactagataaaaagaagagcaaactaagcccaaagctaatacaagaaagcaaagaaatatcaaagcaaactaaagaaatagacagtagaaaaataatagaaattgaaagactttctgtgttcatcaatgggagaaatcaatactgtcaaaatgctattggacaaaacaatctacagataaatgtaatccctatcaaatgtccagyggcatttttcacagaaacagaaataaatactaaaatttgtatgaaattacaaaagactataagtacctaaagtgatcttgtgcaagaagaacaaacaggaggtaccacacttct

SEQ ID NO: 186193 - DNA, 536 bp, Homo sapiens
cttacaataatggttccattcattgattaggaagcgatactgctacttggccattcagggttcattctgctactaaaccaatcagcaaagaagtgggttatggggggcttgcwtgattgatcctgaccctcaagggcaaataagcaatttgcttcaaattgggtagagaggagtatagctggagcccacaggatttcctgttatgcctccctgaaccaccaagcacagtaattaaggctaattgaagactattacaattccatagaggcagaatcaccaatgactcataccccttggccatgaaggttaaggctcctccctggctgggaaccaaccaacttaggtgccaagtcaggaaagtgggactccagaacagacagtagaggaggaaagtcctggccattagctgtcacctcatgatcagagatgaggactgaagcattttccagtatcttttttttttctgtgccatgcatttacctgcatgttataattaatttttatttcctatcctcttattttcttccaatatttta

SEQ ID NO: 186194 - DNA, 536 bp, Homo sapiens
cttacaataatggttccattcattgattaggaagcgatactgctacttggccattcagggttcattctgctactaaaccaatcagcaaagaagtgggttatggggggcttgcatgattgatcctgaccctcaagggcaaataagcaatttgcttcaaattgggtagasaggagtatagctggagcccacaggatttcctgttatgcctccctgaaccaccaagcacagtaattaaggctaattgaagactattacaattccatagaggcagaatcaccaatgactcataccccttggccatgaaggttaaggctcctccctggctgggaaccaaccaacttaggtgccaagtcaggaaagtgggactccagaacagacagtagaggaggaaagtcctggccattagctgtcacctcatgatcagagatgaggactgaagcattttccagtatcttttttttttctgtgccatgcatttacctgcatgttataattaatttttatttcctatcctcttattttcttccaatatttta

SEQ ID NO: 186195 - DNA, 536 bp, Homo sapiens
cttacaataatggttccattcattgattaggaagcgatactgctacttggccattcagggttcattctgctactaaaccaatcagcaaagaagtgggttatggggggcttgcatgattgatcctgaccctcaagggcaaataagcaatttgcttcaaattgggtagagaggagtatagctggagcccacaggatttcctgttatgcctcyctgaaccaccaagcacagtaattaaggctaattgaagactattacaattccatagaggcagaatcaccaatgactcataccccttggccatgaaggttaaggctcctccctggctgggaaccaaccaacttaggtgccaagtcaggaaagtgggactccagaacagacagtagaggaggaaagtcctggccattagctgtcacctcatgatcagagatgaggactgaagcattttccagtatcttttttttttctgtgccatgcatttacctgcatgttataattaatttttatttcctatcctcttattttcttccaatatttta

SEQ ID NO: 186196 - DNA, 536 bp, Homo sapiens
cttacaataatggttccattcattgattaggaagcgatactgctacttggccattcagggttcattctgctactaaaccaatcagcaaagaagtgggttatggggggcttgcatgattgatcctgaccctcaagggcaaataagcaatttgcttcaaattgggtagagaggagtatagctggagcccacaggatttcctgttatgcctccctgaaccaccaagcacagtaattaaggctaattgaagactattacaattccatagaggcagaatcaccartgactcataccccttggccatgaaggttaaggctcctccctggctgggaaccaaccaacttaggtgccaagtcaggaaagtgggactccagaacagacagtagaggaggaaagtcctggccattagctgtcacctcatgatcagagatgaggactgaagcattttccagtatcttttttttttctgtgccatgcatttacctgcatgttataattaatttttatttcctatcctcttattttcttccaatatttta

SEQ ID NO: 186197 - DNA, 382 bp, Homo sapiens
tttctcccaaaatggaatccatcatgcattttctgtttttcccaaaacgtttcaggccaccagaagttatcttgtgtgcattaagagtggaaagacagagtggagaacagtaattcagtcratggaaaagttcttttcaagaaaaacacgatccaagaagacaaaaacatgcaggtcttttaaatatacctataacttgaatatccacttttaatcaagctcagcaccctttcagaaaatcctttgacatcttctgtttcctgactttagctaaatcaagcaggtaatatttctggcttttgaattttaccaaaggtaacatcacaggggaaactaaaaactctccgttaggttataagttcaccgttagtatacaagatat

SEQ ID NO: 186198 - DNA, 386 bp, Homo sapiens
tattttaaatgaaattcaattagctacatgtctacaagaaaaggcatatattactcttttattcagatcactctcgtaaaaaaattacctgagtagcatcattgtagttctcgatatctccacttccagttttacatttaccatcattgaaatcccatccagaatatgggactgctggaaagtccctacttccagggttgaagtaacttccacaggtactgcttgttcctgcactcacagcgttaccacacatatgattaattacagcatccacataaatacgaacctagaaaacaaagtttctacttcagtgtgacttacagagargtagaaatttaaagcattattgatgcaagtttatagtatgttaataaaactccaaaata

SEQ ID NO: 186199 - DNA, 352 bp, Homo sapiens
caaattttagcatatatatatttatctcttccttctcctttaaaccaaacccaacctatcctgttacttgtgtctctgcattcagtgactttatctagaatccaatgccttcattgatttttatagccctttactgggtcttcatcatctctctatcctctggttctcttttgccayatttcaaacaaaggtagcaaattgttatcctctccttttcattccaaggcactgcaaagacttctttgctctgtcacccaggctggagtacagtggcatgatcgtagctcactgcagccttgatctccgaggctcaagcgaacctcccatctcagcctcccaagtagctaagact

SEQ ID NO: 186200 - DNA, 443 bp, Homo sapiens
gaattcagctgccaggaacggaccctcaataggatccaaatgaaggaccagatatggaaaggctaagagggtaccgagaggcattaattgaaaggttgaaaaaaggggctcaaaagggtaccaatgtaaataaagtttctgaagtcatccaaggaaaggaggaaagcccagcccagttctatcaaagaccgtgtgaggcctattgcatgtacactcctttcgatctggagagtcctgaaaatcagcygttgattaatacggccttagttattcagagtgcagaagatatccagagaaaattgcaaaaacaggctaggtttgcaggaatgaaaaccttgcagttactggaaagagctaatgaagtatttgtaaatagagatgcaacaagcggccaagaaagccgtaaggagggcgaacgccaggccaggtgaaacgctagtttg

SEQ ID NO: 186201 - DNA, 441 bp, Homo sapiens
gaattcagctgccaggaacggaccctcaataggatccaaatgaaggaccagatatggaaaggctaagagggtaccgagaggcattaattgaaaggttgaaaaaaggggctcaaaagggtaccaatgtaaataaagtttctgaagtcatccaaggaaaggaggaaagcccagcccagttctatcaaagaccgtgtgaggcctattgcatgtacactcctttcgatctggagagtcctgaaaatcagccgttgattaatacggccttagttattcagagtgcagaagatatccagagaaaattgcaaaaacaggctaggtttgcaggaatgaaaaccttgcagttactggaaagagctaatgaagtatttgtaaatagagatgcaacaagcggccaagaaagccgtaaggagggcraacgccaggccaggtgaaacgctagtt

SEQ ID NO: 186202 - DNA, 284 bp, Homo sapiens
acagcaggtacactacctaggattcactatttgaaaaggggagtgcagtctatggtcagcaagaaagcaggtcatctgcagcttaccagaacctaaaaccaggaggcaaataagagaacatttaggagctgtgagatttttgcagactgcagattccaaactttgtggtgttagccaaagcattgaatggagttataaaggggrtgaccgagagccttttaaatagaggtctctacaacaacaagacttataagttaaaagaaaaacttatgtcagcccaagct

SEQ ID NO: 186203 - DNA, 555 bp, Homo sapiens
agtaatataatttttcatttcttttaaaaatgccagcacatggtatgctacaaagattttaggttagtgatttgtttcatctactaagtattaggtgatagaaactgaaatctggccataatcaaatcaaggcaagatataaattggttttggttgtgatgttttttttttttttttttttttttttttaaacaaagttttgtttttgttgcccaggttggagtgcaggggcacaatyttggttaattgaaacctttgcttcctgggttaaagcgattttcctgcctcagcctccaaagtagcctaaattacaggcatgcgccatcaggcccagctaatttttgtatttttagtaaagacagggtttcaccatgttggccaggatgatctcgatctcttgacctcgtgatccacctgcctcggcctcccaaagggctgggattacaggcgtgagccaccgcttccggcccgcttttgatcttatgtgatcattttaatcgcccaagtctcccagcaaattgatgagctgtgtatcctgctgtgggtgtcacagaa

SEQ ID NO: 186204 - DNA, 579 bp, Homo sapiens
ctttggaaagaaaaaaaataaatgtaaactttcaaagatggcaggagatatagatctctctttctttagtggatttaaatatgcaatttgttatcaacattgcactgacaatttttaacacaggccatattctggaaatgatatgattataggagttataggaaaaagcattttttcatactgtgattatctaggctatgaggaaaagagatatttcctctatgatgtctaatttagcataattattctttttaaactatatttagatttaattaagagatacacaaacaaattamttttagtagtaagaagagtttttaaaatgttttgtgtaagatgactatgtagtaaagaaggttacaaacctgctttttaacttagaaaaataatctcaccttcttgccccatggaaaattgaaatgttatgtggaacccaatgtacaaaaactctcagtgaggatttctgtcttaagtttcaacggattgaggtgagaccagtgcctgttccacctttttcctccctgtcctaggtgacttgataacatttatacagccataaaattttgcttttaaattcaa

SEQ ID NO: 186205 - DNA, 579 bp, Homo sapiens
ctttggaaagaaaaaaaataaatgtaaactttcaaagatggcaggagatatagatctctctttctttagtggatttaaatatgcaatttgttatcaacattgcactgacaatttttaacacaggccatattctggaaatgatatgattataggagttataggaaaaagcattttttcatactgtgattatctaggctatgaggaaaagagatatttcctctatgatgtctaatttagcataattattctttttaaactatatttagatttaattaagagatacacaaacaaattaattttagtagtaagaagagtttttaaaatgttttgtgtaagatgactatgtagtaaagaaggttacaaacctgctttttaacttagaaaaataatctcaccttcttgccccatggaaaattgaaatgttatgtggaacccaatgtacaaaaactctcagtgaggatttctgtcttaagtttcaacggattgaggtgagaycagtgcctgttccacctttttcctccctgtcctaggtgacttgataacatttatacagccataaaattttgcttttaaattcaa

SEQ ID NO: 186206 - DNA, 339 bp, Homo sapiens
ctcacaccttgctccctgagcccctcttgttctcatctgtctcctctcccacctttaagggcccatgttattacatggggcctgccasataatccaagaaaaatctctctgctgtttagcaaatttaatttcattaaacctcaattcctttttgctatgtaatgtaccatattcacagattccagggatccgcatgcggatgtcttcatggggacattattctagttacagccccaaggttgccaagttagccagtggcagagtttggattcaaatacaattttaactagaatattcatatgcatagccctcacattctcctgcctctcaactcattac

SEQ ID NO: 186207 - DNA, 566 bp, Homo sapiens
tgggcaagaacgtagaatagtaaatagactatcaggtaaaaggtactcttacactattggtgtaaaaggaaattataatagccttttctgaaagcaggtacaggcacagacacatacaaacacacatgcttttttttttttcatttatgggcaccaattaaggtacagaactatttaaaggctacctcagcagaatgataggagtaatgactaaattcttattttaaacctttattaactcaatggagtaacactcttttaatctgaaaaataaaaagaaagaaaactttaaaaagtagtagcatgtatcactgactaaaggaaatggagaagaagagagaaaaagagcactgaccatggagttgtaaggaawtcaaaaacaaattcatccatttcacaattcacaattctgtctaggctgaccctgaccttcatactcaaagcaacacatgcaccattagcgtttctcattttttaaatatatccaagcaaataatgcccatggagatggcaccaacctgatctgtttgtggcttcacttggttctacaacaaactgtagagagg

SEQ ID NO: 186208 - DNA, 566 bp, Homo sapiens
tgggcaagaacgtagaatagtaaatagactatcaggtaaaaggtactcttacactattggtgtaaaaggaaattataatagccttttctgaaagcaggtacaggcacagacacatacaaacacacatgcttttttttttttcatttatgggcaccaattaaggtacagaactatttaaaggctacctcagcagaatgataggagtaatgactaaattcttattttaaacctttattaactcaatggagtaacactcttttaatctgaaaaataaaaagaaagaaaactttaaaaagtagtagcatgtatcactgactaaaggaaatggagaagaagagagaaaaagagcactgaccatggagttgtaaggaaatcaaaaacaaattcatccatttcacaattcacaattctgtctaggctgaccctgaccttcatactcaaagcaacacatgcaccattagcgtttctcattttttaaatatatccaagcaaataatgcccatggagatgscaccaacctgatctgtttgtggcttcacttggttctacaacaaactgtagagagg

SEQ ID NO: 186209 - DNA, 658 bp, Homo sapiens
aaactggaactggtaaaaagaacttaaactgttaatatcacaaactcaaaaatataggtttagtttatttttatttactctgtcattttgcatgtagcatcctttccagcttccagcttgcatcttcagtaaatgtgtataaacatcatagaatggtgtttggtttggtttggtttggttcgattttaggaggatggagatgacatctaaagaatgctattgaaaagacagtctcaacaaggaaactaattccagttgctttcagttttcaaatttctgtgaagaaggagcagtcattagcaaaactgtgaagtcattgaactgtgtttttggctaacaaatctcctragtttgagcccttgttcccttattccctttaagctacctttatcttcatattctctccagtctcttccctgctgaaacatggtttcaacaacaaacctgacctctttctctgtaatgtattcctcttttctccactttctaaaaactatctcagggcagtctcaacgacaaatatggctttgacagccactataagctaataaccccccaaatttacacatttctctcctgagcaacagaatggtaatgataacttctcatttgtcatctccacttgggtgtctgacagacaccttcagtacaaaacaca

SEQ ID NO: 186210 - DNA, 593 bp, Homo sapiens
cataatttagtataacctcactagttcttgagtaaacagtaccttcaagtgtagagattgagagtgtgggtgtttgaataaaatgaactcaggttgtagtcctgttcctgaaacatgctggttttgtaaggtaacctcaaaaatgtcaactattctaataatgtagagtatctgctgagcacttattatctgccaagtattatttataaacttaaaaaattatttcatctaattttattattaatgaccatactctgaggcagttacaagaattatctcattcrctaatgagaaacttggagtacagagaagacaagtaacttgctcaagctgacactatcagtaagtggtagagtcctaattcaaactgtcttaaggcacttgagggttatgtcacaataccgcctcggttttcttactatcaaaaataaagaaaataatgatatttgtttcttagaactgtgagaattaattgaaagggaatacataccaaattcatggcatatagaaagcactagaaaattttaactaaagttacttaaaattaattttcatgttagctacttttaaatatgaagatactcttagctcat

SEQ ID NO: 186211 - DNA, 573 bp, Homo sapiens
gaagatacaggctaaagatacaggacccagcctacatatggtttgtctgtgttcccacccacatctcatcttgaattacagctaccatgattccctcatgttgtgggagggacccagtgggagataatttactcaggagggcagtttccytcatactgttcttgtggtagtgaataagtctcatgaaatttgattgttttataagggaaaaactcttttccttggttctcattctcttatcttttctgccgccatgtgagatgtgccattcaccttctgccatgattgtgaggcctccccagccacgtggaactgtgagtgcactaagcatctttttctttctgtaaattgcccagtctctgataagtctttgtcagcagcatgaaaatagactaatacagtaaattggtaccagtagagtggggcactgttgaaaagatacccaaaaatgtggaagtgactttggaactgggcaacaggcagaggtaggaacagtttggagggctcaggagaagacagaaaaatgtgggaaagtttggaactccttagagacttgtcaaatggctttaacca

SEQ ID NO: 186212 - DNA, 518 bp, Homo sapiens
tgtaaaaattagtgtgtagaatatagcaggtactcagaaaatgtttaatatttacaattatagagcgcatctttcaagtatacttccttcatatgtcttttcctaagaaattatggataaatcaaaattttgtayccttccttttaatcctatgcatgtatgtatattatctattattctacagaacccaccagaatgatcttgttaacagtagaaataatgggttagtaatttttgtgattacagtgcctaatgcagtgtatggcattcaacaactgttagacacatgagtgaatgatggaagagaatggacttttatctctataaaaaatagtcccacggtaccctgggattttttttaacatttttattttctaaataatttatcattctgtcttattcatcttccgatactaacttgtttactagccttttcttttcactttgccctctatatatactgccatctcacaagataaacaaaaactatatgagttagaattaaattatatataaaa

SEQ ID NO: 186213 - DNA, 518 bp, Homo sapiens
tgtaaaaattagtgtgtagaatatagcaggtactcagaaaatgtttaatatttacaattatagagcgcatctttcaagtatacttccttcatatgtcttttcctaagaaattatggataaatcaaaattttgtatccttccttttaatcctatgcatgtatgtatattatctattrttctacagaacccaccagaatgatcttgttaacagtagaaataatgggttagtaatttttgtgattacagtgcctaatgcagtgtatggcattcaacaactgttagacacatgagtgaatgatggaagagaatggacttttatctctataaaaaatagtcccacggtaccctgggattttttttaacatttttattttctaaataatttatcattctgtcttattcatcttccgatactaacttgtttactagccttttcttttcactttgccctctatatatactgccatctcacaagataaacaaaaactatatgagttagaattaaattatatataaaa

SEQ ID NO: 186214 - DNA, 587 bp, Homo sapiens
atttcatattttgtagatctataattatttactgtttcacctatcaaagcataacttgtatccagtactgttttatcagagggctgagatgtctctactgggtgaggtttatgggaatgtttgtcatttgccaaagtcttaggtaatatattatgatgcttttctcttgactttctaccttgaargagtgcagtgctctcagccggggatattgtgcgttgtttcagagaccctgcctttcttggtattgtaatccaagatctactggcaaaactttgatccgactcatcaattataaattcatcctctatcaacttcgtatcatcgggaggacacgaatgaggtggagcagttgccgcatgcctaacaatgggactgaaacagggtgatacttttaacagttcaaaaaaataaagcttttatatttgtttagtaaagaaaataatctaggaaataaaatctaaatttcttttaaactgtttatatatctcctcaattttcccttaatcttacaaatctttccctcctttcacatttctatgtctgttcacccttatttataatagtaatgacatcacaaaaattta

SEQ ID NO: 186215 - DNA, 580 bp, Homo sapiens
tcactctaggggaagacagcaacaatatgaagattaacacaagactgccatgctgtgaggaaacctcatgtggccacatggaaaagccacatggaggaaaagagatgcttggccaacctcaatgtcccagttcttccagctgggtccaaacatgtaagtgaggaagttacctcgaatgtccaacccatttgaactttcagatgactccagccccagcagcttgcatttaactatataaattcatgagtgtactcaagtggcaattacccaactaagccaagtcaattcatagaaccatgaaagataaatcaatcactgtattaagcctttaagttttggggtggttggttacgcagcaatatacaactgggacacaatgtccatgaaccacctaaaactgcaaatacaattttgtatgaaatatataccttttttccctaaaaagcrggtctgagcttttatcatattctcaaatgagtccatgaaagcaaacaaacaaaaattgttaagaatgattgaattagatattttataaaattgctggtttggaagaaacttcagtgatcataacatctaattt

SEQ ID NO: 186216 - DNA, 523 bp, Homo sapiens
ttcaatacacgcaccttctcagggacttttcttccatctggcatcatctttgtcttttgaccattttccccaatcaatacctatattcatactcaagttttccatatttgggaaaaaacttctcttgacaccaaactcccctctgacttccttcttataatgatctatggttggatagtctacaatttactgtcyttactttttcataggtattttttaatctcctacagtaagatttctaccactgcactgaaatcattttgtgtatggtcttcagggaattccatgtggccaaagccaatggatacttttggcatgggctttggaggtctaacttcttgaatccaagtgtcggctctaacaatcactatctatgtgaccttagaccagttatttaacgctgtctttatttcctcatttgttaaatgaggataattgcagcaatagaaaaagaacgtaaacaattatacttataggattgtatgatgattaagtgattaatgcaaggaaagaacaacacaga

SEQ ID NO: 186217 - DNA, 523 bp, Homo sapiens
ttcaatacacgcaccttctcagggacttttcttccatctggcatcatctttgtcttttgaccattttccccaatcaatacctatattcatactcaagttttccatatttgggaaaaaacttctcttgacaccaaactcccctctgacttccttcttataatgatctatggttggatagtctacaatttactgtccttactttttcataggtattttttaatctcctacagtaagatttctaccactgcactgaaatcattttgtgtatggtcttcagggaattccatgtggccaaagccaatggatacttttggcatgggctttggaggtctaacttcttgaatccaagtgtcggctctaacaatcactatctatgtgaccttagaccarttatttaacgctgtctttatttcctcatttgttaaatgaggataattgcagcaatagaaaaagaacgtaaacaattatacttataggattgtatgatgattaagtgattaatgcaaggaaagaacaacacaga

SEQ ID NO: 186218 - DNA, 496 bp, Homo sapiens
tgagaacatatgatatttggttttctgttcctgtgttagtttgcaaaggatagtggcctccagccccatccatgttactgcaaaggacatgatctcactctttaaaatggctgcatttaatggtgtgtatgtaccacattttctgtattcgagctgccgttgatgggcatttaggttgatcctatgtctttgttattatgaatagaacagtttctttggagrtcttttcatcagtctagggattcccttcatcttttgcctgggtcctggctccaaacttttctttcctgttttggtggaatgcgtcttctagttacttcttcagaagtgcatgtgaggtaaaatttttgagaccttgcaaatataaatgcctttattttgacttttcacttaattgatggctaggaataaaaaatctaggcttaaaataatttattcagaattttgaaggctacagtccactgtattctagcctctagtcttgtgattgagaatt

SEQ ID NO: 186219 - DNA, 496 bp, Homo sapiens
tgagaacatatgatatttggttttctgttcctgtgttagtttgcaaaggatagtggcctccagccccatccatgttactgcaaaggacatgatctcactctttaaaatggctgcatttaatggtgtgtatgtaccacattttctgtattcgagctgccgttgatgggcatttaggttgatcctatgtctttgttattatgaatagaacagtttctttggagatcttttcatcagtctagggattcccttcatcttttgcctgggtcctggctccaaacttttctttcctgttttggtggaatgygtcttctagttacttcttcagaagtgcatgtgaggtaaaatttttgagaccttgcaaatataaatgcctttattttgacttttcacttaattgatggctaggaataaaaaatctaggcttaaaataatttattcagaattttgaaggctacagtccactgtattctagcctctagtcttgtgattgagaatt

SEQ ID NO: 186220 - DNA, 299 bp, Homo sapiens
gtgtgcaagacaaagggggacacatgtccacagaaagacctgttcattaatgttcacagcagttctattcacgatcgccccaacctggaagcaacccaaaygcctatcaacaggccagtggctaaaccagttgtgtcgtatccatacaatggaatactactcagccactcaaataaactacctatacatacattcaataacattagtgaatttcaaaagtgtcatgctgagcttaaaaaaagccagatacaaaagattgcacatgaatccatttatgtaaatgtatgtaaaagattacc

SEQ ID NO: 186221 - DNA, 521 bp, Homo sapiens
cttcaaactcttttctttgttcccgcaaccttagaaatgatagctgcttcctgcatttacgatctctgtgtaatctcagtttttcttttgaaattttcagtcctctaattcttattttaaattttctgttaaaacaactcctggggtttctattttcctgacttacccccaactgatctatatccctttttattgactgatgtagatctctgattaccatatgtagggctggcagtggaaaaaattgtgaagaacraagtttgttcttggatccaagatacctcctttcagagctctgatgcccagatatccaccacaattatgcaatgtcccaggctcctgccagccctagaccccttccattccatcactcatacccctagggactgcattctgataggtagcaataagtgatcatggattttggtgagataaactagttccctaatatgcaagctaaagtgtttccctcccatataacctacttccttggcttagataaacatacttcttagaaaggc

SEQ ID NO: 186222 - DNA, 572 bp, Homo sapiens
tcaaaaatggaggaaatctcagatgtagtagctaacccatggttttcatgcagtagacatagaaatagccatctcctctgttcacgtgtagaaacatgagtgcttggatattccttcttcttttgacacctttttatctgggccactgggaaagttaaaggagctcagccatgaaaaaagaaacaaaacaaaacaaaacaacaacaacaaaaacaaaccctagagtttcacagacactatttgttrgaaatacagcaaattatttttagctggttacagataaattagtttaattttctcaagtagtcagttgaaataaaatgttctaaactttgctttgagtaattgaatgtaatttgaattaggggttgtgtgtaactcttgtatgtttgataatcaacaactatccccacttctttctgtagaaaagaaaggattttattttctgtgactttcagatcacatgccttatgtatatttccatgctcagaaatatcctcctaaccctgcaatttaaccaacaaatccaatgctttaagatacttcgagataatacaagcaagtcacaaggc

SEQ ID NO: 186223 - DNA, 373 bp, Homo sapiens
gccacgtgagtcaaatgagactctcaggggaatcatccccatctgaacactccttcaaccactcacagactttacyctcagctcccaagaatcccttctttctgggaccttagtgattctcctttggtgtcaaactgaagccaccttttctcctggctacttcaggacttttgagggctaggggagaagctaattcatctttgcatcttctgtgctgaacacatctgggacttgtaaaagttttcagaatgaatggatgctctgtctgaacctgtcctccgtcctgtcagctcttcctagagccccttctgcctcttctttgcagtacttgctactgaggttttcccacttgaatcaatttagcctgaattct

SEQ ID NO: 186224 - DNA, 563 bp, Homo sapiens
ctgccccttggttttgtttctcttcttttgcaagatggctggctttctctactttttaatccatgacttcttctaagcaaccaaatcacatgttacagttccacccaaacactgagaatagactggtatttccctgtccaaatcaacattcccaggaaggataatctggctcacggtggccacgaattaacttcctcttagacaggagcatgaacaacagacactggtgccgccctttgtggacgtgtttcccatagcaaaggcgggagtcttctatacctgcttctcagtcaaatagattgcatgagtcactggaactaagcaatttggtacatttagcatttctccactctccagaattattaagctgaaaatgttttttaatcaaattttataggaaaataaagttttaattcagtaacatctcaacaaataaaaacttrgatgtttattacatgacattcaatattacctttagcataaatagaaaaatgttacccagtacataaatattttcctcattgaatattcaattagtaaatgcaagtaaataatcttcatta

SEQ ID NO: 186225 - DNA, 639 bp, Homo sapiens
acagtgaagagaactaggcagaactggttgtttctggaaggagcatactggccagaaaggccctgtgttctacgctgagaatgagaggggatgtggaaggggaaaggacctgctaggaacctggagtccagccgagcactgaaggycagccttcccctctgcctccgactgcccttttcctttccaggctatattctttataccacaaacactctggaatgagaaaatgtcaaatggcatgtagaagcatgtcttttcccgtagacgcatgcgggtgatggcatgcagccacactgtgcccagcacacccaggcttgtcctttgcctccagagtgcaccccttcctctcatgcaccaccatgagcaaagtgggaaccaggccctgggcttggagaggaagtggagggagggccagggctgggacagcctccacaggatgctcaggacaggggcacaaagacatacgtgcaagtggaattccctttaaggctaaatggcaattccaagacatgcttggattttttagaggtgggggaattgagacgagaaaagagacattaaaaataaaatattctaagaaagctgttttatttaaacgaatcccaaattagcacattatacttcagtgcatatgccact

SEQ ID NO: 186226 - DNA, 639 bp, Homo sapiens
acagtgaagagaactaggcagaactggttgtttctggaaggagcatactggccagaaaggccctgtgttctacgctgagaatgagaggggatgtggaaggggaaaggacctgctaggaacctggagtccagccgagcactgaaggccagccttcccctctgcctccgactgcccttttcctttccaggctatattctttataccacaaacactctggaatgagaaaatgtcaaatggcatgtagaagcatgtcttttcccgtagacgcatgcgggtgatggcrtgcagccacactgtgcccagcacacccaggcttgtcctttgcctccagagtgcaccccttcctctcatgcaccaccatgagcaaagtgggaaccaggccctgggcttggagaggaagtggagggagggccagggctgggacagcctccacaggatgctcaggacaggggcacaaagacatacgtgcaagtggaattccctttaaggctaaatggcaattccaagacatgcttggattttttagaggtgggggaattgagacgagaaaagagacattaaaaataaaatattctaagaaagctgttttatttaaacgaatcccaaattagcacattatacttcagtgcatatgccact

SEQ ID NO: 186227 - DNA, 639 bp, Homo sapiens
acagtgaagagaactaggcagaactggttgtttctggaaggagcatactggccagaaaggccctgtgttctacgctgagaatgagaggggatgtggaaggggaaaggacctgctaggaacctggagtccagccgagcactgaaggccagccttcccctctgcctccgactgcccttttcctttccaggctatattctttataccacaaacactctggaatgagaaaatgtcaaatggcatgtagaagcatgtcttttcccgtagacgcatgcgggtgatggcatgcagccacactgtgcccagcacacccaggcttgtcctttgcctccagagtgcaccccttccyctcatgcaccaccatgagcaaagtgggaaccaggccctgggcttggagaggaagtggagggagggccagggctgggacagcctccacaggatgctcaggacaggggcacaaagacatacgtgcaagtggaattccctttaaggctaaatggcaattccaagacatgcttggattttttagaggtgggggaattgagacgagaaaagagacattaaaaataaaatattctaagaaagctgttttatttaaacgaatcccaaattagcacattatacttcagtgcatatgccact

SEQ ID NO: 186228 - DNA, 370 bp, Homo sapiens
gaattctttatccaggcctggagtggtggccgtggaggaggcttgcagtcttgcactcctgcaaaccatgctccagggctgcctcgtccccgcttccccarcacctgtgtgctgggtgccagggagcacgcaccttctgcgctttcagatgcggccaaatgtctcccgaatttctctatagaaatttaagctgcaccgcagggagagtttgaacagggcacatcctaggcctttctgggtgccatcgattggtgtgaagaggcatctgctgttgtctagagatagacaaccagtgaatgtgcgcattctcaggcgtctcctctgcgtggagggctgccccatccctgcccctttatttccctgggtgcct

SEQ ID NO: 186229 - DNA, 370 bp, Homo sapiens
gaattctttatccaggcctggagtggtggccgtggaggaggcttgcagtcttgcactcctgcaaaccatgctccagggctgcctcgtccccgcttccccaacacctgtgtgctgggtgccagggagcacgcaccttctgcgctttcagatgcggccaaatgtctcccgaatttctctatagaaatttaagctgcaccgcagggagagtttgaacwgggcacatcctaggcctttctgggtgccatcgattggtgtgaagaggcatctgctgttgtctagagatagacaaccagtgaatgtgcgcattctcaggcgtctcctctgcgtggagggctgccccatccctgcccctttatttccctgggtgcct

SEQ ID NO: 186230 - DNA, 568 bp, Homo sapiens
agaaagctgtgtgaaggcaggggcagagctcggagtgatggggctcatcccactaccagagcaccctcctgaaagtccacactgaggaagatgatgagccattgagacacaggccatgttactccacccaacagcaaaggtggtcaagctataggtgagaaactgcttgttaaaaaccacacrggaaatggatacaggccaaacaaaggttcttcgacgtgggtcatacttttagaaataaaaagtgtaaaacacactctaagccctggaaaggttatcattcctcagcagattctcaggagacaaagagaggagaccaagaagaaccactggtgatgagagctggctgtgaatgcaggctcctgcttcaaatgtgtgtacatgcagccagggagggttggctgaatctcaccattcagcatcaagcgccccgtcccttcagaggtgggtaatggacttggagctcctcttctgaaattgtgccctccctgctgcaccgttctctgtattacacagataggtgaagattagcatctttagctaagtgtgatctctccaaatcttccag

SEQ ID NO: 186231 - DNA, 568 bp, Homo sapiens
agaaagctgtgtgaaggcaggggcagagctcggagtgatggggctcatcccactaccagagcaccctcctgaaagtccacactgaggaagatgatgagccattgagacacaggccatgttactccacccaacagcaaaggtggtcaagctataggtgagaaactgcttgttaaaaaccacacaggaaatggatacaggccaaacaaaggttcttcgacrtgggtcatacttttagaaataaaaagtgtaaaacacactctaagccctggaaaggttatcattcctcagcagattctcaggagacaaagagaggagaccaagaagaaccactggtgatgagagctggctgtgaatgcaggctcctgcttcaaatgtgtgtacatgcagccagggagggttggctgaatctcaccattcagcatcaagcgccccgtcccttcagaggtgggtaatggacttggagctcctcttctgaaattgtgccctccctgctgcaccgttctctgtattacacagataggtgaagattagcatctttagctaagtgtgatctctccaaatcttccag

SEQ ID NO: 186232 - DNA, 519 bp, Homo sapiens
aactgagtgacatattcatctaggcattaaaatttcccctctcaactcccagtatcaagtcaaattctctccatcagataaaagctggagctgataaaatgagttcgggaatatytcacagtggaattggaatttcataaacacaagacaatgaaagaacacctatgtgatttactgaaaacagacaaatactgtagtgtagtgtgatccttttgagatggattgcctaaagctttcccgagttgggcatgtgttctacttagtgatgagaaatcagaagcaaagaatggaataaacatgctttatttcacttagagactaaaaatatgaaaagcaagtgctgttttagttacaacactaagatttaaaaatcaaaagcactatttacttttgattttgaaaattcagtctatgactctgagaaagatacctaacaaggcacatgatagaaatctggttataacttctatggcagtcaagcagagatcggatttttttaaacaactaaatgagaggaga

SEQ ID NO: 186233 - DNA, 519 bp, Homo sapiens
aactgagtgacatattcatctaggcattaaaatttcccctctcaactcccagtatcaagtcaaattctctccatcagataaaagctggagctgataaaatgagttcgggaatatctcacagtggaattggaatttcataaacacaasacaatgaaagaacacctatgtgatttactgaaaacagacaaatactgtagtgtagtgtgatccttttgagatggattgcctaaagctttcccgagttgggcatgtgttctacttagtgatgagaaatcagaagcaaagaatggaataaacatgctttatttcacttagagactaaaaatatgaaaagcaagtgctgttttagttacaacactaagatttaaaaatcaaaagcactatttacttttgattttgaaaattcagtctatgactctgagaaagatacctaacaaggcacatgatagaaatctggttataacttctatggcagtcaagcagagatcggatttttttaaacaactaaatgagaggaga

SEQ ID NO: 186234 - DNA, 393 bp, Homo sapiens
ccagtctctcttttcacatttttctgcytgcttatattctagctacactggcggctgattagattgtgcccacccaaattaggttggatctgcttttcccagcccactgactcaaatgttaatctcctttggcaacacactgacagacacacccaggatcaatactttgtatccttcaatccaatcaagttgacagtcagtattagccttcacacatgtctatatccaccagaatataaattcctcaaggacaaattgtaggcttcaatccttagaacagtatgaagtacactaaatttttatggaatgaatgcattctttgcatggctgtttgctgtagattgatcatgtttaaaagtaggaactattaacctgggatccgtggatagaatt

SEQ ID NO: 186235 - DNA, 362 bp, Homo sapiens
tttgttactgcctatgagtttgttcatatcctaacctgagaccacatcttttttcacgcaatgtgcattacaaggtacaccatctgaagctcttccccttagcaagatctttcttcacctctgttttttaaggctacccgtggataaggctgcagtgcagctgtttatgctgaactgatccatacataaaacaaattttgccwttttatctcctccttgatggctgtatgggatccctcatatagctgtatatgtggctaggggaggtgtgctggtgcagtagttgtgggtgccatgggagtctgagctaaatgctcatgttactttcttgtacccgctggtgctactcatgcttgatccca

SEQ ID NO: 186236 - DNA, 577 bp, Homo sapiens
gacaaaaaatgggctgaatacaggttcctgagaaaagacattcttctcaaatttgccttttagcagatcttaccaacatttcttacaactgtggagttcctttcaagttacttggatatatgtttcttccatcaagaggagaaaaaaaatggactaaaaggcaaatgggatacaagaaagattaacctgaatgactgactatatgagaacttcttgaaagcagaattacagcctcattcatcttggcaaccctggtagggtgtctagactgattataggggctcaaatatagcccgtctgtattctaggtacttaccacacacttcattcttcccaatatcacttcagagtgggtaccaccaatctcattttatagacaagaaaaaggtaaagcccagattgttaaacarttactcaaccttacaaaagtgcagaaccaatctgttctaaagttaattccctttttccatgtgaatgtctcaaaaatgtttggtggatgaatacagaattaaaagcaaattctggagatgccttttatttcagatccgtgatccaggaatatgactccagacaaggg

SEQ ID NO: 186237 - DNA, 539 bp, Homo sapiens
tgtttttactttaagatcttaataattattaatagcttcactttctacaattcaatgatacttgcgagcacttcaagggtgcaaagatccacagaatttatgcataatcataactaatgaagaaaatatttatgtagtgtttttctattaaactaaaaataaatgtttacttctcagattttggagaacagtgttaatcaggatgctttataaaatgtgaccataaatttacccgcttaatttttaatatttgtattacttgccatgtgcctggaatgtccttgaagggttagtcatygtttgcatcaacataatacctcataggtcacaagagagtttcatacaaaacattctcaactgcaggaaggtttctcagtaaactgggttttcagctgctgttgctttgtttcattgctcaaagttaaggccatgttgccattctgttttccattcaggaacttttcttctgctttccatccggcaggaatttttgtgctgttttgctatacaggcatacctcagagataatgcattttcat

SEQ ID NO: 186238 - DNA, 440 bp, Homo sapiens
acatttgtctgattctgtgctggccaaagtatgttccattgagcatttgttccccaagatgccactagagaagatagttgcagagtttaatttgtgtaagaaactctgcactctctatcgtcttcttagaggctgatggtgtaacagcctattaaatgttccaaaaaacatgtagcataaagaagaatcacatttcttaatttaatgatttgagaatttactttaccagagaactgtacacttttggcataaaaacctattaacacactgtggaaaaatattctttgggattcattttggaaaaggtaaacctaggaaaattcactatgataatccagagtctttcttgccaacacagytggagtagattggtcttttggggcagacactctctaacaaagacgtctataagccccagatgaaattatttatgtttggga

SEQ ID NO: 186239 - DNA, 440 bp, Homo sapiens
acatttgtctgattctgtgctggccaaagtatgttccattgagcatttgttccccaagatgccactagagaagatagttgcagagtttaatttgtgtaagaaactctgcactctctatcgtcttcttagaggctgatggtgtaacagcctattaaatgttccaaaaaacatgtagcataaagaagaatcacatttcttaatttaatgatttgagaatttactttaccagagaactgtacacttttggcataaaaacctattaacacactgtggaaaaatattctttgggattcattttggaaaaggtaaacctaggaaaattcactatgataatccagagtctttcttgccaacacagctggagtagattggtcttttggggcagacactctctaacaaakacgtctataagccccagatgaaattatttatgtttggga

SEQ ID NO: 186240 - DNA, 612 bp, Homo sapiens
ttttgtgctaacatgacagaaaatcatgggctggaatattgctataatcctgaccttcacctgcccttcactccacttacaactttgggcagattactctgacccacctgaaataagtgatgccagccatttagttattgcaatgggcgctggagggtttgtgtgtataatcccctctattccagctcyctaattgttgatttagtacttctgttgatgccccttgaccaaatgttacctgcactgacctcccagcaggcagtggttctatttatacgaagctttagtctggtattctcaagatgctacttatcctcctgccttatcccactctcaatgggataattctctcagaagacaaatatcagcttcaaaagcaaccactgaaatgtttacatattgctattagttgtccagaaatttcaccaaaaaggtctgagaagcctagaaaaaagaccctcacaaagcaccctatgcagctaacctgcccagcaaaactgtccttcaaatataagggagtgataaagattttctgagataagcaaaagctgagggacttcatcattactagaccaaccttataaaaattgctaagggaagctcttcaagtta

SEQ ID NO: 186241 - DNA, 612 bp, Homo sapiens
ttttgtgctaacatgacagaaaatcatgggctggaatattgctataatcctgaccttcacctgcccttcactccacttacaactttgggcagattactctgacccacctgaaataagtgatgccagccatttagttattgcaatgggcgctggagggtttgtgtgtataatcccctctattccagctccctaattgttgatttagtacttctgttgatgccccttgaccaaatgttacctgcactgacctcccagcaggcagtggttctatttatacgaagctttagtctggtattctcaagatgctacttatcctcctgccttatcccactctcaatgggataattctctcagaagacaaatatcagcttcaaaagcaaccactgaaatgtttacatattgctattagttgtccagaaatttcaccaaaaaggtctgagamgcctagaaaaaagaccctcacaaagcaccctatgcagctaacctgcccagcaaaactgtccttcaaatataagggagtgataaagattttctgagataagcaaaagctgagggacttcatcattactagaccaaccttataaaaattgctaagggaagctcttcaagtta

SEQ ID NO: 186242 - DNA, 594 bp, Homo sapiens
agtacctttttaaaatcgaatgtatattttatggatcacaattgctgcatgcattctaaaaatagcaatacacatctgggaaggtgtattttttagcagtttacagatactgcagctatcacagacctcttgcaggaattctggattggaaccaatgtcagaaaatagttccctacagcccctgctccggggatctgtttttctcctaccaagaaggcaggagcacctgggccaggaagagtccaaaggattcaatatgttttcaaattttccccaatctgggggactccacaaagataagcaagggatcaattattgtaggactaagctagggattctgacctcttcaggagtaagaatggggtatctgaccaaagctagagttctaggctgtggaaagcaacccattctcaagggcctctccccatcctcagaggcccctagattaactctatagctaggctgggccaaaggcctgtgagcccctgcttttgtgttagtcatagaccgtgcaaagttakgactccaactttgctgcttagagatgtgacctaggatggctgtggtagtcattaatggtagatggcagtacac

SEQ ID NO: 186243 - DNA, 644 bp, Homo sapiens
ttcatctttacctacatctcaaccattgcattttaaatcagcaataggagagtgtaaactgttatgtctgaaatgtctgaatacaattataaatctgtccactatgtttgtaaaaaattcagcctctgttaattatcttcatagcgctatttaccctaattgtcaagccttacartagcaaagcaagattacttcataaaaaaattcttattaaaagacagcatcccttttcatgggtgttccaaagattatgagaggaagcaattaaaatatatttaaatcattgttttgaaattgcagttaagtaaatgaattagtgcagggatttttaaaaggagtgtttaaaaattagtaacttgaagattgaagaaaaggttaataacttctactataaactattatgccttttttattcttaaagacaaaatgtgtttatttttaacatgtaaatggggaaagtaactgtactcaggagaaaacagaaactaaatagagagatagataataggtaggttggtggatgactagatagatgggtggatagatggatggatggatgaatacataacactgcaaagtcaaaaattatatttacttttccagttggaataataaaacacattcttatatagcctgagtgctta

SEQ ID NO: 186244 - DNA, 528 bp, Homo sapiens
ctaatttaaaaggaaaaacacaacactctttcaagtcattttatgaatgacacatagaagccactgctaaaattctatgaggtagagcatgataaaaacctgattccaaaacctaaagtgtagcatttgttagcttctaggaagaaaatgcaccaatcagcgcttyttcattaaaatgactctaatcccaaagaagattactgatggattaggcaagtaaaagaagcaacgttagaacatgtggctaagatttggagctctccttttgataatggagggaattataggttggagcccacatggagtgtcgggaaaatgggcttggaattatttccacctgggagataaccttcttctagaagaaattgaaaaatgtcaatttaactttgtcaaagacctaagggaaagttgtctttccttttttttttttttttcttggcttgatgttgctgtttcctggaatcatctgacttgccattgaagtggtgttgtatcacgttgtctcctttcctcttctgaaagttttct

SEQ ID NO: 186245 - DNA, 384 bp, Homo sapiens
ttggctcttggacagcatttytggaccttccctgggccagaggggggcctgatgctctggaggattagtcccagcccttgcagaattcaccacaagctgactgaagtgctcttggcctttatgtaaacattggcagtggcccggcagaacccctttagaccagtgatggtagtgtctacaaagagaggctcctctgcctctggaaaggggagggaatagtaggtaggactttgtattgtggtttgaatgccagcttagccagagtagaacagaatataaggcaaatttctaaagttttttttactttaatgcccagcacctagacagcatctctggacctgcctgggtcctagggtaactcatcaccctaaagggaaggacaca

SEQ ID NO: 186246 - DNA, 528 bp, Homo sapiens
atttgaatgatttaatggacacttaaaagtttcttttcattctaaatcatatgaaggattcaattagactttcatcttaaaacagtaatgcaattacttctatgatmaaacaacatttttaaaaagtgacaacatacacttttagcttcaaatttgttctctgtcccttcaagcttattctatcactatataaaactaagcaatgtaatacagaacaattctcaatagccaggtaacttatatttgatgtaggcctgatattttaaaacttataacagtacaacattgcatgaaaaattatatatgcaataaacatataatatatgcatattcatatatatatgaatttttgaatgggaaacatattttaggtcttagagaatatacctcacaagtttttgggaaagaacaatgtctttacttctatatctacaaggctgatctcagattttgagttctagttatgtctacttttacagcctatttaattatacccctagtcactggcattttatgttttcatttaat

SEQ ID NO: 186247 - DNA, 534 bp, Homo sapiens
tcttaaaaaaaaacaaaacaaaacaaaaaaaaactcttttcaattctatgaagactgagagaagtgagaaagccatagaagaaaagttggaagctagaagaaatttgttcatgagttttaagaaaagaagccatctctataacataaaagtgcaaggtgatgcagtgaatactggtgtctcaataatttgctgcagcaaattattgagaggacctagctcggcaattgttgaagctgactacactattcaagatatgttcaatgtagatgaaacagccttctactcaaagcagatgccatctaggacttgcatagctagagaggagaaattgatacctgggtttgatgcaaaacttcaaagtttagaatgattctcttcctgggggctagtgcaacttgtaactttaagttgaagttcaacgcttatcaaacattccaaaatcctagagatcttarcagttatgccaagcctactttgcctgtattctctaaatgaaacaaagccaggatcacagtatacctgtttacataatg

SEQ ID NO: 186248 - DNA, 592 bp, Homo sapiens
taattcaggattatctctccagcttaaaatctttaacttaatcatgtttcaaagayccttctgccatttaaagtaacacattcacatgttcaacagattagaatgtagaaatcattaatgggatagcattcagcctaccacaggtataaagatcatgaagtcactagacatactatcactttttcttcaatgcagttgtagcaatttaagtactgcctccagtgtttctatgtcttcatcaatacctggcattgtcagcttctctggaaggcataaaacctgaactaattgctattacgtataacttaaaattttgatgtaattttaaataaacaaaaaagttgcaagaataaaataaggaaccattgtatatcacctacattcgcctatttttaaatttcatcccatttgagactaaggtgcaaatgcatatttatctataaccgtttatctagaaacattttggtatgtattgcctaagaataaagataatcttttattcactcatattgcaattatgtaaatcaggacagttaatattgatttaatattaattgatccccagtcctattcaaattttgtcaattgctta

SEQ ID NO: 186249 - DNA, 592 bp, Homo sapiens
taattcaggattatctctccagcttaaaatctttaacttaatcatgtttcaaagatccttctgccatttaaagtaacacattcacatgttcaacagattagaatgtagaaatcattaatgggatagcattcagcctaccacaggtataaagatcatgaagtyactagacatactatcactttttcttcaatgcagttgtagcaatttaagtactgcctccagtgtttctatgtcttcatcaatacctggcattgtcagcttctctggaaggcataaaacctgaactaattgctattacgtataacttaaaattttgatgtaattttaaataaacaaaaaagttgcaagaataaaataaggaaccattgtatatcacctacattcgcctatttttaaatttcatcccatttgagactaaggtgcaaatgcatatttatctataaccgtttatctagaaacattttggtatgtattgcctaagaataaagataatcttttattcactcatattgcaattatgtaaatcaggacagttaatattgatttaatattaattgatccccagtcctattcaaattttgtcaattgctta

SEQ ID NO: 186250 - DNA, 631 bp, Homo sapiens
ttttgtttgtttagcatataatcaagaaataaccataaaaatagccaaccagcagcccttggggctgctctgcctatggagtaaccattcttttattcctttaattcttaataaacttgctttcactttactcygtggacttaccctgaaatctttcttgcacgagatttaaggaccttctcttggggtcagaattaggactcctttctggtaacagggtgacatcagtgaaaatggtgaatttaaagacttctgaaaggctgtcactccattaaatcagcaacaaaaatccctgaaaaaaaaaaaacggtcagaatcaacttttcaaaactttggaaattaatcaaagctttgcagcaacccaagtcatattgagtcaaaaaaatgaatgagtatccataagaccagtgagatttctgatgttttaacttacactagtcccatctccaacttcccagctcagtggtagtcttgagtatatcagctcatattgctggtaatacagggagaaatatcaaactcatcatttgaactcactcaaactcacctcctgccaaacacctctccattgtggatggagtgggtcacagaactttctcaagtgttttaacatctctaatgggtcaaagta

SEQ ID NO: 186251 - DNA, 631 bp, Homo sapiens
ttttgtttgtttagcatataatcaagaaataaccataaaaatagccaaccagcagcccttggggctgctctgcctatggagtaaccattcttttattcctttaattcttaataaacttgctttcactttactccgtggacttaccctgaaatctttcttgcacgagatttaaggaccttctcttggggtcagaattaggactccyttctggtaacagggtgacatcagtgaaaatggtgaatttaaagacttctgaaaggctgtcactccattaaatcagcaacaaaaatccctgaaaaaaaaaaaacggtcagaatcaacttttcaaaactttggaaattaatcaaagctttgcagcaacccaagtcatattgagtcaaaaaaatgaatgagtatccataagaccagtgagatttctgatgttttaacttacactagtcccatctccaacttcccagctcagtggtagtcttgagtatatcagctcatattgctggtaatacagggagaaatatcaaactcatcatttgaactcactcaaactcacctcctgccaaacacctctccattgtggatggagtgggtcacagaactttctcaagtgttttaacatctctaatgggtcaaagta

SEQ ID NO: 186252 - DNA, 631 bp, Homo sapiens
ttttgtttgtttagcatataatcaagaaataaccataaaaatagccaaccagcagcccttggggctgctctgcctatggagtaaccattcttttattcctttaattcttaataaacttgctttcactttactccgtggacttaccctgaaatctttcttgcacgagatttaaggaccttctcttggggtcagaattaggactcctttctggtaacagggtgacatcagtgaaaatggtgaatttaaagacttctgaaaggctgtcactccattaaatcagcaacaaaaatccctgaaaaaaaaaaaacggtcagaatcaacttttcaaaactttggaaattaatcaaagctttgcagcaacccaagtcatattgagtcaaaaaaatgaatgagtatccataagaccagtgagatttctgatgttttaacttacactagtcccatctccaacttcccagctcagtggtagtcttgagtatatcagctcatattgctggtaatacagggagaaatatcaawctcatcatttgaactcactcaaactcacctcctgccaaacacctctccattgtggatggagtgggtcacagaactttctcaagtgttttaacatctctaatgggtcaaagta

SEQ ID NO: 186253 - DNA, 590 bp, Homo sapiens
taattgtaacaagatggtgtttgtgtatctaaacatatctaaacatagaaaaggttaaaatatggtattataattttatgaaactgccattatatatgaagtttattcttgatcaaaacattgttatgcagtgcatgtattatatgtatgtataaggtatatatggtatataatgtrtatgtatatatggtatattttatatatgtttatacatacaccgagagaagatatatacatgtgtgggggtatatgtaaatacctcctcctatgcagacatctcttaacagttcacatatctaagtatttctgccttcttaactctaccaccagggcatcctattggcatttcagactcgatttattcaaaatttagttcattgtctttctaagaaagccacactttctccagaatgactatattttatgtctaattacacaaggtaggaatttgaattccacatattatacccccttctccatgattttctttatctgcaatcctaccacttctgaatatatggaatctctttacttccctccacctatgttattatccatgaccacagtattatttctcagcaggaggctgt

SEQ ID NO: 186254 - DNA, 590 bp, Homo sapiens
taattgtaacaagatggtgtttgtgtatctaaacatatctaaacatagaaaaggttaaaatatggtattataattttatgaaactgccattatatatgaagtttattcttgatcaaaacattgttatgcagtgcatgtattatatgtatgtataaggtatatatggtatataatgtgtatgtatatatggtatattttatatatgtttatacatacaccgagagaagatatatacatgtgtgggggtatatgtaaatacctcctcctatgcagacatctcttaacagttcacatatctaagtatttctgccttcttaactctaccaccagggcatcctattggcatttcagactcgatttattcaaaatttagttcattgtctttctaagaaagccacactttctccagaatgactatattttrtgtctaattacacaaggtaggaatttgaattccacatattatacccccttctccatgattttctttatctgcaatcctaccacttctgaatatatggaatctctttacttccctccacctatgttattatccatgaccacagtattatttctcagcaggaggctgt

SEQ ID NO: 186255 - DNA, 572 bp, Homo sapiens
ttatcatgaaaatgtgcttttcagtgcattaaattttaattaccatatctatttttcaaactagaaaagcgatttgcttaaattaattataaaataataatacatattttaatccatttatcaattacaatttacataggtactgttgtaactgctgctgtttgcataaaatactcaaataaaaatactacaatcttaaatcagtacatagtgaaatatcattcaaactgaatcaatccatagacaccaactagatyggtgaacagcttatgtgtaatactagaaatgattagtgttcccaacatgtgcagtaaaatacaataataatatctcacatgatgcaatagttaaagtgaaatatagctctatcaaaataataaagttgtgtaacacaaatgtattttatactgcttaggttttaaaatttgaataaattaaaattaaataaaatgaaatgttaagttttttgctagccacattcagatgttcaatagccaaatatgactagtggctaccgtattagatagaacagttctagattctacattggtgtttgttaatgtttcacactc

SEQ ID NO: 186256 - DNA, 520 bp, Homo sapiens
tgcttttcagtgcattaaattttaattaccatatctatttttcaaactagaaaagcgatttgcttaaattaattataaaataataatacatattttaatccatttatcaattacaatttacataggtactgttgtaactgctgctgtttgcataaaatactcaaataaaaatactacaatcttaaatcagtacatagtgaaatatcattcaaactgaatcaatccatagacaccaactagattggtgaacagcttatgtgtaatactagaaatgattagtgttcccaacatgtgcagtaaaatacaataataatatctcacatgatgcaatagttaaagtgaaatatagctstatcaaaataataaagttgtgtaacacaaatgtattttatactgcttaggttttaaaatttgaataaattaaaattaaataaaatgaaatgttaagttttttgctagccacattcagatgttcaatagccaaatatgactagtggctaccgtattagatagaacagtt

SEQ ID NO: 186257 - DNA, 602 bp, Homo sapiens
actaatcttcagaagtaagaaaagaagactaagagatgaagaaatagaacggaagtaagtcctgacactatttcctcatggatactttaagaaaaggcaagtacaattttaattatttaactttttctgtattttctaacaataaattgtttttattatctattaaccataaaaatacgattgacagttatacttaatataagggctatattttctttgaagtattcctttgaagatacttcgtttgaaatatctaggaaaaaagaggggaataaagacaattacataagaaaggaaatactagactgaaacataactttaaatatagttgataatagaaacaagccagataataatagaagtagaattyatgtagacaaataaagtactaaaaactcattcttataaaattgcagactgtcaaagttcagactcctggattcccacacagaacttctacccaaacttcaacaatcctatatattatattcatcagttgtgaattattatgtcagaaacataaagctatactaaaattcttcagctttcatttttgggcccatgcttagtattgttaaaaacttatttgtagaacattcatg

SEQ ID NO: 186258 - DNA, 482 bp, Homo sapiens
agttaaaacattgcctcctccatgaagttgtgttgacaatgcctattttatgcctccagaagaagtcaaactgcttttattactaaacaagaaagaataaaaataatcatgtaggtacccaactcaagatatcattaaaaaggaatctagtgaaagaaaagaggtgttaaagaaaaatagaatcaattagtttaaaagaatgtgaaactgattcttttcaggaagcaattttggtatggcttttaaaaccaggttactgataaagctagggctgctttgtgaagttacatttgattgtcgtataaataagacttttatgtttatttctttcactcagatttttcaaccttgaaacctagagcttctctctgaattactgtataatttcactttcttgktcaatattatatctcagttattttatattttatgcctgatttattaatgcttccttatactcagtggatagatacagggaattc

SEQ ID NO: 186259 - DNA, 543 bp, Homo sapiens
ctgtgcattttgcttgtagtcttttgggtggactccggccggcctccattaggagggaagacggcgggaaaaggtaagctaagctccctaggctttttgcgtgtgagtatagacgctccatcagacaaatttagcttgggttcttagatacccttggggaaaaaggcttgcagttgtgctttaagctataattacaagtttgctttcggttttcggttactctttccttttgtgttttttttttttttttttttttttaaatggagtcttggctctgtcgcccaggatagagtgcagtgccgcgatctcggctcactgtaagctccgtctcccgggttcaaccaattctgcttcggcctcctaagtagctgggattacaggcgcccgccaccgtgcccgactaattattgcatttttagtagagacggagttttaccgtcttgrccaggctagtctcgaactcctgacctcgtgatccacccatctcggcctcccaaaatgttgggatatcaggcgtgagccatcgcgcgcggccgggttatt

SEQ ID NO: 186260 - DNA, 504 bp, Homo sapiens
aattattgcatttttagtagagacggagttttaccgtcttggccaggctagtctcgaactcctgacytcgtgatccacccatctcggcctcccaaaatgttgggatatcaggcgtgagccatcgcgcgcggccgggttattctttcagtgcctgtaacgtcccccttctttgattggtcaacgctctatttgaaaagcccgccaagggctgcaatttgccagatagtctcatccgggttgtttttcgaagaggttctcccggaatggaaatgaccgttatctgcaggagtgcatcggactctggcgccaagagctggaagctgtgaattaaccgtccctcttactgcagttgtacggatcctgggtgacattgacttaccggtgtccattttccatacactttagagaataggcatctcgtctggcatcgctgcagatatgttagggtgggttgaaattattggtgtcaaagcgggacgggaaacattaaaggctaaggaagct

SEQ ID NO: 186261 - DNA, 452 bp, Homo sapiens
tatttcttataaggggttacagcctgcaaggtggccatcaagtgtgctgggaagcatgcctctggccaagaccagaracaggcacatcaaaggaggagggcttgaggtaggagctttaggctaaataagttggctaaatatacatattcaacaggttacgggaggatctatgagtattcatgaaggtagccttggcacatgcatattgaacatgtatgtaacatacaacccatgttcacattggagtggagacttaacatttaaatttgttacagttaggccctatacatcaaaaggtcttctcaggacatgaaggcccataaatgcactgtctctgtaaaccagccagaaccagtccgtggtcagttttcctcttatctggagaaagttactgacatcagtctcttgtccaatcaaagctgtagttatgtctggtagcaggggttcagtta

SEQ ID NO: 186262 - DNA, 610 bp, Homo sapiens
caacaacaatacacagaccaatttcctttgtaagaaatccagagactagttgagaggtttctgtagcccaggcaagcataaaactgccacgttgaagccagtaggaaagttcgagacagcctcttgccataatccctgcccctggcacagcactatgattagggagaatcctcmagctccccacttctccctggggaagtaagataagaactatactgatgttcaattttctgatttctctgggggctgcttgaggcactaagtgttggttttctgaaaagacaaaccaactgagaaaactttagctagtcttactaaaagaagaaaagggagcatgaagacaaagaaaatgtaaatgaaagaggagactttaaaactgatgccacagaaatacaaaaagatcatgagactactatgaacaatttcacatatataaattggataacttagaaggaatggataagtttctacaaacatacaacttaccaagagtgagtcatgaagaaatgaaaagtctgtacagacctataacaaataaagaaattgaatcagtaatcaaaaatcttttaacaacaacaacaacaaaaaacccaggaccagatggtgtcac

SEQ ID NO: 186263 - DNA, 637 bp, Homo sapiens
tgtatatttagtatacattttaagtggcttcttgttttacaaagtggctgtcctagttttgcattttcagaattatgtgaagattccagtttctccacattagtawcagcacttgttattattggaccttaattttagctattctggtgggtgtatagtgatatctaatggtggctctaatttttcatagtcctaatgagcaaggggttgaggatcttttcaagtgccttttggtttctcctacatcttcttttatgaagtgtctgttcaactcttttgcccatgtgttttcatttatttgcccttctggtattgagttataaaaattttctatatattcgggttacaagctcattgtcagacatatattttgtaatctgtgacttgactttttatattttttaatgtttaaggtaatctttcaacaaaatttttagttttgatgaagtccagtttaacccaacttaacattttttctcttatcttttatgtttttatgtcctatttaaaatattttcttaacatcacaaagatattctactatattgtcttctaaagttttatgatttgggcgcctatgttttttgaattcatcatccatattttattttttttttacttgacacatggtaattgt

SEQ ID NO: 186264 - DNA, 637 bp, Homo sapiens
tgtatatttagtatacattttaagtggcttcttgttttacaaagtggctgtcctagttttgcattttcagaattatgtgaagattccagtttctccacattagtatcagcacttgttattattggaccttaattttagctattctggtgggtgtatagtgatatctaatggtggctctaatttttcatagtcctaatgagcaaggggttgaggatcttttcaagtgccttttggtttctcctacatcttcttttatgaagtgtctgttcaactcttttgcccatgtgttttcatttatttgcccttctggtattgagttataaaaattttctatatattcgggttacaagctcattgtcagacatatattttgtaatctgtgacttgactttttatattttttaatgtttaaggtaatctttcaacaaaatttttagttttgatgaagtccagtttaacccaacttaacattttttctcttatcttttatgtttttatgtcctatttaaaatattttcttaacatcacaaagatattctactatattgtcttctaaagttttatgatttgggckcctatgttttttgaattcatcatccatattttattttttttttacttgacacatggtaattgt

SEQ ID NO: 186265 - DNA, 660 bp, Homo sapiens
cttcattcttgaaaaatacgggcttttttcatcattcacttcaaaactgctatagcctctactcattacccctatccaagacatttccacattttaggtatttgttataggaacactccacttcttggtacmtatttctgtcttggcctatttgtgctgctataacagaatgccagagaccgagtagttataaatgacgaaaattgattttatcacaactctagaagctggtattttcaagatccagatgctgacaggtttggatgtctggtaggggtcccctccctgcttcctagatgatgccttgaaagctcttctggaggagaggaacactgtgttctcacgtggtgaaaggcagaagagcaaggaaactgaaggctgtgggaaaacttttctaataagggctttacgcccatcaacaaggaaagaagcccttatgacctaagcacctactaaaggccccacctcttactactatcacactggccattgtttcaacacctgaattttggaggggaaacattcaaaccatagcagatatctatataatttacacccagttagagacatctctcccagcaccttgcctcaaatatcattgtcaccagttttctaattatgctcctttcaagtccctgatcatccagcttaatcattaga

SEQ ID NO: 186266 - DNA, 544 bp, Homo sapiens
tcatctcaatctatcttttctcttgagaacttttcaatactctacaggagaaaaaatattacattagtctatgagcagcagactaatgctaagtgttcacatayctttgagtactctatctcattcccacactattgtgctacttgtttcccattcacttcttatttgatgatgtttattctattacttaaggaaaattgctctcactaaagccattaaaaattgcttaatttctacacgcactgatttcctttaagccagcatagtacttgtacaaaaccagacacatagaccaatggaaaagagtagaaaactcagaaagatagtcacacacttacaaccatctgaccttcaagttcaaggtaaacatgcagtggttaaaagattctgtagtcaataaatggtgataggataactggctagcctgaagcagaagaacaaaactgaacccttacctttcaacatatacaaaaacttactcaaggtggattaagtttttaaacgtaagacctcatactataaatatcctagaagaaaccctagg

SEQ ID NO: 186267 - DNA, 544 bp, Homo sapiens
tcatctcaatctatcttttctcttgagaacttttcaatactctacaggagaaaaaatattacattagtctatgagcagcagactaatgctaagtgttcacatacctttgagtactctatctcattcccacactattgtgctacttgtttcccattcacttcttatttgatratgtttattctattacttaaggaaaattgctctcactaaagccattaaaaattgcttaatttctacacgcactgatttcctttaagccagcatagtacttgtacaaaaccagacacatagaccaatggaaaagagtagaaaactcagaaagatagtcacacacttacaaccatctgaccttcaagttcaaggtaaacatgcagtggttaaaagattctgtagtcaataaatggtgataggataactggctagcctgaagcagaagaacaaaactgaacccttacctttcaacatatacaaaaacttactcaaggtggattaagtttttaaacgtaagacctcatactataaatatcctagaagaaaccctagg

SEQ ID NO: 186268 - DNA, 341 bp, Homo sapiens
tcctctatagtttacatccagttgcccagccctagcttgtagggcttcaggaatagggcaatttataggtagataataaaacctcaaagacaatggagagaacaagaatttaacagtgggcgcactatacttttctactgaaacattattttttcctctacagttcccttcatttctaccaaacataattatagaaagactaatttctttacaaaataagtctactctcattaaacttcaactgagtatttacataagtgcagtaaaaatagtgackgatcatatctttttaatttggccaagttaggacctttaataaataatctcatattagactttaa

SEQ ID NO: 186269 - DNA, 386 bp, Homo sapiens
ggtcatttcagacaatttaggctagttaagaatcatttctggggagatagtaaggtcatttggaggtaaggggatattctggctttttgaattgccagagttcatgtactaattctttatcatctwgaagtggtggtattcctttaattttggtataaagtgaatataccaaattggcttagtttctggaagttttcagagggctaaggctctgaataggatctcttgctgagacaggatctcttgctgaataggatctgttgaattcttgctcttagtttctccgggagggagaataatttttggtggtgtggttagggatgtgatccagcagatggcgcctgaaggcaatggacagtaaacaggctttagtcatgcagttcctt

SEQ ID NO: 186270 - DNA, 386 bp, Homo sapiens
ggtcatttcagacaatttaggctagttaagaatcatttctggggagatagtaaggtcatttggaggtaaggggatattctggctttttgaattgccagagttcatgtactaattctttatcatctagaagtggtggtattcctttaattttggtataaagtgaatataccaaattggcttagtttctggaagttttcagagggctaaggctctgaataggatctcttgctgagacaggatctcttgctgaataggatctgttgaattcttgctcttagtttctccgggagggagaataatttttggtggtgtggttagggatgtgatccagcagatggcgcctgaagrcaatggacagtaaacaggctttagtcatgcagttcctt

SEQ ID NO: 186271 - DNA, 533 bp, Homo sapiens
cttactgttataatttctgcaaagacggtttaaaaaccaaccctccatagttttgcaatttggagagggaagataaaggtacaggaacaaaagagaatttggtagcaaaggcagcaatgacaagactctagctaatgcatccttgactttggcaacagtggcatcagcagtggaggctgtggcaccyaagttcagcagcaggaagaacagccctcatcagctagtgttggaacgtggctttagctgttgactggctgtcttgcttccttctgtttctgcctatttttccagctgatcctccaacttccttagcatttctattttagacagatttccatgtaataaacttacttcctgttgtaactgagaatcctggctcaaacaaaagagagacaacaaagagaccagaaaaagatactgaaggaagtgatcagagaagcaggagggaaactggaaagctgagagttgtagacataaagagggaaggatactaaagaaagacaaaatatagtacagggctaaatgccaaaaaa

SEQ ID NO: 186272 - DNA, 427 bp, Homo sapiens
tagctaatgcatccttgactttggcaacagtggcatcagcagtggaggctgtggcacccaagttcagcagcaggaagaacagccctcatcagctagtgttggaacgtggctttagctgttgactggctgtcttgcttccttctgtttctgcctatttttccagctgatcctccaacttccttagcatttctattttagacagatttccatgtaataaacttacttcctgttgtaactgagaatcctggctcaaacaaaagagagacaacaaagagacyagaaaaagatactgaaggaagtgatcagagaagcaggagggaaactggaaagctgagagttgtagacataaagagggaaggatactaaagaaagacaaaatatagtacagggctaaatgccaaaaaaaaatgctacagcaagacaagga

SEQ ID NO: 186273 - DNA, 533 bp, Homo sapiens
cttactgttataatttctgcaaagacggtttaaaaaccaaccctccatagttttgcaatttggagagggaagataaaggtacaggaacaaaagagaatttggtagcaaaggcagcaatgacaagactctagctaatgcatccttgactttggcaacagtggcatcagcagtggaggctgtggcacccaagttcagcagcaggaagaacagccctcatcagctagtgttggaacgtggctttagctgttgactggctgtcttgcttccttctgtttctgcctatttttccagctgatcctccaacttccttagcatttctattttagacagatttccatgtaataaacttacttcctgttgtaactgagaatcctggctcaaacaaaagagagacaacaaagagaccagaaaaagatactgaaggaagygatcagagaagcaggagggaaactggaaagctgagagttgtagacataaagagggaaggatactaaagaaagacaaaatatagtacagggctaaatgccaaaaaa

SEQ ID NO: 186274 - DNA, 243 bp, Homo sapiens
tcaggccaggctgggcccggtgggctccacagcattcccactcccacttctcggatcccagacttgctgctgctgccaccactaayaccaacaccaacatgaccactgctgctgttgccctcaatgcatgggcccaccctacaagcctcctaccacctggcccctgcagacactctcctaccactccaccactccggtcaagctgcagtctctgtctctgccaccaactgcagcgaggggagc

SEQ ID NO: 186275 - DNA, 243 bp, Homo sapiens
tcaggccaggctgggcccggtgggctccacagcattcccactcccacttctcggatcccagacttgctgctgctgccaccactaacrccaacaccaacatgaccactgctgctgttgccctcaatgcatgggcccaccctacaagcctcctaccacctggcccctgcagacactctcctaccactccaccactccggtcaagctgcagtctctgtctctgccaccaactgcagcgaggggagc

SEQ ID NO: 186276 - DNA, 243 bp, Homo sapiens
tcaggccaggctgggcccggtgggctccacagcattcccactcccacttctcggatcccagacttgctgctgctgccaccactaacaccaacaccaacatgaccacygctgctgttgccctcaatgcatgggcccaccctacaagcctcctaccacctggcccctgcagacactctcctaccactccaccactccggtcaagctgcagtctctgtctctgccaccaactgcagcgaggggagc

SEQ ID NO: 186277 - DNA, 243 bp, Homo sapiens
tcaggccaggctgggcccggtgggctccacagcattcccactcccacttctcggatcccagacttgctgctgctgccaccactaacaccaacaccaacatgaccactgctgctgttgccctcaatgcaygggcccaccctacaagcctcctaccacctggcccctgcagacactctcctaccactccaccactccggtcaagctgcagtctctgtctctgccaccaactgcagcgaggggagc

SEQ ID NO: 186278 - DNA, 574 bp, Homo sapiens
ttgaggagggaaggcagataagtatagtttcaagctttaacagcagggttaaatttctaygtttatcgtctatgggacgaccgggctagtttcaaattaagcaatgattctataggtcctttttgttgttttaaaatctgaaacaattgaatgtatggttatatgctagacctaaagaaaatccatttcatgttctaaaaaccagagtagatcaaagtaaaacctgttacaaatagcctatgagtatcaagtttgggaacactatgaaaaattccaaaaaaggtaatcaattcataaaacttacagatggacaaatgaatatttcagaattcttatcagtactaagtatgaacatgaccttatcaatattttcattactaattatacaataagaaactgacttctgactattctaaggtataaatgtgtactttaccttaaataggaaaatgtgttgtatatccattttgagattcattacaagattcacagaagagaaaactgatagccctgtatcgattaaaagcatttttttaagacagttttgctcttgttgcctgggctggagtgacat

SEQ ID NO: 186279 - DNA, 519 bp, Homo sapiens
aaataaacctgttaggcaattgcaaattaaaacyacaatgaggaaccactgcatatcaacttaagagggtaaaaataagattgaccatacaagtattcacaagaatgtcaaccaaaactctcataccctgctgatggagatgtaaaataatgcaggtgccttggaaaacagtttggcatttccttcaaaagttatagatcccagctattccattcccagatatctactcaagagaaatgaaggcctatgtccacacaaaaacttgtacacaaacattcatagtagctctacctgcagtagccccaaccccaaactggaagaacccaaatggctatcaacaaacaaaggaatgagcaaattttgacccatgtatacaacagcatattaatcaacaacaaaatagaatctcctactgatacatgcaacattgtggatgaatttcaaaacaatcatgtgaagtaaagaagtcacaatagtccctaccccatgaaaatagtccacatttaatcatatcatatg

SEQ ID NO: 186280 - DNA, 519 bp, Homo sapiens
aaataaacctgttaggcaattgcaaattaaaactacaatgaggaaccactgcatatcaacttaagagggtaaaaataagattgaccatacaagtattcacaagaatgtcaaccaaaactctcataccctgctgatggagatgtaaaataatgcaggtgccttggaaaacagtttggcatttccttcaaaagttatagatcccagctattccattcccagatatctactcaagagaaatgaaggcctatgtccacacaaaaacttgtacacaaacattcatagyagctctacctgcagtagccccaaccccaaactggaagaacccaaatggctatcaacaaacaaaggaatgagcaaattttgacccatgtatacaacagcatattaatcaacaacaaaatagaatctcctactgatacatgcaacattgtggatgaatttcaaaacaatcatgtgaagtaaagaagtcacaatagtccctaccccatgaaaatagtccacatttaatcatatcatatg

SEQ ID NO: 186281 - DNA, 519 bp, Homo sapiens
aaataaacctgttaggcaattgcaaattaaaactacaatgaggaaccactgcatatcaacttaagagggtaaaaataagattgaccatacaagtattcacaagaatgtcaaccaaaactctcataccctgctgatggagatgtaaaataatgcaggtgccttggaaaacagtttggcatttccttcaaaagttatagatcccagctattccattcccagatatctactcaagagaaatgaaggcctatgtccacacaaaaacttgtacacaaacattcatagtagctctacctgcagyagccccaaccccaaactggaagaacccaaatggctatcaacaaacaaaggaatgagcaaattttgacccatgtatacaacagcatattaatcaacaacaaaatagaatctcctactgatacatgcaacattgtggatgaatttcaaaacaatcatgtgaagtaaagaagtcacaatagtccctaccccatgaaaatagtccacatttaatcatatcatatg

SEQ ID NO: 186282 - DNA, 519 bp, Homo sapiens
aaataaacctgttaggcaattgcaaattaaaactacaatgaggaaccactgcatatcaacttaagagggtaaaaataagattgaccatacaagtattcacaagaatgtcaaccaaaactctcataccctgctgatggagatgtaaaataatgcaggtgccttggaaaacagtttggcatttccttcaaaagttatagatcccagctattccattcccagatatctactcaagagaaatgaaggcctatgtccacacaaaaacttgtacacaaacattcatagtagctctacctgcagtagccccarccccaaactggaagaacccaaatggctatcaacaaacaaaggaatgagcaaattttgacccatgtatacaacagcatattaatcaacaacaaaatagaatctcctactgatacatgcaacattgtggatgaatttcaaaacaatcatgtgaagtaaagaagtcacaatagtccctaccccatgaaaatagtccacatttaatcatatcatatg

SEQ ID NO: 186283 - DNA, 536 bp, Homo sapiens
aagctatcctctgagagaaaataaacctgttaggcaattgcaaattaaaactacaatgaggaaccactgcatatcaacttaagagggtaaaaataagattgaccatacaagtattcacaagaatgtcaaccaaaactctcataccctgctgatggagatgtaaaataatgcaggtgccttggaaaacagtttggcatttccttcaaaagttatagatcccagctattccattcccagatatctactcaagagaaatgaaggcctatgtccacacaaaaacttgtacacaaacattcatagtagctctacctgcagtagccccaaccccaaactggaagaacccaaatggctatcaacaaacaaaggaatgagcraattttgacccatgtatacaacagcatattaatcaacaacaaaatagaatctcctactgatacatgcaacattgtggatgaatttcaaaacaatcatgtgaagtaaagaagtcacaatagtccctaccccatgaaaatagtccacatttaatcatatcatat

SEQ ID NO: 186284 - DNA, 536 bp, Homo sapiens
aagctatcctctgagagaaaataaacctgttaggcaattgcaaattaaaactacaatgaggaaccactgcatatcaacttaagagggtaaaaataagattgaccatacaagtattcacaagaatgtcaaccaaaactctcataccctgctgatggagatgtaaaataatgcaggtgccttggaaaacagtttggcatttccttcaaaagttatagatcccagctattccattcccagatatctactcaagagaaatgaaggcctatgtccacacaaaaacttgtacacaaacattcatagtagctctacctgcagtagccccaaccccaaactggaagaacccaaatggctatcaacaaacaaaggaatgagcaaattttgacccatgtatacaacagcrtattaatcaacaacaaaatagaatctcctactgatacatgcaacattgtggatgaatttcaaaacaatcatgtgaagtaaagaagtcacaatagtccctaccccatgaaaatagtccacatttaatcatatcatat

SEQ ID NO: 186285 - DNA, 466 bp, Homo sapiens
ggaacagtaggttaattatcttttttataaggcagcaatgggttaaagaatacatgcatcttaaaataataaatattgtcaacgtaccatgcacaagatagctacagtttatatgcacataaacaatgtcttaacctgcctgtttttccaaaccctttgctgagactgagcataagcaaaatttactgtctgccaacctgctaggtgtcaaacattttcattcttagattgttatccccacttctttaacgagattgagaatttcttgagtctctgctcatttattttgtggcttgcttcttttaaaacaacatatagatggagtcttcctttgttgcctaggctgggttcaaactcctgagtgaaagcaatcctcccatcttggcccttcaatgactgggattactggtgtaagccaccatgcccagcctggattcgttcttygtaaatcaaaccctttgtcatt

SEQ ID NO: 186286 - DNA, 598 bp, Homo sapiens
aagcgtgagagttaaaatctccagggaagccagtcttagtccctccttctcacttttgaagagttttatcgtcagaagccctaccagattcttagactagaggtagaaaaatctcgtgtttctggcatagggaaaggaaatgtacccattctaaaagccacctagaacattctattcttcttaccaagctctgccatcagaaaactatttgagcaaagcctaacctactggggttttgtcagagtttatatgacctaagttaagggaaatacccatcaccagactgctgcagtcttcagtggggaagaagagaaatattcaacttcagaccacttgagcccttcatgtgagagaagaaacatatgcaactcccattccctctagccttcctgttaaacctaagggggtgggaaaagaaatgtgaagcattttttaagatgacaagacagaggcacagactcactacaagacacaaaactcagggcctggaatggagatatccttctgttctcaataaatgcatcaggacaaactgatgggagyggaagtaataagcagcctaggttttcctctctgtatctcatgctctgtgtcacag

SEQ ID NO: 186287 - DNA, 529 bp, Homo sapiens
tgtagggacatggtcttgctatgtyacccagcctatggagtttcactctgttgcccaggctggagtgcagtggcacattggaggctcactgccacctccgcctcccaggttcaggcaattctcctgcctcagcctcccgagtagatgggactacaggtgcctgctgtcacccagcaaatttttgtattttgagtagagacggggtttcaccatattggccaggctggtctcaaactcctgacctcgtgatccacacaccttggcctcccaaagtgctgggattacaggtgtgagccactgcacccggccccttatctatagttaataatgcttcaatcaacataggagtgaaaatatctcttcaagatagtgaatttatattctttggatatttacttagatgtgagattgctgaatcacatgatagttttatttttaattatttgatgaacctccatgccatcttccataacggctgtaccaatttacattcctggtgatagtgtacaaggtcccttttctctatatt

SEQ ID NO: 186288 - DNA, 529 bp, Homo sapiens
tgtagggacatggtcttgctatgttacccagcctatggagtttcactctgttgcccaggctggagtgcagtggcacrttggaggctcactgccacctccgcctcccaggttcaggcaattctcctgcctcagcctcccgagtagatgggactacaggtgcctgctgtcacccagcaaatttttgtattttgagtagagacggggtttcaccatattggccaggctggtctcaaactcctgacctcgtgatccacacaccttggcctcccaaagtgctgggattacaggtgtgagccactgcacccggccccttatctatagttaataatgcttcaatcaacataggagtgaaaatatctcttcaagatagtgaatttatattctttggatatttacttagatgtgagattgctgaatcacatgatagttttatttttaattatttgatgaacctccatgccatcttccataacggctgtaccaatttacattcctggtgatagtgtacaaggtcccttttctctatatt

SEQ ID NO: 186289 - DNA, 529 bp, Homo sapiens
tgtagggacatggtcttgctatgttacccagcctatggagtttcactctgttgcccaggctggagtgcagtggcacattggaggctyactgccacctccgcctcccaggttcaggcaattctcctgcctcagcctcccgagtagatgggactacaggtgcctgctgtcacccagcaaatttttgtattttgagtagagacggggtttcaccatattggccaggctggtctcaaactcctgacctcgtgatccacacaccttggcctcccaaagtgctgggattacaggtgtgagccactgcacccggccccttatctatagttaataatgcttcaatcaacataggagtgaaaatatctcttcaagatagtgaatttatattctttggatatttacttagatgtgagattgctgaatcacatgatagttttatttttaattatttgatgaacctccatgccatcttccataacggctgtaccaatttacattcctggtgatagtgtacaaggtcccttttctctatatt

SEQ ID NO: 186290 - DNA, 529 bp, Homo sapiens
tgtagggacatggtcttgctatgttacccagcctatggagtttcactctgttgcccaggctggagtgcagtggcacattggaggctcactgccacctccgcctcccaggttcaggcaattctcctgcctcagcctcccgagtagatgggactacaggtgcctgctgtcacccagcaaatttttgtattttgagtagagacggggtttcaccatattggccaggctggtctcaaactcctgacctcgtgatccacacaccttggcctcccaaagtgctgggattacaggygtgagccactgcacccggccccttatctatagttaataatgcttcaatcaacataggagtgaaaatatctcttcaagatagtgaatttatattctttggatatttacttagatgtgagattgctgaatcacatgatagttttatttttaattatttgatgaacctccatgccatcttccataacggctgtaccaatttacattcctggtgatagtgtacaaggtcccttttctctatatt

SEQ ID NO: 186291 - DNA, 516 bp, Homo sapiens
cagcagggaaagtaaatataaaaataatgcatttttttctgaatcaatacagacttaaaccatataataaacttctgcawttagacaaccattaaggtctatagcacatatttactattctatggtaatctcttagatttatcttgcgccaacatactaaaattttaacggaataaaaacagaaaagaggttttcaaaaaatattattttcatatacctaattttccaattgtctttctattcctgttggctcttaaaatttacttattattcaatgtccagttcaagtacagattctcattgtctttctaatttatttcctgcagggctagtttgttattttagacacagtttctgtatcacacatttttatagttcatattgtatgtaaattaaattgttgcagattcttcctatgtgcatgtctttgatgcacacgtacaatgaatgttcccaaaaagtattaataaagaacacattttaacttctttttaaatcaccaatttcagtacaaag

SEQ ID NO: 186292 - DNA, 516 bp, Homo sapiens
cagcagggaaagtaaatataaaaataatgcatttttttctgaatcaatacagacttaaaccatataataaacttctgcaattagacaaccattaaggtctatagcacatatttactattctatggtaatctcttagatttatcttgcgccaacatactaaaattttaacggaataaaaacagaaaagaggttttcaaaaaatattattttcatatacctaattttccaattgtctttctattcctgttggctcttaaaatttacttattattcaatgtccagttcaagtacagattctcattgtctttctaatttatttcctgcagggctagtttgttattttagacacagtttctgtatcacacatttttatagttcatattgtatgtaaattaaattgttgcagattcttcctatgtgcaygtctttgatgcacacgtacaatgaatgttcccaaaaagtattaataaagaacacattttaacttctttttaaatcaccaatttcagtacaaag

SEQ ID NO: 186293 - DNA, 457 bp, Homo sapiens
gcttatgcacacatatgagggcatatgtgtgcatgtgtgtgtgcacacctcacatgtgtatgcactacacacacaagrtgaattctatttaaaaacataaatgcagtatatctagtaacagaaaatagcagaaatcaaatcaacaagtaattatctcagggatgtaggattttcactattatatacatatcatagatgtatgtgatctgtgatcatttgactgggggcacaaaaacaaatgcttaaatatttcagcataatacagcatttacatctgtgtggtataaataatattgaataataacattgctttgaaagaccaaatttggccgggcgcagtggctcacacctgtaatcccagcactttgggaggccgagatgggtggatcatgaggtcaggagttacctggctaacaccgtgaaaccccatctctactaaaaatacaaaaaattagcc

SEQ ID NO: 186294 - DNA, 607 bp, Homo sapiens
attacaaagaatagtttgagtaatggaatgtatttgaattttacatatgtctttcatttactagcagaaataaaatcttarcacttgatttagtaaattcctccatttaaaataagatgttactttagcagaaacaaaatttatcttaatgggataataattcactagtttacctctgatgagcatcagctaatatttaatccattgtgaaattacacagaatcaaaataaaatataatacagttagttaaaatagaaaaattatcttattgattaatttagacatcagaagttagattataaaatcaaggtattttttgtgtttgttttgtttttagtatattagcatatactaccaaacgtgaaccatagtaaaagctgttcagtaacacttaccattccattttcaaataacccgagtttatgtgtcaggttgaaaagcttttagatgagtggtttatgttactgtatgtatccaaatatttgtatatcatgtagacagcccaagaacatatgcacgtatgttagctattgcatagaatggtaaagaatacattcttaaaagaaagaagagagtaagatacattcacttaatgttccaaatagg

SEQ ID NO: 186295 - DNA, 607 bp, Homo sapiens
attacaaagaatagtttgagtaatggaatgtatttgaattttacatatgtctttcatttactagcagaaataaaatcttagcacttgatttagtaaattcctccatttaaaataagatgttactttagcagaaacaaaatttatcttaatgggataataattcactagtttacctctgatgagcatcagctaatatttaatccattgtgaaattacacagaatcaaaataaaatataatacagttagttaaaatagaaaaattatcttattgattaatttagacatcagaagttagattataaaatcaaggtattttttgtgtttgttttgtttttagtatattagcatatactaccaaacrtgaaccatagtaaaagctgttcagtaacacttaccattccattttcaaataacccgagtttatgtgtcaggttgaaaagcttttagatgagtggtttatgttactgtatgtatccaaatatttgtatatcatgtagacagcccaagaacatatgcacgtatgttagctattgcatagaatggtaaagaatacattcttaaaagaaagaagagagtaagatacattcacttaatgttccaaatagg

SEQ ID NO: 186296 - DNA, 558 bp, Homo sapiens
tgattattgattatattcaaatgcgctctcattttcaaagcaacgtgtataaaattattattaaaattgtacatagcttgaaataatgtaattgtcatgggatacatttatatatcataattaaaagcacattacaacgcttgtacctgatcttaayattacttaaccttagaaatatagaataaatgataggaataatatgggagacaaaagactgtgtgaaaagccacatattgtatatctctattgtttttattaaactttttttcccactgcacttacaagtaaatttgtcatggaccatggtaatttttattgtaatcttactgtaggtacattctgttagcaggttaaataaaatacatgatcaaagtcaaaaatatatgcaaggaaaatatagaaaatttaagttataaaaagctactgttggtcaccggtggctggcaggcgggcagccctaacacaggcagggctgcgagtgcagtcacccaggtctgcaggagcagcaggccgaggccagcggagatgaccccgatgagcccacttcaggtcggggct

SEQ ID NO: 186297 - DNA, 382 bp, Homo sapiens
ccctgtattggggacacagttcattccccccttccctaactctgcagtaaaatcttgaggctgtcatctggggaagccaccttgtccgttcagccatgaagacagaaacagtgccatygttccaggagactccagctggatccagctgtcacctcaataacctgttgagtaggcggaaggtgatggctgtgggggtcttgcttgctggctcctggtcatacaccttctggtcagcatgtggctgctgtgccttctgtctgcattgctagtggtgctgggaggatggctgggctccagtgtctctggagtggcttcaagtccactgctcctggaaggcttcatcccattggccacctgtcctctattccctgagacagaaaga

SEQ ID NO: 186298 - DNA, 566 bp, Homo sapiens
ttggggtgaacaaatgccagctgagtgtttagtcttggagtcactacaacaaccactcatcaacaggcatttgatttactgccttggggacattatcctggaattcttggatctcagtgcctctgttgaggagtccgctgctaccacctctgcttaagataccccaggcagccctaagaggatgggtgtctcctcrtagctggttattcccgcatccttcccaggtcagggaagtagagttactcagccacccagagaccagtgaggaagcctgcatcctctggaagtaagctacagctcagaaggcctaggctcccagtggctcaattctctcccacttctccatttgtagcaggtgacacagggtatgtgtcccagttgcatgcacatttatttccatgtcccttttgtggtgttgggattgttgttggtgagtagattctgtttcctttgggaaaagaagatgtgaggtagaggaacaatccccttttgcttctccttttgccgtcctccctgagattgtttgccagaaccctggccctgtgcacagatgtatttaatccacc

SEQ ID NO: 186299 - DNA, 572 bp, Homo sapiens
aagcctgcatcctctggaagtaagctacagctcagaaggcctaggctcccagtggctcaattctctcccacttctccatttgtagcaggtgacacagggtatgtgtcccagttgcatgcacatttatttccatgtcccttttgtggtgttgggattgttgttggtgagtagattctgtttcctttgggaaaagaagatgtgaggtagaggaacaatccccttttgcttctccttttgccgtcctccctgagattgtttgccagaaccctggccctgtgcacagatgtatttaatccaccagcacacaagctctggatagaacaggaaaaaagcaatggccagatttccttggaggaaagaacaaccttctgagctctctgttcctacccggaaactaaaaattcattcygggccattctcaaaaaccagactcctgggtcttacctagtttcccaacagttccagaagaagaaggagggaggaaaatttttcaagggacttcttgctcatgtgttgctatttcccaacacatcagccttatggaagatgtcatcaggctgcttccctggaag

SEQ ID NO: 186300 - DNA, 572 bp, Homo sapiens
aagcctgcatcctctggaagtaagctacagctcagaaggcctaggctcccagtggctcaattctctcccacttctccatttgtagcaggtgacacagggtatgtgtcccagttgcatgcacatttatttccatgtcccttttgtggtgttgggattgttgttggtgagtagattctgtttcctttgggaaaagaagatgtgaggtagaggaacaatccccttttgcttctccttttgccgtcctccctgagattgtttgccagaaccctggccctgtgcacagatgtatttaatccaccagcacacaagctctggatagaacaggaaaaaagcaatggccagatttccttggaggaaagaacaaccttctgagctctctgttcctacccggaaactaaaaattcattccgggccattctcaaaaaccagactcctgggtcttacctagtttcccaacagttccagaagaagaaggagggaggaaaatttttcaagggacttcttgctcatgtgttgctrtttcccaacacatcagccttatggaagatgtcatcaggctgcttccctggaag

SEQ ID NO: 186301 - DNA, 582 bp, Homo sapiens
tgtgtcctcttaacctttccagagtaggtgtccttacagcataaatttagcataaaattagacacgttccagtataaaataaaatgaagacataataagccaatactgaattctttagtgaatctagaaaattcactttaattttttttctagaaaatggatttattttagtgtatttatttgtttttgcatttgcctcatggttctgcatggctaacttgttaaagtcacaagataycgtatattgggtggatttgcaagcgatgtttagtgttttcttccctgatgaaccaacataaccatcattctgctatgagtctatgttatgaaatatgtctatgtcctgctattctcaggcttcatttttgcctctaaatcttccaggtactgttgtttttgacaatgtaatagatattacttctttctgtgccttcaaaatttcactaaggaaataaactggttaccaaaaacacctgtttgttaaaaattggagtcaaactttttaaagaagagatgtactttgttttctttcctaaatatttaaaaattaataggatttatccatagtataacatggtttta

SEQ ID NO: 186302 - DNA, 582 bp, Homo sapiens
tgtgtcctcttaacctttccagagtaggtgtccttacagcataaatttagcataaaattagacacgttccagtataaaataaaatgaagacataataagccaatactgaattctttagtgaatctagaaaattcactttaattttttttctagaaaatggatttattttagtgtatttatttgtttttgcatttgcctcatggttctgcatggctaacttgttaaagtcacaagatatcgtatattgggtggatttgcaagcgatgtttagtgttttcttccctgatgaaccaacataaccatcattctgctatgagtctatgttatgaaatatgtctatgtcctgctattctcaggcttcatttttgcctctaaatcttccaggtactgttgtttttgacaatgtaatagatrttacttctttctgtgccttcaaaatttcactaaggaaataaactggttaccaaaaacacctgtttgttaaaaattggagtcaaactttttaaagaagagatgtactttgttttctttcctaaatatttaaaaattaataggatttatccatagtataacatggtttta

SEQ ID NO: 186303 - DNA, 537 bp, Homo sapiens
ggtggggggctaggggaaggatagcattaggagaaatacctagtgtaggtgacaggttgatgggtgcagcaaaccaccatggcacatatttacctatgtaacaaacctgcatattctacacatgtatcccagaacttaaagtataatttttaaaaaagacttcaccaatattatttatttttcctgttgcctcaggttccaacgtggctcaacatggcagttgctgatcctgactttgcttaaaatttggtactttgtttatcacaaattttaaaattaattttgatttctcaaaatattgattaaaatrtttatctctactattgagtttttgggcacgcctttaaattttgcatgcaagataagcaccttcctcagttgtaggatgttgacggtgataaggacattagcaaaggaaatattgaaaagctcgtgaatactgttgcgtaattcttcttagagaaaatagtttcttggtataggatagaacaattgctaaagggaaggtgacctcctacatagcatgaaaagatgtgt

SEQ ID NO: 186304 - DNA, 537 bp, Homo sapiens
ggtggggggctaggggaaggatagcattaggagaaatacctagtgtaggtgacaggttgatgggtgcagcaaaccaccatggcacatatttacctatgtaacaaacctgcatattctacacatgtatcccagaacttaaagtataatttttaaaaaagacttcaccaatattatttatttttcctgttgcctcaggttccaacgtggctcaacatggcagttgctgatcctgactttgcttaaaatttggtactttgtttatcacaaattttaaaattaattttgatttctcaaaatattgattaaaatgtttatctctactattgagtttttgggcacrcctttaaattttgcatgcaagataagcaccttcctcagttgtaggatgttgacggtgataaggacattagcaaaggaaatattgaaaagctcgtgaatactgttgcgtaattcttcttagagaaaatagtttcttggtataggatagaacaattgctaaagggaaggtgacctcctacatagcatgaaaagatgtgt

SEQ ID NO: 186305 - DNA, 537 bp, Homo sapiens
ggtggggggctaggggaaggatagcattaggagaaatacctagtgtaggtgacaggttgatgggtgcagcaaaccaccatggcacatatttacctatgtaacaaacctgcatattctacacatgtatcccagaacttaaagtataatttttaaaaaagacttcaccaatattatttatttttcctgttgcctcaggttccaacgtggctcaacatggcagttgctgatcctgactttgcttaaaatttggtactttgtttatcacaaattttaaaattaattttgatttctcaaaatattgattaaaatgtttatctctactattgagtttttgggcacgcctttaaattttgcatgcaagataagcaccttcctcagttgtaggatgttgacggtgataaggacattagcaaaggaaatattgaaaagctcrtgaatactgttgcgtaattcttcttagagaaaatagtttcttggtataggatagaacaattgctaaagggaaggtgacctcctacatagcatgaaaagatgtgt

SEQ ID NO: 186306 - DNA, 537 bp, Homo sapiens
ggtggggggctaggggaaggatagcattaggagaaatacctagtgtaggtgacaggttgatgggtgcagcaaaccaccatggcacatatttacctatgtaacaaacctgcatattctacacatgtatcccagaacttaaagtataatttttaaaaaagacttcaccaatattatttatttttcctgttgcctcaggttccaacgtggctcaacatggcagttgctgatcctgactttgcttaaaatttggtactttgtttatcacaaattttaaaattaattttgatttctcaaaatattgattaaaatgtttatctctactattgagtttttgggcacgcctttaaattttgcatgcaagataagcaccttcctcagttgtaggatgttgacggtgataaggacattagcaaaggaaatattgaaaagctcgtgaatactgttgcrtaattcttcttagagaaaatagtttcttggtataggatagaacaattgctaaagggaaggtgacctcctacatagcatgaaaagatgtgt

SEQ ID NO: 186307 - DNA, 555 bp, Homo sapiens
ttggaacactgttttccaccaatagtaacaagacttggaacaaaataaaatagcaatatcatgtgcattttctatttctgcacttttccacttctggaaatagtcatagaatcattttgtgacagattaatatcatccatgatcctaagtcactaagaataagtgttagaktctttgggttaaattgccataaggactaaatttatttttttaaccaattccctaaagaatcaactgattttagttttacagcatatgtatgacctctccatccattttgccttaattctagttctttttatccttcagtggtgagaatgagaaaacctggatgcatatggctatggttgatttgaaaagtactttttaaacatttggaagtttttcaaaaccaaaagcatatttgccaagtgatcttttccccctacattttaaatccatgtgcaacctaagagaaatttagaccatatgctagttcagattgacttacattaaaatcatgaaaattttatttaatagctctttgacacacagggagtgtttaaattaagcttc

SEQ ID NO: 186308 - DNA, 573 bp, Homo sapiens
aaaagcaaaagtaaaatatacatcaactaattgcagaagggtgtatagaagggagtcatctgtatatatgacatctgatggccccgccactcagctaacccatccacgcatgaaatgataaatagacaagtgcattgaaaattgtaagtgtgatggaaaggtcaccacgtgattgctactattatattgttttattattttgttctcccaacaatgtatagctcaaatttatactacaggctgttcacatcccttaacaaaatatccattaatttatgaatttgataaaattctaacttactgcaatgccctacaaataatagttcggcccatctgtggtgatgactgttccrgaagatctttttgatgttgaataactaatactgtttttcaatgttactattaggttggtgcaaaaataattgagatttttgccattaatcacaactacatttgcaccaacctaatagtaatttaacattctgtatctaacatttgtggacactgatcgaatatgcaatattctggggagaagttggtggaagagatgtgtgttgttttgtgaaagatagt

SEQ ID NO: 186309 - DNA, 575 bp, Homo sapiens
atctagcatcctttacttagtaggattgggaaaggcagcagtgggtttttttaattacttaataattcaatttgaatcaaactcagccttgacccctgccttctctcacaccccatgtccagtctgtcaggatcctgttgacagtcttcaacatgtctccaggctctgaccatctctcaccgccaccatgaccctggtcaggaccactatcatctcccacctggatgtggtaacagctcggcctccctgcttctaccaaaatcttcctatagtctttcccaactcagcagccaggggtgcttttaaatagggagacagatgatgtcacytggctgctcagaaccttcccgtagttcccatctcagtcagagtaaaagtcaaagccccagcaataacctcccagggcttacacaatctgtactgatctcagcccagctactccctggcctcctcccttgcttctcttcctccctctctctgctgcaccagactccatcctgagccttagacacaccaaggagttccctcctaacatcttctctctgttgcttctgcctgcaatgctcttccctaag

SEQ ID NO: 186310 - DNA, 582 bp, Homo sapiens
tgccttaactctttagtcctttgtctgccaagaggatgcagaagactctgggatcctaaataaatcttaaatcaagaagatgcaagaggaagtgacaccaataagatagctgactagaagttcctaacactcaacctcctccccggccaccacacaaaaggaccaaagaaacaaataaataaccacatttcaactaaaatatatgaaagagagccctggagtacaacaaggaaatggcagagaccatgtggatcacggagactcaggatggccatataaaaaagggaatggaacactctgcctttaccatcttttctctcctagtgggatgaggtyagagccagggcagactctccttacagagaaaaggtatgcaggaggccctcagcaacacaaattaaaatgtggacacccacaatctttgctcctggagatcactgtagtccttacaggtcctaggcccagcctgaggagttgcctggagttcacatgtctatgttactccaaacaaggagctatattgtgtctcatcctgccctattatcgaagctgctgcagtgtaatgacatcttgagactgaag

SEQ ID NO: 186311 - DNA, 588 bp, Homo sapiens
actggtctttgagctctgagattcttccctcagcttggtctcgtctggtgttaatatttctgattgtattacaaaattctttttgtgagtttttcagctttatcagatcagttttgttccttcttaagaaggttatttcatctctcatctcttgaatagttttgctgaattttttagattccttgaaatgggtttcaactttctcctgaatcttgaagatcttcattggcatccaggttctgaattctctgtctgtcatttcagcrattttatgctggtcctccacttgagtactagccataggtcttggcttggcactcccatcccatagccctgtgcaccatagctctggggtgaactcaggcttttctttttctccccagcttgggagcagcagtgttggggaccttggcaatggcaatggcagaaagcctttctgttgtctcttggggtaccacatcagagacgtgcagagctctgccaatcagaatgatcagtcagaaatggagcagctgcattgtgagcccaagctgggacccctgtctagtgaagagcaggggatttggggccaacagggaagagagactg

SEQ ID NO: 186312 - DNA, 456 bp, Homo sapiens
agggccacacttctttcagaaactctggagaaaaatctgtttcttgccgtttccagcttctggtgtccgtgaggattccttggctattggccacatcaccctcacatcttcaaatctctttgctccaactttatatcaatctaccactttatgtataaggtctctcttagccttcctcttacayggatacatgtgattgaattttaggcccagctagataatccaggatgatctccagatttcaagattcataaattaagcacaacaacaaataccccttttttcaaatataaggtaaaatttataaatttcaggaatgaagacatgaataccttttgggagactaccataccttcacatgaactcagccacatgactatttaatagattgatctaaagaacattaccagcccctaagttattcttccttttaaactttctatcagtttttgactt

SEQ ID NO: 186313 - DNA, 580 bp, Homo sapiens
acacttctttcagaaactctggagaaaaatctgtttcttgccgtttccagcttctggtgtccgtgaggattccttggctattggccacatcaccctcacatcttcaaatctctttgctccaactttatatcaatctaccactttatgtataaggtctctcttagccttcctcttacacggatacatgtgattgaattttaggcccagctagataatccaggatgatctccagatttcaagattcataaattaagcacaacaacaaataccccttttttcaaatataaggtaaaatttataaatttcaggaaygaagacatgaataccttttgggagactaccataccttcacatgaactcagccacatgactatttaatagattgatctaaagaacattaccagcccctaagttattcttccttttaaactttctatcagtttttgactttgttaactgaagagtaattagtcccctgacttctaacaaaatggattacatttgccattttagaatttatataaagtaatacagtttgttttaactattgtctgactttttgctcagcatacatctatgt

SEQ ID NO: 186314 - DNA, 456 bp, Homo sapiens
agggccacacttctttcagaaactctggagaaaaatctgtttcttgccgtttccagcttctggtgtccgtgaggattccttggctattggccacatcaccctcacatcttcaaatctctttgctccaactttatatcaatctaccactttatgtataaggtctctcttagccttcctcttacacggatacatgtgattgaattttaggcccagctagataatccaggatgatctccagatttcaagattcataaattaagcacaacaacaaataccccttttttcaaatataaggtaaaatttataaatttcaggaatgaagacatgaataccttttgggagactaccataccttcacatgaactcagccacatgactatttaatagattgatctaaagaacattaccagcccstaagttattcttccttttaaactttctatcagtttttgactt

SEQ ID NO: 186315 - DNA, 645 bp, Homo sapiens
aatgcctggttggaatggatcaaatattccgtctgcaggtgaaacaaaagcaattgttatgcttgagtgcatggcaggccagaggcccagattgacccctttccactagggtggtcctccagtcgaccaggcatgggctgcatggtagctcttttccaggattacacagcctggggtaacaagtcatgtcaagttctctctctgctatatcccraagttcaacactctgcaggtcagcccctgaaggccatccagcttccatctccccacattaatttcacttcttgtctctcatgacagggaggaaacttggtgtttcttggagacctgaaaggatgcaatgagcttaagactttccaagagcttaccaatcagcagcccttgttcatccctgagcagatgtatggtggtattgtggtggacctttactggactctctgccaagtaactggagtggcacttgtactctagtccagtaggctatccctttcaccctggcatttcaccaaccagagagaggaaaaatacaacatcataaaacaagggaagccctttatgtgtcttctgactctcgcatttatttagatgtaattggggtcccatgaggagtaccagataaatttaaagccagagatcaaatagctg

SEQ ID NO: 186316 - DNA, 645 bp, Homo sapiens
aatgcctggttggaatggatcaaatattccgtctgcaggtgaaacaaaagcaattgttatgcttgagtgcatggcaggccagaggcccagattgacccctttccactagggtggtcctccagtcgaccaggcatgggctgcatggtagctcttttccaggattacacagcctggggtaacaagtcatgtcaagttctctctctgctatatcccaaagttcaacactctgcaggtsagcccctgaaggccatccagcttccatctccccacattaatttcacttcttgtctctcatgacagggaggaaacttggtgtttcttggagacctgaaaggatgcaatgagcttaagactttccaagagcttaccaatcagcagcccttgttcatccctgagcagatgtatggtggtattgtggtggacctttactggactctctgccaagtaactggagtggcacttgtactctagtccagtaggctatccctttcaccctggcatttcaccaaccagagagaggaaaaatacaacatcataaaacaagggaagccctttatgtgtcttctgactctcgcatttatttagatgtaattggggtcccatgaggagtaccagataaatttaaagccagagatcaaatagctg

SEQ ID NO: 186317 - DNA, 581 bp, Homo sapiens
gtcattgactagagttaattttgagtgtcattttgctactcctattatttcatactaataaacacaattgactgggtggttttgctatccctattagtgctcatttaggtagctgagaaaaagcataagtggttagaatgawacaaaaagtataggtaccttatcaaaactgatattttatatatttttatatagcaatcaggagccaaattcaagttatgattagctgcatgtaatctctaccaaagttctatatacgttacactaagcatttctaggaacatagagtgtttgaagtaagagcacgtttagatatcttcatgtcctactccttatattaaaaaataaggaaactggagttctaaacacataaatgacttcattaaggcctccaagctacttagtgccaaaaatttcatataattattatattcacatgtgaaatgattatgatgattcaaatgtatcaatgatcataccacattatatttcagttacttagagaaatgactcctactcaaaacatacatagagattgtagtaaaaggaagttatgaagtattttagaaactcttaaaaag

SEQ ID NO: 186318 - DNA, 581 bp, Homo sapiens
gtcattgactagagttaattttgagtgtcattttgctactcctattatttcatactaataaacacaattgactgggtggttttgctatccctattagtgctcatttaggtagctgagaaaaagcataagtggttagaatgatacaaaaagtataggtaccttatcaaaactgatattttatatatttttatatagcaatcaggagccaaattcaagttatgattagctrcatgtaatctctaccaaagttctatatacgttacactaagcatttctaggaacatagagtgtttgaagtaagagcacgtttagatatcttcatgtcctactccttatattaaaaaataaggaaactggagttctaaacacataaatgacttcattaaggcctccaagctacttagtgccaaaaatttcatataattattatattcacatgtgaaatgattatgatgattcaaatgtatcaatgatcataccacattatatttcagttacttagagaaatgactcctactcaaaacatacatagagattgtagtaaaaggaagttatgaagtattttagaaactcttaaaaag

SEQ ID NO: 186319 - DNA, 609 bp, Homo sapiens
tgccatttctgattgtgcttatttggatcttctctctctctttttctttgttaatctagctttcagtccatcaatcttgtttatcattttagaaaaggtttcactgattctttgtacaaatttttgtgtctccattacattcagttctgttctgatattagttacttcttttcttctgctagttttgtggttagtttgttcttatttttctagtttccccaggtgcgatgttacataattaaattgagattattttaaccttttcaggcccacagttagcatataaactttcttcttaacactgcttttgcagcataacagagactttagtatattgtgtctctgtcttcatttatttcaaataattttttgatttatcccttactttcattgtttacccaaaaggcattctggggcaagttgtttaatttccatataattgtatggttycaagagatcttcttggtattgatatctatttttattccactgtggtccaagactataggtggtatgattttgacctttttgaatttgttgagatgtgctttatggctgagcatgtggttgatcttggagtaggttccatgtgcagatgagaaaaatgta

SEQ ID NO: 186320 - DNA, 473 bp, Homo sapiens
ggaggtatgaggtaagggttgaaaaactaaccattgggtactatgattcgtatatcgctgatgggattattcctacttcaaagctcagcatcctggaatatacacaggtaaaaaatctgcacatgcatcccttgaatttaaaataaaagttgaaaaaaaaatagctacacggctacaagtaactacaaggcccccacattatggtcttccacttcaaattcttatctccccaaccctcacttggcatgactgaaagcttcactcacttatagtatttgttcaaatattatttaatcattgaagcctgtctgatcactatttgctcttctatccaaattccacacctccttgcccrgcttatttgtttctctatgtattagtccatttttatactgctataaagaactgcccaagactgagtaatttataaagaaaagaggtttaattgactcacagttcagtataactgggaa

SEQ ID NO: 186321 - DNA, 554 bp, Homo sapiens
agtctaaataagtggtattatttacaaatttatggtataaacctacgctggatttaaattgtatatttaaaatatacaacagagactttatttctttagtagtgaatacatttggaagaatatttgctttccatttccacaaaaatgaaacaatgtattgaaatgtattcatcagtgcaccctattaatataaagggcactaatggagagaaactaaatatgcatgatcatattcaacmaaggatactaaataattatcaagaaaaacacaacttataccatgtttaataaaaataaacctgttgtagcaaatgaaaaatcatttttcttaatagtatgattttttttaatataaaatagttaccctatgacttccctttgcattcattaagtttattactggcagcatgagtatggcaatattttaattagattaaaattgtcttttcaaagcaactgaagagtaaaatatggaatttaaaaagaatcacacttgagagaggatccttaatatttaattaactttcttattttatatgtctttagtagctgca

SEQ ID NO: 186322 - DNA, 554 bp, Homo sapiens
agtctaaataagtggtattatttacaaatttatggtataaacctacgctggatttaaattgtatatttaaaatatacaacagagactttatttctttagtagtgaatacatttggaagaatatttgctttccatttccacaaaaatgaaacaatgtattgaaatgtattcatcagtgcaccctattaatataaagggcactaatggagagaaactaaatatgcatgatcatattcaaccaaggatactaaataattatcaagaaaaacacaacttataccatgtttaataaaaataaacctgttgtagcaaatgaaaaatcatttttcttaatagtrtgattttttttaatataaaatagttaccctatgacttccctttgcattcattaagtttattactggcagcatgagtatggcaatattttaattagattaaaattgtcttttcaaagcaactgaagagtaaaatatggaatttaaaaagaatcacacttgagagaggatccttaatatttaattaactttcttattttatatgtctttagtagctgca

SEQ ID NO: 186323 - DNA, 554 bp, Homo sapiens
agtctaaataagtggtattatttacaaatttatggtataaacctacgctggatttaaattgtatatttaaaatatacaacagagactttatttctttagtagtgaatacatttggaagaatatttgctttccatttccacaaaaatgaaacaatgtattgaaatgtattcatcagtgcaccctattaatataaagggcactaatggagagaaactaaatatgcatgatcatattcaaccaaggatactaaataattatcaagaaaaacacaacttataccatgtttaataaaaataaacctgttgtagcaaatgaaaaatcatttttcttaatagtatgattttttttaatataaaatagytaccctatgacttccctttgcattcattaagtttattactggcagcatgagtatggcaatattttaattagattaaaattgtcttttcaaagcaactgaagagtaaaatatggaatttaaaaagaatcacacttgagagaggatccttaatatttaattaactttcttattttatatgtctttagtagctgca

SEQ ID NO: 186324 - DNA, 554 bp, Homo sapiens
cactggctgttggaatgaactgactataaagatgcataatgaaatttgtggggagtgttctatatcttcatagtgacagtggttacaaacggtcaaagccaatggaatcatacacgcaaaaggatgaattttaccatttgtaaattgtacctaaataaccattattttacatacctaaatagtttttatagccattccaattgcattttaattacatcatgatttttcagaacaatttcatcaatttcccatataagtaaactttatctcccagcctcrtgtttttcactgtcttgaagaagatgccttttaatctccctttagggcgacattgttcaatttaatctatactctccttgcgtggttgatttaccaactttgaatctcacacaaggtattgctacctaacagggtgaagtaatgtgaactacaaggacataaaaattacggccctcctgcatacttgtcagaagtaaattctagcaatgtgctccattgagccacacagatggttgataaaattatctcaaggtagctatctctgtcgcgaattc

SEQ ID NO: 186325 - DNA, 505 bp, Homo sapiens
ttttacaatttaacataggctgatgacttctgagatgagttgctttaactgtttctcctttgtttctgactagctaagamttgtagccaataaatataaaattaagccagttatagttagatttacagaatgattttcatgaaagtcaattaacaacgagacaatagatttattagttccatctgtaagtacatttattaccacttataagtagttataactggtataaacaatataccattcttatataataagagattttttttttcagttaaactgataaatcagcaaacgccgagtgcctacttttatttcacatattcaaagctgaacgttgtctacattgagagggaaattgttcctgggacaattttctttagaggataaatgttttctacatttacaatgtcagaggttatagatattagttaactgtcttggtttcctgacatcaacatttcttagccaattataagataaacatatacattagaaaaataactct

SEQ ID NO: 186326 - DNA, 505 bp, Homo sapiens
ttttacaatttaacataggctgatgacttctgagatgagttgctttaactgtttctcctttgtttctgactagctaagacttgtagccaataaatataaaattaagccagttatagttagatttacagaatgattttcatgaaagtcaattaacaacgagacaatagatttattagttccatctgtaagtacatttattaccacttataagtagttataactggtataaacaatataccattcttatataataagagattttttttttcagttaaactgataaatcagcaaacgccgagtgcctacttttatttcacatattcaaagctgaacgttgtctacattgagagggaaattgttcctgggacaattttctttagaggataaatgttttctacatttacaatgtcagaggttatagatatkagttaactgtcttggtttcctgacatcaacatttcttagccaattataagataaacatatacattagaaaaataactct

SEQ ID NO: 186327 - DNA, 604 bp, Homo sapiens
attaggaactgtggctgtgtatttgagatgtaataaaaataatggaagagttttctaagtgaaatcgttttagaataatattttatttccaaattagtgaaataccataaacatcctattatctcaaaatacattaacaaagtaatatattgaagccaaatttccttcagcattaatgagaacagctattaatgaactaatgctttaaacagtcataaaaatcaagagcaattttaacaagcttcaaattttctaataaattgaacaattgaaataattaacatgtttgtgataatcacaaagtacctgaggattctggttactgtttttgttcctattcaaatttgttgaaatmtaatgatgatttctttggcagtgattttagtggtcagaagccaccaaaatcaaagaaacatgtgaaaactttggacttggcttctttcctttgcctccctggattattctattatacttctaactttcaatgcttacaaataactataaaacatctacactgaatgttcaacattgaatttcaatggacatttacacaagggtagcttaactagtttcaagttataaaatgctttttgttttgtttctt

SEQ ID NO: 186328 - DNA, 569 bp, Homo sapiens
tcttaagaagttacaataaaataggacaaggtcagcttccagaccttggaatatatatagtacctgagtacctgaattctgggtttggagcaagctattcttgtgagcttgtattagtaaaggtactccayagaaacacagccaacgggataaataggtgggcatatagatgctgactgataggtagagggatagatagatgaaagagagaaagggaaaagagagttgaatcatgtgatattgtaggggctggaaagtgcaaaatgtgcagggaagactggtagttagggagccagggaagagtttatgattcagtcttgaagccaaaggcagtctgcagcctgagtctcttcttcctagaggaacctcagtcaatctttaaagtgctcatctgactggttgaggcccaactacattatagagggtaaactgtttactcaaaaactactgatttcaatgtgaatcacatctaaataataccttcacagcaacatctgaactggaatttagccaaatacagtcatgcactgcctaatgacattttcagtcaatgatgtacaacgttggta

SEQ ID NO: 186329 - DNA, 564 bp, Homo sapiens
atgaagatgcttgtgaagtaaaaatccttatattgccataaaaaatttttatgagattttaacatcataaattaaaattttactttcaaagaatttactatattatttcatcgttataataattatattaatagttatcttccacggattaataacagtgtattattaacaatgtttctcctcttcttgtgaaataattatgcttctcacccyactaacttttaacttgtctgtaatttgcaatactccttccagcaggaggattatacatccctgtcctgttgaactcaggtctgaccctgtgattgacttgggctaatggtatataactgacatgcatcactaccaagcagtgggtttagtgtcagtgaagtttattacatctctcttgtccttctgccaggtgatactcagccatactcacaggctactccattacttcactctcagagtgaaggtgacttggacagagccacagctgaactacaatggacatgtaatctgagtgagacataaacatttagggttggaagccactgggatttggaagtagtttgttaccac

SEQ ID NO: 186330 - DNA, 557 bp, Homo sapiens
tacttctttaaataattagatttgaggacttttcatctaatgagctactgttcactttaaagacacagaaagagtttcagagtcaacagaaagagtatgtgatacaccctaatactaaagctcaccattactaacttgtttcctaattcacctttctacctccttactacaaaataaaaattaaaaagtcaaaaacctccctgctacaacaaaaacaagcaaataaaattataatagtggtctttagaattgttcttctttctcttttgtgcccattatacttcttcttgctatagacataaactaggaaaacatcagaatcttaggtgtgaatcaactttcagtatcttctattttgctatttgtgttttagaaagcataaggttgaaagctctatttcataaagccaggtacaattttcttttactcagtmaattagtgttaagacctgtagcctgactatggctcaagaaaaatgtccagggacattttcactgatatttggcaaagatggcagagaaaaagcaatttagttaacatggctgcaaaaatggtca

SEQ ID NO: 186331 - DNA, 594 bp, Homo sapiens
tttctacttttagccttcttacataaaagcctcgaggcaaggggatacaacaagaasagcaaataaaaagatgattatctttgtgaaaggggggatggatgcagaacatatgcaggaatatagtgaagcaaggcaaagaacccaaggtgcaaaatgtgaggaagcctttgcgcttaggtttgtgaagtgcagggttggcacctgagagtcggtgcctcattacattttttaacacttcactgagatataaatcacatactatacaattcaaccacttatttattttttattattattattttttattttttactgctccttgcagagcagggctaactcataggcagtgtgcccagagcctgcccagttcacccatttaaagtatacaattcaatagtttttgttacatttacagatatgtataaacatcactatagtcaattaaaacgttcatcaccttgaaaaaaaagcccgtaccctttagccatcagctttatcaccctatctccccactcccaggcctaagcaacctctaatctactttgtgtctctgtggattaccctgttgtgaacatttcatctaaagggaattat

SEQ ID NO: 186332 - DNA, 621 bp, Homo sapiens
ctctgttgctcaggctagagtgcagtagtggtgcaatcatggcccactgcagccttgatctcctgggctctggcaaagcttcctgagtagctagacccacaggcccatgccaccacacccagctaattttcttttttggtagacacagggtcttactatgttgtccaggctggtcttgaactcctgggctcaagcgatcctcccaccttggcctcctaaaatgttgagattacaggcatgagccactatatctggccatgttcattttctaaaaatctttttctcttatttgattagacaatttctgygggtccattttcaagttcactgactctttcctgtcatctgtattctgccattaagtccatcagtgagttttttattttggttattatactttcagctctaacatttccatttggtttctctttatgtcttctatttgtttgttgataccatttccattcaagagtgttcacctttacttcttggagcattctataatgcctagcttaaagtctttaacaatttcaacacttatgttctctcttcattggcatctgttggctgttttttctcatgcagattaagattttctctgttctttgtatgctgagtaat

SEQ ID NO: 186333 - DNA, 529 bp, Homo sapiens
cagactgggagatcatgttctttcctgaaaaaaaaaaaaaaaaaaaaaaaccccctaatgagggcggkgatctgtgatacttactttgtggttcctcctgccaaggggttacagcgatgggtgtgtccaggaggcaaggtgacatcttaaacaggagttagggatccttgccaactgaaacctccagcctgtatgggtgtggggagaggatttcaccttaaataaaactagcgttcattgacgtttgatggatttgcttcatcttgatgcttcaaatgttattctgaatttgaatgtgctggttacatttgctttcttaaagatgtagttacaggcatatgtaataaacattacaagttgtggagtaagcttttttttttaaataaacgaagggtaaagttttctttaatcagttttgataattgaatcagtaattcgaatagattttttcttggtagagttggtatctacgcatttgtggtcccttgcccagtgttaagcttttgtagttactgtttgcatcactggt

SEQ ID NO: 186334 - DNA, 597 bp, Homo sapiens
aaattagtcttacccttgaagtcaggggcgcgtcctcgcaatacacatcttgttagggaaagtgttcggctccagctagggttctacaaggcgtttcttgttcaccgccggagggaagcaggctccggagtgactgccttctgaaagtcggtcttgtaacaattggatggatgcctttgaagagcccctgtccctattctatgcttgaaaacagcgtgcagtcctaatgttcaagaaccacgaccacataaaaacattgctccccttctgctgctttgaaaacgacccctaaattccgtgtagaagttgccaggtcgtcttgacgtacacttcgtttgtatgatgtttgtctgtcaaatactgtgatggaagagtgtatgcgggggaggagcagggaatttttaaaagcattttccggtcacctcagactgggagatcatgttctttcctgaaaaaaaaaaaaaaaaaaaaaaaccccctaatgagggcggggatctgtgatacttactttgtggttcctcctgccaagkggttacagcgatgggtgtgtccaggaggcaaggtgacatcttaaacaggagttagggatccttgcca

SEQ ID NO: 186335 - DNA, 637 bp, Homo sapiens
aatattgtcatataactttatgcagaattatttgttttttaaaaatttttttgtctttcctgcacagcaatatacgtaattacgtgtttaaatatatatacatataaatattgaaatgaataaagtatgtgtgatgcagaagagaagatgcctggttcaaaattggtctcgaagtttttactctgtttttcaccaaaggtagtaaaaagctatttaccttttgtgtaatctgccaagatagcagagattycttatgtcaactgaatatttttcttgagaacctgttaatttttagtgcttttgaaacgatcaacaaatgttcttcaaatctaaaagagctatattacattgttacgatgatgatgatgttactttgtgctatgtttgtttttaaatattgcattgttggctgggtgtggtggcttacacctgcaattccagcacttgggaggttgaggcaagcggatcacttgatgtcaggagtttgagatcaacctggccaacatcgtgaaacaccatctctattaaaacttttattttttaattagcattcttattcttgttaatcagctagccaagctaaaccgtttcttttactttttttttttttttttttctgagacagagtctggctctg

SEQ ID NO: 186336 - DNA, 572 bp, Homo sapiens
ccatttgtgtgtgatgctgagtgaactgtgctaaacgtccaaggaaacctttgtttcctcatccagaaaatgaaactaatacctactttgtagggttggtatgaagattaaatgagactaatgtgtgtgaagtccctggaatacagtaggtactgtataaaatgaaattaaggttgtggagggtttgtttttaaaggtgagaatgttcctaggttaagaagaagctacagcctagagaggctgacaataaaaagggtctatactgagaagaatggggtggtctgtggtttcacagctagtgaaaccggctgtgtctggtgctcactccactctgcaagtcagaagcaagagaagtcagccccagagtttctatttggaggagcttaraaacaatcttagaaagtgggtgctaaggcagatttctcttaagtatgcctaccaagcacactgcctccctgtctggggtgtgcgattggtggtggattggaagggaactaatggagattgtgggtacgctcaagcccttaacaagcctcccttttcgcagatccttacccgagggctctctagca

SEQ ID NO: 186337 - DNA, 508 bp, Homo sapiens
gaattcaagtatctgtatattgaagtaatcaaagaacaactacttaataagagatcaccatgctaggcttcatagagtttcagacatgtctttgaagtatcaggtagaatttcatatctcacctcccccacccacacacccacaccccaaccactcgcacaaaagcaaagctatctgtttcctttgatactagtaggtactaaagtgaatctgaaacctcaatgtaagtctccagagttccgagtgcttggaaaagacaactagggatgtgaggcatggatggatgcattcagggaggcagtacctcactccacaatctaggtggaagacctgatgattcctgcacagagcagacagggctccctccattccatcccttcccataatgagacaacagtgtacctaagcaacttcaggaacacacaaccatcatcttcrtacttggtgcttacgcaggagttaaaagttgtaactaataaaaattaatgcaaaatttcaaacaatctcc

SEQ ID NO: 186338 - DNA, 508 bp, Homo sapiens
gaattcaagtatctgtatattgaagtaatcaaagaacaactacttaataagagatcaccatgctaggcttcatagagtttcagacatgtctttgaagtatcaggtagaatttcatatctcacctcccccacccacacacccacaccccaaccactcgcacaaaagcaaagctatctgtttcctttgatactagtaggtactaaagtgaatctgaaacctcaatgtaagtctccagagttccgagtgcttggaaaagacaactagggatgtgaggcatggatggatgcattcagggaggcagtacctcactccacaatctaggtggaagacctgatgattcctgcacagagcagacagggctccctccattccatcccttcccataatgagacaacagtgtacctaagcaacttcaggaacacacaaccatcatcttcgtacttggtgcttacrcaggagttaaaagttgtaactaataaaaattaatgcaaaatttcaaacaatctcc

SEQ ID NO: 186339 - DNA, 455 bp, Homo sapiens
catgactgcccagtgagatgagtacaaccagtgttctgcctcatcctttccctgagagtggcccttgaaactgcctctgaggggtcctgtcttcctcagcctcagcaaactgccaaaatggaatcatagaatcattccatgaaaagatggttgggttcagggaggccaccggccttgcaccgttgtattattgaaaacccactggggccatctttagacaacctaaccctgcagcaaacttaactaagccctaaacgttgccataacaaacagattaaaattcactttcatcgacattaaaaataatttgggaggaaaaaaaggcaaaaagatttttctaattttgcttttgaaattatttgtctgagtaactcatttaattcacaatttgcttwgcttttttccccaaaaaatctgtgcataattgggaattctcgggaagtgaggaaattaaa

SEQ ID NO: 186340 - DNA, 403 bp, Homo sapiens
agtaaacagaaaataaacatttctatttacaagaatgtaggggaactaccacctagctataaatataatggatatattaggtcagtatcatagattacaagagtgctcgcttcaggagcacatttaataatagataaaacgatttaaagagaaaacatttacgataaaaagaatcctctcttaaaaatgaaaactaaattayatttatgtgtatataacaaccgtcagagaactctataggaacagcatgttttcaaaactacaaaaaccccaaactattttaaatcaacctagtaataattctatggccaacatttgaaaaataaaccaacaaaatgtacagtatctattaaactatctcttaaaatcctatggcagtaatttcatattttacaaagaattc

SEQ ID NO: 186341 - DNA, 520 bp, Homo sapiens
tagcctgttccagcaagagaggaaatgccttcaaaaaaattatctccaatccaggtgrcttggacaccactaatttcaccagtgaaaaactatttctaatatctattatgtccattagtgaagacacttctgttgatttaagattgtcgacgtgcttgtactagctgtctctgtctttttgatgaaatgctagctaaccacctcaagtgtgtgtactctcaaacagggcaccagaccacccttaggtgtagattaaaactgtgcagcacatacatatggctctggggactgccatgtgctggcgatcggctgcaaggagttcccctggacgactgccatcagctgtcagccctccttagggactgtcccagctggagacaaccgtgtcacccaaggtcatgccatttccgagggcagtatgcatccagtgaaacaattctaggccccggggacaaaaatacctgccttcctggagcttggattctggtggagacagacaataaacaaagtcaacacatga

SEQ ID NO: 186342 - DNA, 520 bp, Homo sapiens
tagcctgttccagcaagagaggaaatgccttcaaaaaaattatctccaatccaggtgacttggacaccactaatttcaccagtgaaaaactatttctaatatctattatgtccattagtgaagacacttctgttgatttaagattgtcgacgtgcttgtactagctgtctctgtctttttgatgaaatgctagctaaccacctcaagtgtgtgtactctcaaacagggcaccagaccacccttaggtgtagrttaaaactgtgcagcacatacatatggctctggggactgccatgtgctggcgatcggctgcaaggagttcccctggacgactgccatcagctgtcagccctccttagggactgtcccagctggagacaaccgtgtcacccaaggtcatgccatttccgagggcagtatgcatccagtgaaacaattctaggccccggggacaaaaatacctgccttcctggagcttggattctggtggagacagacaataaacaaagtcaacacatga

SEQ ID NO: 186343 - DNA, 609 bp, Homo sapiens
cctttaagaaataggtatgttatggacactgttagcaggaaaatgcatccatacatgcaaaaataagatttgcatataatttcagtgttctctgagtctcaaaacaagaacattttaccttatccaaccctgtagtttcataaataaataaagtcactaaaagtgtgtttttactcaggtaaccaacaaactgatatgtagcacagtggaaattcagttatgtatgtaaaaaygctattgaatactctttctacaatgccaccttgattctctttaagcatgtctcatgcaaaagtgattatccagtaaattttagctgtatccagattagagtacacacaagagtttgggataggtacacaaggggtttagtggagaacagcttctggagccaagcacacctgggctccaagctctcatacatagtagctgtgtgaccctggactacagattatctgatacaagtgtccatttcctcatctgttcatgagtgatatctctaaaatctagccctgggcctttgcagaattaggcatggtaatgcatgtaaactgcttattaaggtgcttggaacatagaattaaatattagctcaaagaagtaaaaaat

SEQ ID NO: 186344 - DNA, 561 bp, Homo sapiens
tagctcataacaataattatactagtgaaaacatcataaagaaaaatattttcataagcttaattacataccaactaaaatagtgtgttaagaactcctacaaaaagataaaatccacgagacagacaaggagaaactatttgcagaatatataaaagaaaaggcaaagccagcatatagaaaatgtttccacaaattaataaaaaaagaaaaattcacagaaaaaaataaaaacagatgacataactaatacaaactcacatacaatargggaaatagggatagaaataaaatattgtactcatcaaagtggtaaaatctgatttaaaatattaataatattgaatagactatggcaaaacaatcttccccatatactcttggagtatatgttggtgtaaatatactctggttccaaaattatacttataggtctccattctacagaaatatttacctaattgcaccaaagtataagtataaagttattccactcagaattatctctaacattgacaaaataagaacaacctatatattaggtatattttaactaaattc

SEQ ID NO: 186345 - DNA, 598 bp, Homo sapiens
tgaacaaagtaataaggtgaacaaagtaataaggtaaacatatcaattcttttcattttttatacttgagagttttcaagggttaaaacaagggttatagaaatctggcttcttcctaagtactttcaacagagaagaatagtgaccaatagtttgtagagaaaaaagccaaagagaagagttttatgtaatgtaactaccatgaattgatgctattatggtgtcactttctaaaaataagtcttcattaatatttttaaatagtttgctgtgagtaaagtatggtaggcccattaatgccccccccccaccaaatgtggctacatgcttatccctggaacctatgaacatgttatcttacatggcaagatggaattttgcagataaaattaaggttgctaatagctgacattaaaatcaggagactatcctaaattatctgatagatccaytgtaatcacatggacccttaaaagcagatgataaaggcagaaggctcaatgagataaatgtgatgagggaacaagaggcagaagaaatttgaaatttgaaagggacttgactcatagttgttggctttgacgatggacaaaggggg

SEQ ID NO: 186346 - DNA, 472 bp, Homo sapiens
agcttttgtttgcataaagagttaagttgcagaaataataaactaagttataaccgtacaaacctcatgtgactgtacacaggcaaagagaaattctttttatggttgctaatattattactttgtttcttaagtacttcaggagtccctgtttccagtaagatgcaacacatagaaacattccattttgaggcaggagaattgcttgaacccgggaggcagaggttgcagtgagccgagattgcaccattgcactccagcctgggcaacaggagtgaaatctgtctcaaaaaaaaaaaaaaaaaaaaaaagraaggaaggaaataaaaaaagagaaacattccattttaaacaaattttacacaaattttttcaagcacaaaggtacacattgatttcaggcatgaaattgaattaataattctccaccatcacataacttgaatgtggtaaaacaggttttacttacttt

SEQ ID NO: 186347 - DNA, 497 bp, Homo sapiens
tttggtttcccagggaaagcccaggaagaagttatagattgaggattaaaatgcaccatttcccctcaaatctgtcctttccaaaattattattaccataatttctgattctggccttctttctatgtattartaatgggtgataaagcgaactggggataagcatcactagtgaaaagataactatttcttaagtgaagacacatgaatctgcttttctcatgcagcttgtacacgagagtccagcaggactgtggcccacctcaacagaagaggaactgtgtgctccgtgaggatggtaagataatcattgaaagcctaggggttttgctagtgtggggcgaagacattcatggtctgtggaactgtttcgtagctcttgcaaactctctacttaaacctgagaaaaagaggcaccaatttactctgattgaattttcattcagggtacctctacttgcttcaagaatggtgacaactttttgatggaatagtca

SEQ ID NO: 186348 - DNA, 497 bp, Homo sapiens
tttggtttcccagggaaagcccaggaagaagttatagattgaggattaaaatgcaccatttcccctcaaatctgtcctttccaaaattattattaccataatttctgattctggccttctttctatgtattagtaatgggtgataaagcgaactggggataagcatcactagtgaaaagataactatttcttaagtgaagacacatgaatctgcttttctcatgcagcttgtacacgagagtccagcaggactgtggcccacctcaacagaagaggaactgtgtgctccgtgaggatggtaagataatcattgaaagcctaggggttttgctagtgtggggcgaagacattcatggtctgtggaactgtttcgtagctcttgcaaactctctacttaaacctgagaaaaagaggcaccaatttactctgaytgaattttcattcagggtacctctacttgcttcaagaatggtgacaactttttgatggaatagtca

SEQ ID NO: 186349 - DNA, 412 bp, Homo sapiens
ctacaatcttttccctttttgcttgcatcactaagaggaagaatctacatgtatatgtaacataaagaaaagaactgaggaaattaaatgtggtttcatagatagttactgcagttctccacttcacactataagtyggaacaatctcctctaaaactttgtaaacaaacacctatattttaattgcacagtgcatgcttaataaaaagccttagaaaacatctaaaatctctccccaccaaagtagtacacataatcccatcaacaagacatgaccaatattcatactgatatttcaatgaatgttttgattatgtctaggtgtatgcacacacacacatacacacacacacaaacgtgtgtgcacatatacacaactcagtaaatttcagcagcaatatgatctttaaaa

SEQ ID NO: 186350 - DNA, 412 bp, Homo sapiens
ctacaatcttttccctttttgcttgcatcactaagaggaagaatctacatgtatatgtaacataaagaaaagaactgaggaaattaaatgtggtttcatagatagttactgcagttctccacttcacactataagtcggaacaatctcctctaaaacttygtaaacaaacacctatattttaattgcacagtgcatgcttaataaaaagccttagaaaacatctaaaatctctccccaccaaagtagtacacataatcccatcaacaagacatgaccaatattcatactgatatttcaatgaatgttttgattatgtctaggtgtatgcacacacacacatacacacacacacaaacgtgtgtgcacatatacacaactcagtaaatttcagcagcaatatgatctttaaaa

SEQ ID NO: 186351 - DNA, 423 bp, Homo sapiens
ctatgttgcccaggctggaatgcagtggctattcacaggtgcaatcatagtgcactgcarcctcgaactctaggcctcaagtgtggtcctcccacatccacctctcaagtagctggtactacaggcatgtgctgccatgcccaatgagtgaatttttcagttgccttccatgtaccatgcatggagctaagatccatgtctgctgttgatggcattcctggaacagctgataaaggactcactttaaacatttttttatctgttattttgaaatattatgaatccattgctttacagtggctgacttaatcttttttctttcaaaatgccctcaccttaaaaagatttcccaaatggaatgttgaaaatttccatttgatctattaataattgttttttcctaatagcacatagcactaacag

SEQ ID NO: 186352 - DNA, 385 bp, Homo sapiens
gaattcctattttctgtttaggkggctgtccttttcaagcaaattatgaaaataaattaataagagatttaaaaaatatttatcaggacagtgacagtgatagaaccaaccaagagttcaattaatctctccatgcagttaaagtaatatcacacttacttagaacattaaactctttagaatacatatgataattcaaaagcaagttagaaatgtctctaggtagtcaaattatgagatccatggcccaaaattttcacgcctgattcaaaaatgcttgaagtctgtttgctcttatttttcaaacaactctaattatattttaaataaaaacagtggtaagaaaagtataagtgtcaaaggcaaagacagttataaaatacag

SEQ ID NO: 186353 - DNA, 616 bp, Homo sapiens
aatatagaaaaaaaatcccattcagtccctttgggtcttgtgagttaggtaaattgaggtgaagactgcatgctttcctgcttttcctctttctgttttcttcagacagagtctggctctgttgctcaggctggagtacagtgcgatctcagctcactgccacctccacctyttgggcttaaaccattctcctgcctcagcctttgagtagctgggattacagttgcatgcctccatgcccagctaatttttgtattttttatagagatggggttttgccatgttggccaggctagtcttgaactcctgaggtcaagtgatccgcctgcctcggcctccctaagtgctaggattataggcatgagcccccacacttgggccttttcagcattcttttaacagtgacatgcagaacttggagaaaaaagctgtacaaggttttgatactagaatgcagcaaataatagggcttgactctatttttttatgttttgggcaaactctaaaaggcataaaggagcaacacaaacacaaatggctctgatataattattagagagtggttcctattttgtattgccatgtaaaaattgccatgacctcagcagctgaaaaa

SEQ ID NO: 186354 - DNA, 616 bp, Homo sapiens
aatatagaaaaaaaatcccattcagtccctttgggtcttgtgagttaggtaaattgaggtgaagactgcatgctttcctgcttttcctctttctgttttcttcagacagagtctggctctgttgctcaggctggagtacagtgcgatctcagctcactgccacctccaccttttgggcttaaaccattctcctgcctcagcctytgagtagctgggattacagttgcatgcctccatgcccagctaatttttgtattttttatagagatggggttttgccatgttggccaggctagtcttgaactcctgaggtcaagtgatccgcctgcctcggcctccctaagtgctaggattataggcatgagcccccacacttgggccttttcagcattcttttaacagtgacatgcagaacttggagaaaaaagctgtacaaggttttgatactagaatgcagcaaataatagggcttgactctatttttttatgttttgggcaaactctaaaaggcataaaggagcaacacaaacacaaatggctctgatataattattagagagtggttcctattttgtattgccatgtaaaaattgccatgacctcagcagctgaaaaa

SEQ ID NO: 186355 - DNA, 616 bp, Homo sapiens
aatatagaaaaaaaatcccattcagtccctttgggtcttgtgagttaggtaaattgaggtgaagactgcatgctttcctgcttttcctctttctgttttcttcagacagagtctggctctgttgctcaggctggagtacagtgcgatctcagctcactgccacctccaccttttgggcttaaaccattctcctgcctcagcctttgagtagctgggattacagttgcatgcctccatgcccagctaatttttgtattttttatagagatggggttttgccatgttggccaggctagtcttgaactcctgaggtcaagtgatccgcctgcctcggcctccctaagtgctaggattataggcatgagcccccacacttgggccttttcagcattcttttaacagtgacatgcagaacttggagaaaaaagctgtacaagkttttgatactagaatgcagcaaataatagggcttgactctatttttttatgttttgggcaaactctaaaaggcataaaggagcaacacaaacacaaatggctctgatataattattagagagtggttcctattttgtattgccatgtaaaaattgccatgacctcagcagctgaaaaa

SEQ ID NO: 186356 - DNA, 661 bp, Homo sapiens
aaatggtacagtaataccttaaggaaccggaaaatactaaatgtctttggctatacaactaaaaggccattctttcaaaagaatagggcatattcatttcagaatcaactaaaaaaaacagaaagcataacagaaatatgcatagaatttaagtatactttgtcttgccttcttttcccattctacccacataagcaaggagaatgcaatttatataatctttccagatgagactcaatagcactacaaagaaaatacccaaatttctgcaaaggcaaagtgaattaaaataattacacaactaggtgaagactgaaagggacaaatgttatttgcaattttctttttaacttgtttktaagccttacaagtgtagaaattatagctaataaacaaaaagtcccaatcttcacaaatggaactacaatagaaaaataaatcaaatgaaacacttagtaataaatgaagcctattttattacttcaagtgttaatgataaaaaaatttcagcacagctgttgcatttaaaaaagtgaaactacatactatgtttctagctcagtaaacagatgaacctgatgtctttaaatgacataacaattgagcattgtacagtacattttatgaagacccgtaaattaaagaactactggtttaaagt

SEQ ID NO: 186357 - DNA, 661 bp, Homo sapiens
aaatggtacagtaataccttaaggaaccggaaaatactaaatgtctttggctatacaactaaaaggccattctttcaaaagaatagggcatattcatttcagaatcaactaaaaaaaacagaaagcataacagaaatatgcatagaatttaagtatactttgtcttgccttcttttcccattctacccacataagcaaggagaatgcaatttatataatctttccagatgagactcaatagcactacaaagaaaatacccaaatttctgcaaaggcaaagtgaattaaaataattacacaactaggtgaagactgaaagggacaaatgttatttgcaattttctttttaacttgtttttaagccttacaagtgtagaaattatagctaataaacaaaaagtcccaatcttcacaaatggaactacaatagaaaaataaatcaaatgaaacacttagtaataaatgaagcctattttattacttcaagtgttaatgataaaaaaatttcagcacagctgttgcatttaaaaaagtgaaactacatactatgtttctagctcagtaaacagatgaacctgatgtctttaaatgacataacaattgagcattgtacagtacatyttatgaagacccgtaaattaaagaactactggtttaaagt

SEQ ID NO: 186358 - DNA, 527 bp, Homo sapiens
acacttatgtaaacagtgagattaataattatttccaaaacaacaggctttgattggcttccagggatgctattaacaactcttagcccatacctattcaagaatgatgtcatcactttagccatttataaatcactttttagatgatataaagtgatactgaaaataacttttgctttcaactttttctccctgcccaattgttacttcatgacyttttccttccaaattagaaaacaatcaaagcctggttatttgtgggatcatgatgctatagtttgggctgctttgttattttcttaattctctactttaagaatgattttagaagatcagcttacagtataatagagaaggtaagtagctatttgtccttttgaagttggcaggtagattgattgcctggaaatctgagtgctattcaaaaccaacatattgtgttttctggttgtaataacaatatatactcattacagacatcttttaggaaaaatacaaagaaaaataacaaaaaatacaaaatacat

SEQ ID NO: 186359 - DNA, 434 bp, Homo sapiens
cttttggaagacaaacactcaggacaaaggctgtgtatcaatttgagtatgacccaccccatgtcaaagaaggaattgagtagactggctggacagatatgaaggttgtatggttcagatgaaatctaataggccattttggatctgcctcactggattcacagtagacagtgccctgtgtgaagagcgaagatgaattttctagcgacttgctagacataaaagaagacttcttttagtttatttcctctggaaagccttgtgttcccgactcctaacttagaatacactyttgaagatgttgatgtaaacgaagtttgtatctttgatggacttgtggatgaaagcattcagaagaaggtgacatttcaaaaggcccaggaatactctttcaggacagcccacttgtctgtcattccagggatacatgacca

SEQ ID NO: 186360 - DNA, 557 bp, Homo sapiens
ggtaaaaacagatgtcttccacaaagaggaaagccaaaatatcaaatgcagctgatgacaaggattatgaggaaaaaagatctctgaatttatcaatagtcctgaatgtgagaaaggcagtgggctgttctaggaaagctttgcagccaagcaaatgccaatctgaatcctggttgagcctcttcgtaatgttgtaatctctggcaaatcaaataatctctctgagcctcawctgtaaagccaaaattatgattactacctaataacttgaatacaaagattagaaaaacataggtagttatcattaacagtcttcaagagaataaacatttcagtggtgaggattgaatggagaggaaataaaaataatagaaatatacccctgatacaagaaaagtaatcaatgaaagaaaatagagaaatccgatgatagctagaagatggcatcaagctaaacttacttttaccacggcttccacctgccactatagggcagatctgtcacaataaggcagaaaatatggagacttggtagaaatagccaactgaagaaaaat

SEQ ID NO: 186361 - DNA, 633 bp, Homo sapiens
aggtacacagttgggatgaaaggaggtttaacatgttgagattaacttgttagatcatacatgtggacagtgaagcatacttgctgcagtgacagcaagtttttgaacatgagatgccatgtcattgacctttgaccaaggactacatttataattttctgtcctttccttttttcattcaataaatatttcctgagagcttattctgtgctagacactcgtcacagcctttaggtgaataatgcatttactctcaacagccgtatgaagtaagaactgttgtcatcccttgtaaagaacttttgttatcttagagatgagaaaagcaaagcactgagaggttaagaaatttaaacaaggccactgagctggcaagtagtggaaccaggattcaaacccagagagttcagcttcagatccagtgctctttaccactgcatctttaatattgtctcatccttttcatcatttagaagtgatgggctagctrtgttttcatataaggtaagggttgtcattcattcattcattcattcattcattcaacaacattaattgattgcccaggcactgttgtcatgttcacgaccatagtccccagcatccatgcagcttcctctttctctttaataa

SEQ ID NO: 186362 - DNA, 443 bp, Homo sapiens
ccaatgtcctccaggaacacactcacagacacacccagaaataatgctttaccagctctcttgatatcccttaatccagtcaggttgacacctaaaattaaccatcacgagaagagtgaagggattcactggtttgtaaatagcttggaattctgaatgaacaaatgcgatgatgcttgatgttgtggaacagctaaaccagagccacatttcagcaactggcttatacctgtgaggacttccagtgaraacacaaaatgtgccacacactgggccattcaccgtggtatgaacaatccctttctaggataagagttctgtattcaacaaattcccttgtttttacaagaaaataaatgctgaatattcatagcctgaaatgaggtaataagtgataataaacaaatctggaagatattttcaaaatgttaaattaaggtctt

SEQ ID NO: 186363 - DNA, 443 bp, Homo sapiens
ccaatgtcctccaggaacacactcacagacacacccagaaataatgctttaccagctctcttgatatcccttaatccagtcaggttgacacctaaaattaaccatcacgagaagagtgaagggattcactggtttgtaaatagcttggaattctgaatgaacaaatgcgatgatgcttgatgttgtggaacagctaaaccagagccacatttcagcaactggcttatacctgtgaggacttccagtgagaacacaaaatgtgccacacactgggccattcaccgtggtatgaacaatccctttctaggataagagttctgtattcaacaaattcccttgtttttacaagaaaataaatgcwgaatattcatagcctgaaatgaggtaataagtgataataaacaaatctggaagatattttcaaaatgttaaattaaggtctt

SEQ ID NO: 186364 - DNA, 520 bp, Homo sapiens
gcagactgttacttttattccaaaacactctccctgtcttctacttatagccctacttcatccctaggtgttagcacaggtgccacctcagttccttcttaactgatctaacctctacaaccttttcttctcagcaattttggtttgagagcaagcattgtttgtggtaaaggagatatgagaaggcagaagagccataatattgtgacttaaatgtgaccttgtgaaggagagaagaaaggaagcttggtggaattgtcccaggccaccttgcagtctagaagtttggcaaggccactggggagtccttgagtcaaaacctctaggcatggatctgccttartgtcctgttgtgctcagtcactgcctggcaccagcccatgtaagagggaggtctcctagggccattcttgaggctgtcaggagaagacattactaacagagagactataatgaataaagttatgaaagtaggaaaaggcatgccattataagaaatgtgcccagaattctagtatgg

SEQ ID NO: 186365 - DNA, 520 bp, Homo sapiens
gcagactgttacttttattccaaaacactctccctgtcttctacttatagccctacttcatccctaggtgttagcacaggtgccacctcagttccttcttaactgatctaacctctacaaccttttcttctcagcaattttggtttgagagcaagcattgtttgtggtaaaggagatatgagaaggcagaagagccataatattgtgacttaaatgtgaccttgtgaaggagagaagaaaggaagcttggtggaattgtcccaggccaccttgcagtctagaagtttggcaaggccactggggagtccttgagtcaaaacctctaggcatggatctgccttagtgtcctgttgtgctcagtcactgcctggcaccagcccatgtaagagggaggtctcctagggccattcttgwggctgtcaggagaagacattactaacagagagactataatgaataaagttatgaaagtaggaaaaggcatgccattataagaaatgtgcccagaattctagtatgg

SEQ ID NO: 186366 - DNA, 618 bp, Homo sapiens
gttaggattggctcacacaattatggaggctgagaagttgcaggacaagccatctgcaagctggagaccctgcaatgctgaaaacatcaaactcagtccaagtcagaaggcctcagagccagggaagctgatggggtaacagtccaaggccawaggcctgagaacccagggggccactggtgtaagtcttggaatttaaaggccagggagcctggagttgttgcatagggacaggagaaaaagagtgtatcccagctgcagcagacagatcaacacattcaccttttctctgtttttgttccctccagacccccagcagattaacgacaccttcccacactgagggcagttctttcctacctggtcccctcagactcacatgctaatcttctctagaaacaccctcacagacaccccaaaataattctttaccaggcttctaggtattccttaatccagtcaagttgatactaaaattgacataagactaatctggtctaaaagagaaataacaaggtaaaaatgtatagatattctagaggaggacaataactgaataactgaaatagaagacaataatagaataactgaaatagaagaattaatctgtcacagtgg

SEQ ID NO: 186367 - DNA, 618 bp, Homo sapiens
gttaggattggctcacacaattatggaggctgagaagttgcaggacaagccatctgcaagctggagaccctgcaatgctgaaaacatcaaactcagtccaagtcagaaggcctcagagccagggaagctgatggggtaacagtccaaggccaaaggcctgagaacccagggggccactggtgtaagtcttggaatttaaaggccagggagcctggagttgttgcatagggacaggagaaaaagagtgtatcccagctgcagcagacagatcaacacattcaccttttctctgtttttgttccctccagacccccagcagattaacgacaccttcccacactgagggcagttctttcctacctggtcccctcagactcacatgctaatcttctctagaaacaccctcacaracaccccaaaataattctttaccaggcttctaggtattccttaatccagtcaagttgatactaaaattgacataagactaatctggtctaaaagagaaataacaaggtaaaaatgtatagatattctagaggaggacaataactgaataactgaaatagaagacaataatagaataactgaaatagaagaattaatctgtcacagtgg

SEQ ID NO: 186368 - DNA, 618 bp, Homo sapiens
gttaggattggctcacacaattatggaggctgagaagttgcaggacaagccatctgcaagctggagaccctgcaatgctgaaaacatcaaactcagtccaagtcagaaggcctcagagccagggaagctgatggggtaacagtccaaggccaaaggcctgagaacccagggggccactggtgtaagtcttggaatttaaaggccagggagcctggagttgttgcatagggacaggagaaaaagagtgtatcccagctgcagcagacagatcaacacattcaccttttctctgtttttgttccctccagacccccagcagattaacgacaccttcccacactgagggcagttctttcctacctggtcccctcagactcacatgctaatcttctctagaaacaccctcacagacaccccaaaataattctttaccaggcttctaggtattccttaatccagtcaagttgatactaaaattgacataagactaatctggtctaaaagagaaataacaaggtaaaaatgtatagatattctagrggaggacaataactgaataactgaaatagaagacaataatagaataactgaaatagaagaattaatctgtcacagtgg

SEQ ID NO: 186369 - DNA, 593 bp, Homo sapiens
accaggcatggaggctgggtttaaaccaagacacttctatgccaagagggaagaatccaaaatcttttagtccaaacagactggtctagagctactgctttayaaaggacatggaggctgcttctgttgctgctatgaaagaatctaaacggtttcttttgtctctgtttcttgctgaagagtcacagtcccatgttggccgggcctgggacatttgcttcccttctggctggtggtgctccaaagagaaaggatgtgatctctttggtttcttcccacaaggaaaaggtagttgttgggaacctgccccgtatgatgaaagtcatctgcagtcagacgagcagcacctaaaccgggagcttgtgaaagaaaactgccagtgggtttctgaagggttcaacatgtgcctgaagtgcccagaacatgtgatcaaaacaaggaactgaaagcaacagtgagtatatggtcatttgtgttcagcattcccatagagttgaaatctaaaacaaagatctgaagttcgcaatgacttcagcagatctgaactgataagtattataaactggaaatgttcattggcaatttgaaggatt

SEQ ID NO: 186370 - DNA, 593 bp, Homo sapiens
accaggcatggaggctgggtttaaaccaagacacttctatgccaagagggaagaatccaaaatcttttagtccaaacagactggtctagagctactgctttacaaaggacatggaggctgcttctgttgytgctatgaaagaatctaaacggtttcttttgtctctgtttcttgctgaagagtcacagtcccatgttggccgggcctgggacatttgcttcccttctggctggtggtgctccaaagagaaaggatgtgatctctttggtttcttcccacaaggaaaaggtagttgttgggaacctgccccgtatgatgaaagtcatctgcagtcagacgagcagcacctaaaccgggagcttgtgaaagaaaactgccagtgggtttctgaagggttcaacatgtgcctgaagtgcccagaacatgtgatcaaaacaaggaactgaaagcaacagtgagtatatggtcatttgtgttcagcattcccatagagttgaaatctaaaacaaagatctgaagttcgcaatgacttcagcagatctgaactgataagtattataaactggaaatgttcattggcaatttgaaggatt

SEQ ID NO: 186371 - DNA, 593 bp, Homo sapiens
accaggcatggaggctgggtttaaaccaagacacttctatgccaagagggaagaatccaaaatcttttagtccaaacagactggtctagagctactgctttacaaaggacatggaggctgcttctgttgctgctatgaaagaatctaaacggtttcttttgtctctgtttcttgctgaagagtcacagtcccatgttggccgggcctgggacatttgcttcccttctggctgrtggtgctccaaagagaaaggatgtgatctctttggtttcttcccacaaggaaaaggtagttgttgggaacctgccccgtatgatgaaagtcatctgcagtcagacgagcagcacctaaaccgggagcttgtgaaagaaaactgccagtgggtttctgaagggttcaacatgtgcctgaagtgcccagaacatgtgatcaaaacaaggaactgaaagcaacagtgagtatatggtcatttgtgttcagcattcccatagagttgaaatctaaaacaaagatctgaagttcgcaatgacttcagcagatctgaactgataagtattataaactggaaatgttcattggcaatttgaaggatt

SEQ ID NO: 186372 - DNA, 594 bp, Homo sapiens
ttataaataaagatacctggagttggttaatgtcatctgactatatatatttatatatagtgactatattatatatactgactatatatttatagtcagtatagtgactatatttatatatactgactatatatttatatatagtggtagagcagagcaatttagagtggaagaggagatgatctattctcggcatcttggaactcttccgtgatgtcacatgtcacctgatcactgaaagataagtaggggttagtgaggcaaaattaggaactgaggagtatcattgcraaaagaatttcatgcaaacgcaagcagatgcaaaggccctgaagtagaaggagccaatgtgggtgaggtttactcttttccttagtttggtcctttggtttcatgaagcttaattaatttggagcataagtagtactacggcctatgggttgctcttcaggatctcctctagttttgatgaactcagtgttaatgctactgataacctttttgttttaaagtaaatcctacaaatttggaacctcacacagaagcagctgctattgcagatgcttttgattctggggtgtaggaagccccact

SEQ ID NO: 186373 - DNA, 594 bp, Homo sapiens
ttataaataaagatacctggagttggttaatgtcatctgactatatatatttatatatagtgactatattatatatactgactatatatttatagtcagtatagtgactatatttatatatactgactatatatttatatatagtggtagagcagagcaatttagagtggaagaggagatgatctattctcggcatcttggaactcttccgtgatgtcacatgtcacctgatcactgaaagataagtaggggttagtgaggcaaaattaggaactgaggagtatcattgcgaaaagaatttcatgcaaacgcaagcagatgcaaaggccctgaagtagaaggagccaatgtgggtgaggtttactcttttccttagtttggtcctttggtttcatgaagcttaattaatttggagcataagtagtactacggcctatgggttgctcttcaggatctcctctagttttgatgaastcagtgttaatgctactgataacctttttgttttaaagtaaatcctacaaatttggaacctcacacagaagcagctgctattgcagatgcttttgattctggggtgtaggaagccccact

SEQ ID NO: 186374 - DNA, 401 bp, Homo sapiens
ccttcgcattcacgatgctttcaaccatcagaactggttggatccttttacaacaaaacagaaaatcatctttctctcctatttaataggctttcaaacattagaagatcaatattctgttgccattaaaatttctcttctgtaccacgtaaagttctgattaatcactcttcaagccagttttacatrttcctctgtcttctaggcaccttctgtagacaggctacaataaggcagccatcttaaattatgtcaatacattgtccaaaaatgagctaaacagttcaggtttcatctgatatgttcagggaaaagcaaaactatcacttctccccttctcttttccttcagtgatgcaggttaatacaacaatggctgtagctatgcaccaaagatatcat

SEQ ID NO: 186375 - DNA, 559 bp, Homo sapiens
taactcttctacccacgaccacctggttacacatgtcctgctgtggcaaagtcacctccatgttgccaaaaccagtggtcactatttagcccttatatttctttatcttttaaaataatgtttttgttttttttgttttgttttgttttttttcgagacggagtctcactctgtcaccaggctggagtgcagtggcgcaatctcggctcactgcaacctccgactccctggttcaagtgattctcctgcttcagcctcctgagtagctgggattacaggcacatgcctccatgcccagctaatttttgtatttttagtagatacggggtttcaccatgttggccaggatggtctcgaactcctgacctcatgatccacctgcctyggcttcccaaagtgttgggattacaagcgtgagccaccatgcctggccaagataatgttttaacctataaacaaaagtttcattatttattttggaaaatataaaaaaagcacaaaaagtactttcactagtagtcccaatccctggagagaatgactattaacattttcaggt

SEQ ID NO: 186376 - DNA, 480 bp, Homo sapiens
taatagtttttgtgatgtgtgcagtcatctcacagatataaaccattcttttgattgagcagttttggaactctctttttgcagaatctgcaagtggacatttggagcgctttgaggcctatggtggaagaggaaatatgttcacataaaaactagacagaagaatactgacaaacttctttgttatttgtgcattcatctcactgagttgagcctttcttttgattgagcagtttggaaacaatctttttgtagactctgcaagtggacatttggagcacattgcatcctgtggttgacaaggaaatattttcacataaattgtagacagaagcaatctgagaaacttctttgtgatgtgtgcgttcatctcacagagttgaacstttattttgatagagcagtttggaaacactctttttgtagaatctgcaagtgaacgtttagagcgctttgcgtcctctgttagaaaaggaaata

SEQ ID NO: 186377 - DNA, 474 bp, Homo sapiens
aacttctttgtgatgtgtgcattcatctcaagaagttaaacctttattttcattgagtagttttgaaactctcttttgyagaatctgcaagtggacatttggagtgctttgaggcctatagtgcaaaaggaaatatcttcacataaacactagatagaagcattctgagaaacttctttgtgatgtgtgcattcatctctcagagttgaagctttcttttggtggaacagttttgaaatactctttttgtaggatctgcaagtggacattttgagagccttcaggcctaaggtggaaaaggaagtatcttcatataaaaactagacagaagaattctgacaaacttctttgtgatgagtgcgttcatctcacagagttgaacatttcttttgattaagcagtttggaaacactctttttgtagaatctgcaagtggacatttggaaagctttgtggcctatggtagaaaaggaa

SEQ ID NO: 186378 - DNA, 594 bp, Homo sapiens
acctttcttttgattcagcagttttgaaactgtcgttttgtagaatctgcaaagggatatttgtgagcccattgaggcttctggggagataggaaatatcttcacataacaactagacagatactttctgagaaactattttgtcatgtgtkacttcaactcaccgggttgaaactttctcttgattgagcagtttgggaacagtctttttgtagaatctgcaaatgaatatttggagcacttttggcctatgttgaaaaatgaagtatctttccataaaaactaggcagaagcttttggagaaatttctttgtgatgtgtgcattcatctcacacagttgaacttttcttttgattgagcagtgtggaaacactctttttgtagagtctgcaagtggatattttgagtgctttgtggcctatagtgaaaaaggaaatatcttcacataaaaactggacagaagaattctgagaaacttcctttgaatgtgtgcattcatctcacagtgttgaacttttttcttgattgagcagcttctaaacagtcattttgtagaatatgcaaaggaatatttgtgagcccattgatgcctc

SEQ ID NO: 186379 - DNA, 539 bp, Homo sapiens
atatcttcatataaaaactagacagaagcattctgagaaacttctttgtgttgtgggcattcatctcacagagttggattttgtttttgttgagcagcttggaaacactctttttgtagagtctgccattggatatttggagcgctgtcaatcctatggtggaaaaggtcttattttcacataagaactataaagcaggttttctaaaaacaaccttgtgatgtgtgcattcatctcacagaggtaagtgtttcttttctgcaatcagtctggaaactccgttcttgtacaatctcaaagagggtatttttgagcactttgaggcctattgkgacaaaggaaatatcttcacattcaacgcataaagaacgtttctgagattcttctttgtgatatgtgcattcatctcccagatttgaacgtctcttttaattcagccgtttggaaacagtctttttgaagaatctgcaaacggatatttgtgagcactttgaggcctatgcaggaaaagaagtatcttcacagaaaaatataaagaa

SEQ ID NO: 186380 - DNA, 426 bp, Homo sapiens
atttgtgagcactttgaggcctatgcaggaaaagaagtatcttcacagaaaaatataaagaaggtttctgggaaactgttttttgatgtctgcattcatttcacagaggtaaacaattcttttcttgwtcaattgtgaaactctgttcttgtaggatctgctaagggacatttttgagtgcctagagccctgtggtgaaaaagatattgtcttcacataaaaactagacagaggcctactgagaaacttcttggtgatgtgtgcattcatctcacagaattgtaactttcttttgattaagcagtttagaaacgtcttttgtggaatctgtaaagggatatttctggtcactttgaggactatggtgaaagagaaagtatcacctactgagaaactgcttggtgatgtgtgcattcatctcacaga

SEQ ID NO: 186381 - DNA, 426 bp, Homo sapiens
atttgtgagcactttgaggcctatgcaggaaaagaagtatcttcacagaaaaatataaagaaggtttctgggaaactgttttttgatgtctgcattcatttcacagaggtaaacaattcttttcttgttcaattgtgaaactctgttcttgtaggatctgctaagggacatttttgagtgcctagagccctgtggtgaaaaagatattgtcttcacataaaaactagacagaggcctactgaraaacttcttggtgatgtgtgcattcatctcacagaattgtaactttcttttgattaagcagtttagaaacgtcttttgtggaatctgtaaagggatatttctggtcactttgaggactatggtgaaagagaaagtatcacctactgagaaactgcttggtgatgtgtgcattcatctcacaga

SEQ ID NO: 186382 - DNA, 538 bp, Homo sapiens
tgcttggtgatgtgtgcattcatctcacagaattgaaactttcttttgattaagcagtttggaaacgtctttttgtggaatctgtaaggggaaatttctgagcactttgaggcctatggtgaaagagaaagtatcttcaygtaaaaactagactaaagatttctgagaaactgctttgtgatgtatgtattcatctcacagagttcaacaattcttttgattgagcagttgggaaaccatctttttgtagaatctgcaaagggatatttgtgagcactttgaggtctatggttaaaaggaaatatcttcacataaaaactataaagaaggtttgtgagaaacttctttatgatgtgtgcattcatctcacagagttgaaccactcctttgactcagcggtttggaaacagtctttttttaggatctgcaaagggatatttttgagcactttgaggcccatggtgaaaaaggaaacacttacacataaaaaaaacatagaagttttctgagaatcatctttttgatatgtgcattcatc

SEQ ID NO: 186383 - DNA, 578 bp, Homo sapiens
ggaaacaacctaaaaagtctattgagggacgatggataaacaaaatgtggtatagacataaaatggaatattagtgatctttaaaaagggagggaattctgatacttgctaccacatagataaaacttaaaaacattatgctaagtgagacgtcaaacacagactacgtgattccatctatatgaagaacctggaacaggcaaattaatagagacacaaagtagaatagaggttttcaggactggcaggaggtagaaatgggcggggttagtgtctaatgggcacagagttcctgtctgggatgatagaatgtttcaraaatggatagtggtgatgattgcacagcattgtgaatgtagctaatgacattgaattatttaccagaaaacaaaagcaaaaacagaaacattgcttaagcttcccagtcagacaggtgatgtgcttggtgtgagctggggcctgaaaccaggctgccctagccagagcgggttcaaaacccctcttcattgtacttaggcctgattgctctggagagccccatacgtgaaagccagctctggttctatctcttctcactc

SEQ ID NO: 186384 - DNA, 578 bp, Homo sapiens
ggaaacaacctaaaaagtctattgagggacgatggataaacaaaatgtggtatagacataaaatggaatattagtgatctttaaaaagggagggaattctgatacttgctaccacatagataaaacttaaaaacattatgctaagtgagacgtcaaacacagactacgtgattccatctatatgaagaacctggaacaggcaaattaatagagacacaaagtagaatagaggttttcaggactggcaggaggtagaaatgggcggggttagtgtctaatgggcacagagttcctgtctgggatgatagaatgtttcaaaaatggatagtggtgatgattkcacagcattgtgaatgtagctaatgacattgaattatttaccagaaaacaaaagcaaaaacagaaacattgcttaagcttcccagtcagacaggtgatgtgcttggtgtgagctggggcctgaaaccaggctgccctagccagagcgggttcaaaacccctcttcattgtacttaggcctgattgctctggagagccccatacgtgaaagccagctctggttctatctcttctcactc

SEQ ID NO: 186385 - DNA, 351 bp, Homo sapiens
tcaggcacccagcaggtggtaataaatgctggttgaacactaaaaccttggaatgctacatcattattctaaaggatagtcattttttaaaacattttggaagttcttttgaaackgactttttagattatgaaaatatctcagtgataggttttgattttccaagttagaccttattttattttagaaaccgtcaaagttatacaaaaccaagcatgtgtctctgcgcattttgttttctctcctcccttaatggtaaggaagggtttcatctcttttataggccaaatgctccacaaatgaatgtgttaacgaatgaacaaattaataaatggcaagaatgagagctca

SEQ ID NO: 186386 - DNA, 562 bp, Homo sapiens
gtttcatttcaacaaaacacccttcctagttgtttgaaccccaagagaaatatgaggacaggccccaccttccattacaaaagctgaaagggaktgcatgatcctttttccagtttcttggccattcacgtgtgggcacatatctaggcccagccaactgatggctctttattagaacttggaacccgatgaaatgatgcaaaagacctgaaagaatcagagatgattctgagaaattgagcagagatacaggtccaggaacgtggcagcaagtgcctaagttcagcagagcccagctacatggtgacaagtgtcaaatgacaacattctagtggtggcattccaagatctgcttccgtcgaatgaacttggctgtgctgagtttccctcagttcttaccttgcttctccaacatcttcaatgattttgtgaactattcaatatcctttcattgaagtcctgttttgcttaagttgtctagaatttgttattttcagtgaaaaatataaaccaattatcccctcacattaaaacacactcctcttaggcatctcctctgatc

SEQ ID NO: 186387 - DNA, 562 bp, Homo sapiens
gtttcatttcaacaaaacacccttcctagttgtttgaaccccaagagaaatatgaggacaggccccaccttccattacaaaagctgaaagggattgcatgatcctttttccagtttcttggccattcacgtgtgggcacatatctaggcccagccaactgatggctctttattagaacttggaacccgatgaaatgatgcaaaagacctgaaagaatcagagatgattctgagaaattgagcagagatrcaggtccaggaacgtggcagcaagtgcctaagttcagcagagcccagctacatggtgacaagtgtcaaatgacaacattctagtggtggcattccaagatctgcttccgtcgaatgaacttggctgtgctgagtttccctcagttcttaccttgcttctccaacatcttcaatgattttgtgaactattcaatatcctttcattgaagtcctgttttgcttaagttgtctagaatttgttattttcagtgaaaaatataaaccaattatcccctcacattaaaacacactcctcttaggcatctcctctgatc

SEQ ID NO: 186388 - DNA, 562 bp, Homo sapiens
gtttcatttcaacaaaacacccttcctagttgtttgaaccccaagagaaatatgaggacaggccccaccttccattacaaaagctgaaagggattgcatgatcctttttccagtttcttggccattcacgtgtgggcacatatctaggcccagccaactgatggctctttattagaacttggaacccgatgaaatgatgcaaaagacctgaaagaatcagagatgattctgagaaattgagcagagatacaggtccagraacgtggcagcaagtgcctaagttcagcagagcccagctacatggtgacaagtgtcaaatgacaacattctagtggtggcattccaagatctgcttccgtcgaatgaacttggctgtgctgagtttccctcagttcttaccttgcttctccaacatcttcaatgattttgtgaactattcaatatcctttcattgaagtcctgttttgcttaagttgtctagaatttgttattttcagtgaaaaatataaaccaattatcccctcacattaaaacacactcctcttaggcatctcctctgatc

SEQ ID NO: 186389 - DNA, 562 bp, Homo sapiens
gtttcatttcaacaaaacacccttcctagttgtttgaaccccaagagaaatatgaggacaggccccaccttccattacaaaagctgaaagggattgcatgatcctttttccagtttcttggccattcacgtgtgggcacatatctaggcccagccaactgatggctctttattagaacttggaacccgatgaaatgatgcaaaagacctgaaagaatcagagatgattctgagaaattgagcagagatacaggtccaggaacgtggcagcaagtgcctaagttcagcagagcccagctacatggtgacaagtgtcaaatgacaacattctagtggtggcattccaagatctgcttccgtcgaatgaacttggctgtgctgagtttccctcagttcttaccttgcttctccarcatcttcaatgattttgtgaactattcaatatcctttcattgaagtcctgttttgcttaagttgtctagaatttgttattttcagtgaaaaatataaaccaattatcccctcacattaaaacacactcctcttaggcatctcctctgatc

SEQ ID NO: 186390 - DNA, 572 bp, Homo sapiens
gatgggtgtagatatagacatccaattctgccatttcacactagtcagaataccagtcatagaaatcccacaggaaaaatcatttctgaaggtatctggtcttatggattataaaattaaactttcttatcattgtacctaaaccgaaatatgcttcctatacaaagaaggtttctttcaagagttaagaccacctcccgccatcccccttaacacacacacacacacacacacacacacasagagagagagagagagagagaaagagagagagagaattgagagcattagtggttttctcccttagactgattttttcttgctgttatttttagccactttgttaacggtggggttaaagggcaggatagatgtaacacccatttaacatacatgttgcaacatcagagatgctagtcttcgttaaaaatactagttctaaattccttctaaaatatatttttaaaaatcagtacacttggtaccttggaaatgctgaaatgttatcatgaatgctggttatttgttatgagtcaactgactattatcttcaatataaactataatttact

SEQ ID NO: 186391 - DNA, 248 bp, Homo sapiens
gaattctgtaaatatacacaatagggtaggaatgagaaaatctttagaggaaatattcaagtaygtttgatttctagcaaatccagatagacagttttgttaacaaccaagtcataattttaagtcttgttataggagctagaattttattcaagggacaactgatttgattagattagatgctgtgcactgcatgtttccttcaacaaatgcacaagttgaaactctaacaatagaatggcattaga

SEQ ID NO: 186392 - DNA, 248 bp, Homo sapiens
gaattctgtaaatatacacaatagggtaggaatgagaaaatctttagaggaaatattcaagtacgtttgatttctagcaaatccagatagacagttttgtyaacaaccaagtcataattttaagtcttgttataggagctagaattttattcaagggacaactgatttgattagattagatgctgtgcactgcatgtttccttcaacaaatgcacaagttgaaactctaacaatagaatggcattaga

SEQ ID NO: 186393 - DNA, 419 bp, Homo sapiens
taggaatgagaaaatctttagaggaaatattcaagtacgtttgatttctagcaaatccagatagacagttttgttaacaaccaagtcataattttaagtcttgttataggagctagaattttattcaagggacaactgatttgattagattagatgytgtgcactgcatgtttccttcaacaaatgcacaagttgaaactctaacaatagaatggcattagaaggaggacctttgggaagtaatttggttttgatgaggatggagtccccacaatggggttagcatcctaataagaagagtaggagactagagccctcttctctcagccatgtgaagataaaacaagaacacctgcaaaccagtaagagggccttcaccagacactggctctgctggcccagattttaatctttgaatt

SEQ ID NO: 186394 - DNA, 381 bp, Homo sapiens
atattcaagtacgtttgatttctagcaaatccagatagacagttttgttaacaaccaagtcataattttaagtcttgttataggagctagaattttattcaagggacaactgatttgattagattagatgctgtgcactgcatgtttccttcaacaaatgcacaagttgaaactctaacaatagaatggcattagaaggaggacctttgggaagtaatttggttttgatgaggatggagtccycacaatggggttagcatcctaataagaagagtaggagactagagccctcttctctcagccatgtgaagataaaacaagaacacctgcaaaccagtaagagggccttcaccagacactggctctgctggcccagatttt

SEQ ID NO: 186395 - DNA, 407 bp, Homo sapiens
taagaattctgtaaatatacacaatagggtaggaatgagaaaatctttagaggaaatattcaagtacgtttgatttctagcaaatccagatagacagttttgttaacaaccaagtcataattttaagtcttgttataggagctagaattttattcaagggacaactgatttgattagattagatgctgtgcactgcatgtttccttcaacaaatgcacaagttgaaactctaacaatagaatggcattagaaggaggacctttgggaagtaatttggttttgatgaggatggagtccccacaatggggttagcatcctaataagaagagtaggagactagagccctcttctctcagccatgtgaagatamaacaagaacacctgcaaaccagtaagagggccttcac

SEQ ID NO: 186396 - DNA, 627 bp, Homo sapiens
ttcatagatacaatgaggatataggcattgggtaaatrcacctggtccaaatgggagaaattggccaaaatgaagggactgcacgccccatgcaagtccaaaattcaatgggtcagtcaaatcttgaagctctgaaatgatttcctttgacttcatgtctcacatccaggtcatgctgaagcaagaggtgggatctcatggccttgggcagctccacccctgttgctttgcagggtacagccctccttctggctgctttcacaggctggtgctgagtgtctgtggcttttccaggcaatacagtgtaagctgtcagtgtatctaccattctggagtctggaggatggtggccctcttctctcagctccactaggcagtgccccagtggggactctgtgggggctctaacaccacatttcccttctgcactcactgccctagcagaggttccccatgagggctccgtccccatcacaaatttgtgcctgaacacccaggcgtttccatgcatcctctgaaatttaggtgtagatacccaaacctcaattcttgacttctgtgcacccacaggcccaacgcctcatgtaagctgtcaaggcttgggccttgtaccctctgaagccatgg

SEQ ID NO: 186397 - DNA, 552 bp, Homo sapiens
agctgtcaaggcttgggccttgtaccctctgaagccatggcctgagctggacattggccctttagccatgattgggacacagggcgccaagtcctgagactgcacagagcagcaagtccctgcaccgagcccattaaaccattttttttcctcctaggcctcctggtctgtgatggtttgagttgctgtgaaggtctctgacattccctgaagacattttcccattgtcttggtgattaatatttagctcctcgttacttatgcaaatttctgcagctggcttgaatttctctccagaaaatgggttttccttttctatctcatcatcaacctgcaaaatttttaaaacttttatgctttgcttcctcttgaacactttgctacttaggaatttattctgccagataccctaaaccatgtctctcaagtttaaagttccacagatttctagggcaggggcaaaatgccatcagtctctttgcakagcaagagtcacctttattccagttcccaacaagttcttcgtctccatatgaggccacctcagcctgg

SEQ ID NO: 186398 - DNA, 538 bp, Homo sapiens
ctcattcactatcatgagaacagcatgggggtaattgcctccatgattcaattacctcccactgggtccccatcatgatatgtgaggattatgggaactacaattcaagatgagatttggttggagacacagccaaaccatawcatggggtctcactttattgccccggctgatttcaaactcctgggctcaagtgaccctcctgacttggcctcccaaagtgctgggaatacaggcatgagccaccatacccagtcctaaagtctaaattcttaacatctaaaatccagaaaatcacactcacaggagagttgtaccaagttagttgcatcgtgttaggtacaactgttgctttgttttctttttatttggaaattatatatggtttaaggaggtccatatgggtgccaaatctgcaaggggtggacttgcaggcttaatttcaggtgtcaacttgactggattaaggaatccctggaaagctgggaaagcattattttgggtatgtctgtgatggttttctcagaagagatcagtg

SEQ ID NO: 186399 - DNA, 251 bp, Homo sapiens
aaaatcacactcacaggagagttgtaccaagttagttgcatcgtgttaggtacaactgttgctttgttttctttttatttggaaattatrtatggtttaaggaggtccatatgggtgccaaatctgcaaggggtggacttgcaggcttaatttcaggtgtcaacttgactggattaaggaatccctggaaagctgggaaagcattattttgggtatgtctgtgatggttttctcagaagagatcagtgtgt

SEQ ID NO: 186400 - DNA, 516 bp, Homo sapiens
tcacttaattttcatttctctaactatcattgattctgagctttttctcatacacttsttggcctcatgtatgtcttctttcgaaaactgtccgttcatgtctttgcccactttttaatggggttgtttttcttttgtaaatttaagttccttatagatgctagatattagacctttgttagatggatagtttacaaatattttttttccactccataggttttctgtttactctgttaatagttttttttttctgctatgcaaaatctctttactttaattaaatcctacttgttaatttttgcttttcttgctgttgcttttggtctttctatcatgaaatctttgcccattcctatatccaggatggtattgcctggaatgtctttcatggtttttatacataaagattttatatttaagtcttcaatcagtcttgagttgatttttttttgtatatgatgtaaataaggggtccagcttcaatcttccacatgttgccagccaattattcca

SEQ ID NO: 186401 - DNA, 540 bp, Homo sapiens
gggagcctgtactccagctactttggaggctgacacaggagaatcacttgaacaatcccacaacamaaaacaacaaaagttagtcttcatgtcaaaaatcttcaatggattttttttcatcacaggattgtttagtgcaacattttatggaaaagatgcatgctactgagatgtagttctataaaagtctcttagagtttgtcattttgttgtgtcttacatcacatacctgtcctgttccaggctatttttcaaagatttttgtacacaaataacctggaaaaagggtagtagtttttctcttcaggtgaatggcagataaattactcaatcaatataataaagacaatttttctctgtgaggcaaaggttggacaggtttgcatgtaacctactttaagaagattgaggtttcttagtcttgagtctgctcagctgtgacacaaatcttccccatgtgcaatgtccatctgagccttttgaaatccctctaaaaaatgtagtatggacaaggagaactaatacaaaaatgaggctttt

SEQ ID NO: 186402 - DNA, 540 bp, Homo sapiens
gggagcctgtactccagctactttggaggctgacacaggagaatcacttgaacaatcccacaacacaaaacaacaaaagttagtcttcatgtcaaaaatcttcaatggattttttttcatcacaggattgtttagtgcaacatwttatggaaaagatgcatgctactgagatgtagttctataaaagtctcttagagtttgtcattttgttgtgtcttacatcacatacctgtcctgttccaggctatttttcaaagatttttgtacacaaataacctggaaaaagggtagtagtttttctcttcaggtgaatggcagataaattactcaatcaatataataaagacaatttttctctgtgaggcaaaggttggacaggtttgcatgtaacctactttaagaagattgaggtttcttagtcttgagtctgctcagctgtgacacaaatcttccccatgtgcaatgtccatctgagccttttgaaatccctctaaaaaatgtagtatggacaaggagaactaatacaaaaatgaggctttt

SEQ ID NO: 186403 - DNA, 540 bp, Homo sapiens
gggagcctgtactccagctactttggaggctgacacaggagaatcacttgaacaatcccacaacacaaaacaacaaaagttagtcttcatgtcaaaaatcttcaatggattttttttcatcacaggattgtttagtgcaacattttatggaaaagatgcatgctactgagatgtagttctataaaagtctcttagagtttgtcattttgttgtgtcttacatcacatacctgtcctgttccaggctatttttcaaagatttttgtacacaaataacctggaaaaagggtagtagtttttctcttcaggtgaatggcagataaattactcaatcaatataataaagacaatttttctctgtgaggcaaaggttggacaggtttgyatgtaacctactttaagaagattgaggtttcttagtcttgagtctgctcagctgtgacacaaatcttccccatgtgcaatgtccatctgagccttttgaaatccctctaaaaaatgtagtatggacaaggagaactaatacaaaaatgaggctttt

SEQ ID NO: 186404 - DNA, 540 bp, Homo sapiens
gggagcctgtactccagctactttggaggctgacacaggagaatcacttgaacaatcccacaacacaaaacaacaaaagttagtcttcatgtcaaaaatcttcaatggattttttttcatcacaggattgtttagtgcaacattttatggaaaagatgcatgctactgagatgtagttctataaaagtctcttagagtttgtcattttgttgtgtcttacatcacatacctgtcctgttccaggctatttttcaaagatttttgtacacaaataacctggaaaaagggtagtagtttttctcttcaggtgaatggcagataaattactcaatcaatataataaagacaatttttctctgtgaggcaaaggttggacaggtttgcatgtaacctactttaagaagattgaggtttcttagtcttgagtctgctcagctgtgacacaaatcttccccatgtgcaatgtccatctgagccttttgaaatccctctaaaaaatgtagtatggacaaggaraactaatacaaaaatgaggctttt

SEQ ID NO: 186405 - DNA, 524 bp, Homo sapiens
ttgtcattttgttgtgtcttacatcacatacctgtcctgttccaggctatttttcaaagatttttgtacacaaataacctggaaaaagggtagtagtttttctcttcaggtgaatggcagataaattactcaatcaatataataaagacaatttttctctgtgaggcaaaggttggacaggtttgcatgtaacctactttaagaagattgaggtttcttagtcttgagtctgctcagctgtgacacaaatcttccccatgtgcaatgtccatctgagccttttgaaatccctctaaaaaatgtagtatggacaaggagaactaatacaaaaatgaggcttttgcctccaggtagacagtaaatagtaggtttttttttcatacttcagtgyctcatgccttctaccagcatccatgaaaatggaaggttaataggttcgtttacaaataggatgaaatcttagatccttcacaattatttaattttggagatgacaatgggatgctgagataaacgcaactttc

SEQ ID NO: 186406 - DNA, 524 bp, Homo sapiens
ttgtcattttgttgtgtcttacatcacatacctgtcctgttccaggctatttttcaaagatttttgtacacaaataacctggaaaaagggtagtagtttttctcttcaggtgaatggcagataaattactcaatcaatataataaagacaatttttctctgtgaggcaaaggttggacaggtttgcatgtaacctactttaagaagattgaggtttcttagtcttgagtctgctcagctgtgacacaaatcttccccatgtgcaatgtccatctgagccttttgaaatccctctaaaaaatgtagtatggacaaggagaactaatacaaaaatgaggcttttgcctccaggtagacagtaaatagtaggtttttttttcatacttcagtgtctyatgccttctaccagcatccatgaaaatggaaggttaataggttcgtttacaaataggatgaaatcttagatccttcacaattatttaattttggagatgacaatgggatgctgagataaacgcaactttc

SEQ ID NO: 186407 - DNA, 577 bp, Homo sapiens
tcttagagtttgtcattttgttgtgtcttacatcacatacctgtcctgttccaggctatttttcaaagatttttgtacacaaataacctggaaaaagggtagtagtttttctcttcaggtgaatggcagataaattactcaatcaatataataaagacaatttttctctgtgaggcaaaggttggacaggtttgcatgtaacctactttaagaagattgaggtttcttagtcttgagtctgctcagctgtgacacaaatcttccccatgtgcaatgtccatctgagccttttgaaatccctctaaaaaatgtagtatggacaaggagaactaatacaaaaatgaggcttttgcctccaggtagacagtaaatagtaggtttttttttcatacttcagtgtctcatgccttctaccagcatccatgaaaatggaagrttaataggttcgtttacaaataggatgaaatcttagatccttcacaattatttaattttggagatgacaatgggatgctgagataaacgcaactttctgaaaggggaaaatacacaaatacttgaagagcttgcaagggtt

SEQ ID NO: 186408 - DNA, 524 bp, Homo sapiens
ttgtcattttgttgtgtcttacatcacatacctgtcctgttccaggctatttttcaaagatttttgtacacaaataacctggaaaaagggtagtagtttttctcttcaggtgaatggcagataaattactcaatcaatataataaagacaatttttctctgtgaggcaaaggttggacaggtttgcatgtaacctactttaagaagattgaggtttcttagtcttgagtctgctcagctgtgacacaaatcttccccatgtgcaatgtccatctgagccttttgaaatccctctaaaaaatgtagtatggacaaggagaactaatacaaaaatgaggcttttgcctccaggtagacagtaaatagtaggtttttttttcatacttcagtgtctcatgccttctaccagcatccatgaaaatggaaggttaataggttygtttacaaataggatgaaatcttagatccttcacaattatttaattttggagatgacaatgggatgctgagataaacgcaactttc

SEQ ID NO: 186409 - DNA, 520 bp, Homo sapiens
atactgactcaccttttctaaaaagacaactgattttcttatgcttttaakttcaaatttatcttgtctccttttgattaattaaaataacagttatgaaaaaccttaacagaaaatattatttattgaatcagaagagaaacaggaaatactgtgctttcttgagcctgtttcctataccccaatatcataagaattgttgttgcttctataatgttcagctgcaaattattttgcttgatcaatcaaaatgaattacctgaattttctcctcttgttcaaaatggagccacattcatccacctacccctagccctaggactgtttctttcattccgatagtttgtgatatccttgacttcacagcagaaagctgtgagtctcccaaaccccttcactcaggtcccgtggggcctgccctctaaagtctcttcagtcttctttctttgttcatggccaccttgtcgtttagactcttatccctgactgtaagagatctctcgggtcttcctgcctgtgg

SEQ ID NO: 186410 - DNA, 520 bp, Homo sapiens
atactgactcaccttttctaaaaagacaactgattttcttatgcttttaatttcaaatttatcttgtctccttttgattaattaaaayaacagttatgaaaaaccttaacagaaaatattatttattgaatcagaagagaaacaggaaatactgtgctttcttgagcctgtttcctataccccaatatcataagaattgttgttgcttctataatgttcagctgcaaattattttgcttgatcaatcaaaatgaattacctgaattttctcctcttgttcaaaatggagccacattcatccacctacccctagccctaggactgtttctttcattccgatagtttgtgatatccttgacttcacagcagaaagctgtgagtctcccaaaccccttcactcaggtcccgtggggcctgccctctaaagtctcttcagtcttctttctttgttcatggccaccttgtcgtttagactcttatccctgactgtaagagatctctcgggtcttcctgcctgtgg

SEQ ID NO: 186411 - DNA, 520 bp, Homo sapiens
atactgactcaccttttctaaaaagacaactgattttcttatgcttttaatttcaaatttatcttgtctccttttgattaattaaaataacagttatsaaaaaccttaacagaaaatattatttattgaatcagaagagaaacaggaaatactgtgctttcttgagcctgtttcctataccccaatatcataagaattgttgttgcttctataatgttcagctgcaaattattttgcttgatcaatcaaaatgaattacctgaattttctcctcttgttcaaaatggagccacattcatccacctacccctagccctaggactgtttctttcattccgatagtttgtgatatccttgacttcacagcagaaagctgtgagtctcccaaaccccttcactcaggtcccgtggggcctgccctctaaagtctcttcagtcttctttctttgttcatggccaccttgtcgtttagactcttatccctgactgtaagagatctctcgggtcttcctgcctgtgg

SEQ ID NO: 186412 - DNA, 520 bp, Homo sapiens
atactgactcaccttttctaaaaagacaactgattttcttatgcttttaatttcaaatttatcttgtctccttttgattaattaaaataacagttatgaaaaaccttaacagaaaatattatttattgaatcagaagagaaacaggaaatactgtgctttcttgagcctgtttcctataccccaatatcataagaattgttgttgcttctataatgttcagctgcaaattattttgcttgatcaatcaaaatgaattacctgaattttctcctcttgttcaaaatggarccacattcatccacctacccctagccctaggactgtttctttcattccgatagtttgtgatatccttgacttcacagcagaaagctgtgagtctcccaaaccccttcactcaggtcccgtggggcctgccctctaaagtctcttcagtcttctttctttgttcatggccaccttgtcgtttagactcttatccctgactgtaagagatctctcgggtcttcctgcctgtgg

SEQ ID NO: 186413 - DNA, 595 bp, Homo sapiens
ccttaacagaaaatattatttattgaatcagaagagaaacaggaaatactgtgctttcttgagcctgtttcctataccccaatatcataagaattgttgttgcttctataatgttcagctgcaaattattttgcttgatcaatcaaaatgaattacctgaattttctcctcttgttcaaaatggagccacattcatccacctacccctagccctaggactgtttctttcattccgatagtttgtgatatccttgacttcacagcagaaagctgtgagtctcccaaaccccttcactcaggtcccgtggggcctgccctctaaagtctcttcagtcttctttctttgttcatggccaccttgtcgtttagactcttatccctgactgtaagagatctctcgggtcttcctgcctgtggccatgcctaatttgtacccttcctaaaatgtgatgtgatcatgtcactgccttgcttagaagccctgcactggmgtccaacacgtgcagaatcaagtgcttgctgtttaacatggtctacccagtcctccagattctggcttccagttattttctcagcctcagaaaagcacctcgct

SEQ ID NO: 186414 - DNA, 424 bp, Homo sapiens
ggttaccctaaaatgtatatgaaaaggmaaacaaattaggatagctaaaattattttgtaaaatatgaagaaagtgagaggaattaatctatgtgatttcaagacttagtaatcaacactgtggtactggcagacagataaaaacacagaccaatggaacaaaataaagaactcccaaatatactcacacaattatgcctcactgactttttccaaaggtgcaaaagtaataaaatggaggaaatacagaactttcaacaaacgttactggagcgattggacagctgtaggccaaaaaaagaaaacaaacaaacattggcctaaacctcacaccttgtacaaaagtaagcataaataaatcataaacaaatataaaatctgaaattataaaacttttagaaaaaatgtatgagaaaaatcttct

SEQ ID NO: 186415 - DNA, 597 bp, Homo sapiens
aatctatgtgatttcaagacttagtaatcaacactgtggtactggcagacagataaaaacacagaccaatggaacaaaataaagaactcccaaatatactcacacaattatgcctcactgactttttccaaaggtgcaaaagtaataaaatggaggaaatacagaactttcaacaaacgttactggagcgattggacagctgtaggccaaaaaaagaaaacaaacaaacattggcctaaacctcacaccttgtacaaaagtaagcataaataaatcataaacaaatataaaatctgaaattataaaacttttagaaaaaatgtatgagaaaaatctkctggatcaaggctaggcaaaaagtttctagatttggcaccagaaacatgatttatagaaggaaaaatctacatattggatttcatcaaaattaaaaagatcactgtgaaatacactgttaagaggaagaaaagacaagccacagaccggtagaaagtagtcgcaaagtgcttacctgacaaagaactagtatctagaatacatgaagttttaaaattcaaactaccaacacagttagaaaatgggcaatggacaaaagcc

SEQ ID NO: 186416 - DNA, 597 bp, Homo sapiens
aatctatgtgatttcaagacttagtaatcaacactgtggtactggcagacagataaaaacacagaccaatggaacaaaataaagaactcccaaatatactcacacaattatgcctcactgactttttccaaaggtgcaaaagtaataaaatggaggaaatacagaactttcaacaaacgttactggagcgattggacagctgtaggccaaaaaaagaaaacaaacaaacattggcctaaacctcacaccttgtacaaaagtaagcataaataaatcataaacaaatataaaatctgaaattataaaacttttagaaaaaatgtatgagaaaaatcttctggatcaaggctaggcaaaaagtttctagatttggcaccagaaacatgatttatagaaggaaaaatctacatattggatttcatcaaaattaaaaagatcactgtgaaatacactgttaagaggaagaaaagacaagccacagaccggtagaaagtagtcgcaaagtgcttacctgacaaagaactagtatctagaatacatgaagttttaaaattcaaactaccaacacagttaraaaatgggcaatggacaaaagcc

SEQ ID NO: 186417 - DNA, 457 bp, Homo sapiens
aagcatttaaaagaatataaaacactcatttttaaaatcttaggagtagatcaaaaaaacttttgtaaattttacatatgaaaactttgcagctggaagataagtaaacttataattagacagcaaactgacaattcttaccatatgcaaatttgtgattggatatgacattgacattgggaaagcctaaaccacaagaatgatttatttaaaaaggcatttttgtaaagatttcaawtgatgaggaatgggtgtgttctctgatagtttcttttctgctgttaactaggtcatgtttccatggagtgctacactcaaggaaaaggggacaaaagactaaatagataatcgtatagacagttttatcttctaaaatagagaacagtctgattagagaatgaatacatttaaaatgtcctcctcaacctatggaaatatgatggttgagactgatttg

SEQ ID NO: 186418 - DNA, 336 bp, Homo sapiens
aaacaaagtatctctaaaacataaaatgtagttcttcttctaattattaaatacaggagaaataactgattttcaaaattatgcatcaaatgtaagttgcaaagttgtgttgcttttatataatttatagtaaccagaaatgttaagcctattcctaatagcacaataaagataattacaacatgcattaggcaggtgagwtttataattttaaaaacaggatgagtaaaattctggaggatcaaagcaggaaaaaaaacaaatatacattttttgaagtaattttctgattgaataacaatatcaacattcatactctatgaattaaagattcat

SEQ ID NO: 186419 - DNA, 490 bp, Homo sapiens
taactttagaaataatttacttcaaatttctaaaaaaattaatgcaaacatattgtgaaatagaaaagtaggttcatgatttgattattataattaatattatgggttaatcacctcaggtcaggagttcaagaccagcctggagaacatggtgaaagcccatctctactaaaaatacaagaaattagctgggcttggtggcctgtaatcccacctactcgggaagctcaggcaagagatacgcttgaacccaggaggtggaggttgcagtgagccaagatcacaccattgcactccagcctgggcaacaagaggaaaattccatctcaaaaaaaaataattaattaatttaaagaaaagaagaagatgatgatggagagagggcgggtagaaagatatgtggtctgccttacactatgtatttcttatattagagataaatacygtgccacagaaaactgggtagccatctttatatcgcatagcaagt

SEQ ID NO: 186420 - DNA, 500 bp, Homo sapiens
tgttggctgtgggtttgtcatagatggcctttattaccttaaggtatgtcccttgtcaatttttcttaaggttttaatcataaaaggatgttggattttgtcacatgcttttttgtgtcaattgagatgataatgtgatttatgtttttaactctttttatgtggggtatcacatttattgacttgcagaagttaaaccatccctgcatctctggtatgaatcccacttgattatggtggattatctttttgatatggyttatcatatcacacattatatctttttgatatggattatcttggatttggtttgctagtatttttctgaggattttttgcatttatattcatcagggatattggtctgtagtattcttttcttcctatgtcctattctggttttggtgttagggtgatactagcttcatagaatgatttatagagaactggattggtatcaattcttctctgaatgcctgatacaattcagctgtgaattc

SEQ ID NO: 186421 - DNA, 617 bp, Homo sapiens
agacaaaacataaggcttaaataagatccagagtttcattacagaatactcaaaatatccacagcacaataaaaaaattactcatcatacaaagaattaagaagatttgtaactgaatgagaaaacacaacagatgttaacactaaggtgacagaaattttataattaattgacaaaaattttaaactagccatcataaaaatgcttcaatgtgcaattaaaaagrcacttgaaacaaatgataaaataagtcctagcaaaaaaaaatcagcaaaaaatgattgcatcagcaatagatgtaaagagtaactaaatgaaaatttaataaatgaaaaatgtaataaacaatttaaaataaatacctcaaacatttggctcaaaaacaaaaaaactgaaataggcaaacagaagaaaaaaaatcagtgaatggaaagctgaacaatagaaatttctcttcctgggctacagagagcaaattcattgaaaaataagttaagagagcctcaaggacctgtggaattataatacaagatgtaatattcatgttattgatgagaggaaagaagaaaaagggatgggatatacatttttcaaaattaataagtaaaaacttgtgt

SEQ ID NO: 186422 - DNA, 582 bp, Homo sapiens
aatataagccctaacataacaaaaattatatataggtaattaacttaaatrcagaaaaagcagagattaacagattacaaaccaactatatgctgtctataagaaactcacttaaaatgtaagtatataggtgaggtgaaagtagaagaatgaaaaatattgaaaatgttattcagctaaaattagggatgggaatattattaggagattaagtaaagtgcagagcaaagaaaattcagagagaaagtgagagaatatgtaaagatgaaagggtaaatccaccaagaatacatagctattctaaatgtgtatgctcctaacaataggctgtaaattatgtgaaacaaaaatgacataaatgaaaaaacagacaaaaattatagctgaagacttcaagacctgcttctgaccttgatagaaaaactagaatgaaaatcagcaaggatagataattcaaaaacacattaaccaacagattctaattaatatctataaaacactccaaccaacaacaacgaaatacacagtcttttaacatgcctttagaatacaaagaaagaccatatttggggcttacaataa

SEQ ID NO: 186423 - DNA, 587 bp, Homo sapiens
tgtaaggcattttttttaaagtcattgtaccaacttaccttccacatggtaatatatacattctgctatctccaccttctgtccaacacttggtattttcagtcattctgatattagatattccaytgggtttttagagtttcttcattgtagttctaatttgcatttcttacatgacaaatgcttttgaaaaattttctatatgtatattggccatttgagtatttgttttttgtaaagtacctgttctaatattaaactattttaaaattgaattggcagagctctttctattgatttacagcaatttttgtatattctggatacagttcttaattgtataagcactgcaaatacattcttcaagcctgtggcttggttttaataaaacctaatatatcaaacttttgttttaagagtagtggtgaatgttttccccagcctaggatgttctacatgtctgaactgataagcactctgcaaaatatttgagaagagcccttggcataccttcagagttctctttccatgtagctctctcctctttgttactcccttctactagatttggtctattctgcctactg

SEQ ID NO: 186424 - DNA, 550 bp, Homo sapiens
tgtttttaattaaattttttaattaaaaaatgtcctaattgaaacaaaaataaggacgagttaaaggtatgtgacgtgaatgttattcttaaggacacattttagtttgatgaccatttactttatttttggatattaagtgtctgtctattaaactttggacactaagatggtaattcatggatttcaaaagtttcatagagattttaaaattcagcattaagaatataaaccaggctgaktagtattcaatgggacatatgtctccaaagagtagacaaagataatgttgtgtatatatgttgtgggcagttgggctggttccacatttttgcaattgcgaattgtgctgctataaacattcatgtgtgatatatttttcgtttaaggacttctttttcctctggggagatactcagtagtgggatttttggatcaaatggtagatatacttttagttcttcaaggaacctccacactgtttttcatagtggttgtactagtttacattgcctccagcagggtaaaagtgttcccttttcaccacatc

SEQ ID NO: 186425 - DNA, 516 bp, Homo sapiens
acaaggacatatgttggatagtctgtcacaaaatgatttggtctgtaactttttgtatttatcatgtgcatttctttataaaagtgttccagggaagatattttgaagacaagatgaggttaattttgaaggcctattttaactgaatgtatggaactcagctyatgacattaacccatgtccctagaatctctaaaagtttaaattgtgggtaatttatagaatgtttgttacatagtaaatattaaaaacaaagcataatgtgagttttgaaatgtaatagtaaaatgaacttttgtgaattcaccagtcagatttagaatgcaaatactgccaatatactatatctaacagtatgctccatccttatcgcattccctgcttaatcctggagatgaatctcctgactctaatgccactttttccttttcaaattattttttactatacatgcaaataaatgatatattattttccttttttttgctttactaaaaatatatgtggacatttaag

SEQ ID NO: 186426 - DNA, 442 bp, Homo sapiens
atctccatccctcagagtctacttagactacctggatgatatttctagttctctaagaactaaatttgcaatcttctaaggttattctccaataataagtcatgtggttccagttattgtccagtccctctgtagcactggcctctccctccttccttctgggtttattactgttctgcacatatcttaggccagaaactgttttagatattttcattgtcatctcatttaacacacaaacaatttcatgaagatggtacagtaatactcttaattgacagatgaaagcactgagagtatagagattcaatattgtttctagttataccagttatgaaatagttgttcagatttgaacccagtctatctcattccacaacatgcttttgctytaaatcatgcaacctcctataactcttgtagctcaaagctgatattagat

SEQ ID NO: 186427 - DNA, 493 bp, Homo sapiens
tttttgccactgagttgtttgagtttctcatacatactggtaattaatctcttgcttaatggatagcttgcaaatattttctcccattttgtaggttgtctcttcactttgttgatattttcctttgctatgcatatcaagcggttctcatgcctcatcctcccaagtagatgggattacaggtgcctgtcaccacatctggctaatgaaatcagtatatcagtacggaaaagaaatcaatatatcaaagagatagctgcactgccatgtttactgtaacatcattcmcaataaccaagatatgaactcaacttaagtgtccaccaacaaatgaatgtataaggaaaatatggtatatatacccaatgaaatattatctagccataaaaaagaatgaaattttgtcatttacagcaacatggatagaacaggagaacattatgataagtcagcaaaccaaataccacatgttctcactcaaatgagggagcta

SEQ ID NO: 186428 - DNA, 493 bp, Homo sapiens
tttttgccactgagttgtttgagtttctcatacatactggtaattaatctcttgcttaatggatagcttgcaaatattttctcccattttgtaggttgtctcttcactttgttgatattttcctttgctatgcatatcaagcggttctcatgcctcatcctcccaagtagatgggattacaggtgcctgtcaccacatctggctaatgaaatcagtatatcagtacggaaaagaaatcaatatatcaaagagatagctgcactgccatgtttactgtaacatcattcccaataaccaagatatgaactcaacttaagtgtccaccaacaaatgaatgtataaggaaaatatggtatatatacmcaatgaaatattatctagccataaaaaagaatgaaattttgtcatttacagcaacatggatagaacaggagaacattatgataagtcagcaaaccaaataccacatgttctcactcaaatgagggagcta

SEQ ID NO: 186429 - DNA, 463 bp, Homo sapiens
gggattatcagaagattacttgtttcgttactatctaaatttatttctataacagtgaattaaattttggttgacggtaaaaaaaaaaagataaaaagagcttagggttatgatatctttaatttatgagccaaactgaataatcatattgtcaatggaaatcaatccttaaaatagggcattaaggtcacccagcagtaagtagcacatagaaaaaattcaaaggatgtaatcaaactgtaaagatgaaaaagaattyagcgatttccttgtttagatctcaaatttacagattgaaaacttaaagcccttcaagatcaaatgactcatttaagtatatccaggataaaggaacagaagtatccaaaaaagtaaatcgtaaaacttactattttaaataatcaaagtcacaccaatgccactattcattacaagtactattatttatatagaaaatataatc

SEQ ID NO: 186430 - DNA, 638 bp, Homo sapiens
actttctactgatcttgtcactccttgattaaaatcagtctccatttgtctttctaaactctgtagaatgacatttaagacattttactttatggtctctagctttctattttaacctgctgatattgttttagacatactaaatgatttgcacacaatttgcaaagcataaattacattctcttgactgcagcacatgctgtttcttttctattcaatgtcaattgtgcctcttcatctgacaaagttatatgttttccaataatcaactcacttacttacccctgtgtgtgaaaaaaaaaaacctcaataaatatttmttgaattataccttatttaatctcccaggcggtttcatgtgaacttgctatgtatacccatagcacttggtgcatacatttatattagtgcatattacactatatttgtttgcctctcactatctgctactccccagaaatgtgaagtttgtaaaggaagacaccatgtctttcatccatgtatctctaatgcccagatcagttcctgagggtactttaaaagtatttgtgggtagagtaagtaaaaacttgcacaaaatgctattattagtagagagacaaaaggaaaataaaaagttatcctcattaggaataatt

SEQ ID NO: 186431 - DNA, 543 bp, Homo sapiens
tttccagaaaaaaaaaaaaagaccctgatttgtaatgtctgctgatttccatagagtaaacacttcgaccatggctgatgccagacagccaatgtgacatcaacagccttgcaaaaatcactgaaaagttaacaagttcttgctagccagtatgaactgactctggcatgccactggacataggccttgccttcataccacttacagtccagggcagtagttctcaaagggtgtctgtgaggttaacactactttcacattatactttgccttttttcactgggttctttgccttttttcactgtgttgacatttgcacagttggtgcaaaagcaatggcaggagacactggagccttagtgtgaatcaaggcatggcactcgtagcacaatctttgtgttcttcaccaccacacacttgcaggaaaattaaaaattccaggttttcttaagaatgcctttgatgaaacagcaaamaatattaattttattaaatcttgatccttgaatacatgtctttttaaatattctgtgtgattatttg

SEQ ID NO: 186432 - DNA, 440 bp, Homo sapiens
tatgcattacttcctcctctttcctgcagtggctacatcggtccatattttcatcatcccgtaggttactttggcaagagctttcaccagaagccccctcctgtctttatctcttccctgaacactaccttcggcttaatctttaaccattaagtgcagagttcatcaagtaactctttcgtttaaaaatgaccaatatttgtcctgtttaccgactatattagtccattctcmtgctgttaatagacatacctgagactgggtaatttatgaaggaaagaggtttaattgactcacatttcagcgtggctggggaggcctcaggaaacttacaatcatggtggaaggggaagcaaacatatccttcttcacacaatgacaggagagagaagaatgagagctaagcaaaggcggaagccccttataaaaccatgagatct

SEQ ID NO: 186433 - DNA, 440 bp, Homo sapiens
tatgcattacttcctcctctttcctgcagtggctacatcggtccatattttcatcatcccgtaggttactttggcaagagctttcaccagaagccccctcctgtctttatctcttccctgaacactaccttcggcttaatctttaaccattaagtgcagagttcatcaagtaactctttcgtttaaaaatgaccaatatttgtcctgtttaccgactatattagtccattctcctgctgttaatagacatacctgagactgggtaatttatgaaggaaagaggtttaattgactcacatttcagcgtggctggggaggcctcaggaaacttacaatcatggtggaaggggaagcaaacatatccttcttcacacaatgacaggagagagaagaatgagagctaagcaaaggsggaagccccttataaaaccatgagatct

SEQ ID NO: 186434 - DNA, 443 bp, Homo sapiens
atggcattaggtaaagctaattgaatcgacaggattgccttggtcaaaggtattgcagactgatgacaatcagatctacttccagtgcaaactaaaagttaatcttctataaatagtcactggtaggcttatgcccctaataatagaacctcatgtatctcctgctcctaaactcccatacgactaaatgctgcawgctttaatgcattatgccaaagtgtattgtcacaaggtaaagaaagcttttccatgatccaccaactgaggaccatcatgatctagaacgcagagattgggtcttctggaaacgacctcagagaaagatcaaccttgccactcactctgcagcagaactgcagccaactgtttaaaccatgtttaaataaggcaaagattgagctgcaaccaatctggctatttctatacctcacttctgttttctt

SEQ ID NO: 186435 - DNA, 537 bp, Homo sapiens
cctggaccctgctgatcagaatagttgcgctcaccgatgcagcaacagaaacactagtattcctcctagaccacaaggaggaccaaggaaggtcggatttagtggcccttactgacacattctcaaaaacctgcacccttgcttgtcctcctagaccacaaagaggactgagaaaaatcagatttagtggcccttaccaatgcattctcaaaaacctaagaatgttagagtcctargcattctcctgttagtattgggacattacccctgtcctataaagatgttattccccaaaaataaagtggagggccataccctgaagaagggaagggatctccagggttggaagagtgacatgttttgtcctcacttctcatcatgtgaataggaaggatatcacttctgaggctccccatatcttagcttcaggaatagcctttgttaggcccacttgtctgaggacggatcctaaaattccagatagtccccacctctgacaaggctttgggcaaaaattatgtctttctgattggtgag

SEQ ID NO: 186436 - DNA, 523 bp, Homo sapiens
actagtattcctcctagaccacaaggaggaccaaggaaggtcggatttagtggcccttactgacacattctcaaaaacctgcacccttgcttgtcctcctagaccacaaagaggactgagaaaaatcagatttagtggcccttaccaatgcattctcaaaaacctaagaatgttagagtcctaagcattctcctgttagtattgggacattacccctgtcctataaagatgttattccccaaaaataaagtggagggccataccctgaagaagggaagggatctccagggttggaaragtgacatgttttgtcctcacttctcatcatgtgaataggaaggatatcacttctgaggctccccatatcttagcttcaggaatagcctttgttaggcccacttgtctgaggacggatcctaaaattccagatagtccccacctctgacaaggctttgggcaaaaattatgtctttctgattggtgagcctgggtgcctaaagaaggaaacagagtcctgaggttt

SEQ ID NO: 186437 - DNA, 541 bp, Homo sapiens
cctgtgtacaaatctggcagtttcttgggatttgttgttgatgtgtgtgtgtgtgtgtaagtgtgtgtgtgtgtgtgtgtgtgtgttttagcaaagtttacttttaatagataatagcatcttgtttttacggaaggttgttctaatatacacgtccatcagcaatgtataagtgaacctttcatttaaaagcaacaactatgtcaatctttaaaatacttgctgatataatacattaaatacggttttttttttactgtttttattttaatttccctcaccaccagtaatgctgaagagttgtctaatataatttgatggccatcttctttttcttttttgtaaagtatcagtttataaactgttttcatttttattgggatttttatatttttcataagttttcaaacrttcttcgtgtttgtaagtttaacccttgacttattatgtatattttcaactttatgtagtatacacatattttcattttatgcaattatacatgactattttatcttaaggtttcctaagattaagtttg

SEQ ID NO: 186438 - DNA, 561 bp, Homo sapiens
agcagccaaatatgaagggtcaggatttttcctagttaaaaattatataatgacatatgtctattcttaactagtaatgaaggtagagaagacatgaataataataaaaatgatgaaatggtgctaacatttcaaaagttgaggtcaagacagaaratagatatgattagagatagagtttaaatttatcaaaatatataaaagattctgaatttttttctaaaaggaactgtcaaattttatatatgtgtgtgtgtgtgtgtaaatattttcattcttctttgtatacactttttaggtttctataaccaatttcacagatgtttcataaaaacagaattaatgattatatcctattttattcatattggagaatttcatttgcattgaacttgtttccaaattctataaaatttaataacttttataggtaatacataaatgattttaccattagtataattgtttttaattgtgagagtaaactcgaacagaaaagaaaatacagtcactgagttaaatattttgagttcatgcttggaaagagaagagaagggaaca

SEQ ID NO: 186439 - DNA, 628 bp, Homo sapiens
ataaattctgttcattcagtagaactgaagtcagctctttccttttctatttcctgattaacctctttgatgatatcatggcccagaaatgcaccatccttcttatattccctgtgccttataagtcatgtattcctgtattaggattaatcaattctagtctcttgttgagatttaagatgtgagtaaacgatgtcagttgagcttgtttctgcatctgtgtttagccagtaggtcagcttactactagagaatctaatgtggcctcagtcatgggtctcatggatggcaggctgtcagctggggaagtgggggtcactcagtcaccacatgtctcttaccatccagcaggttagctcagacttattaacaagagagcacaggagttttaaaagcctcaagataaagagtctcaatgtgtaagcacttttcaagtctttacttatatcataatgtctgttgcccacttgcaaaataaaatcagatagtgtaccttaaagtagaatgggaaagaggtacccaagctacagataaaaagaggtgttaacaacatgggaaattactgcaattatatactagagcaggaaaaagttggaatyaccttgaaatattttgtgtagaattaagg

SEQ ID NO: 186440 - DNA, 550 bp, Homo sapiens
ggctgcagggatgcttggctcagcagttcttgtgttacaagggcatgacaggacaaagaccttatggccctagaatgtttgctatctgaccttttacagataatgtttgcttaaccctgacctaagagagcatcctctgatcatagaagcatattctcagccctctctaacaggtgctggaagctgggataggacagacactgagtttccgaaaattgaaaagtcccttctgagctttcttgcattgctgtgttccttggctccaagaggggttcgggggaagatgaagggcaatgcagcaaaggaggggctgaggagcaaaaaaaaaaaaaacaaaaaaaaaacaaaaaaaaccaaaaacttcccagagcccagaatacctggttatgggcaccccctgctggagagttggcaaarttctgtgacattggtcaatttagtcaccaaatgtgtagaggttgactgtatgccagattgtggaaagcaaaggtaaagttctcttgaagaactgactcacagtcaagagtagtcaggctccctaattagatct

SEQ ID NO: 186441 - DNA, 530 bp, Homo sapiens
ctttttagtgtgtgcattcatctcacagtgttgaaactttcttttgattgagggttttgaaacagtctttttgataaatctgcaagtggatatttggagcgaattgtggcctatggtttaaaaggaaatatcttcacataaaagctagacagaagctttctgagaaacttctttgtgatatgtgcgttcatctcaccgggttgaatctttcctttcatcgagcaatattgaaacacccttttytttgaatctgaaatagatatttggagcgattgtgtcctatggtagtaaaggcaatattttcacagaaaaactagacagaagcattctgcaaaacttcctcgtgatgtgttcatttatctcaccaaattgaaccattcttttccttgagcagatttgatacactctttttgtagaatgtgcaagtgaatatttggaacgctttgatgagtttgacggaaaaggaaataccttcacatataaacgagacagaagcattctgagaaacttctttctgatatgtgcattca

SEQ ID NO: 186442 - DNA, 596 bp, Homo sapiens
actagaattttatggatggtgcactctaggtgggtaatgaggtctagaagagaaaagatatacaacatcaagcaggtgcccaagaaatggtaggtccctttctcccttcctgcctcctcatttttacagatgaggacatttttacagaagcccgaatagataagtagtcacaatcatgttctaagaaaaacaaaaaaaaggtggcggatgccgtattttatttttcgtcatcactctccttttcctgctgctcattcagttatggtttcatgacccatataataattccacaaggctcaccaatgttatctggcacctgctagagaatagatatagtaacagaggcaaatattttggtgaagtttaacagttgtgttgccttctagaatttcattgtatctgatgtgcaaaaacaagcaaaacattgtcggttaagtatcacaatctcataatggagatgagcactgattcttaggccttggcgtagttcagggcctatcctttagcagctaaaaagagcactttggctgtaactcattggastctagtctcataatgttaggatatttctatttaagtcttaaccactattggta

SEQ ID NO: 186443 - DNA, 600 bp, Homo sapiens
gtgcgagagctcaggtttttaaatgcagagcgctcatgcagaaccaaactgttcttactttagaaacgactatagcaaaccttaaattagaagcagtagagcatttagaagccagaaagctgccacccataggcatttactgatagcaacaagaaattgctggaacctcacagcaaaaagaaagaaagacagaaggaaagaaagaaacaaaagaagggagagagggaaaaataaaacgaaaaaagaaaaagagggagggagaatggagagaaagaggaagggagggaagtggggaaggagggaaggaaggaagggagggargaacagatttaaaaatcccaaaaagttttgcaatccttagtcgttcattggcgggggcagcagtttttaaagttttaaagtgtagctagggatgagggagttgcctgggggcagtccccaagatgttttcagggggtttgtaaggtccagacaacttctgtgtagtactaagacattatataccttttcactcccattctctacaagcttacagtggagttttccaggcacaacctgtggtgaaggggtaactttgaaggctagtgggataagtatctt

SEQ ID NO: 186444 - DNA, 478 bp, Homo sapiens
ctctctctacaccttccgcaagatgaaaatactgcccccttttaagcagtagaagcaggcatttgcattagccagagataacatgtacacccttttctgccattggacagatttttaaaaaatcaatsttattgaggtaaaattgatttacgatgaaatgtgctcattttaaattttgaaaaatatatgtgtcgtgtgaccataactccaacaaagatgtcttttacttagttcatttgtatcaccatgaaaattcctttatgccccttcccaatcaatcttcctctccaggcaaccacagatcaatttctatagctacagattagctcaacctgtcctagaacgtcatagaaatggaatcacgcagcatgtaccctattgcatctgacttccttcacaaataataatgttttaaacttcatagacagtgtttcatatatcaggaatgtgctcctttttattgttgagtagtgtccca

SEQ ID NO: 186445 - DNA, 461 bp, Homo sapiens
atgaaaatactgcccccttttaagcagtagaagcaggcatttgcattagccagagataacatgtacacccttttctgccattggacagatttttaaaaaatcaatgttattgaggtaaaattgatttacgatgaaatgtgctcattttaaattttgaaaaatatatgtgtcrtgtgaccataactccaacaaagatgtcttttacttagttcatttgtatcaccatgaaaattcctttatgccccttcccaatcaatcttcctctccaggcaaccacagatcaatttctatagctacagattagctcaacctgtcctagaacgtcatagaaatggaatcacgcagcatgtaccctattgcatctgacttccttcacaaataataatgttttaaacttcatagacagtgtttcatatatcaggaatgtgctcctttttattgttgagtagtgtcccatggta

SEQ ID NO: 186446 - DNA, 607 bp, Homo sapiens
ttttcttcctagtaaaaggacagaggtcacttttctatctacctccctttagaggtagtcataggaggatgtgatgcctaaagaaacacctgtcacattgcaactatgctggaatgatcaggagaactgcagacatgcttcccaggatcctgacatcacttggaattaattctatcatgggatactgaacttcagacttttcattgtgaaaaataataagttgtctttattatgtgtgctgcattagttagtattttattatttataaatcatayagtcttctcctctacccaccctcacaccccaaaatcctagtccagtatagaatggaccttctctcaagcaaaaaaggtaagtattttcatcaccaatccttttcaaacatgaaaatgagacagactgattccataagccacaaagtcatgggatgggatctaaggaataaagtggaaagcctggggattacaagcctgggttctcacactgcctacctccccagcatctctaggcttccttcattttctcaaggtttcatgcgcctttctatagtcttctgtcagcctgaaacactcccctttacctagactcttttctttgtctggcttgt

SEQ ID NO: 186447 - DNA, 550 bp, Homo sapiens
tgatgaatttgaccgggtttcatttctctctggcatttagaaaagaggaacctccctttatgcccctactgtgaatgtccacgtccaaaccaacacacaagccaatacacggccactacactgcacaaacttcatttatgtgagatcatcggccatgagaccctgtgggcgctcagaggaagggggctgatgcagatgaagaggtcaagagacacttctggaggaggtgataccggggcagaatcctcaaggaagcataggaacccttcaagaccagggatgggggtccagccagaaggatcatgtgtgcaaaggtgggaaaccgccaggagtctcatgggaattccatttcccagggtgatgtccacacagttggcaggaggctgaaagggccagtcgggagttgaggggagccccggagggcttttgaaggttggtgcctgatatggtttggctgygtccccacccaaatctcatcttaaattgtagctcccgtaattcccaagtgttacacgagggacctggtgggagataattgaatcaggagggc

SEQ ID NO: 186448 - DNA, 565 bp, Homo sapiens
cagatgtcatccaatataatccacagggcagctgatagatgaggaaatggggaaggctgctaccatgacgtgcatctgtacacctgctsctgggacataacaccaggccagaggcagtggcttatgttggaaatatcttcttccagtctgtggctttccaccttattttgttaagggtgtatttgttaagaacaagagaattgtgtcttttcatttaatatagtcaaatttatcaaattcctttgtagatcatgatattttcatgttaacaaagctgccttggctccaacgtcatgaagatattctcctatattccccctttagagttttaacatttccccttccacatttcgatgtatatcaaattctgtttctatagacagctaattttattttattaggcaaccttctaccattactttgaggggtcactaactgattatggtttggtcagcgtagctgtcagacacacagagactcactaccagggggcttggggctcagtgatgtttgggaaatgccggaaaagtcattagaggggagctgggtcataaaaacattgaaa

SEQ ID NO: 186449 - DNA, 565 bp, Homo sapiens
cagatgtcatccaatataatccacagggcagctgatagatgaggaaatggggaaggctgctaccatgacgtgcatctgtacacctgctgctgggacataacaccaggccagaggcagtggcttatgttgraaatatcttcttccagtctgtggctttccaccttattttgttaagggtgtatttgttaagaacaagagaattgtgtcttttcatttaatatagtcaaatttatcaaattcctttgtagatcatgatattttcatgttaacaaagctgccttggctccaacgtcatgaagatattctcctatattccccctttagagttttaacatttccccttccacatttcgatgtatatcaaattctgtttctatagacagctaattttattttattaggcaaccttctaccattactttgaggggtcactaactgattatggtttggtcagcgtagctgtcagacacacagagactcactaccagggggcttggggctcagtgatgtttgggaaatgccggaaaagtcattagaggggagctgggtcataaaaacattgaaa

SEQ ID NO: 186450 - DNA, 565 bp, Homo sapiens
cagatgtcatccaatataatccacagggcagctgatagatgaggaaatggggaaggctgctaccatgacgtgcatctgtacacctgctgctgggacataacaccaggccagaggcagtggcttatgttggaaatatcttcttccagtctgtggctttccaccttattttgttaagggtgtatttgttaagaacaagagaattgtgtcttttcatttaatatagtcaaatttatcaaattcctttgtagatcatgatattttcatgttaacaaagctgccttggctccaacgtcatgaagatattctcctatattccccctttagagttttaacatttccccttccacatttcgatgtatatcaaattctgtttctatagacagctaattttattttattaggyaaccttctaccattactttgaggggtcactaactgattatggtttggtcagcgtagctgtcagacacacagagactcactaccagggggcttggggctcagtgatgtttgggaaatgccggaaaagtcattagaggggagctgggtcataaaaacattgaaa

SEQ ID NO: 186451 - DNA, 638 bp, Homo sapiens
ttagtcttatgacacaatcccccaaagatccaggatccaaacaaaatctgctaatcatcacaagcaccatgacaataacaacttgaaagagaaaagaccaccaccaacacaaaaaatgagatgatttggaatgatatgacaaggattataaacagcaatcacaaaaatccttcagcaagtaatcatgactatasttgaaaaaaagaaagtctcaacaaagaagggcaagatatgaaaaagaatcaaaaggaaatcatagaactgaaaaatacaataaccaaaataaaaacactggttgagtgtaacagcagaataaatatgacagatgaaataatgagtttgcttgaagatagaacaaaagaaattattcaatttaaacaacagaaagaaaatagattttaaaaaacaacaaacagagctccagggacctgtggtataatattttagaaatctaatatttacattgtcagaatgtcagaaaatgaagaaaaagcgtgttggtctgaaaaaatgtataagaaaatagtggctgaaaatttcccaaatatggtgaaaggcataaccctaagagattcaagaagctgactaaaactcagagtaaacccagataaatctgcactaagacacattgtaagcaa

SEQ ID NO: 186452 - DNA, 638 bp, Homo sapiens
ttagtcttatgacacaatcccccaaagatccaggatccaaacaaaatctgctaatcatcacaagcaccatgacaataacaacttgaaagagaaaagaccaccaccaacacaaaaaatgagatgatttggaatgatatgacaaggattataaacagcaatcacaaaaatccttcagcaagtaatcatgactatagttgaaaaaaagaaagtctcaacaaagaagggcaagatatgaaaaagaatcaaaaggaaatyatagaactgaaaaatacaataaccaaaataaaaacactggttgagtgtaacagcagaataaatatgacagatgaaataatgagtttgcttgaagatagaacaaaagaaattattcaatttaaacaacagaaagaaaatagattttaaaaaacaacaaacagagctccagggacctgtggtataatattttagaaatctaatatttacattgtcagaatgtcagaaaatgaagaaaaagcgtgttggtctgaaaaaatgtataagaaaatagtggctgaaaatttcccaaatatggtgaaaggcataaccctaagagattcaagaagctgactaaaactcagagtaaacccagataaatctgcactaagacacattgtaagcaa

SEQ ID NO: 186453 - DNA, 611 bp, Homo sapiens
atcagctcaaataatatctatcacaggaggtatatagataagaaagcatctgaaaggtggaaactgaatgactaaaatgttggaaatactaggttattccacagtacactgacatcacttaagaagccttaggctgattggcctcagttagcttaaacaataaggaaatgtataatgtcatacaaggcaartccagaagtggtgcgggttctcaagttggctcaggtttctggtggactgcagcattctacaatatcatcaaggaaccatgttctttccatctttccacctcttcactcttggctccatcctcaggttggtcacaatggctgcagcagttccaggacagggagcaagaaggaaacctccttctcttatatcaccttcattcaataagagaatcatgtcccatgtctcgttggccagaagtaggtcacatggccattgctaaaccattgattgggggagtggacctacatggttggcttggactaatgaggatttgtttccgtggtggtgttggagtcacctctgtgagggatacttaaggaaatttgtttttgtttttggtttttagcaagacagagatggaggagcttcatctggtttat

SEQ ID NO: 186454 - DNA, 611 bp, Homo sapiens
atcagctcaaataatatctatcacaggaggtatatagataagaaagcatctgaaaggtggaaactgaatgactaaaatgttggaaatactaggttattccacagtacactgacatcacttaagaagccttaggctgattggcctcagttagcttaaacaataaggaaatgtataatgtcatacaaggcaaatccagaagtggtgcgggttctcaagttggctcaggtttctggtggaytgcagcattctacaatatcatcaaggaaccatgttctttccatctttccacctcttcactcttggctccatcctcaggttggtcacaatggctgcagcagttccaggacagggagcaagaaggaaacctccttctcttatatcaccttcattcaataagagaatcatgtcccatgtctcgttggccagaagtaggtcacatggccattgctaaaccattgattgggggagtggacctacatggttggcttggactaatgaggatttgtttccgtggtggtgttggagtcacctctgtgagggatacttaaggaaatttgtttttgtttttggtttttagcaagacagagatggaggagcttcatctggtttat

SEQ ID NO: 186455 - DNA, 611 bp, Homo sapiens
atcagctcaaataatatctatcacaggaggtatatagataagaaagcatctgaaaggtggaaactgaatgactaaaatgttggaaatactaggttattccacagtacactgacatcacttaagaagccttaggctgattggcctcagttagcttaaacaataaggaaatgtataatgtcatacaaggcaaatccagaagtggtgcgggttctcaagttggctcaggtttctggtggactgcagcattctacaatatcatcaaggaaccatgttctttccatctttccacctcttcactcttggctccatcctcaggttggtcacaayggctgcagcagttccaggacagggagcaagaaggaaacctccttctcttatatcaccttcattcaataagagaatcatgtcccatgtctcgttggccagaagtaggtcacatggccattgctaaaccattgattgggggagtggacctacatggttggcttggactaatgaggatttgtttccgtggtggtgttggagtcacctctgtgagggatacttaaggaaatttgtttttgtttttggtttttagcaagacagagatggaggagcttcatctggtttat

SEQ ID NO: 186456 - DNA, 551 bp, Homo sapiens
ggagacttttggttcctgccaagatggagtagctccattcctccaatccctacctcttataactaaaaaccctgaacatagcacaacaaacatgcaaagactctgaaatgtggattggagacggcaggctgcttaggmatctcgggacttaagggatgactcagcaaaaagtttcctgagtttccatattgagtcccatctgtctcatacagggtgctggagaagcccagagccccaaaccatcaacaggcccagacaaaaaatcatcctaagaaagcctgttttctccagtcaacataccaggaaaagtgtggattaatagaactgaaaaccttgatgaccatagccaccatgctccagccaaccaaaaccaacggaaaagctccttctttctctacaaccttccaggtctcccacccagtggtgtcaactgagccaaacagtgacctaacctttcatttcctatccagcagaagcaggcatgctctgattcctctgttggggtgggctgagtggcgagctaaacctccattcccatctggaaggaaata

SEQ ID NO: 186457 - DNA, 551 bp, Homo sapiens
ggagacttttggttcctgccaagatggagtagctccattcctccaatccctacctcttataactaaaaaccctgaacatagcacaacaaacatgcaaagactctgaaatgtggattggagacggcaggctgcttaggcatctcgggacttaagggatgactcagcamaaagtttcctgagtttccatattgagtcccatctgtctcatacagggtgctggagaagcccagagccccaaaccatcaacaggcccagacaaaaaatcatcctaagaaagcctgttttctccagtcaacataccaggaaaagtgtggattaatagaactgaaaaccttgatgaccatagccaccatgctccagccaaccaaaaccaacggaaaagctccttctttctctacaaccttccaggtctcccacccagtggtgtcaactgagccaaacagtgacctaacctttcatttcctatccagcagaagcaggcatgctctgattcctctgttggggtgggctgagtggcgagctaaacctccattcccatctggaaggaaata

SEQ ID NO: 186458 - DNA, 551 bp, Homo sapiens
ggagacttttggttcctgccaagatggagtagctccattcctccaatccctacctcttataactaaaaaccctgaacatagcacaacaaacatgcaaagactctgaaatgtggattggagacggcaggctgcttaggcatctcgggacttaagggatgactcagcaaaaagtttcctgagtttccatattgagtcccatctgtctcatacagggtgctggagaagcccagagccccaaaccatcaacaggcccagacaaaaaatcatcctaagaaagcctgttttctccagtcaacataccaggaaaagtgtggattaayagaactgaaaaccttgatgaccatagccaccatgctccagccaaccaaaaccaacggaaaagctccttctttctctacaaccttccaggtctcccacccagtggtgtcaactgagccaaacagtgacctaacctttcatttcctatccagcagaagcaggcatgctctgattcctctgttggggtgggctgagtggcgagctaaacctccattcccatctggaaggaaata

SEQ ID NO: 186459 - DNA, 551 bp, Homo sapiens
ggagacttttggttcctgccaagatggagtagctccattcctccaatccctacctcttataactaaaaaccctgaacatagcacaacaaacatgcaaagactctgaaatgtggattggagacggcaggctgcttaggcatctcgggacttaagggatgactcagcaaaaagtttcctgagtttccatattgagtcccatctgtctcatacagggtgctggagaagcccagagccccaaaccatcaacaggcccagacaaaaaatcatcctaagaaagcctgttttctccagtcaacataccaggaaaagtgtggattaatagaactgaaaaccttgatgaccatagccaccatgctccagccaaccaaaaccaacggaaamgctccttctttctctacaaccttccaggtctcccacccagtggtgtcaactgagccaaacagtgacctaacctttcatttcctatccagcagaagcaggcatgctctgattcctctgttggggtgggctgagtggcgagctaaacctccattcccatctggaaggaaata

SEQ ID NO: 186460 - DNA, 461 bp, Homo sapiens
ctgctcaggtgtggtggttcatgtctaatcccatcactgtgggaggctgagtctggcagatggcttgagtccaggagtttgagaccagcctgggcaatatagcaaaactccattgctactaaaaatacaaaaacttagccaagcatggtggcatgcacctgtagtcctagctacttgggaggccaaagtgggaggatcacctgagcctgacaggtgaaggctgcagtsagtggagagtgtgccactgcactccagcctgggtgacagtgtgagacctcatctcaaaaaaaagtccgagccacacacgtaatttaaaattttctactgatcacttttaaaaagtaaaacaaaacaggtgggattaattttcagaatatattttatttaatcctgtatataaatatgatttcaatatgaaattcaggatataaagattatgatgggtattaaaaataattttt

SEQ ID NO: 186461 - DNA, 461 bp, Homo sapiens
ctgctcaggtgtggtggttcatgtctaatcccatcactgtgggaggctgagtctggcagatggcttgagtccaggagtttgagaccagcctgggcaatatagcaaaactccattgctactaaaaatacaaaaacttagccaagcatggtggcatgcacctgtagtcctagctacttgggaggccaaagtgggaggatcacctgagcctgacaggtgaaggctgcagtgagtggagagtgtgccactgcactccagcctgggtgacagtgtgagacctcatctcaaaaaaaagtccgagccacayacgtaatttaaaattttctactgatcacttttaaaaagtaaaacaaaacaggtgggattaattttcagaatatattttatttaatcctgtatataaatatgatttcaatatgaaattcaggatataaagattatgatgggtattaaaaataattttt

SEQ ID NO: 186462 - DNA, 461 bp, Homo sapiens
caggtgtggtggttcatgtctaatcccatcactgtgggaggctgagtctggcagatggcttgagtccaggagtttgagaccagcctgggcaatatagcaaaactccattgctactaaaaatacaaaaacttagccaagcatggtggcatgcacctgtagtcctagctacttgggaggccaaagtgggaggatcacctgagcctgacaggtgaaggctgcagtgagtggagagtgtgccactgcactccagcctgggtgacagtgtgagacctcatctcaaaaaaaagtccgagccacacacgtaatttaaaattttctactgatcacttttaaaaagtaaaacaaaacaggtgggattaattttcagaatatattttatttaatcctrtatataaatatgatttcaatatgaaattcaggatataaagattatgatgggtattaaaaataatttttgtacc

SEQ ID NO: 186463 - DNA, 434 bp, Homo sapiens
tggtgctctactcgcaggctgctgtgacccttggacsagggtgagcccccaccctggcagggcacccttagggagcaggaattaaagaaacaaaacctcagaagtctccagttcattaaatggaagcgtatttcctaagtttgaatctagatgtttaggcttagagctgttctcaagccctggctgcacacaggattacctgggagctggtaaaaatcaatcaatcaataaagcagccgcatgcccgcaggttcttctaaatccctggggggcatctgtgctgtaaaactctctagggaatgagaaccgctgggcctgggaggggagccttgggctaggaacagcaggagacgaaggtctctgcagcagaagtgagcgccagcgacaggagagtggggcagatccctgccacctcccccagccacccacccagc

SEQ ID NO: 186464 - DNA, 434 bp, Homo sapiens
tgtcgagtagtccgcagtggtgctctactcgcaggctgctgtgacccttggacgagggtgagcccccaccctggcagggcacccttagggagcaggaattaaagaaacaaaacctcagaagtctccagttcattaaatggaagcgtatttcctaagtttgaatctagatgtttaggcttagagctgttctcaagccctggctgcacacaggattacctgggagctggtaaaaatcaatcaatcaataaagcagccgcatgcccgcaggttcttctaaatccctggggggcatctgtgctgtaaaactctcyagggaatgagaaccgctgggcctgggaggggagccttgggctaggaacagcaggagacgaaggtctctgcagcagaagtgagcgccagcgacaggagagtggggcagatccctgccacctccc

SEQ ID NO: 186465 - DNA, 631 bp, Homo sapiens
agtggtactgttgtcataagtcaagtacctaatacatgtgggtttacttctggacccttgtgtcccattttccagtatgtctgtcctcagcctataccacaccttcatgattcgtaaaactctattgattacatatatccaggtaataattgaaaatattacaagaccacacacaatacattgaygtgagggtttaatgaagataaatggtgcaggacagcaagagagagaaggcacttgaagaatcagagaggccccagtcttccagggacagctcttaaggccctttctgggattcatagcatgtgctttatcttaagcgtttgaatccaaactgggcaacagatatctggtctcaagggagacaagcacaaggccactgaacagtgtcttatatgagttagctggatcttctgctcaggcctcacaggctgacagcaaggtgccctcatctgaggccctgactcctcttgaagtatttgagttgttggcagatttcatttcctcagctataggtactcagttgtaggactgaggtcccatttgcttgttagctatcagccagagattgttctcagccttgagttgtccactacataccatcagcagcccactctgctccaacagcagc

SEQ ID NO: 186466 - DNA, 529 bp, Homo sapiens
tatcattcttcaattaataatgcatctggactttatatacagtgtaagaaatgggtcagtattacttttttcatatgaatagtcaatcgatgatgcattatttattgaaaatggcatccttttccttatggcattacagtggtactgttgtcataagtcaagtacctaatacatgtgggtttacttctggacccttgtgtcccattttccagtatgtctgtcctcagcctataccacaccttcatgattcgtaaaactctattgattacatatatccaggtaataattgaaaatattacaagaccacacacaatacattgatgtgagggtttaatgaagataaatggtgcaggacagcaagagaragaaggcacttgaagaatcagagaggccccagtcttccagggacagctcttaaggccctttctgggattcatagcatgtgctttatcttaagcgtttgaatccaaactgggcaacagatatctggtctcaagggagacaagcacaaggccactgaacagtgtct

SEQ ID NO: 186467 - DNA, 631 bp, Homo sapiens
agtggtactgttgtcataagtcaagtacctaatacatgtgggtttacttctggacccttgtgtcccattttccagtatgtctgtcctcagcctataccacaccttcatgattcgtaaaactctattgattacatatatccaggtaataattgaaaatattacaagaccacacacaatacattgatgtgagggtttaatgaagataaatggtgcaggacagcaagagagagaaggcacttgaagratcagagaggccccagtcttccagggacagctcttaaggccctttctgggattcatagcatgtgctttatcttaagcgtttgaatccaaactgggcaacagatatctggtctcaagggagacaagcacaaggccactgaacagtgtcttatatgagttagctggatcttctgctcaggcctcacaggctgacagcaaggtgccctcatctgaggccctgactcctcttgaagtatttgagttgttggcagatttcatttcctcagctataggtactcagttgtaggactgaggtcccatttgcttgttagctatcagccagagattgttctcagccttgagttgtccactacataccatcagcagcccactctgctccaacagcagc

SEQ ID NO: 186468 - DNA, 631 bp, Homo sapiens
agtggtactgttgtcataagtcaagtacctaatacatgtgggtttacttctggacccttgtgtcccattttccagtatgtctgtcctcagcctataccacaccttcatgattcgtaaaactctattgattacatatatccaggtaataattgaaaatattacaagaccacacacaatacattgatgtgagggtttaatgaagataaatggtgcaggacagcaagagagagaaggcacttgaagaatcagagaggccccagtcttccagggacagctcttaaggccctttctgggattcatagcatgtgctttatcttaagcgtttgaatccaaactgggcaacagatatctggtctcaagggagacaagcacaaggccacygaacagtgtcttatatgagttagctggatcttctgctcaggcctcacaggctgacagcaaggtgccctcatctgaggccctgactcctcttgaagtatttgagttgttggcagatttcatttcctcagctataggtactcagttgtaggactgaggtcccatttgcttgttagctatcagccagagattgttctcagccttgagttgtccactacataccatcagcagcccactctgctccaacagcagc

SEQ ID NO: 186469 - DNA, 589 bp, Homo sapiens
aaagtattcaagatgtggcctggctgtttctaacagctgatgctcagatgcagaacaaaggaattttctaaagttggaatttatatttaaaccrtaaacagagcatataaatttggaaaatttgaagcctgaccatgtgacaaagaaagaaaaagcttttttggtggagtaattcaagcaggctatggagcaaattgttgctagagatatttgcataactaaaatgcagcccagtgctaatatccaagacaatggggaaaaggcactgaagacgtttcagaaaacttcgtggaagtccctgccatcacagacacagaagcctaggaagaatgaatggtttcatgggccagggccagggctttgttgccttgtgcagcttcaggacactgctctctatgtccatgccattccagctgtggtctcagatcaaaggggcactgatgcagcttggactgccactttggagattgcaagccataagctttggaggctttcacttggtgttaagcttgtatatgcacagaatgcaagaatgaagaacagttggcagcctctgattagatgtcagaggatgtatgggaaagcctgg

SEQ ID NO: 186470 - DNA, 568 bp, Homo sapiens
ttataaccaccgcggtgttttcaagactggttgataggatttgggatgggaataaaagcctctaagaagaaataaggatcccctggggaagaagaggctggagtaatggggaagaaaatgttctcaattacagatatagtaaactgcaacttgtgcttggattgattgattgattggttagtaaactgaaaatagtaccctgccttcttaggccaaagagttactttgagaatcaaatgggattatccatgaaatttctttttgcaaaggatgatacaaacactattaagatgtcaaagattagaattgcttaaagcagaatccttattgtttggaaaggcacagaaatactaaagggaggaaccctttcatgatgctttatgtttctcttaacagcaatgagataaagaggacaaatatgatgcattctgtgtactgatgcccaaaatagaagctgcatctctagctttatgacctgacaacgtcaagagctttgaggaggagmaagctgcatttccatactttaaacacagagcgtgctgcctgtgaagcactaaggggatggaac

SEQ ID NO: 186471 - DNA, 596 bp, Homo sapiens
caggctggagtgcagtggcacaatctcagtttactgcaacctccacttcycaggttcaagcaattctcatacctccgcctcccaagtagctgggattacaggcatgcaccaccatgatcagctaatttttgtatttttagtagagacatggtttcaccatgttggccaggctggtctcaaactcctggcctcaagtaatccacctgcctcgacctcccaaagtgctgggattacaggcctgagcgccacttcgcctatttacatggtagcctaaatgtcagctctgcctctagaaataaagatggaattcatagatgcccagtttctgtgcctatgggaagtcaattctatctccacagctgaggtgtattcccagccgcttgtccttccctggtcacccctggctccatactccatttttcagagtgcagttatggattttctcaagtcttttgggcattgaccgtgtgaaaccagctggaaattgtcacttttcttcacactcgtgatgatacacacaaacaaacaaaaactcctgtgcaagtactgagagtagcagatttatctgaatatttataggggcagaggatcagaag

SEQ ID NO: 186472 - DNA, 520 bp, Homo sapiens
ttgatttatttcaacaagatggcaagcagtagtaagaagaatgactrttataaaggagttcattaaaatatcatcaattttgaatagtaagattgttttattgttttgcacataaatcaaagacaagtctactaaaataataatagactatttagtggactgattacaaaatcaatacttttcccatatttgaggaaagaacatatggaaataaaataataataaacacaagccctccacagtcataatgggaagtctaaaataaacaaccataaaatccaagccagtctggaaaatttatttgcaaaaatgacgtattgagagaaaataagaaaaatatttgagaaaagttgaatacagcaatcaatattctcacctaagtatattctccttggccatacccaccatatctgagtttctttctatagctatttccatactcttgtatatatccacctatgaatttacataaatgtaccaaatattatatacaaattaacagtgctttattctcccaaca

SEQ ID NO: 186473 - DNA, 550 bp, Homo sapiens
ctattgatggagaggtgcttcagaggtattacctgaaacacaaatgcaaaccaatggcatctcaacagcaagcagatgacaccaagggctcttttcaaaagtcctatcacatcatcacttcrttttttgtctgcaactgctattaaagggaatcttcatgggaagtgatttttgtcataccattacctgaagatcaataaggattttcttacagttaagaactatgtatttattaatgtgtgatatctatttttttctattttaaataaatgcatacattttatattctaaaattgggaagaaaaataaaagcagtattcattctatttttattgttaaatgtgcaatatttattatttttctcatgaataggtaatatattactattgcaaagtttatttttcaattaagtaaactgatgaactatcaggaacaacactttggatacccccttgaagagtctgattcctctgcaaagcctgaatgtgccagtgccagaaacagactccccagactctcctgaagccaggaccttcacctattaccaaat

SEQ ID NO: 186474 - DNA, 550 bp, Homo sapiens
ctattgatggagaggtgcttcagaggtattacctgaaacacaaatgcaaaccaatggcatctcaacagcaagcagatgacaccaagggctcttttcaaaagtcctatcacatcatcacttcgttttttgtctgcaactgctattaaagggaatcttcatgggaagtgatttttgtcataccattacctgaagatcaataaggattttcttacagttaagaactatgtatttattaatgtgtgatatctatttttttctattttaaataaatgcatacattttatrttctaaaattgggaagaaaaataaaagcagtattcattctatttttattgttaaatgtgcaatatttattatttttctcatgaataggtaatatattactattgcaaagtttatttttcaattaagtaaactgatgaactatcaggaacaacactttggatacccccttgaagagtctgattcctctgcaaagcctgaatgtgccagtgccagaaacagactccccagactctcctgaagccaggaccttcacctattaccaaat

SEQ ID NO: 186475 - DNA, 550 bp, Homo sapiens
ctattgatggagaggtgcttcagaggtattacctgaaacacaaatgcaaaccaatggcatctcaacagcaagcagatgacaccaagggctcttttcaaaagtcctatcacatcatcacttcgttttttgtctgcaactgctattaaagggaatcttcatgggaagtgatttttgtcataccattacctgaagatcaataaggattttcttacagttaagaactatgtatttattaatgtgtgatatctatttttttctattttaaataaatgcatacattttatattctaaaattgggaagaaaaataaaagcagtattcattctatttttattgttaaatgtgcaatatttattatttttctcatgaataggtaatatattactattgcaaagtttatttttcaattaagtaaactgatgaactatcaggaacaacactttggatrcccccttgaagagtctgattcctctgcaaagcctgaatgtgccagtgccagaaacagactccccagactctcctgaagccaggaccttcacctattaccaaat

SEQ ID NO: 186476 - DNA, 602 bp, Homo sapiens
tattatttttctcatgaataggtaatatattactattgcaaagtttatttttcaattaagtaaactgatgaactatcaggaacaacactttggatacccccttgaagagtctgattcctctgcaaagcctgaatgtgccagtgccagaaacagwctccccagactctcctgaagccaggaccttcacctattaccaaattctgaccattgggacctgcaagggaatactctggaggcctctggaaggtttccctgataaaaaatacatgcctctggatgtatatttggctgtcattgatgcctggaactcaaagaacaagcaacaggatcagtctattaaattaaggtcatcacagcagaaacgtgcaaagagcctgagttctcaatatcacaactgagcctttggaacaactctgaaattgcggacttggggtcttcttatggtttgaaataataagtgcctttattgtttaaactactcttagttgggttctctgtcattgaatacctaaagaatcttaactgataaattcaccactctgcgttttgtctgttttatctttaacaatctggcaatcgatctaatttacctcattgttgtt

SEQ ID NO: 186477 - DNA, 501 bp, Homo sapiens
tgcgtatgttgacagtgttcttgaacagttgttggctgaagattcgtttgaattcgatttttgtgaaatagatgattctgctgattcagatgattctgatgttagttctgtttagaaataactccaasagcaatttttatattttattttcacattgaaaatcaatcagacgtgcttcaacctcaaagagcgtgtttatgtaaaaactattaggttggagcaaaagtaattgtggtatttgccactaaaagtaatgtaaaaaccacaaatacttttgcacccacctaatgcatgagtgctggcagcgagctgcactctttttttctaaacaggattaaaatacatttccaaattattttgttaagttaccaaaacacaatattgaattttatgatctactgtcctgcccttttgtttttcttaaattttcttaatttttctttctcaaattacattcaagttgccattttcctctgcagtgtgtatgtggtgttcagctgt

SEQ ID NO: 186478 - DNA, 530 bp, Homo sapiens
gccgaggtgggtggatcatgagattagtagatcgagaccatcctgtccaacatggtgaaaccccgtctctactaaaaatacaaaaattagctgggcgtgatggtgcacactgtaatcccagctactcaagaggctgaggcaggagaattgcttgaacccagcaggcagacattgcagtgagccgagatcccatcactgcactccagcctgggcaacagagcaagagtccatctcaaaaataaataataaaccattcttttgtaatgtaatctatttaacaatatttatggccttacatttaaaaaatgtaagaattattgaactctagacattttaactatggaatttatttggcttaacatagtctaaaccttatttaagtttttacaaaaatattcatctatctgcttatatkactaaaagttttataaatcaatcccatttcttctatatcttctgtagtgactgctccctgagacaataatatcatctggctgagaattagaaacaggaagagaaaggcgggggaa

SEQ ID NO: 186479 - DNA, 581 bp, Homo sapiens
aacaaataacctgagattacattgattatttggttaattcttctgaagatagctataaagacttaatatcaaaatatttctctattggccaggtgtggtggctcacacctgtaatcgcagcactttgggaggcagaggcaggcggatcacttgaggtcaggagtttgacaccagcatagccaacatgatgaaaccccatctctattaaaaatacgaaaactagccaggcatggtggtgtgcacctctagtcccagttctcaggaggctgaggcaggagaatcacttgaacctaggggcggaggctgcagtgagtgaagttcacaccagtacaccctagcctgggtgacagagtgagactccatctcaaaaaaaatttatatatatatatacacatacacacatacacatatatatctattaagctttttaaattatatcaacttaaaggcagatatccttctatataatgtggcttgttccatcaagaatttgaggctcttcacactttttttctgaattmaagcaaacttccaagtttacatacaataaaaatagtcaaatatgttaaaaaaatgtgtta

SEQ ID NO: 186480 - DNA, 453 bp, Homo sapiens
ctttacatttacaattgtagatatttatttaactcatgagcgttttcctctgttttttatataattcttaatctatcctacatgtgtttctttttctcttaccggaacttcaacgacttacaatcatctgcatctcccagcaatctcatgatttcattcactttrtatttttgctctgtgggcatgaaatattaagtcatgtgatcctcaaggccactaatacaggtgcaaaaaagattatcttttgcttgatttctcttattgatatctgagttaataaatgatgtttgcttgtttttagtttcattttatcttttttatgattctcctttatctcctttttcttttcttgcctattaaatacattgtttctgtgatagttaatgttatgtgtcaatttggctgggctacagtgtccagatatgtggtcaaatgttaatctgaatatttctg

SEQ ID NO: 186481 - DNA, 378 bp, Homo sapiens
ggcaagtttgtttctgtccattgaktgcattgaaaacacaagtcaatcagaaagaaagattaatactgtgggtaggtgttggcaagtgtgcaaatctgcacagtgaggaaatgttcactgagcttatttcaaaggaagaacatgacagaatcaaggtttctattcccaacttggaacatcaagatgcagacattacattatttacataaatatgtgtgaggaaaagcatactcataaaacaattatatatttaataatagtaatttcaggttatttaaataaaacatactttggatatataaaaggaattgttaaatcaactgactaacttaacagatttcaatgtttctagctttagagacacgtaatctatgaatt

SEQ ID NO: 186482 - DNA, 514 bp, Homo sapiens
ttgccattgaatttggatgatattctaattttgtttctcttcatgttacttagtcattttgcctagaaacatgaaagatctttattttttcaaatctagtaattttatcagaatatayattggtgtgggttattctgcagcaacattatcatgtatggtattctttgttttcaatttttgtttcagctatttaaaaatatgtatttttaaaagtttacttgaattatagtttaagaactttttctttttctttgcttagttttcatcttcagggtttcttgttctctgcgtgtcgaatcatcttagcctatcttgcatatatgttcttttctcttgaaagttattttaatcttttgattgcattttaattttttaaaattttctcttttcaccttccatttgtattaatttttgtatgtttgctgttgtgttccttctaattttattcttcagtattaaaattatatttgccttatatgcctatttttcttgagttctcccatataatttatta

SEQ ID NO: 186483 - DNA, 514 bp, Homo sapiens
ttgccattgaatttggatgatattctaattttgtttctcttcatgttacttagtcattttgcctagaaacatgaaagatctttattttttcaaatctagtaattttatcagaatatacattggtgtgggttattctgcagcaacattatcatgtatggtattctttgttttcaatttttgtttcagctatttaaaaatatgtatttttaaaagtttacttgaattatagtttaagaactttttctttttctttgcttagttttcatcttcagggtttcttgttctctgcrtgtcgaatcatcttagcctatcttgcatatatgttcttttctcttgaaagttattttaatcttttgattgcattttaattttttaaaattttctcttttcaccttccatttgtattaatttttgtatgtttgctgttgtgttccttctaattttattcttcagtattaaaattatatttgccttatatgcctatttttcttgagttctcccatataatttatta

SEQ ID NO: 186484 - DNA, 542 bp, Homo sapiens
ctttgtcagatgtatagcttacagatatgttcttctactccctaacttaccttttcattttcaacagaatcttccacaaaacaaaaactttttaattttggtgaagtaaaatttatcaytttttccttttatagattgtttttggtgagaagtccaagaattctttctagccctagatattgaaaattttctcctcaaatactttttttatatttaactctatgatctatattgtgttaactttgtataatatgagatttcatttttttgaatatcaaggttagtttattttgcctatggatgtccagttgctgaaacactgttattgagaaggtaattttctctccacagagttgctttcaccactgccaaatcagttgggcatattgttggagttgatttgggggttctctgttctagttaatagttctctgtgtctataccttccccactaccacatagtcttggttaatgcagctatgcaatacattctgaaatttggtaagctaatttctcccacttttttatttcttttcaaaatt

SEQ ID NO: 186485 - DNA, 448 bp, Homo sapiens
ccgtctgagagtgacatcctctgatgctgacttgtgaactcatgcctctcacgcatcatttcagaaagacatttttacaaaatagagatgaggcctacatattgccattttaacctggaactgtgttttaacctaaatgattcaraataagtaggaatttggggcatgacggtttatatcttaggcggcgaatctaaagcaatctgaatacataatatttatggcattatgtagagtatcccctttgaataatccaaaagtaaaaaggctctagatggcttggatatatagaaagaccttaagcccacagacaaacagaataagggctgatttatttgcaggtgtaagcctagctactattttcccccaggcccacagtcagtgctcatagacacgaacaacttatttttttgtcccccaagagaagatgttttcgattttaaaacat

SEQ ID NO: 186486 - DNA, 586 bp, Homo sapiens
tgctcactcattggacatggaaacacctatgaagctcactttgcgttgaggaatcccccataacataatgggtacttatattaacccaagacaatttcatggttcttgcgaaaacctgcaagatcatcactgacctgaatgcagatccttctgcattctgcagactgagatagtgactcatctgtttactgagctaaattgggcctgtttataagaaatgtacacttacagagttaaaggactgtgtaagtttcttacaggtatggatttcagttagtttgtccatgatcatttgtatttatttttgggaaataagaggtttaaaaagataaccagaaaaccacaaaaaatatagtgagcactttatgagagagacttttataatttcatgggmatttagagggataaatcgcttctaactgatggaatcactcagactaatttatagggaggttgccatactggcaacctgaggttttttatctgtatctatctgatggatactaggtagagaaaattacgtgagtaaggcatggaaatatggaagcacgagtgtttaggtaatgtcatcagagttgtagttcag

SEQ ID NO: 186487 - DNA, 541 bp, Homo sapiens
cgtcaaccagggtctttctgacttagactctatatacttaattatgctctactrcacttttttttcaaaggctggcctggatcatcaatgacatctaactgtttagactaagagaacaaagatatggtctccataagtaacagtccaaaggaaacattttacaaaacaggtaagctgcaaagcactgcatacatgccagttattattacaagaggaagaatgtggcatcaagtttgagcttctctttataattctataagacaaatgaatgagagagagaggtttggcatgacagggaggtgagaaaaggttatatcaacaaacataacgacttccttttgtggaagcatgttcacatgaacacaaagtatccaggttgggtttagctcactgaaacacagtgaccctgttgctccacctgtaatgaatcaacacaacttattgggtatttggagtaaccagcattttattaggtcctgcatgtatatgacatcacagttcttttgtaaaacatcaacaaaaagttgagtaggttatacat

SEQ ID NO: 186488 - DNA, 541 bp, Homo sapiens
cgtcaaccagggtctttctgacttagactctatatacttaattatgctctactacacttttttttcaaaggctggcctggatcatcaatgacatctaactgtttagactaagagaacaaagatatggtctccataagtaacagtccaaaggaaacattttacaaaacaggtaagctgcaaagcactgcatacatgccagttattattacaagaggaagaatgtggcatcaagtttgagcttctctttataattctataagacaaatgaatgagagagagaggtttggcatgacagggaggtgagaaaaggttatatcaacaaacataacgacttccttttgtggaagcatgttcacatgaacacaaagtatccaggttgggtttagctcactgaaacacagtgaccctgttgctccacctgtaatgaatmaacacaacttattgggtatttggagtaaccagcattttattaggtcctgcatgtatatgacatcacagttcttttgtaaaacatcaacaaaaagttgagtaggttatacat

SEQ ID NO: 186489 - DNA, 596 bp, Homo sapiens
aaccctccaatgaggaatgctggcaaaagtatttcagccgggagatggtgggcagcggccatgtccaygcatgagcatgcaggaggtagtagaaaatgccagatcctgcatttgcattaatgaagcagggggaggctgcaggagaatgtgtgactgagaagcagttgaggaaagctgcaggtgagtatgtgctggccagggaggactgtgggcaggtgctcatcagtgggggcccaccagtagcagctctctgactattaggtggcatctgctggtgaaagagctattatgtggctgctggcaagcaccttggatggacagctgaggccacgctgcaagaggctgtagccagtagggaccctaggataggccaacagacagagtgttgcttagatcagactggctccatcctacaagaaagataatcctgctctgtccttgtccagcagtcaacaaaggctaaagccacctagaggagtgtggtgagccttggtttatgggtacccatggctgtactctactgtagctgttcctgcacaaaaccctctggcctccatgcaagctagagttccatccctgccaactatccagttccc

SEQ ID NO: 186490 - DNA, 558 bp, Homo sapiens
tacaattcgagatcagacttgggtggggacagacagccaaaccataycagcctctaactctcatttaatcaatgatactttgtaattgtcaacactctagttctttctttaccatgtgtgagttcttatgaaaaagtttgctactcttgtttcagagtattaattgtactttaattaggaaataggagaacttgtcacagtagagaaatatcttctccttggacaatcagcttagttaagtgcaggacactcagaacacagtagttattccttagatttaaataaaattaaaatcaatagatgcccactagatggttgaagatggcatactaaagtgacagtgtgtctactttcttcctttgggttgatgttactattttgagaggaacccccaaaatagctaagtagtagcttgactttcaggcctgtatcagtcaagctgctttaggctgcaagttaccgaagcatcaatataagttagcttagatactaaagaaaataaaccatttcctctaacaagaattgtcagaacagcttaactccaaggttgattaatcc

SEQ ID NO: 186491 - DNA, 558 bp, Homo sapiens
tacaattcgagatcagacttgggtggggacagacagccaaaccataccagcctctaactctcatttaatcaatgatactttgtaattgtcarcactctagttctttctttaccatgtgtgagttcttatgaaaaagtttgctactcttgtttcagagtattaattgtactttaattaggaaataggagaacttgtcacagtagagaaatatcttctccttggacaatcagcttagttaagtgcaggacactcagaacacagtagttattccttagatttaaataaaattaaaatcaatagatgcccactagatggttgaagatggcatactaaagtgacagtgtgtctactttcttcctttgggttgatgttactattttgagaggaacccccaaaatagctaagtagtagcttgactttcaggcctgtatcagtcaagctgctttaggctgcaagttaccgaagcatcaatataagttagcttagatactaaagaaaataaaccatttcctctaacaagaattgtcagaacagcttaactccaaggttgattaatcc

SEQ ID NO: 186492 - DNA, 558 bp, Homo sapiens
tacaattcgagatcagacttgggtggggacagacagccaaaccataccagcctctaactctcatttaatcaatgatactttgtaattgtcaacactctagttctttctttaccatgtgtgagttcttatgaaaaagtttgctactcttgtttcagagtattaattgtactttaattaggaaataggagaacttgtcacagtagagaaatatcttctccttggacaatcagcttagttaagtgcaggacactcagaacasagtagttattccttagatttaaataaaattaaaatcaatagatgcccactagatggttgaagatggcatactaaagtgacagtgtgtctactttcttcctttgggttgatgttactattttgagaggaacccccaaaatagctaagtagtagcttgactttcaggcctgtatcagtcaagctgctttaggctgcaagttaccgaagcatcaatataagttagcttagatactaaagaaaataaaccatttcctctaacaagaattgtcagaacagcttaactccaaggttgattaatcc

SEQ ID NO: 186493 - DNA, 558 bp, Homo sapiens
tacaattcgagatcagacttgggtggggacagacagccaaaccataccagcctctaactctcatttaatcaatgatactttgtaattgtcaacactctagttctttctttaccatgtgtgagttcttatgaaaaagtttgctactcttgtttcagagtattaattgtactttaattaggaaataggagaacttgtcacagtagagaaatatcttctccttggacaatcagcttagttaagtgcaggacactcagaacacagtagttattccttagatttaaataaaattaaaatcaatagatgcccactagatggttgaagatggcatactaaagtgacagtgtgtctactttcttcctttgggttgatgttactattttgagaggaacccccaaaatagctaagtagtagcttgactttcaggcctgtatcagtcaagctgctttaggctgcaagttaccgaagcatcaatawaagttagcttagatactaaagaaaataaaccatttcctctaacaagaattgtcagaacagcttaactccaaggttgattaatcc

SEQ ID NO: 186494 - DNA, 519 bp, Homo sapiens
acgtcaacatatgaattttaaggaacataattgaacccataacagtggtctcaacacggactttttaaaacaacttagttctctctgcatcaacagaaggcccaatcttcatattacacaaagaattggttattaggggtgggaggtggagagtagattaataaaaaaggtaaacattataggaggccaaagtgagagccttgcttaagcccaggagttcaakacgagcttgggcaacatagtgagactccatctctacaaaaaatagtagtactcccatctacttggagggttagggtgggagaatcacttgagcctgagaggtgaggctgcagtgagctgtgatcgtgccactgaaattcagcctgggcaacagaactacaccttgtctttaaaagaaaaataaacacaactcattcttttgagacgagaagctacaattcatttatcaaacaggttatctgctcactagggcatctggcatatagtagattcccagtaaatatttgttcaattagg

SEQ ID NO: 186495 - DNA, 519 bp, Homo sapiens
acgtcaacatatgaattttaaggaacataattgaacccataacagtggtctcaacacggactttttaaaacaacttagttctctctgcatcaacagaaggcccaatcttcatattacacaaagaattggttattaggggtgggaggtggagagtagattaataaaaaaggtaaacattataggaggccaaagtgagagccttgcttaagcccaggagttcaatacgagcttgggcaacatagtgagactccatctctacaaaaaatagtagtactcccatctacttggagggttagggtgggagaatcacttgagcctgagaggtgaggctgcagtgagctgtgatcgtgccactgaaattcagcctgggcaacagaactacaccttgtctttaaaagaaaaatwaacacaactcattcttttgagacgagaagctacaattcatttatcaaacaggttatctgctcactagggcatctggcatatagtagattcccagtaaatatttgttcaattagg

SEQ ID NO: 186496 - DNA, 700 bp, Homo sapiens
aacaacttccaggcacatggagttatcaaaagaggtacataccaagcccattatgtccattgctctcttacagcaactagagattgtaggtaagttgtctcacagattcaaaagctctatgaatttgtattttgagctatctgactttgtttgagcaaatattggatctaaactgggtttggaagtcacaacagaaactggactgggtccagaatcagactgagtccaggatcagattggttccaacagttaactggactggatccgtttagaggcctcagatgtctgattgagtcagacagaagctggcagggatagatgaaggaggcagataagggagagggtccccagagaatctctgacccacctgtgtcctgggagaacagggtgtagccatgggaagttcacgctttgtgcagcagggaagaggctggtctcttcagcaatgtgtgrtggtctggtattcaatctgtgaggtggagggcctgttagcaggactctctcttactttgctgagacttttttttcttttcacccaataaattctcttctcacccttcagtgtgtctgtccacctaatctttcctactcatgtgacaagaacctggttttagctgaactaaggagcaaaattctgcaacagcaataaatggcaatgactgcagggaagtacaaattctggcattcagaaatttgcagg

SEQ ID NO: 186497 - DNA, 355 bp, Homo sapiens
cttgttacaaatctgaggtggtttatagttatatttatatatgtacataggttcacataaatagaattgaaagattkaaacagtgaaaaggataaagaaattatgctaaccatggaattaacacacttactataaacattatgtttaaatttaattaagtcttctggaagcaaaggcaaaatagagaaataccataattacataattcataggtaatagataaaaacatatgaaaacttaagagcataactccttttcctgactctcaatcattaaagaaatgtatcatcatgaagctaatgtactttcccatcttggccagagagcaatggtgagactgggtgagagggtagaa

SEQ ID NO: 186498 - DNA, 358 bp, Homo sapiens
ctcagctggtctcctgcttccttatccctcatcttaggctccagcaaggggctggacaaraaaaaaaaccatgaggtgggggagggaagagggtgtgatttctctgccttgccccagcccccagccaatgccagagagcagtgttagatgagatcagaaaccaaggccagggcccctcacccgggccaaggaggagccacagagctcaggccaaagtccaaggccagttaacagtgacttgtcccacctctaccttgctgattacaaacagaaagagaaactagttgtggccaaagcttgggtcctattctggaggtagggggcctgctagtgcttcagggccccttttagccaggtt

SEQ ID NO: 186499 - DNA, 216 bp, Homo sapiens
caccattgcactccagcctgggcaacagagccggactctgtatcacacacacacacacacacacacacacacacacaaaatccttggctgctagagcgtgcattctagtgcggargagacaagacaataaacttgggctgtcagctggaactaagcgttgggagaaagcaaaagcatcctatgagtgacagagtgaacagttcagccactggaagg

SEQ ID NO: 186500 - DNA, 592 bp, Homo sapiens
aaatagttccaggttatgttaactttcccaaaggttggaaacactacctaggagaggtctatcaaatatgactattccaggatataaatagagcatggagcagacaggtggcttgactaagctgggccagtagggcttcagtcttccagcatggcactttacatccactctctatctgacacctgaatggtcaactgccttttcttataaaccagaatatcagggagtgtcagaagtttcaaactctgaaagatgcactgaagatcaaagatgtaacttatgtctttgaattcatttagcagctgccaaatctgccattaagcagactttaaaatcatatatttattgtgtgcaacatgatgtattgaagtacatatacattgaggaatagttaaatctaggtaattaacaaatgcattacctcacatactactacctctgctttttttttcaagaatccaatatatcatcattaatcatcaccatgctttacagtacatctcttgaasttattcttcctatctaactgtaattatatgtcccttgaccaacatctccccattccccctctccctaagtaccctggcctctg

SEQ ID NO: 186501 - DNA, 473 bp, Homo sapiens
gatttctttctcctagatcaggaaaaaggaaggaaaagcaaggggattctcttcagaatgtagattttccccaaatcagtcagctttgcaggactatttcaggacatggcaaataaaacatatttgggcttraactactttgatttccttctttatctgtcgtgtgatgttatgccagagtcaggttggaaagtgagccacattatatagggttaaataaaacccctttgatgagacattatggattgtagggtgtaacccaccagtccccttagatacaaatttggccaagagaagaaaaaggtcagtgtttagttctcaaatgtaagattgcaatgacatagcttctaccacctctagcaccacctccagaagacctcttaataaccttctgggcaggattatgcgacatcactcacactatgataaaggagaattttgttgagtcattttatacaaacaattgtcctacc

SEQ ID NO: 186502 - DNA, 473 bp, Homo sapiens
gatttctttctcctagatcaggaaaaaggaaggaaaagcaaggggattctcttcagaatgtagattttccccaaatcagtcagctttgcaggactatttcaggacatggcaaataaaacatatttgggcttaaactactttgatttccttctttatctgtcgtgtgatgttatgccagagtcaggttggaaagtgagccacattatatagggttaaataaaacccctttgatgagacattatggattgtagggtgtaacccaccagtccccttagatacaaatttggscaagagaagaaaaaggtcagtgtttagttctcaaatgtaagattgcaatgacatagcttctaccacctctagcaccacctccagaagacctcttaataaccttctgggcaggattatgcgacatcactcacactatgataaaggagaattttgttgagtcattttatacaaacaattgtcctacc

SEQ ID NO: 186503 - DNA, 473 bp, Homo sapiens
gatttctttctcctagatcaggaaaaaggaaggaaaagcaaggggattctcttcagaatgtagattttccccaaatcagtcagctttgcaggactatttcaggacatggcaaataaaacatatttgggcttaaactactttgatttccttctttatctgtcgtgtgatgttatgccagagtcaggttggaaagtgagccacattatatagggttaaataaaacccctttgatgagacattatggattgtagggtgtaacccaccagtccccttagatacaaatttggccaagagaagaaaaaggtcagtgtttagttctcaaatgtaagattgcaatgacatagcttctaccacctctagcaccacctccagaagacctcttaataaccttctgggcaggattatgcgacatcactmacactatgataaaggagaattttgttgagtcattttatacaaacaattgtcctacc

SEQ ID NO: 186504 - DNA, 506 bp, Homo sapiens
  misc_feature (1)...(506): n = A,T,C or G
gaattcttcactatgaagtgaggaaacccgtattcatttccttntaggtcatgagagccttggccaatttgaagaaagtggacctgattttatcagacacattgtttggaaatcaatgrgcatactgcttagttctttcttcatcctctgataaaagaacatatctgactaaataatatggtcagctcctgattatctacagaggggaagagaatttcacagatgaatttgggttctccagagaaacagaaccaataggatatatagagatatataagaggagatttcttatgagaattagtttgtgtgatcatggcagctgaggactcccacaatgtgccatctgcagcctggagacacagggaagccagtggtgtaattcagcccctgcctggaggcctgagaacccagaggaagggggagggaggccaccagcataagtctgaaggcccaagaatcaggagctccaatatctgagggctggagaaaacggatgtccaagccca

SEQ ID NO: 186505 - DNA, 572 bp, Homo sapiens
aagaacatatctgactaaataatatggtcagctcctgattatctacagaggggaagagaatttcacagatgaatttgggttctccagagaaacagaaccaataggatatatagagatatataagaggagatttcttatgagaattagtttgtgtgatyatggcagctgaggactcccacaatgtgccatctgcagcctggagacacagggaagccagtggtgtaattcagcccctgcctggaggcctgagaacccagaggaagggggagggaggccaccagcataagtctgaaggcccaagaatcaggagctccaatatctgagggctggagaaaacggatgtccaagcccagacagaaacgaattccaccttcctctgcatttgtgttctatttgggccttcaatggattggatgatgcccacccaccttggtgagggcagatcttcactcagtcttctgattcaaatgctcatctcttccagaaacaacttcacagatatagctagaaataatgttttaccagctaccagggcatcccttagcccagttaagttgacatgtaaagttaac

SEQ ID NO: 186506 - DNA, 407 bp, Homo sapiens
gtcacaaagacctgtttccctggcaaagtagaggaagggggaaagttgtgattacattaatttgggggtcactgttgtgcaaggatagctgcagagatgtatttccaatccaattctcacctctctaccttatttatctgarcccattaccactatctttactctcatgtttcctaggcctcaccaaaattagagactgtgttgggagcaggccccccaaaatctggccataaactggccccaaaactggccataaacagaatctctgcagcactgtgacatgttcatgatagccataacgcccatgctggaagactgtgggtttatgggaatgacggcaaggaacacctggcctgcccagggcggaaaactgcttaaaggcattcttaagctacaaacaatagctt

SEQ ID NO: 186507 - DNA, 607 bp, Homo sapiens
gaataactggatgtgaaaacataaaattaatgaccaatttatcatctcataggtttcttagtcccartggtgaacctgtctgtaaagtcagagaatttgaacagcaacaggttattcccttcacttgcacaattaattaaaagcccttgattcttccttggtgaaaaatgagggagatttccaacaggagagcaaattctgtaatgttggcatggaatgctggaagctgaacaactctgtcatcagaccaaacctggtccaatctttctgctacctgcttcatgttttgaatagattagtgtccctcttgagtgcatatgtatttaatcattcactcacatttgactttctttctctaggtcctcgtttttttcttgcttatttcaggtttttatagaactgcattatatggaggcatgattcatatgtcttatttttcctccagttatgaaattctgttttctttcgcagagattaatgaatctgctctaaatttcaaataatgatagcttttgttttctggtaactagccatgagctttatatgttttcttataaataatgtccttatttgaatatctgcctatactgccatgttgaaataagat

SEQ ID NO: 186508 - DNA, 512 bp, Homo sapiens
tatgaatttatttttgtctcattttggctttacaaaaaaaggacaaaataaaatagccaaaaaattgcccacaaaagatactgtgacacaggcaaagaaggtgtcactgctggaactgaactgttagccagctggyagcatcactatgcaatggtctgaaatggtcactgggtggtttgtgttcagaagtttaggatggaaaaggttcgtttcggggtatacttatgcaattgtgaatgtaccaaagcctaaaattatacaaacatgacctcttcatataataaatatggctgtgacttaaaaaatggtcagatatttaggaaaaacacagaacactgattggttgctaattagaccactaattatcaggaagggaagagagtttgactccctcctccccactgccttgtaaataaaaggtggaacatggttttccaagtcagtggatttgggctgaagttggtagaaatgtaaaattaaaaggagggcactgaataaaaagaatatccatt

SEQ ID NO: 186509 - DNA, 402 bp, Homo sapiens
tgagaattaaataaaataatccacacaaagcccttagtagaatgcctagtacatagcaagtgctcagcaaaggctatatgttaccactgatagtatttgatagatttacaaggaagggaattctttaactaaaatcaagagatgtcttgacagttatccaagtgtcccaagatgctgaaagacaatgtgaatctgacattctcagtagcataattttctagcttcacagtstattcaccgggagattggaggtaacaaatctgaactcctggctttggtgtctatttgatgtgcacagaaaacagtgagtttttgtttgtagagattgttctgttgcttgaactatagggaaaaccagtgggcacaattgctaataaagctgtacctctggcctgcaggctt

SEQ ID NO: 186510 - DNA, 608 bp, Homo sapiens
atgttaccactgatagtatttgatagatttacaaggaagggaattctttaactaaaatcaagagatgtcttgacagttatccaagtgtcccaagatgctgaaagacaatgtgaatctgacattctcagtagcataattttctagcttcacagtctattcaccgggagattggaggtaacaaatctgaactcctggctttggtgtctatttgatgtgcacagaaaacagtgagtttttgtttgtagagattgttctgttgcttgaactayagggaaaaccagtgggcacaattgctaataaagctgtacctctggcctgcaggcttcctgaatatcaatgggtatttaagagaaggggaccatagttttcatggatacaaacagattaatgacaagaagaaaacttgggagagatcaagtgttttctgtggcctcctctaacagactcatagccatgggtgctactgttttggaaacagaaagacctgcatttagatatttcttttcagtgtcttctctttttaactaatgatgtccctataacatgtcctttcatctggcccaatagcctgaggaatcttcctaaatttctcatgaggaagtaactca

SEQ ID NO: 186511 - DNA, 402 bp, Homo sapiens
tgagaattaaataaaataatccacacaaagcccttagtagaatgcctagtacatagcaagtgctcagcaaaggctatatgttaccactgatagtatttgatagatttacaaggaagggaattctttaactaaaatcaagagatgtcttgacagttatccaagtgtcccaagatgctgaaagacaatgtgaatctgacattctcagtagcataattttctagcttcacagtctattcaccgggagattggaggtaacaaatctgaactcctggctttggtgtctatttgatgtgcacagaaaacagtgagtttttgtttgtagagattgttctgttgcttgaactatagggaaaaccagtgggcacaattgytaataaagctgtacctctggcctgcaggctt

SEQ ID NO: 186512 - DNA, 538 bp, Homo sapiens
tttttaccctttgcctatggaactatcttttcaagaacacctacaaacatttgaaaatrtattagtgttttgagataaacagattatgaagcattgaccttgtgagaatcacacagtccaaggcaggtgcttatgacttgctcctctcaccactctgaagttattcaaatttaatgtgggcggtgaggcttggaatgggaagggctgtagctttgatgtgtcagaggatgactagaagaaggccagtggtggaagaaaaggcaagagagctgttcatctatttttgtttttgtaatatttggcaataattgagtaacaattatcctaatggattaatgtttatttggaaagttaccactatctgtttatgtttgcctcttaaaatttcatcaccacattgtctaaagacatttcattacttgtccttatagtcttaacaacttccccaagacttcaaataaggctttcaatctcctaccgaacatgggagaagtaagacactattctgccattttccttcaatctgctgttgtacgcc

SEQ ID NO: 186513 - DNA, 606 bp, Homo sapiens
acttttttagcttccacatatgaaggagaacatggaatatttgtctttctgtgcctggcttatttcacttaacacaatgacctccagttccatttatggttgccacgcataacatgatttccttcttttttatggccaaatagtactcaattgtgtatataygccacagctgcttcattcatttgtcattgatggacactaagattgattccacttctttgctattgtgaatagtgctataataaatatgagggtgcaagtatccctttgatatactgatttcctttcctttgaatcaatacccagtggtgggattgcttgatagtatggtggttctattttttagctttttgaaaaatctgcatgctgttttccatagtggctgtactaatttacattcatgccaagagttcattatattttttgggtattagtttcttgccagatgaatagtttgcaaatattttctcccatttaacaggctgtatctttattctgttgattgtttcctttgctgtgtagaagatttttagtttaaaacagtcccatttgtctctttttgttttggttgcctgtgcttttgaagtcttaaccataaaaatcttt

SEQ ID NO: 186514 - DNA, 524 bp, Homo sapiens
ttccaggaagttcagttctgggaagcatatgtgaaccgaagggaaataaatattcttttttgaggtcaagaggagtcatgagtaatttaatattggcatcccccctcctctctagctctctctggagccagtgacaatgattaggaacagrtctctgtctcttcccgtagaacttatatggaaatgtctgacttcccattcttttctctctagctgtgtagttactgagtggacatctcttttcctgctttctcttttatacctcagttattagctcatgtagtgaaatgaatagattggacagatatttaataagttctatggtctaaggtactgctcaagtccttgccctggaagtgatagatataataatataaaatagtgaatagagcaggatagaggctgagtgaagggggaagttgagtgatcagtatgggctgagtttggaaataaacttcagcaaagccactgctggaactttggccttagcgggtggcaagaggccagatatcaaggctagaact

SEQ ID NO: 186515 - DNA, 626 bp, Homo sapiens
attaggtaagtacttggccttacctaagtatttgagtcagttattggctgtaagctgctcattccaccttgtgtcttgtgtgtgtgtatgtgtgtgcgcacacacatgtgtatgtaagattttccyggtaaggtggctgggaatgtcaaggttaatcctccaacattcatgacaactcacaccgacccagtctgtggtcaaggcaccaatggcattcagcttatttgagatttttcactgttaacatctttaatcactagcattcctctacaccaacaacaatcaagcctagagccaaatcaggaatgaactcccattcacaactgccgtaaaaagaataaatacctaggaatatagctaactagggaagtgaaagatctctacacggggaactaattttttttaattctaaatttaaaatgttcaatttaaaattaaacaaatatttttaacatctctgataattttaaagtctttcacatttaatgtatgaaatatgacatttcatattctaatactttgttagctctaactcatttattcaataaactatttttcataattgttggagtttggagtgctgttacaccatatgagtattaatacattctaatgttgtgttacct

SEQ ID NO: 186516 - DNA, 626 bp, Homo sapiens
attaggtaagtacttggccttacctaagtatttgagtcagttattggctgtaagctgctcattccaccttgtgtcttgtgtgtgtgtatgtgtgtgcgcacacacatgtgtatgtaagattttcccggtaaggtggctgggaatgtcaaggttaatcctccaacattcatgacaactcacaccgacccagtctgtggtcaaggcaccaatggcattcagcttatttgagatttttcactgttaacatctttaatcactagcattcctctacaccaacaacaatcaagcctagagccaaatcaggaatgaactcccattcacaactgccgtaaaaagaataaatacctaggaatatagctaactagggaagtgaaagatctctacacggggaactaattttttttaattctaaatttaaaatgttcaatttaaaattaaacaaatatttttaacatctctgataattttaaagtctttcacatttaatgtatgaaatatgacatttcatattctaatactttgttagctctaactcatttattcaataaactatttttcataaktgttggagtttggagtgctgttacaccatatgagtattaatacattctaatgttgtgttacct

SEQ ID NO: 186517 - DNA, 598 bp, Homo sapiens
ccacaatgtggtacaatgaaatggatatttgctgcaagtatagtggtctgttttggtttatagataaaaattcaaaaagttttaattaagaaatggyttgcttatagctcacaggcagacttaatagtattaaagatacagagcttttgttttcagagacaatcaacagggtagacaatgtaacaaagttatgactcctattttttatgtttgaaatttcacatttgctcatactcctttccagaaataattttaaataccttaaaatgaaagatatgtatgataaggttaattaagaaccaagaaaatgagaaagaagcatttttcctttccccaaatatgtttatttaaatccaactttctttcatttagatacttttaagttctggggctagtaccaagtgatctgactcttttaagcataacactacgtattacctgagatatcgcaaatcttagaaaaagtatagaccctaagagacagggtgcaatgcaattaactcaagagaacttcaagtagccagttttgctttcaggtacttaggagaatggacttcaaaacctgtctttgcctttaacttactatgaaataatggcc

SEQ ID NO: 186518 - DNA, 598 bp, Homo sapiens
ccacaatgtggtacaatgaaatggatatttgctgcaagtatagtggtctgttttggtttatagataaaaattcaaaaagttttaattaagaaatggtttgcttatagctcacaggcagacttaatagtattaaagatacagagcttttgttttcagagacaatcaacagggtagacaatgtaacaaagttatgactcctattttttatgtttgaaatttcacatttgctcatactcctttccagaaataattttaaataccttaaaatgaaagatatgtatgataaggttaattaagaaccaagaaaatgagaaagaagcatttttcctttccccaaataygtttatttaaatccaactttctttcatttagatacttttaagttctggggctagtaccaagtgatctgactcttttaagcataacactacgtattacctgagatatcgcaaatcttagaaaaagtatagaccctaagagacagggtgcaatgcaattaactcaagagaacttcaagtagccagttttgctttcaggtacttaggagaatggacttcaaaacctgtctttgcctttaacttactatgaaataatggcc

SEQ ID NO: 186519 - DNA, 570 bp, Homo sapiens
aattatcttaatgggaacaatgagttgtgttaaaactgaaagcccttccctgaccactagttgaaattgggtcctctagtcacatactctcaaatcatcctgtacttctccttcatcatacataccacgattttatttaaataattatgtagtgtccaccacccctctgttcctgccattacccagccctcatgccccagcatgtaaactcaatgaggattgatccagtcttccagtgtttaacataacactttgggcgaagcaggtactcaataaatatttactgaatgaataaatggtagatggcaattatatacgtgtatagatttagrtattttctacttttaagtgtaagctatgagtcaggaatgagaccaacatccatttctatattgtcagtttcaaagtcagctatatgcgtcaccatgtaagtgttcactcagttcatctgaatttaacaaacacttcttgagtactaccatgtgctacagtactcagaatatagagatgctttcaacaagttcaccctccccacatacccttttcccatccaaacacaccagtggggaa

SEQ ID NO: 186520 - DNA, 474 bp, Homo sapiens
aacacttgctctctttgttatgtattgtgtgactttgcctgtgaataatcattgcagaggaataaatgggttcttctgggtgagccacctgtatttgcagcaatgctatgtatttgttgtacatagaccgggaagtgttgcagttaaacatttaacttagtttttcttttttttwaattttttttcattatactttaagttctagggtacatgtgcacaatgtgcaggtttgttacatatgtatacatgtgccatgttggtgtgctgcacccatttttaccctcctaagttccttgcaaatctgatggcttgccacagcagcatgctttccagtcagggagtctatcatttccatcttaagactctgctgtctcaacatttaacttgcaaggttgctatggcaggggacacaaaccatggaaatctcactgttcttctctttggcccagactgacattacacttattgtccatt

SEQ ID NO: 186521 - DNA, 395 bp, Homo sapiens
aattccatctcaagcacagattttgcaaacatttttacattgctagattttattttaattgttgcaaaccgtaaatttagtttctttgcattccacttcctaatgtgttcrttcatttaaaaaatacttaagtacctactatgtgccaggtactgttctaagtgttggaaatatatctttgaacaaacagataaaattcctgagttcatggagcttacattctattgaagggcagaaatatgtacacaataaatataatacctaagaaaatggtatatgctattttttaaaataataaagcagggtaagagagcttaagtgtgaagactgggaagaaagataaaatgtaagataatgtagctggggtagctatacttgcatggtgacatttgagc

SEQ ID NO: 186522 - DNA, 552 bp, Homo sapiens
atcaagaccatgttggatctacctcctcaacccagcagagagttggaaatacagtaggggctcagtaaatggtgaattagttagttaaccaaatggtgaaatactatttctggtcaggcacaaagctgtgatccacatatgtatacattaggtagaatttaccagagcacattttataaaatattcagttagatgtaccatagagggacaacttctgagttgaaatatatttggaaaacatacaatctccctcatagatattcaccatgcatgttaacattaagggtttaaattgtggttttattctagttccagaaaggaaaaagttgccaggcagctaagacacttgaaattaaaaaatatttactacctttgttaygaataaaatcgagaagggagaatttcataaaacataaatctgatttacatataattatttggtacatattttattggtaatatggtcattctatggcattcaaggaatacataaatcatagagtttagtagccttttttggctttaaaacattctatttaatgcctaaaataa

SEQ ID NO: 186523 - DNA, 575 bp, Homo sapiens
ccctttccttttcctccaaggctctcacttctctccatttccttgggataatcccctcaaagagttcaggttagaaaacaaagcagaaaaggaacctgtccttgggttatttttattttaactccatcacaaagggtcccagaacaaaaaggtgaggttaccmcctcaaggtggggttggaaaaatgagaacaaaacccaagttaaaatctcaacaaaatattttgtcaacctccagctaggtggccttggaaaagtcccagtaaaaaaaaaaaaaaagtgccagtacctttaagcctcatcaaaattttagatctaaaaaaaaaaaaaaaaaaaaaagaaaagaaaaaaatatttctggggatcaaaagagggcaggcatgtgaaaattttttttgatgctaaatattagtggtagcagttattcttgattttgtaattttgtaatgccccttgcatagcagataccaatttgcagctgggagatgaaagagagtccagtcttccatacactatttcttacgtagtttggatctggtctgagcagactgctatactgagttccatgctaactaa

SEQ ID NO: 186524 - DNA, 575 bp, Homo sapiens
ccctttccttttcctccaaggctctcacttctctccatttccttgggataatcccctcaaagagttcaggttagaaaacaaagcagaaaaggaacctgtccttgggttatttttattttaactccatcacaaagggtcccagaacaaaaaggtgaggttaccccctcaaggtggggttggaaaaatgagaacaaaacmcaagttaaaatctcaacaaaatattttgtcaacctccagctaggtggccttggaaaagtcccagtaaaaaaaaaaaaaaagtgccagtacctttaagcctcatcaaaattttagatctaaaaaaaaaaaaaaaaaaaaaagaaaagaaaaaaatatttctggggatcaaaagagggcaggcatgtgaaaattttttttgatgctaaatattagtggtagcagttattcttgattttgtaattttgtaatgccccttgcatagcagataccaatttgcagctgggagatgaaagagagtccagtcttccatacactatttcttacgtagtttggatctggtctgagcagactgctatactgagttccatgctaactaa

SEQ ID NO: 186525 - DNA, 575 bp, Homo sapiens
ccctttccttttcctccaaggctctcacttctctccatttccttgggataatcccctcaaagagttcaggttagaaaacaaagcagaaaaggaacctgtccttgggttatttttattttaactccatcacaaagggtcccagaacaaaaaggtgaggttaccccctcaaggtggggttggaaaaatgagaacaaaacccaagttaaaatctcaacaaaatattytgtcaacctccagctaggtggccttggaaaagtcccagtaaaaaaaaaaaaaaagtgccagtacctttaagcctcatcaaaattttagatctaaaaaaaaaaaaaaaaaaaaaagaaaagaaaaaaatatttctggggatcaaaagagggcaggcatgtgaaaattttttttgatgctaaatattagtggtagcagttattcttgattttgtaattttgtaatgccccttgcatagcagataccaatttgcagctgggagatgaaagagagtccagtcttccatacactatttcttacgtagtttggatctggtctgagcagactgctatactgagttccatgctaactaa

SEQ ID NO: 186526 - DNA, 575 bp, Homo sapiens
ccctttccttttcctccaaggctctcacttctctccatttccttgggataatcccctcaaagagttcaggttagaaaacaaagcagaaaaggaacctgtccttgggttatttttattttaactccatcacaaagggtcccagaacaaaaaggtgaggttaccccctcaaggtggggttggaaaaatgagaacaaaacccaagttaaaatctcaacaaaatattttgtcaacctccagctaggtggccttggaaaagtcccagtaaaaaaaaaaaaaaagtgccagtacctytaagcctcatcaaaattttagatctaaaaaaaaaaaaaaaaaaaaaagaaaagaaaaaaatatttctggggatcaaaagagggcaggcatgtgaaaattttttttgatgctaaatattagtggtagcagttattcttgattttgtaattttgtaatgccccttgcatagcagataccaatttgcagctgggagatgaaagagagtccagtcttccatacactatttcttacgtagtttggatctggtctgagcagactgctatactgagttccatgctaactaa

SEQ ID NO: 186527 - DNA, 446 bp, Homo sapiens
acaataaaattttgaataaatcatctgttcatcacaatacactgataagagggttaaaatacaaaccacacagtggaatatctgaaacatatgtaactcataaaggactccttcacatggacattttaaaaatgtaaaactttgacaaatcaataagaaaaagatagmtacttattaaagataggcagtaaacatatgaaagggtgttcaagtccattagtaataagggaaaagaaaattaaagccacagtgaagagtcaactgatctttgatgcagggtcaaaggcaatactatggagaaaagagtcttttcaataaatgttgctggaactgaacatctgtatgcagatgcaaaaaaaaaaaagtggggggttacaaaagagattacagacctaaatgtaaaatacaaatttataaaattcctagtaaaaattcccagaaagtaa

SEQ ID NO: 186528 - DNA, 451 bp, Homo sapiens
acaataaaattttgaataaatcatctgttcatcacaatacactgataagagggttaaaatacaaaccacacagtggaatatctgaaacatatgtaactcataaaggactccttcacatggacattttaaaaatgtaaaactttgacaaatcaataagaaaaagatagctacttattaaagataggcagtaaacatatgaaagggtgttcaagtccattagtaataagggaaaagaaaattaaagccacagtgaagagtcaactgatctttgatgcagggtcaaaggcaatactatggagaaaagagtcttttcaataaatgttgctggaactgaacatctgtatgcagatgcaaaaaaaaaaaagtggggggttacmaaagagattacagacctaaatgtaaaatacaaatttataaaattcctagtaaaaattcccagaaagtaacatag

SEQ ID NO: 186529 - DNA, 450 bp, Homo sapiens
tgtgtgatgctagattttcttcatgtactgcaaccaaaacaacttataataggttgaatgcagaagtggatgtatatctgtctttattaagccagatatagaaaaaaaaataggcctgccaacccaggtgtaatagaataaggaggatgcaattatggcaagaagtccttacatagaggtcaagtagactgtggtcactttactatgtgtggacgtgaccacttgtacaaaagggaattgagtccctgggcatcggtttctcatttttggcagtttctcactgtctgtggtccctattgatcactgaactttagggacatctctgtgaggagttagagaggcactggggagctgtgtacatttgctcatcttcttagtttatatatcctttatagtacttccttrctggttcagttatgaaccagagtaaaggcaaaattagtcctagtc

SEQ ID NO: 186530 - DNA, 585 bp, Homo sapiens
aacactaactatgtgctaggcacagttctaggcattggggacatgcaggtgaacaagacacatgaagaccctgttcttgtggatactggggttggaaaggatagataataaagaatgagtaaataagaaaaatgccacctggaagataattctctgttatcaaaaatgaaagaatgtgtggaaatactgggtggttgagtgaccatttatgtcaggtgatcgggaaaggtctttctgagggagyagcacttgagctgagctttgagtgaaaagaaagactgaggcaaatgaagagggaggaaagggtattcccagaaaaaaggccagcttgtgcaaagaccataactaaggaatttaaagaggacagggggaaaagggagagtggagcagggtggggttaaagaagaaggcagaggctttgttagccatcttaaggagtttggattttatttcagatgcagtagaaaaccatcagagaattctaataaagcagagagatgtttaaaaaatgccaccctgcctgctatgtggaaatagatcttggagggcaagagtgtctgactcttgtagttaaactttgagctg

SEQ ID NO: 186531 - DNA, 585 bp, Homo sapiens
aacactaactatgtgctaggcacagttctaggcattggggacatgcaggtgaacaagacacatgaagaccctgttcttgtggatactggggttggaaaggatagataataaagaatgagtaaataagaaaaatgccacctggaagataattctctgttatcaaaaatgaaagaatgtgtggaaatactgggtggttgagtgaccatttatgtcaggtgatcgggaaaggtctttctgagggagcagcacttgagctgagctttgagtgaaaagaaagacygaggcaaatgaagagggaggaaagggtattcccagaaaaaaggccagcttgtgcaaagaccataactaaggaatttaaagaggacagggggaaaagggagagtggagcagggtggggttaaagaagaaggcagaggctttgttagccatcttaaggagtttggattttatttcagatgcagtagaaaaccatcagagaattctaataaagcagagagatgtttaaaaaatgccaccctgcctgctatgtggaaatagatcttggagggcaagagtgtctgactcttgtagttaaactttgagctg

SEQ ID NO: 186532 - DNA, 517 bp, Homo sapiens
atccacgtcactaacattttataactttttttaatcaaatggacataaaatagcatgtctmtgtggttttgatattttatttccttgattactagtgaggttgcatatctctttataagtttactggccatatatatttcttcatctatgaaatatctactcatgtattttgctcctctattgaattgtatgtttcttataggtgtatgagtttttcacatgttcttgatcctaatcctttattatagagtgtatgtatggcaaacatctttttctagttgtggcttatcttttcacacaatttaagctgatatttaagatacaaattcttaatttaaataagattgaatttatcaacattttatagttagcactttctgtatcttgtctaagaaatcctcatcactttccccaaccctgccaccagtatttgactatattaaatttttgttctttcttataaattataaggcagagtggttcatacctgtaatcccagcacttagggaggcagaga

SEQ ID NO: 186533 - DNA, 519 bp, Homo sapiens
aactttttttaatcaaatggacataaaatagcatgtctctgtggttttgatattttatttccttgattactagtgaggttgcatatctctttataagtttactggccatatatatttcttcatctatgaaatatctactcatgtattttgctcctctattgaattgtatgtttcttataggtgtatgagtttttcacatgttcttgatcctaatcctttattatagagtgtatgtatggcaaacatctttttctagttgtggcttatcttttcacacaatttaagctgatatttaagawacaaattcttaatttaaataagattgaatttatcaacattttatagttagcactttctgtatcttgtctaagaaatcctcatcactttccccaaccctgccaccagtatttgactatattaaatttttgttctttcttataaattataaggcagagtggttcatacctgtaatcccagcacttagggaggcagagaggggaggatagcttgagcccagga

SEQ ID NO: 186534 - DNA, 412 bp, Homo sapiens
tgcttatatggggacaaaaaccaggtacacttaaaaattagtcaatgaataattaaaatataaatatttataagttaagccttcaaaatatcttgtatgcgataaatacatagaattttatctgtcaaaaaaaaaaaagytgtcaagtataaaaatttagtgaaagtagaccagcacagactgggaaaaccaggccagttatatgtgttcattgtaacattccagacagtacagaatgcacagtatagaattctgattacattccaagcaatgttttatgaggggtgctgactctaagtgtccttagtgtgtaaccttgggcatggcacctaatccctctgtaaactggagttgttgtgagtaaataagagagtaggtaactgtaagaatgtcaggaattgctatgggcagt

SEQ ID NO: 186535 - DNA, 384 bp, Homo sapiens
gacccacaaccagatgagccagtttattaatctgggtggtgccagctgatccatcaaatgcagggyctgcaaattatctcaagcactgatcttaggtttcacaatagtgatgttatcccccgagcaatttggggagggtcagtcttgtggcctccagctgtatgactcctaaaccataatttctaatcttatggctaatgtgttagtcctacaaaggcaatctagtccccaggcaggaaggaagtgtttttttttttttttggaaagggctgttaaaaggaggttttttttttttttttttttttttttggaaacgggtgttattttctttttcaaagttaagctttcaactaagtttcccccaaagttatttcaccctaccca

SEQ ID NO: 186536 - DNA, 507 bp, Homo sapiens
  misc_feature (1)...(507): n = A,T,C or G
nnnnnnnnnnnnnnnnnnnnnnnnnnnnnnngaattcattggtcatttaatcctgtcacttggacctccccttaacttcagactcttccttccctttccatctgcactggtgctgttcttcccatcctcctgacaggcccttctctctaggtttacctctctgcaatccatcttccatgcaacccagaggtctgctcttcatctctgagagcyccgaagtctccaaggatcctctgtatccccaggtcaagcccaaactccttagcctgggtcaaaggtcttaaaagacctgccctgctctccttcagcctcctctcccatcattcccaccctcacacactcaccactgcagcaggatgaagctgctcacagctcttccgtgggccgagcttgcattcttccatatctttccacaggctggcccctgccctcttgcctgggtggtgaagccctcagtttccatcctagtccagccactcactgatgatatgaactggtacaagttat

SEQ ID NO: 186537 - DNA, 367 bp, Homo sapiens
ttttaaacttttcaaccaacttttttggaatagaggactatagactcatgtctataaattctatacattttctaaattatrgatgatgtttatagaattcacagctaatctttttctatccctagatttcaagaacatttaaacaagctaagtattcaaaatatgttaaagttaaattcaaaaaccacagtttgaatcccaatagggtttcagctatagaaaaatttagttaaaccagtgaaggtaggagatggcaaatggagttgagtgctacataatttaactttaagaaaaacataattaaccagcctatcattttatacaactgatcatttataatgagaagatatggggtaaaagccaggcg

SEQ ID NO: 186538 - DNA, 633 bp, Homo sapiens
gccattatactttcatggtttagctaattgagaattgactatacgttaagtcatggagtaatttcttttcactcttgagtagtgtacagaatgtagactagacaattgggttgccattagcagttagcagagggcaggtggagcctttgtgtcatttttagaactaggcatatctctcactactgtgcgtttaaaagaatgggactttctgaaacatttttatgagctcatacaccagtagggtcacagggtcattgacttttcctgggctgtaagggatctcagaaaccatctagcccaatttcatttatttcaccattargttaactggagaccagggagataaaatgccacataattactgatgaggccagacaagaaaaattagaaagtgctaagtcttcaatgtttatgtacaactagttatgctattaccactagtttctagggtagtcagggcattgtcagcgagaaaaaaaaatgttgtcaggagcaggaaagaaacattgctaatgaaacaaagaaatactggcatgggtggtatgagggcattttttaaaataatagaagcatatttcttttggaaagggaattctaggatcaactagtaattgctggaatatcagggtgggg

SEQ ID NO: 186539 - DNA, 633 bp, Homo sapiens
gccattatactttcatggtttagctaattgagaattgactatacgttaagtcatggagtaatttcttttcactcttgagtagtgtacagaatgtagactagacaattgggttgccattagcagttagcagagggcaggtggagcctttgtgtcatttttagaactaggcatatctctcactactgtgcgtttaaaagaatgggactttctgaaacatttttatgagctcatacaccagtagggtcacagggtcattgacttttcctgggctgtaagggatctcagaaaccatctagcccaatttcatttatttcaccattaggttaactggagaccagggagataaaatgccacataattactgatgaggccagacaagaaaaattagaaagtgctaagtcttcaatgtttatgtacaactagttatgctattaccactagtttctagggtagtcagggcattgtcagcgagaaaaaaaaatgttgtcaggagcaggaaagaaacattgctaatgaaacaaagaaatactggcatgggtggtatgagggcatttttwaaaataatagaagcatatttcttttggaaagggaattctaggatcaactagtaattgctggaatatcagggtgggg

SEQ ID NO: 186540 - DNA, 629 bp, Homo sapiens
agaaaaattagaaagtgctaagtcttcaatgtttatgtacaactagttatgctattaccactagtttctagggtagtcagggcattgtcagcgagaaaaaaaaatgttgtcaggagcaggaaagaaacattgctaatgaaacaaagaaatactggcatgggtggtatgagggcattttttaaaataatagaagcatatttcttttggaaagggaattctaggatcaactagtaattgctggaatatcagggtggggccctacatgactttttcttcatgaactaagtaaaaygagccaaacattgttcacagcctagaacactaggcagctcaaaggggagatacttgaagcttgacagagataaattttggacaaatgaagcaaatactaatttatcttgtgggtaatacatttttcattacatcaagaaatagatggaagattgaataggctctgtcaaaaatacaatcagatctagttagaaaaaaagttaaaagtttattgtcatacagtaagagaaagtacagactgtgatctgggagagttcaaaccaagtgggaagaggctggccttacagcagtgacggcagtttgttgctgttattgttgttgttgttttgagatggagt

SEQ ID NO: 186541 - DNA, 623 bp, Homo sapiens
cttgattgtgctcttgaaagtgagaacggattttgcggacgtgccctcctctactttctctaatgtcatattagccaataattgtgtcatgtgcccatgcctacaccatgattgacttaaaccattcaaaatttatccccagaggctggggccagcctgcctgcagcatttggctaggcaaaggaagaaaaatgtagaaccctaaataaaacaggaatgatcacaatgaggctgatatcagaagggttactgacaaaggtaatagtggaggatggaggcatggaaccaacattaycccaaggtgtaaagctcatgctgtacattaaaattcagtggctaagttagtttaatttttgatttgcaggtaatcttaggctatgctgtgcatttttatggaattaaaaaaatccattattatacaattccaattagaacaattcccaagccattgtttttcagccactgcttaactcttttatttttgggggggagggcgggggacagagtctggctttgtcacccaggctggagtgcagtggcatgatctcagctcactgcaacctccacctcctgggttcaagcctctcgaatagctggggttatagccatacaccaccatgacc

SEQ ID NO: 186542 - DNA, 623 bp, Homo sapiens
cttgattgtgctcttgaaagtgagaacggattttgcggacgtgccctcctctactttctctaatgtcatattagccaataattgtgtcatgtgcccatgcctacaccatgattgacttaaaccattcaaaatttatccccagaggctggggccagcctgcctgcagcatttggctaggcaaaggaagaaaaatgtagaaccctaaataaaacaggaatgatcacaatgaggctgatatcagaagggttactgacaaaggtaatagtggaggatggaggcatggaaccaacattaccccaaggtgtaaagctcatgctgtacattaaaattcagtggytaagttagtttaatttttgatttgcaggtaatcttaggctatgctgtgcatttttatggaattaaaaaaatccattattatacaattccaattagaacaattcccaagccattgtttttcagccactgcttaactcttttatttttgggggggagggcgggggacagagtctggctttgtcacccaggctggagtgcagtggcatgatctcagctcactgcaacctccacctcctgggttcaagcctctcgaatagctggggttatagccatacaccaccatgacc

SEQ ID NO: 186543 - DNA, 473 bp, Homo sapiens
cctgtgcacagccttgctccaggcatccatccttccatctgatactatttatccattaacaacaaagataatatggcctcaaaggtgctcaaagttttaacagtttaaggtcgcactgtcaaatttgctgcctctttagggaactctttgttgtcttttaggctttgcttcaataccttaacaatttattagaactctcaatgtgacagagttaatgtacatttaagataatttgactagtactatgttaagtattttgaaggctacatagctataagagggaaacaaatagacaattaacctcgatgagttcaaggcaaggttattaatagaaaataaactrtatccattatttctgtccagtggaagaattagttttcaaaacacatccagcaacaatttgatatacatacttttctttctaaaagtagcagtagggacagaacaaacaacagaacacagagagaggaaca

SEQ ID NO: 186544 - DNA, 522 bp, Homo sapiens
aagaatttaagtgaaatgtagtaaatacattgacacctctcaaatactatagttactttaaattcttcattaattttgtgatttaggtgatattaccacttttcttaataatatgattgaaatttcttgagattaagtgctgcaaattggtaaatgccaacagctggattttaatctaagccaattctaatcttagattttttcctcactgtccttaataataataatggttattcatacacatatttaaaacaattttgttgtattctccttttttccatatattgtttttctgataaaaaatacctcattatcccagttggatctgattaaaagagccattttccttaaacacaattattttaattttgkctgttgacctgctacaaatcaccttgcaaataagtaggaaacacaaaatcacatgcagatattaggatttagatcaaacagatatgttctttgtgaattccttaattcttaggtttgcatctggaaatcctggacacaaaagtaaagaaa

SEQ ID NO: 186545 - DNA, 488 bp, Homo sapiens
ctttctatcaccaaaatttgctaaattttgaagatgtaatttaaaagttatctgatattctattaatttttgcaatatacatttggaatttaaacaatttaggcaaagtcatgagatcaagccttgccattaagaatttattttccccacttatgtaagtttgccaaagttatactttacatatttgtttgtttatttaaccacatgacctatgtgagattaggaaatatacatttggtytttgtcccaggttcctgacataaagctcctaaaatcattggaatccctaatgattagtgtattttgcacatttatatgctaatgagatgactgctggctggggccccttgatagctttaggataagggctggtcaccaaaaagaccaaagcatgttttttttttttgttttgttttgtattttggcattattgattggaccgaagccaatcaacttaatgttggcatgattggaccaaagccacccca

SEQ ID NO: 186546 - DNA, 656 bp, Homo sapiens
ctaacagtgactattacagagaagtttctaactttaatgatgtttaatctatctttttttcatagattttaattgtggtggtacatctaaagtaatcacaaaacccaaaatgacatagattgtctcttgttattttatattatttataatgatattatatagcatataatttaaaactatgaacaaagatagytttctttctttataatctgcatgctttattttattttcctgcctgatggcactagctagaaattccagtacaatgttgaatacaagtagtgagaataacagtctttgccttgtttctgatcttagtgagagagtatctaatttatcaccattatatgtgatgttagctgtaggatttttggtagatgttctttatcaagttgaagttcccctctatttttattttgctgagttcctaccgtggatggctgatgaattttctcaaatgcttttctgcatctgttgatatgatcatatgatttttcttttttagtttatcgatgtaatggattacattaattgatttttgaatgttcatccagtcttgcatacctgaaataaatcccacttgattgtggtgtgtaattatctttacaaactattggggttgatttgctaatattttgttgacaattgttatacat

SEQ ID NO: 186547 - DNA, 488 bp, Homo sapiens
agtctattctcttactccaagtcctgggagctgtaggcaataataaccataagtgcttgaaggacagtaatatttaggatgatatgcaggttctctcactctggaaggcagaatttagggcattgattctcagaccttaatgtacatatgactaaactagggattttgttagaattcaaattctgattcaatacattttgggtaatcttagatatttgctgcatttctagcaatcttccagcaatgctaatgctgttggataatgggcgacwctttcagcagcaaagtttcaggaggtatgtagaaaggtactctcttctggcctttcaagagcttgacaagtagtcgagactttgaactgttataataacacctcaggtggcaaggcttggtcttgtaccactgaaattgacctatctgtgtgtgtgattgccctcgttatggaggaaatcaattacttcttcctctcctctgctttgtgtatgtgt

SEQ ID NO: 186548 - DNA, 549 bp, Homo sapiens
gacagctgcaaaactgctttgccaagttaaaaatgcaatcgtattttgaaagatacttgtttgttaaacataaaatgatttatttagttgcctgtttataatagttttagagaaatattactctaggaatatatttttatgtgaaatgactattaagagttcattatatttttccatgtttaggattctattctctcatttctttaatatcctctgcaattaaacactgacaaaaatggactcacttctacttttttggttttattcttctcatatccttccttgtgaatatcctcacataactttccactgtctactagatatataatcaaatgaaaattatctgtttaaccccaattaagagctcaacacaactgttcaacccctcratctggcattcatcaagcccttagccttgcactatcttgcctcattcaacccattttctatttcttctcaaacgaattaatgaaatactcaactactgacctcactgctttctacaaaggcatttgtcccttggaaaggcttttggttttggttttgttt

SEQ ID NO: 186549 - DNA, 549 bp, Homo sapiens
gacagctgcaaaactgctttgccaagttaaaaatgcaatcgtattttgaaagatacttgtttgttaaacataaaatgatttatttagttgcctgtttataatagttttagagaaatattactctaggaatatatttttatgtgaaatgactattaagagttcattatatttttccatgtttaggattctattctctcatttctttaatatcctctgcaattaaacactgacaaaaatggactcacttctacttttttggttttattcttctcatatccttccttgtgaatatcctcacataactttccactgtctactagatatataatcaaatgaaaattatctgtttaaccccaattaagagctcaacacaactgttcaacccctcgatctggcattcatcaagcccttagccttgcactatcttgcctcattcaacccattttctatttcttctcaaaygaattaatgaaatactcaactactgacctcactgctttctacaaaggcatttgtcccttggaaaggcttttggttttggttttgttt

SEQ ID NO: 186550 - DNA, 492 bp, Homo sapiens
ataggtaaaattatgccatggaagaaagcatacatttgcttctctcaactatcttagggcaaaatcttgtcaattctatagctagatcatcctgtgagatgtgctcaaacacttagtgcttcaatgcgtcaccatggtaagaaagctggtcttagagtctttctgtgatttgggtttcttacaccatgtttttcaagtaccagcttttatagctttgcagaatcatcaagggcaacaggtccttctatgtgtctataacaggaaacacattttccaaaggtatacacttcttcttggttctcttctatcactgctcatagtgctgaaattctcgtgcatggcatttattttttgactgtcactaaacaggccgaacaactcaaaattgcggcyttgaaactctgaaaaccaaaagtattaatattggtgcttcttagttaaaccataattaatgttcacaattacttaataaaagtgtaaatgaacaagcag

SEQ ID NO: 186551 - DNA, 483 bp, Homo sapiens
aattgtatcttttttttaaagatatgcattaatggggggattactggaggtagaagagatatctgatgtatatgtggatagtaactgcagggaagagggaactagagattcgacagtcctgtcctgagcatcctgccctgtcctctctttcagcaggcccttgtgtctgagaatgactgcttctgtgatctgatgagcacacgtggtgtgcatccagtggctctgctcttaaactaggcccatgactaccaacagtcattcttcctgggctgctgagaccagaaaataaaagtgccttccaaakggtgagtgggcattgctcaatgactgctaatagctattctacatgctgggtaacagtttttggatgagttagaaaaaaatccagattttattgactttattgctaattatatcatctttggaaaggaaccacctggaggaagggaggagaaaagagttcaaactcatctgcagagttgt

SEQ ID NO: 186552 - DNA, 533 bp, Homo sapiens
gcttctcctctgtcatcgttccccttgtttggtgcatttgagtgagagtctgttttgcacatttcagagtctaacacctcccccaccctctcagacccccaattcaatcagtaaacaagtcccagaaattctaactccaatgtatctactaactgccacctcctctctcttccctttggcactgctcagtccaggccctcgctttttgtggatttttttktttgtttgttctgttttttgttttgagacaaggtctggctctgtcacccaggctggagtgcagtgccacaatcttggctgactgaaacctccacctcccaggctcaagccatcctcccaccacagcctcccaagtacctgggactacaggtgcacaccaccacaccagcctactttttgtatgttttgcaaagacagggttttgccatcttgcccaggttggtctcaaactcatgagctcaagcaatctgcctctggctgcctcggcctcccagagtgctgggattacaggtctgagccaccatgcccggcca

SEQ ID NO: 186553 - DNA, 533 bp, Homo sapiens
gcttctcctctgtcatcgttccccttgtttggtgcatttgagtgagagtctgttttgcacatttcagagtctaacacctcccccaccctctcagacccccaattcaatcagtaaacaagtcccagaaattctaactccaatgtatctactaactgccacctcctctctcttccctttggcactgctcagtccaggccctcgctttttgtggatttttttgtttgtttgttctgttttttgttttgagacaaggtctggctctgtcacccaggctggagtgcagtgccacaatcttggctgactgaaacctccacctcccaggctcaagccatcctccyaccacagcctcccaagtacctgggactacaggtgcacaccaccacaccagcctactttttgtatgttttgcaaagacagggttttgccatcttgcccaggttggtctcaaactcatgagctcaagcaatctgcctctggctgcctcggcctcccagagtgctgggattacaggtctgagccaccatgcccggcca

SEQ ID NO: 186554 - DNA, 533 bp, Homo sapiens
gcttctcctctgtcatcgttccccttgtttggtgcatttgagtgagagtctgttttgcacatttcagagtctaacacctcccccaccctctcagacccccaattcaatcagtaaacaagtcccagaaattctaactccaatgtatctactaactgccacctcctctctcttccctttggcactgctcagtccaggccctcgctttttgtggatttttttgtttgtttgttctgttttttgttttgagacaaggtctggctctgtcacccaggctggagtgcagtgccacaatcttggctgactgaaacctccacctcccaggctcaagccatcctcccaccacagcctcccaagtasctgggactacaggtgcacaccaccacaccagcctactttttgtatgttttgcaaagacagggttttgccatcttgcccaggttggtctcaaactcatgagctcaagcaatctgcctctggctgcctcggcctcccagagtgctgggattacaggtctgagccaccatgcccggcca

SEQ ID NO: 186555 - DNA, 388 bp, Homo sapiens
ggtcccagactcagccccagatctggtgcagcaaccacacccggtctaccccacatcactccctgagcagcacgtctccacagcttgacaaggaggaagtgcatccttcagtgactgtagtcagtgagtagccacatggctccagtttttgggggctcatgcattgtctaggccaagaggtggcatctttgcagccgggccctgtagatccaccgtgatgtacctggtcgggcacagctccaggactcagtgctgagcataagccccaaggttttcaggtagcttttctccrttcccagtctcacatgccatcagtcactagatctcctctggcacatacatggtcttggtcttggggggcatgggttgggaaggggagaaagggggc

SEQ ID NO: 186556 - DNA, 547 bp, Homo sapiens
ctccttctcagcacctcttttgctaggcttctggagccagggtttttctcattccactttttctgctctgtgcacccagcagagttctggcctctgaagatgggacaagaccttacacatattacacttctatctaagaatttgtaaatagatgagctgcccttgatatgtacatcacctattccaaggggccaatgggacttttatgtgcatccttgattcagttgcccagaggcacttgtttcaacctcagcactgccccaagagatggcagaagggcaagcccatgcttcccttacctgcaatccctgccactgcctgcagtgaggtgtggcctctggaatgatgcttctggagagcaccagctttactttttgccacaactgtctttcctgagggagatcgaagcccttctctttcccacttgaagtcactgtcctttcacaggggcaackgtttatcaccacttcctctttggtttttgaaccaaaatttctagaacagtcaacctgtagtgcactggcatgacagctacattgtgaggcca

SEQ ID NO: 186557 - DNA, 249 bp, Homo sapiens
tggcatcattgagctgtaagatgccatgtattttgtgattcyacaatcctctatgcaagagtacactagctattctgtggacaggagccagacaatgtgagctgtacataagaattatttttgcagtgtcaaaagccattctaggtggaatccaaatcaccacttgccttagacagacaccccctcagcttcactgcaggtccagagtcagccgaggccagagagagaaccaccaggagtggaagcaac

SEQ ID NO: 186558 - DNA, 514 bp, Homo sapiens
aaaagccattctaggtggaatccaaatcaccacttgccttagacagacaccccctcagcttcactgcaggtccagagtcagccgaggccagagagagaaccaccaggagtggaagcaacactctctaggttctctgcacattgtccagaagtggaggccattttctcctcctcctccaacagcctcagtgtagaacaatcccaggaaggagtagctggtgtgtttctggcaagggcatagaatgttgaataaatagtcacctgtttacagaccaacaaaatgcttcacccctcactgtctgaactcctaggattggctgtgagtcctgctattaggagaaacatttctgaagtacctccccaggwtcattccagcattgggaatcataaaggaagctaggagaggggccccatatttttcctgtatgtgcgctgtgatgctcagatattacaactaacactactgcttatgtcataggctgagaaatgccagttactttagggtgaaatgggga

SEQ ID NO: 186559 - DNA, 346 bp, Homo sapiens
aagttacctcacacttaaatgttgccttctctctgtgctacaaccttcttaggcctagattaagactgtcctggaatgctaagctcagatttccatggggaaggtcttccttaggtcaggagctactgtcggatgggaaactatttctacagagtcacccacccctacacactctttccactctttcacacacatctttcacacacactgtgcatacaaccacgtgccaatcctgcccccataaayattgcttttggatttggagccaaacatcctggcacctggcagctaggagtgcaggtatttagaggaatggcttgaagcagctccatttctgtgtcccagg

SEQ ID NO: 186560 - DNA, 346 bp, Homo sapiens
aagttacctcacacttaaatgttgccttctctctgtgctacaaccttcttaggcctagattaagactgtcctggaatgctaagctcagatttccatggggaaggtcttccttaggtcaggagctactgtcggatgggaaactatttctacagagtcacccacccctacacactctttccactctttcacacacatctttcacacacactgtgcatacaaccacgtgccaatcctgcccccataaacattgcttttggatttggarccaaacatcctggcacctggcagctaggagtgcaggtatttagaggaatggcttgaagcagctccatttctgtgtcccagg

SEQ ID NO: 186561 - DNA, 551 bp, Homo sapiens
tctgtgctacaaccttcttaggcctagattaagactgtcctggaatgctaagctcagatttccatggggaaggtcttccttaggtcaggagctactgtcggatgggaaactatttctacagagtcacccacccctacacactctttccactctttcacacacatctttcacacacactgtgcatacaaccacgtgccaatcctgcccccataaacattgcttttggatttggagccaaacatcctggcaccyggcagctaggagtgcaggtatttagaggaatggcttgaagcagctccatttctgtgtcccaggtagtgtaacaataagacattttaaattctcagagaaaaacctgaccctacgcaaaatctcccagtgggtgaggcctattctcagcctcctctctctgtgcatctttttccttccttggagattgttcccttctctcctgttccccctcttcagatcctgataccttcccaagctcttccatgttcctctttgccaaaactggttaaaggagaacattcactatcactcattattca

SEQ ID NO: 186562 - DNA, 551 bp, Homo sapiens
tctgtgctacaaccttcttaggcctagattaagactgtcctggaatgctaagctcagatttccatggggaaggtcttccttaggtcaggagctactgtcggatgggaaactatttctacagagtcacccacccctacacactctttccactctttcacacacatctttcacacacactgtgcatacaaccacgtgccaatcctgcccccataaacattgcttttggatttggagccaaacatcctggcacctggcagctaggagtgcagstatttagaggaatggcttgaagcagctccatttctgtgtcccaggtagtgtaacaataagacattttaaattctcagagaaaaacctgaccctacgcaaaatctcccagtgggtgaggcctattctcagcctcctctctctgtgcatctttttccttccttggagattgttcccttctctcctgttccccctcttcagatcctgataccttcccaagctcttccatgttcctctttgccaaaactggttaaaggagaacattcactatcactcattattca

SEQ ID NO: 186563 - DNA, 566 bp, Homo sapiens
agctcttctttgcacgtctggtggaattcagctgtaaaattctgtctggtccagggctctttcagattrgtagaatttttattactgattcaattacataactcattattggtctgttcaggatttcaatttcttcctggttcaatcttaagaagctgtgtgcttccaggaattcaactatttcttctaggtttttctagtttgtgcatgtagagatgctcatagtagtctctgaggatcttttgtatttctgtgatatgagttgtaatgtcacctttgtaatttctgattgtgcttatttggatctttttttcctggttaatctagctagtggtctatcaatcattcaaataaccaacttttcatttcattgatcctttgtattttttttatctctgtttcatttagttctgctcgatcttagttatttctttccttctcctagctttgggttttgtttcttcttcttttcctagttctttaggtgtggtattatgttgttaatttgagatctttctatcttttcaaggtaggtattgagtgctataaactttcctcttaacact

SEQ ID NO: 186564 - DNA, 554 bp, Homo sapiens
cggtgaaagaaagcaacttttgttaaactggtactgcttctcgtggaggaaggctaacccatgggcagtgtgtgggttgctagctagctgtatttatttagatgcttttaattagatgctaattaggaagtgggttattcagaactttttggaaaagggatgaggagtttccagaagcatataaggtaacttcctggccattgccatggcawgttgacatggcatttataaactgtcatggcactggtaggagtgtctttatgctaatgagcagtgagggcaactagaggtagcttttgtctccatctgctggttttggtcagcttctttactgcaccctgtttggaccagatcctgctctgatcaactgggccacaaccgcaaaataagtcctgccactttcctgcctcagtagaatctctgccaaagaatgatcttgaaagtttgctgtttactcatcatctggaaaaatcttcctgtataggccaaattcccacccttgagatttctgaaggaccaacaagtaaaaacagtatactccaatgggactgtta

SEQ ID NO: 186565 - DNA, 273 bp, Homo sapiens
cggacattgctctacacaatcctctcctttcctgatcactaaattagagtaaatcactgtcctgaagaaggtacccttgggagagtgggttggcctstctttccaccctttcttgactctgccctcaccttcaagcctctttctggcctgtgttcaaggtccagaggcatgcttaagacctctctgtgtggctcttcttgaagagtcaggaaccccatacttcctgttcagcgggcagagaagcttcaagccgcacagttttgggtatgctag

SEQ ID NO: 186566 - DNA, 460 bp, Homo sapiens
tacacaatcctctcctttcctgatcactaaattagagtaaatcactgtcctgaagaaggtacccttgggagagtgggttggcctctctttccaccctttcttgactctgccctcaccttcaagcctctttctggcctgtgttcaaggtccagaggcatgcttaagacctctctgtgtggctcttcttgaagagtcaggaaccccatacttcctgttcagcgggcagagaagcttcaagccgcacagttttgggtatgctaggatcccacaaggcacagatgtgcagtggcccaygaagtgagtttgtgggtctccagttacctgcagccctttctgctcctgtaggttaaagggcaattgcctttttttttctgtccaggaaggaccccagaatgttctgagtcagaaagacagtgaatcctctcctctgggtcagtggggagggagagagagagatttc

SEQ ID NO: 186567 - DNA, 535 bp, Homo sapiens
cctaattatctagacaaattattagctgccacatatacatcaataatatctctccttctagacatcgtggacaaccaattacataggctgaatttcttttaaaattgcattcacgtaggttataatgcctaagcaatctacttttggctgytgctgtgatgttgtacagtgacttctgtaaatcaggctcaatttttccctcactaatcaactggccatagagaacttcccatgaagacataggtatagattctattattcctacctgctgatgaagcaggatagttaattggaaaacacttatttcatgataagcagctcatgttgtcatatttttttgcattgataggacttcagtttctacaatggtccaggatcaatcaagagttctttaaagaaaacatttattttgtcaaagaaagaagcattttgttccaaatcctaagaacaatagtagtggtgtgtcagaggctctattgcatctggatataaaaacaaaggggcacaatattcctgaccagttgggaattattat

SEQ ID NO: 186568 - DNA, 535 bp, Homo sapiens
cctaattatctagacaaattattagctgccacatatacatcaataatatctctccttctagacatcgtggacaaccaattacataggctgaatttcttttaaaattgcattcacgtaggttataatgcctaagcaatctacttttggctgttgctgtgatgttgtacagtgacttctgtaaatcaggctcaatttttccctcactaatcaactggccatagagaacttcccatgaagacataggtatagattctattattcctacctgctgatgaagcaggatagttaattggaaaacacttatttcatgataagcagctcatgttgtcatatttttttgcattgataggacttcagtttctacaatggtccaggatcaatcaagagttctttaaagaaaacatttattttgtcaaagaaagawgcattttgttccaaatcctaagaacaatagtagtggtgtgtcagaggctctattgcatctggatataaaaacaaaggggcacaatattcctgaccagttgggaattattat

SEQ ID NO: 186569 - DNA, 298 bp, Homo sapiens
tgaatttgtggtttaaattttcactgtaagtataaktttaaaaaaacccacacatgaaactgataatttattttatagttatcccatgttggtattaccaccaaacacaagacgaaggcaaagtgtctttggagaaacccacattcagcccatgtctcaaagaatggccacaggtaaaatttcatccaaaatgagaaaaaagtaagactcttacaaaactcatgaggaaataaacatcatgagcagaaacagaattatgcccataaagatttcagatattaggatgattatataacta

SEQ ID NO: 186570 - DNA, 298 bp, Homo sapiens
tgaatttgtggtttaaattttcactgtaagtataatttwaaaaaaacccacacatgaaactgataatttattttatagttatcccatgttggtattaccaccaaacacaagacgaaggcaaagtgtctttggagaaacccacattcagcccatgtctcaaagaatggccacaggtaaaatttcatccaaaatgagaaaaaagtaagactcttacaaaactcatgaggaaataaacatcatgagcagaaacagaattatgcccataaagatttcagatattaggatgattatataacta

SEQ ID NO: 186571 - DNA, 513 bp, Homo sapiens
ttttaatttgcattaacagaaacaacattggaagggagtatattaagattttaatagtgactatttctgccaatggtttctgttttattgtttactattttyggtatatttccaatgtttcttaataagtgtttattatttaaaaaatgagaaaacagcaatgagtaattcagtaaaataaaatttttcaaaattgtgactgctatgattatgagccaattatgaaagaaagagacacagatagaaatagggtgaccaatctttcaacttactcaggaatgaaggattttctggatgggggatttttgttgctaaaatcgggacagtaggggacatattgggactgtggaaaaagcctacagggatttatttcctaactatgaatgtctatcttggtctagagacgactgttctcataaataggtagagtagatgtggtatttctggaatgagatttaacatctttacgtagcttgccctattaaaagtagacaaatgcttgtgagagaatat

SEQ ID NO: 186572 - DNA, 513 bp, Homo sapiens
ttttaatttgcattaacagaaacaacattggaagggagtatattaagattttaatagtgactatttctgccaatggtttctgttttattgtttactattttcggtatatttccaatgtttcttaataagtgtttattatttaaaaaatgagaaaacagcaatgagtaattcagtaaaataamatttttcaaaattgtgactgctatgattatgagccaattatgaaagaaagagacacagatagaaatagggtgaccaatctttcaacttactcaggaatgaaggattttctggatgggggatttttgttgctaaaatcgggacagtaggggacatattgggactgtggaaaaagcctacagggatttatttcctaactatgaatgtctatcttggtctagagacgactgttctcataaataggtagagtagatgtggtatttctggaatgagatttaacatctttacgtagcttgccctattaaaagtagacaaatgcttgtgagagaatat

SEQ ID NO: 186573 - DNA, 513 bp, Homo sapiens
ttttaatttgcattaacagaaacaacattggaagggagtatattaagattttaatagtgactatttctgccaatggtttctgttttattgtttactattttcggtatatttccaatgtttcttaataagtgtttattatttaaaaaatgagaaaacagcaatgagtaattcagtaaaataaaatttttcaaaattgtgactgctatgattatgagccaattatgaaagaaagagacacagatagaaatagggtgaccaatctttcaacttactcaggaatgaaggattttctggatgggggatttttgttgctaaaatcgggacagtaggggacatattgggactgtggaaaaagcctacagggatttatttcctaactatgaatktctatcttggtctagagacgactgttctcataaataggtagagtagatgtggtatttctggaatgagatttaacatctttacgtagcttgccctattaaaagtagacaaatgcttgtgagagaatat

SEQ ID NO: 186574 - DNA, 298 bp, Homo sapiens
ttctcataaataggtagagtagatgtggtatttctggaatgagatttaacatctttacrtagcttgccctattaaaagtagacaaatgcttgtgagagaatatcatatacttttgaaagctaatgtcttaactaatttgctgcaagcaaagctcttgaagactgtgatgtaacagagattcctaggtatcagtgaagatacggagatgaaaaagggaagttgaaaaaagaagctgagagataagcatggaaatcattttccaacctcatttttccagtctccattttcctgtattgag

SEQ ID NO: 186575 - DNA, 298 bp, Homo sapiens
ttctcataaataggtagagtagatgtggtatttctggaatgagatttaacatctttacgtagcttgccctattaaaagtagacaaatgcttgtgagagaatatcatatacttttgaaagctaatgtcttaactaattygctgcaagcaaagctcttgaagactgtgatgtaacagagattcctaggtatcagtgaagatacggagatgaaaaagggaagttgaaaaaagaagctgagagataagcatggaaatcattttccaacctcatttttccagtctccattttcctgtattgag

SEQ ID NO: 186576 - DNA, 298 bp, Homo sapiens
ttctcataaataggtagagtagatgtggtatttctggaatgagatttaacatctttacgtagcttgccctattaaaagtagacaaatgcttgtgagagaatatcatatacttttgaaagctaatgtcttaactaatttgctgcragcaaagctcttgaagactgtgatgtaacagagattcctaggtatcagtgaagatacggagatgaaaaagggaagttgaaaaaagaagctgagagataagcatggaaatcattttccaacctcatttttccagtctccattttcctgtattgag

SEQ ID NO: 186577 - DNA, 297 bp, Homo sapiens
aggtagagtagatgtggtatttctggaatgagatttaacatctttacgtagcttgccctattaaaagtagacaaatgcttgtgagagaatatcatatacttttgaaagctaatgtcttaactaatttgctgcaagcaaagctcttgaagactgtgatgtaacagagattcctaggtatcagtgaagatacggagatgaaaaagggaagttgaaaaaagaagctgagagataagcatggaaatcattttccaamctcatttttccagtctccattttcctgtattgagaagtgaaaat

SEQ ID NO: 186578 - DNA, 297 bp, Homo sapiens
aggtagagtagatgtggtatttctggaatgagatttaacatctttacgtagcttgccctattaaaagtagacaaatgcttgtgagagaatatcatatacttttgaaagctaatgtcttaactaatttgctgcaagcaaagctcttgaagactgtgatgtaacagagattcctaggtatcagtgaagatacggagatgaaaaagggaagttgaaaaaagaagctgagagataagcatggaaatcattttccaacctcatttttccartctccattttcctgtattgagaagtgaaaat

SEQ ID NO: 186579 - DNA, 523 bp, Homo sapiens
gggagctgtaaaaatgcccaggccctactctgtgtcaattaaatcagaatccagaatctctgcttgagtgtgtctagagtattggtcaaaggaaacagtgattttgatgtgcagccagttaagagctgatatcctcaaggatcatgatgtgacacagctgtttcagaagggtaaatctccatactcccactttagaagaaaagaaaagacaaaatgacaaaacaatcaagcaaaagggctggaagagctggtagataacagggtgtcaacttgaattaattcagctctttggtaaagattagctggagtaaagaaattccagttagtcaaatgggatgaatgtccttttatggaaaccatatcatgctttttgaatgatctgagaaagactggaagcattagaggtgaagtatatccatttgctcaatgggaraagattttgttttattttatttacataatgtgatatgcttggccatctgcagtagtgcctgaaaggggatgtaaaacggaaaatgtagtc

SEQ ID NO: 186580 - DNA, 423 bp, Homo sapiens
ggaaaaacttattcatataattgcttcattttgctgactgcaaaaggatttgttttggaagtgatttctgctctttaacctagtggattgatagatcacagaaaggtcttagaaatgacattacgtaattttgttcrtaacatgaaattagcttgaatcaaaaaatgtatacctttttttgtatctaccttctaagacatttgtcttgagaaattaatgattctacaacataaatagtcattgtgaaaggaaggaaaaagataacagagggctttcataataatcatggactcaagattatctaatttaaaaagacatatctcattttcctttatttaaacataaaacaaatgagagaaaacagaaatagctcataattttatttatctgataaaacatgctgacataaaaatataattcatg

SEQ ID NO: 186581 - DNA, 374 bp, Homo sapiens
gctttcataataatcatggactcaagattatctaatttaaaaagacatatctcattttcctttatttaaacataaaacaaatgagagaaaacagaaatagctcataattttatttatctgataaaacatgctgacataaaaatataattcatgcacccagtaagaaaatcaaaaaattaaataaaggtaaaaatgaaatataaaattctctttcctctagtctcttacccccagacatctrgaatctctccttaagataatcactgttgacaatttcttgagtacctttttaaaaatgaccttaatacacatcccccgtatagaatatagatcttaaacaagttagaaaataaaattttatcttttagtattac

SEQ ID NO: 186582 - DNA, 374 bp, Homo sapiens
gctttcataataatcatggactcaagattatctaatttaaaaagacatatctcattttcctttatttaaacataaaacaaatgagagaaaacagaaatagctcataattttatttatctgataaaacatgctgacataaaaatataattcatgcacccagtaagaaaatcaaaaaattaaataaaggtaaaaatgaaatataaaattctctttcctctagtctcttacccccagacatctagaatctctccttaagataatcactgttgacaatttcttgagtayctttttaaaaatgaccttaatacacatcccccgtatagaatatagatcttaaacaagttagaaaataaaattttatcttttagtattac

SEQ ID NO: 186583 - DNA, 545 bp, Homo sapiens
ttttaggtcagtggttttaaaactcaaaatgaaactgttttcaaaaagagttgttatacakaacagaaaaaagcagccacaattttaaaaaagatatgaagacccagattctcactcattcagctcccttcatactccctccccacagccacctcagctcctgaggcaggttcccagggctccaaggaacatacttttaaaaaatcagtattttgaatatataataagtgatgtaacttaaaagtatggtgagaaagtcccattgccaagagaaacatgttaattttttatttaaaaaatcatcactcttttcattgtgacatcttgaagaacgctgaatggcttcaaaataactgcatatgccaagatttctggagtgggcacgtttgatcttctttcataatgaaaactgacaaaactttttaaggggatagtattgtttcttcactctccccccctcctcacccctgcacacacatacatttctccttcctggggaactccaaagaaaacaaaggccctttaacaatcaagtagattgtctc

SEQ ID NO: 186584 - DNA, 545 bp, Homo sapiens
ttttaggtcagtggttttaaaactcaaaatgaaactgttttcaaaaagagttgttatacataacagaaaaaagcagccacaattttaaaaaagatatgaagacccagattctcactcattcagctcccttcatactccctccccacagccacctcagctcctgaggcaggttcccagggctccaaggaacatacttttaaaaaatcagtattttgaatayataataagtgatgtaacttaaaagtatggtgagaaagtcccattgccaagagaaacatgttaattttttatttaaaaaatcatcactcttttcattgtgacatcttgaagaacgctgaatggcttcaaaataactgcatatgccaagatttctggagtgggcacgtttgatcttctttcataatgaaaactgacaaaactttttaaggggatagtattgtttcttcactctccccccctcctcacccctgcacacacatacatttctccttcctggggaactccaaagaaaacaaaggccctttaacaatcaagtagattgtctc

SEQ ID NO: 186585 - DNA, 545 bp, Homo sapiens
ttttaggtcagtggttttaaaactcaaaatgaaactgttttcaaaaagagttgttatacataacagaaaaaagcagccacaattttaaaaaagatatgaagacccagattctcactcattcagctcccttcatactccctccccacagccacctcagctcctgaggcaggttcccagggctccaaggaacatacttttaaaaaatcagtattttgaatatataataagtgatgtaacttaaaagtatggtgagaaagtcccattgccaagagaaacatgttaattttttatttaaaaaatcatcactcttttcattgtgacatcttgaagaaygctgaatggcttcaaaataactgcatatgccaagatttctggagtgggcacgtttgatcttctttcataatgaaaactgacaaaactttttaaggggatagtattgtttcttcactctccccccctcctcacccctgcacacacatacatttctccttcctggggaactccaaagaaaacaaaggccctttaacaatcaagtagattgtctc

SEQ ID NO: 186586 - DNA, 545 bp, Homo sapiens
ttttaggtcagtggttttaaaactcaaaatgaaactgttttcaaaaagagttgttatacataacagaaaaaagcagccacaattttaaaaaagatatgaagacccagattctcactcattcagctcccttcatactccctccccacagccacctcagctcctgaggcaggttcccagggctccaaggaacatacttttaaaaaatcagtattttgaatatataataagtgatgtaacttaaaagtatggtgagaaagtcccattgccaagagaaacatgttaattttttatttaaaaaatcatcactcttttcattgtgacatcttgaagaacgctgaatggcttcaaaataactgcatatgccaagatttctggagtgggcacgtttgatcttctttcataatgaaaactgacaaamctttttaaggggatagtattgtttcttcactctccccccctcctcacccctgcacacacatacatttctccttcctggggaactccaaagaaaacaaaggccctttaacaatcaagtagattgtctc

SEQ ID NO: 186587 - DNA, 568 bp, Homo sapiens
ttgcttgatcaacagagtgctgttgattttttcaactgaattaattactcttggagtccaaactctccagtgtgccacagtcctcatcacttcctgtatcttaaatattgcattatctgtcccctaaaagtatttgaacatgtgacccagagaagaggacttacaacttgactaggcaacttctgtcacactggattcatatgaaattccactgcaagtgacatcaccagattggggaccctgaagtgtttgagtatcttctccacatctggtcatttaggctaagaaattccttcttgtctaccaggtcttttagcattcattktgtaagtcattcaacacctacttactgagaaggaatactgggctagacagtgtgctaggggctggggaaaccgcaatgcataggagagaattcccatctccaagaggctcacagtcaaacagacataaataggtgattacaatatacactaacaacatagttttagaaacaactagcagaattatatagacgaagatgccaggaaaggcttctcagagaatctggcttggcaaatatctcaac

SEQ ID NO: 186588 - DNA, 393 bp, Homo sapiens
ctctctctccataaggctcccacctccttcaatgaagtctagttcacctaaaatgacactattaacattaattcaatattataagttgataagcacattaaatcaaaacacagcaagattattttaagagtctgactgaaatgtcaggatgagaaatagattaataaatattggcttctaatgtcggtaatgaaaacaaacaygttattttcagaaaataaaaggtcttcgtcattaggtacaaatcataaagggattatctacggttactacactgtaacaactttttacatattgtattatagaacaagcttttgagaagacaaagcaacacatcagcagtttaaccaattgtctttctcttttaacaggctggtctacattagattagat

SEQ ID NO: 186589 - DNA, 613 bp, Homo sapiens
ttactaacgaaatgtgcatctctcattcttcccccaaaagaaagaagtcatccactccagctacatataagtctccaatttctgtcttacaactaaacgtgaaaaccgaaataccactcattgaaaaaaaatatatacagagaattggcaggctgcatgtttatgtgaaccttcagaaaacatggaaatacgcagccccaactcaccaggaaaattaacacttgtgatcaaactattttgtgacattttatgtcttttatacatttcacttcatatccagtattccagttttgcaccggcttgcctgtatcaaccccaaatcgcctgagagcaatctagtactgtagcagaaccgtttcaacatgaagagttctgctcatcgcctgtggcgtggtcttcgaaacacctgaatcaaacattgattcccctccccctgctatttaaaaccgwgggacgtcaggcttgggttgtaggtaaagaaaagccacagtaatcaaacaagcaaccaaaatacccgaacacggaacacgctaagaacaaaggaaacacaagagtgtgaacaggaaatgaagcaactctacacccataaataccttctggggccgccaacata

SEQ ID NO: 186590 - DNA, 432 bp, Homo sapiens
ccttcccccgcccggaccaaccgccgtgggggaccgagggtgccggggacggccggagagcgatcaccggctgggcggcgggagccgacgaggggcgagccccgctccggctcaagcgcgcacacccctcacggcccgcactccggccttccacacccgtgcacactctcgcccgcgggcggcggcagccgtgcccaggctgctgcagcgccacccgcccgccgcggaccctccgcgccctccgcctagtcacccggcccggccgcgggccgccggggctcgcagagtgtcagccatcccrggcaggcgtcgcgtctccccaccccgacctccactcgcgccgggagctgagcggcagtgtaggtagtgaagactccctggggctcccagccttccctctccgcgctctccccccatcacttttatgaattc

SEQ ID NO: 186591 - DNA, 535 bp, Homo sapiens
cagaaggaagagacttctagtctagggactcagagaatagatcactcagaacaagaagcccacasgaagaccttcctgcccagaggattcctttcaaaagaagcctgggactctaccccagcttcagagagaatattcatcccttaagattcaaaatctgtccatagccatcaacgggcttttgtctggagcaatggctcaggaatctgattcaccaatggatccctaatcagtcagaaatgacaacaaagacttcaaaggcatgcatttagggtcctgagtgagaggcccaggatccagtgatgaatctgtttcaacaccataattgttaaagaaaaaattattcagtgatacttcaaatgcacagtaaagaagactttattcaggaccattgccatagatataggaaccactgcaacacagtcttggagctggggagagagatgggcttaactctgaatacagcaaggggaagtgggaatttatagcccaggagcaatgcaggggtcagtgaatggagaatcactaagaggaa

SEQ ID NO: 186592 - DNA, 565 bp, Homo sapiens
gatatgaagggaaaaaaaggtgtggagtgaagggttgyaagatatggatcttggaggaatttaagagctaatacacaccacaccagaggaattaacaaaagatgacttcatggagatgagtgcttcctaaccagtgccagataatgaggaagaagacataggaaaagcagtgccagaaaacaaattggcattcaacaatctggcaaaagagctttgattattcaagactacttttgacttcttttatgacatagaccgttccatgatacaggaactgaaactaaagcaaatggtggaagacggataggtactacactgaaatgtttttagagaaatgaaaaagcaaaatagacagaaataatgatgtatttttgtaaagtttcaccaagtgtgcttgcctcttttgcttccccttccatcccttcaccctcttccacctctgctaccctaagacacaaagaccagctcctcctcctcctcctctgcctactcaacatgaagacaacaatgatgaagacctttaggatgatccacttccacttaatgaatgggtcatatattttct

SEQ ID NO: 186593 - DNA, 565 bp, Homo sapiens
gatatgaagggaaaaaaaggtgtggagtgaagggttgcaagatatggatcttggaggaatttaagagctaatacacaccacaccagaggaattaacaaaagatgacttcatggagatgagtgcttcctaaccagtgccagataatgaggaagaagacataggaaaagcagtgccagaaaacaaattggcattcaacaatctggcaaaagagctttgattattcaagactacttttgacttcttttatgacatagaccgttccatgatacaggaactgaaactaaagcaaatggtggaagacggataggtactacactgaaatgtttttagagaaatgaaaaagcaaaatagacagaaataatgatgtatttttgtaaagtytcaccaagtgtgcttgcctcttttgcttccccttccatcccttcaccctcttccacctctgctaccctaagacacaaagaccagctcctcctcctcctcctctgcctactcaacatgaagacaacaatgatgaagacctttaggatgatccacttccacttaatgaatgggtcatatattttct

SEQ ID NO: 186594 - DNA, 511 bp, Homo sapiens
ctactaactcttctctttggcagatcaaatgcttcttcttaaaaaaattrattttttaaaatgtatttcataggatttttgttctctctctccctctttttgtgcatatgtgtgtgtgtctgattagtctttattatcttaaaatggttagtcctgatagacctgtttcttcaaaatttctctcagttctttggcagtttgctcttagcttataattaaagatcaatttctgacttgtcttgttctagaaaacctcaatggaaattacagcaagctgaataggatattaattaaaaacataaacctggtgaaacccgaacatagaggctctagttcaaagatgcttccaatagttgacatggccattcattccttaaaaccagctatttttctttcgaattacattacctttaattctgtaaattggatgttatatagtaccatgaaaactgctgtgagtaattataatactcattgctgagtgatgtgacttctttctcaaggctatttc

SEQ ID NO: 186595 - DNA, 499 bp, Homo sapiens
gcttcttcttaaaaaaattgaktttttaaaatgtatttcataggatttttgttctctctctccctctttttgtgcatatgtgtgtgtgtctgattagtctttattatcttaaaatggttagtcctgatagacctgtttcttcaaaatttctctcagttctttggcagtttgctcttagcttataattaaagatcaatttctgacttgtcttgttctagaaaacctcaatggaaattacagcaagctgaataggatattaattaaaaacataaacctggtgaaacccgaacatagaggctctagttcaaagatgcttccaatagttgacatggccattcattccttaaaaccagctatttttctttcgaattacattacctttaattctgtaaattggatgttatatagtaccatgaaaactgctgtgagtaattataatactcattgctgagtgatgtgacttctttctcaaggctatttctgagggaaattgtacaat

SEQ ID NO: 186596 - DNA, 496 bp, Homo sapiens
gcttcttcttaaaaaaattgattttttaaaatgtatttcataggatttttgttctctctctccctctttttgtgcatatgtgtgtgtgtctgattagtctttattatcttaaaatggttagtcctgatagacctgtttcttcaaaatttctctcagttctttggcagtttgctcttagcttataattaaagatcaatttctgacttgtcttgttctagaaaacctcaatggaaattacagcaagctgaataggatattaattaaaaacataaacctggtgaaacccgaacatagaggctcyagttcaaagatgcttccaatagttgacatggccattcattccttaaaaccagctatttttctttcgaattacattacctttaattctgtaaattggatgttatatagtaccatgaaaactgctgtgagtaattataatactcattgctgagtgatgtgacttctttctcaaggctatttctgagggaaattgtac

SEQ ID NO: 186597 - DNA, 509 bp, Homo sapiens
gcttcttcttaaaaaaattgattttttaaaatgtatttcataggatttttgttctctctctccctctttttgtgcatatgtgtgtgtgtctgattagtctttattatcttaaaatggttagtcctgatagacctgtttcttcaaaatttctctcagttctttggcagtttgctcttagcttataattaaagatcaatttctgacttgtcttgttctagaaaacctcaatggaaattacagcaagctgaataggatattaattaaaaacataaacctggtgaaacccgaacatagaggctctagttcaaagatgcttccaatagttgacatggccmttcattccttaaaaccagctatttttctttcgaattacattacctttaattctgtaaattggatgttatatagtaccatgaaaactgctgtgagtaattataatactcattgctgagtgatgtgacttctttctcaaggctatttctgagggaaattgtacaattagatcttta

SEQ ID NO: 186598 - DNA, 432 bp, Homo sapiens
gcttcttcttaaaaaaattgattttttaaaatgtatttcataggatttttgttctctctctccctctttttgtgcatatgtgtgtgtgtctgattagtctttattatcttaaaatggttagtcctgatagacctgtttcttcaaaatttctctcagttctttggcagtttgctcttagcttataattaaagatcaatttctgacttgtcttgttctagaaaacctcaatggaaattacagcaagctgaataggatattaattaaaaacataaacctggtgaaacccgaacatagaggctctagttcaaagatgcttccaatagttgacatggccattcattccttaaaaccagctatttttctttcgaattacwttacctttaattctgtaaattggatgttatatagtaccatgaaaactgctgtgagtaa

SEQ ID NO: 186599 - DNA, 436 bp, Homo sapiens
tcaaggctctcctttctgcaagtggccagcaggtcactattggcatctatggccatgtgccctcagctaacacctctgctagtcagggttttgccttgtgaratgaccaaatattcattcctgacagagaaatgtccttgataatctttttgtgtgagcgtgccatggtcattgttaatttctttcatttaacaaaataatagactttattttttgagcagttttagctttatggaaagatcgagcagaaagtacagagttctcacatactgtcacctttatcccacccccagtttacattagggttcactctttgtgtggtacaggtctaggagttttgcaaaacgcataatgtcatgtacccatcattacattattaccaatgtattttcaatcccctaaaaatcgcctgtttcagaactatttatctccctac

SEQ ID NO: 186600 - DNA, 572 bp, Homo sapiens
aactggtcagacaactcatatctaaaacacttaaaatgttagaacgtttgggaatgttataacctaagcgtttttgctgataactttttgttatttatagacatttgtgtatttaacatacttacttctggaaatatatgcctttcctaaaacttaaccacacatccactaccatggcctatgtatagaattgaatattttggaccatgttatctgtggcacagtcagtgctgtgtttgaggtaaatgcagtaacggttagttttctactttgccttataaaaggtagaaaccatgtgtatgttatgtttgtctataaaagaaaaatactaatattaaattatttcttatgactgtgagtcactcacttatttttccaataattgatattgtacattcttagtgccattaggtatgtrtgtatgtaacttttacagtttttcagctgaaagttgtatttttttttaatcagggctctttaatctcattttaatttcctttgtttgaatgaactgtagttattttttgtattcctatattaaccatctaaaccaactgtaatgacacgtacac

SEQ ID NO: 186601 - DNA, 567 bp, Homo sapiens
gaggtaaatgcagtaacggttagttttctactttgccttataaaaggtagaaaccatgtgtatgttatgtttgtctataaaagaaaaatactaatattaaattatttcttatgactgtgagtcactcacttatttttccaataattgatattgtacattcttagtgccattaggtatgtgtgtatgtaacttttacagtttttcagctgaaagttgtatttttttttaatcagggctctttaatctcattttaatttcctttgtttgaatgaactgtagttattttytgtattcctatattaaccatctaaaccaactgtaatgacacgtacactaataaagaattgaacatttgtatttgttggcagtgagcccagttgttggtgaatttaaagcttaaaatatgggagtgatttgctgctatatttcttttgagagataaaggaggaagaaatggaacctaatggtaatcatgaattttagggaaagtactgaaaaaccatggggtcccctctggtttcttgtgttgaatgaggcaagagtaatcatctgattctgagctaaaga

SEQ ID NO: 186602 - DNA, 605 bp, Homo sapiens
gggggatcccttggctcttgatagtcccctttccttccctatggttgcatgagcctgaagcacccggaaaccatacttagagtcagtaaacacattgactcttgagggtttttttttcttttttgaaacrgagtcttcctctgtcgcccaggctggagtgcagtggcatgatcttggctcactgcaaactctgcctctcagtttcaagtgattctcgtgccccaccctcccgtgtagctgggattacaggtgcccaccaccatacccggataatttttgtatttttagtagagacagggtttcgccatgttggccaggctggtctcgaactcccaacatcagatgatccacccacctcggcctgccaaagtgctgggattacagtcgtgagccatccaacccaggcttaagtcttttcacagttggaaggtcctgattagagcagctaattctgctttttgagcagaattctgagaaggtaaacccttggcctcaatgacttcttgttagctaaccttcctttcttactccctcatgaataaagctatttccatctctaaaccactcaacactggggttagacaagggcttgtcttcaaggttgg

SEQ ID NO: 186603 - DNA, 606 bp, Homo sapiens
ttgtatgggggatcccttggctcttgatagtcccctttccttccctatggttgcatgagcctgaagcacccggaaaccatacttagagtcagtaaacacattgactcttgagggtttttttttcttttttgaaacggagtcttcctctgtcgcccaggctggagtgcagtggcatgatcttggctcactgcaaactctgcctctcagtttcaagtgattctygtgccccaccctcccgtgtagctgggattacaggtgcccaccaccatacccggataatttttgtatttttagtagagacagggtttcgccatgttggccaggctggtctcgaactcccaacatcagatgatccacccacctcggcctgccaaagtgctgggattacagtcgtgagccatccaacccaggcttaagtcttttcacagttggaaggtcctgattagagcagctaattctgctttttgagcagaattctgagaaggtaaacccttggcctcaatgacttcttgttagctaaccttcctttcttactccctcatgaataaagctatttccatctctaaaccactcaacactggggttagacaagggcttgtcttcaag

SEQ ID NO: 186604 - DNA, 605 bp, Homo sapiens
gggggatcccttggctcttgatagtcccctttccttccctatggttgcatgagcctgaagcacccggaaaccatacttagagtcagtaaacacattgactcttgagggtttttttttcttttttgaaacggagtcttcctctgtcgcccaggctggagtgcagtggcatgatcttggctcactgcaaactctgcctctcagtttcaagtgattctcgtgccccaccctcccrtgtagctgggattacaggtgcccaccaccatacccggataatttttgtatttttagtagagacagggtttcgccatgttggccaggctggtctcgaactcccaacatcagatgatccacccacctcggcctgccaaagtgctgggattacagtcgtgagccatccaacccaggcttaagtcttttcacagttggaaggtcctgattagagcagctaattctgctttttgagcagaattctgagaaggtaaacccttggcctcaatgacttcttgttagctaaccttcctttcttactccctcatgaataaagctatttccatctctaaaccactcaacactggggttagacaagggcttgtcttcaaggttgg

SEQ ID NO: 186605 - DNA, 606 bp, Homo sapiens
ttgtatgggggatcccttggctcttgatagtcccctttccttccctatggttgcatgagcctgaagcacccggaaaccatacttagagtcagtaaacacattgactcttgagggtttttttttcttttttgaaacggagtcttcctctgtcgcccaggctggagtgcagtggcatgatcttggctcactgcaaactctgcctctcagtttcaagtgattctcgtgccccaccctcccgtgtagctgggattacaggtgcccaccaccatacccggataatttttgtatttttagtagagacagggtttcgccatgttggccaggctggtctcgaactcccaacatcagatgatccacccacctcggcctgccaaagtgctgggattacagkcgtgagccatccaacccaggcttaagtcttttcacagttggaaggtcctgattagagcagctaattctgctttttgagcagaattctgagaaggtaaacccttggcctcaatgacttcttgttagctaaccttcctttcttactccctcatgaataaagctatttccatctctaaaccactcaacactggggttagacaagggcttgtcttcaag

SEQ ID NO: 186606 - DNA, 237 bp, Homo sapiens
atgagttggggatctgtttcttgggatgtgaggtccagcaacagagtagcagggtttaaaaatcagcatactttaagggtaacatctggggtgtcaagcagaagagcctgatatttaagtaactggccccctattagccatkggtatacttttgcctctaggaccctctgtactgtacttcatggggtggtggggggcgggggtggtatggcatctacttgttgtcccaaggtaaac

SEQ ID NO: 186607 - DNA, 276 bp, Homo sapiens
cttccatggtttccacccaggagtcaatgagttggggatctgtttcttgggatgtgaggtccagcaacagagtagcagggtttaaaaatcagcatactttaagggtaacatctggggtgtcaagcagaagagcctgatatttaagtaactggccccctattagccattggtatacttttgcctctaggaccytctgtactgtacttcatggggtggtggggggcgggggtggtatggcatctacttgttgtcccaaggtaaacttactggcttctt

SEQ ID NO: 186608 - DNA, 535 bp, Homo sapiens
tgtgaaagaaaacatcttttaaatttaatactatgaaccaataagcatcttcagggacttgagttattattgtataaagattaggaactattgggtgactggaactaatgcctcattaactgccctaagatcctgaacaaatctatattccccgtttggcttattaacaggaaaaatgggggtgttacgttgggactgayaggattgtaataatccatacttcattatcaggggatggatgccccttggagccaaaggtctaaaaggatactggatttttctttttttttttttttttgagtcagagtcttgctctgttatccaggctggagtgcggcggcgcaaggctcactgctacctctgccttccgggttcaagcaattctcctgccacagccttctgagtagttgggattgcagatgtacaccaccatacctagctaatttttgtgtttttagtagagatggggttttgccttgttggccaggctggtctcaaactcctagcttccagtgatatgcccaccttggcctcc

SEQ ID NO: 186609 - DNA, 535 bp, Homo sapiens
tgtgaaagaaaacatcttttaaatttaatactatgaaccaataagcatcttcagggacttgagttattattgtataaagattaggaactattgggtgactggaactaatgcctcattaactgccctaagatcctgaacaaatctatattccccgtttggcttattaacaggaaaaatgggggtgttacgttgggactgataggattgtaataatccatacttcattatcaggggatggatgscccttggagccaaaggtctaaaaggatactggatttttctttttttttttttttttgagtcagagtcttgctctgttatccaggctggagtgcggcggcgcaaggctcactgctacctctgccttccgggttcaagcaattctcctgccacagccttctgagtagttgggattgcagatgtacaccaccatacctagctaatttttgtgtttttagtagagatggggttttgccttgttggccaggctggtctcaaactcctagcttccagtgatatgcccaccttggcctcc

SEQ ID NO: 186610 - DNA, 535 bp, Homo sapiens
tgtgaaagaaaacatcttttaaatttaatactatgaaccaataagcatcttcagggacttgagttattattgtataaagattaggaactattgggtgactggaactaatgcctcattaactgccctaagatcctgaacaaatctatattccccgtttggcttattaacaggaaaaatgggggtgttacgttgggactgataggattgtaataatccatacttcattatcaggggatggatgccccttggagccaaaggtctaaaaggatactggatttttctttttttttttttttttgagtcagagtcttgctctgttatccaggctggagtgcggcggcgcaaggctcactgctacctctgccttccgggttcaagcaattctcctgccacagccttctgagtagttgggattrcagatgtacaccaccatacctagctaatttttgtgtttttagtagagatggggttttgccttgttggccaggctggtctcaaactcctagcttccagtgatatgcccaccttggcctcc

SEQ ID NO: 186611 - DNA, 459 bp, Homo sapiens
attctccagatatttaattggctcaaaactatgctcaatatagtggaagctgctgtgtttttcaaggccatattctgagaaaatagcaataaaatcatcttaaattaattaaatgcaataattatgtatgattactgtggctatgttacaataattgtgcacttctcaggttggattcaggcatatttatgttcatgtacaaagactggtgcaataaatgtcaaccaactgattaaaaaaagtaaacttatcagttggtgacaaataataatatctactttgtggggaaaattaaaggccctggagaggtatcgggatgcactaattgttcttcatgtgttctgtcttttacggtaatcactgattaaaatttcattagatgagtatgtattacacctcaacagagaatgccactgtcccccattgtgatgtygtttgctatggcaaaaaattaaccaa

SEQ ID NO: 186612 - DNA, 598 bp, Homo sapiens
tctcccttttactggacgggcttcctctgtttactaatacaattccccaaattgattcatccacttgttgaaatacctaattttaggccctgcactgacagcttgcctaggcttatacttgtgtttggtgttgcagtcttcagattctaaaaacaccatctagaccttacattacctccagccagggctattcccccagggcctgccttaagaagcagatttcttttcawgtttcatcttcttcccatttatttcatttcatgacagttagagaagctgtatactaacgtgacaaatggtaagttagcagagaaaaacgttatttcaggataagttcagggaaagctttttggaggaaagtcagctcacattagtcctgatgatggatagtgtatagagactacagatgatggaacgatgaagtggaaactcgagtggctacatacggacattccacatagaagcagtgtgagcaaaaccaccaagacaggaaatgagatggaattgataaggcaatgcaaataattcaggttatttagatcatcagtgttgggggaagctgggtttatgggaatcaatggttaatcagaatgtgagc

SEQ ID NO: 186613 - DNA, 598 bp, Homo sapiens
tctcccttttactggacgggcttcctctgtttactaatacaattccccaaattgattcatccacttgttgaaatacctaattttaggccctgcactgacagcttgcctaggcttatacttgtgtttggtgttgcagtcttcagattctaaaaacaccatctagaccttacattacctccagccagggctattcccccagggcctgccttaagaagcagatttcttttcaagtttcatcttcttcccatttatttcatttcatgacagttagagaagctgtatactaacgtgacaaatggtaagttagcagagaaaaacgttatttcaggataagttcagggaaagctttttggaggaaagtcagctcacattagtcctgatgatggatagtgtatagagactacagatgatggaacgatgaagtggaaactcgagtggctacatacggacattccacatagaagcagtgtgagcaaaaccaccaagacaggaaatgagatggaattgataaggcaatgcaaataattcaggttatttagatcatcagtgttgggggaagctgggtttatgggaatcaatsgttaatcagaatgtgagc

SEQ ID NO: 186614 - DNA, 411 bp, Homo sapiens
attcagcaacacaaaactgtggcctaaattcactctgacagttgttatgctatctcctgctgcccgagtaaagtaagttatgaacaagacacatgaaggggatcaggcagacatatggtcaaatgctttctgtgcaatatgtctgtctccatattatcttctctctcattgcactttggacatttttattcttcctgcagatctatttttatgaagcaatgtgatttaaatgaaaagagcactgaattctcagccagatatttgagttctagttgaagatttatcacctagtggttatgagatttggggcaaattrcttaatctctctctttctttaccacttcgtttgtaagttttcttgcctccctacaggactgtattggggatcaatcaatgttgagttgaaggcaa

SEQ ID NO: 186615 - DNA, 411 bp, Homo sapiens
attcagcaacacaaaactgtggcctaaattcactctgacagttgttatgctatctcctgctgcccgagtaaagtaagttatgaacaagacacatgaaggggatcaggcagacatatggtcaaatgctttctgtgcaatatgtctgtctccatattatcttctctctcattgcactttggacatttttattcttcctgcagatctatttttatgaagcaatgtgatttaaatgaaaagagcactgaattctcagccagatatttgagttctagttgaagatttatcacctagtggttatgagatttggggcaaattgcttaatctctctctttctttaccacttcrtttgtaagttttcttgcctccctacaggactgtattggggatcaatcaatgttgagttgaaggcaa

SEQ ID NO: 186616 - DNA, 609 bp, Homo sapiens
aactcctaaccccactctcctcttctatgtgtggtttgcttagtgttayaatctctgtatacatattttgtgcttgtcacttatgattttcattctaactccacatgctttctttccaatttgtcacaattgctgaaataatttatgtatatctctttaaatacatgtagttgccacctaatttggaatgacttataaactgttactattttatgtgtttgaagcagtttttatggaacactaatgatttgcattggcctgaggatatattctcagacaaagcatggtaaaaatcaagttaatgagtctgtggtggttggcggtgatcaacagttttcctgtgcaatggggtttagtgggatagaaactgaggttttaaagacaggcatagataggcagaagagaagtcatcccctgatgtaactcttcacttcctatgtatcaattcctccctggttttttgagactgagatagggagactcttatggaatatctgtcctttcccttcagctgcctgactttcctgggctactggcctacacatgtgtaatcatggtcacctccacattcatgacaaacagaaggaagcaggaccaacaaactgcata

SEQ ID NO: 186617 - DNA, 609 bp, Homo sapiens
aactcctaaccccactctcctcttctatgtgtggtttgcttagtgttataatctctgtatacatattttgtgcttgtcacttatgattttcattctaactccacatgctttctttccaatttgtcacaattgctgaaataatttatgtatatctctttaaatacatgtagttgccacctaatttggaatgacttataaactgttactattttatgtgtttgaagcagtttttatggaacactaatgatttgcattggcctgagkatatattctcagacaaagcatggtaaaaatcaagttaatgagtctgtggtggttggcggtgatcaacagttttcctgtgcaatggggtttagtgggatagaaactgaggttttaaagacaggcatagataggcagaagagaagtcatcccctgatgtaactcttcacttcctatgtatcaattcctccctggttttttgagactgagatagggagactcttatggaatatctgtcctttcccttcagctgcctgactttcctgggctactggcctacacatgtgtaatcatggtcacctccacattcatgacaaacagaaggaagcaggaccaacaaactgcata

SEQ ID NO: 186618 - DNA, 583 bp, Homo sapiens
tgggataaggggtctgacatttcattgtccagatgtggtactctggtaaatttcagttctttgatactatctggagggcccaacgcttggtttcctgagaaaggaactcagataatacaaatgtaactttctcaaatttcaagactgaaagggtcaatttctatgtttattcaaaagaaaccgtaaacatcagttctatgggacaattgggttggtttaaaagtcacttcagctttcttatggttgctaattacataattatattacattgtatggcaaagggattttgcagatacaattaaccttaaaatggggagattataaaggttgactaatctaataacatgggcctttaaagtctggatctagaggtcagaggtcagcaaactaggaagtcagagagatccaaaacgtgttagtgattcaatgaggaagaaactcttcattgmtgactttgaagatggtgagagtcacaaataaataaagtcctcagtccaacaacttcataattagtgctacctgcaaatatgggctaacaatatttttaaatgcatttacaatatgtggtgaacagattcacatt

SEQ ID NO: 186619 - DNA, 583 bp, Homo sapiens
tgggataaggggtctgacatttcattgtccagatgtggtactctggtaaatttcagttctttgatactatctggagggcccaacgcttggtttcctgagaaaggaactcagataatacaaatgtaactttctcaaatttcaagactgaaagggtcaatttctatgtttattcaaaagaaaccgtaaacatcagttctatgggacaattgggttggtttaaaagtcacttcagctttcttatggttgctaattacataattatattacattgtatggcaaagggattttgcagatacaattaaccttaaaatggggagattataaaggttgactaatctaataacatgggcctttaaagtctggatctagaggtcagaggtcagcaaactaggaagtcagagagatccaaaacgtgttagtgattcaatgaggaagaaactcttcattgatgactttgaagatggtgagagtcacaaataaataaagtcctcagtccaacaacttcataatyagtgctacctgcaaatatgggctaacaatatttttaaatgcatttacaatatgtggtgaacagattcacatt

SEQ ID NO: 186620 - DNA, 318 bp, Homo sapiens
ggtggctgagtacaggcaactgatggtgttagaagccacaggcccttgattaatccaggctctaatcttcacccacctcaaagtcctaagagtcctccttatagcttcctatcagatttatacagattattacccacaaaccttgctcttccttggacccctaagrccagggcttctaatatcttcatcatttttgaggtatctaataactcttctttctggagtttcagttacttcatccccactgctgagtgaaaagttaccagatgactagcacaaagtctcatatgcaaatcagggctaaacagcgagtggatg

SEQ ID NO: 186621 - DNA, 318 bp, Homo sapiens
ggtggctgagtacaggcaactgatggtgttagaagccacaggcccttgattaatccaggctctaatcttcacccacctcaaagtcctaagagtcctccttatagcttcctatcagatttatacagattattacccacaaaccttgctcttccttggacccctaaggccagggcttctaatatcttcatcatttttgaggtatctaataactcttctttctggagtttcagttacttcatccccactgcygagtgaaaagttaccagatgactagcacaaagtctcatatgcaaatcagggctaaacagcgagtggatg

SEQ ID NO: 186622 - DNA, 520 bp, Homo sapiens
atgctaatctaatgccatcgttgatctgacaggaggctgagctcaggcggtaatgctttctcgctggctgctcacctcctgctgtgcggtcccattcctaacaggccatggaccagtgctgggggttggggactcctgttctaaccaatgctccctctattaaaagggattttcacactagctgatggaaacaccaagtgttgcaagctatgtgtgagctacagagattattccttttgggaagttctttgccctgctttgcataatttcctcaaatacatgtactaatcagtacttagctgaagattgaagacagatatccaaggcattctatctgtgcagcaacctattctctagtctgtcctgtgatgtctagccaccctgwcttcttcaaagttactaccaggctctgcctgggtcctccctccctgctctacagttgacaatctcaggcagcaaactggagcaatcatagggctcacctcttttatttattatagtactgcactgtatccaatgt

SEQ ID NO: 186623 - DNA, 520 bp, Homo sapiens
atgctaatctaatgccatcgttgatctgacaggaggctgagctcaggcggtaatgctttctcgctggctgctcacctcctgctgtgcggtcccattcctaacaggccatggaccagtgctgggggttggggactcctgttctaaccaatgctccctctattaaaagggattttcacactagctgatggaaacaccaagtgttgcaagctatgtgtgagctacagagattattccttttgggaagttctttgccctgctttgcataatttcctcaaatacatgtactaatcagtacttagctgaagattgaagacagatatccaaggcattctatctgtgcagcaacctattctctagtctgtcctgtgatgtctagccaccctgtcttcttcaaasttactaccaggctctgcctgggtcctccctccctgctctacagttgacaatctcaggcagcaaactggagcaatcatagggctcacctcttttatttattatagtactgcactgtatccaatgt

SEQ ID NO: 186624 - DNA, 557 bp, Homo sapiens
agaagtctccattccatctttgtggtcagaaagaacagtatgacagaaggcagcttgttagaatgggaagacccatgggctaagaatcagcattacctaggctctagtctcagcactgtatttactaactttgtgcaagtgattgatccttcttgaatttctgtttccccatttgtaaagtgrgtcaaatcataattccaaggctgctgtacagatcagttgaagtagtatcttaatgttcatgagtgtatttctctttcagggttatttatttttttatttttgggtcccaataaaccgtccaaatcttttggggttagttcaggcactgtatatagtagaagctggtgttagaaaagttgatttatactggaatatttttcacagaatcaaccccaatgctcactaacaaactgagaagaaaaaaaagaattacccccaacaacatctgaggaagcacaacagggacagacttgaaggcacctgggcagtcctctggttttggagtagaggtaggacagggctatttgtcctctcagagactggagcaggttctg

SEQ ID NO: 186625 - DNA, 557 bp, Homo sapiens
agaagtctccattccatctttgtggtcagaaagaacagtatgacagaaggcagcttgttagaatgggaagacccatgggctaagaatcagcattacctaggctctagtctcagcactgtatttactaactttgtgcaagtgattgatccttcttgaatttctgtttccccatttgtaaagtgggtcaaatcataattccawggctgctgtacagatcagttgaagtagtatcttaatgttcatgagtgtatttctctttcagggttatttatttttttatttttgggtcccaataaaccgtccaaatcttttggggttagttcaggcactgtatatagtagaagctggtgttagaaaagttgatttatactggaatatttttcacagaatcaaccccaatgctcactaacaaactgagaagaaaaaaaagaattacccccaacaacatctgaggaagcacaacagggacagacttgaaggcacctgggcagtcctctggttttggagtagaggtaggacagggctatttgtcctctcagagactggagcaggttctg

SEQ ID NO: 186626 - DNA, 544 bp, Homo sapiens
aaaagtaaactaaccagggatccctggtttctgtatctttaaaacctatagggttacaaaccaaagtgagatgcctatctggtttctgcacagttgtcctgaattatgttggcagatattttatagccagaaatttaccttgaaaaataaattgaaaccataccaagtatttagagctaggggtctaaaatctgcaaaagccgtgggaggttgtgttgtctcaagagccagtattcagtggaccactccacatcatatyaaataaaatttaaacacagcattttgaagccgacagtatgggtcactgtgtgtcctgtgtgccgtgagcgtattgtagagtagttgttgagtctgctgccttatctgtgtgttatgaggtcaatgcactgatcacttgcttttttcacttctatactaactctaggcacactttactcccagtcaaaagtggactgtatacttcctctttgatgtgatggtccctttggttttggtgcctcttccatgagcttcagatcagaactagctatgtggttccaggctg

SEQ ID NO: 186627 - DNA, 475 bp, Homo sapiens
agagaccttcagtgttttcccacctcctgtcaacctgccttatacttcccatatctccatgtgggaggcatccctgtggagtttgcttagcacttggccatgctttctttgaaaccttaaaagctcttaaagaaagttgccttatgttccctgatgagaagatgaagttggcaaaagaatggtgaaaggcagggatcttgacgagaggcccctgactatccctttagtgatcagcatcttcacttcccatctcattccatgtcctggtggaatggctgcagaagatgagatccagagccagtggcagcacctgaaggagacccttttcaycaacaactgcctgtgagaaaagctagaacgtcatcacagcagctttgatgaagaaaatggtaggagaggcccaagtcagcctgcttctggcaatatgtatttttctaaaggcgtgtgactggggcagagttttatagatttcaaa

SEQ ID NO: 186628 - DNA, 510 bp, Homo sapiens
aataatctctaaaacctgttagtgttctccagattgaagccttccctctaactgctcctaaatctgtgatgtagtggaaaaggtttgaggccttgattctcatcccrggtttttcacctacagatcatatggccttagcctcttgacaccattgtctccttatggccaaagatggaactgtacttgggtggtatctgagcaccctgttggctttgacattctagggctcttcccttggcaccactctcttatttaaaaggaataggatgtggacttagaagggttatttctctgcaaactatcctctctttcttatgacaagctatttctgaatgtgcacatttgaggctaagcaaatcccttcctgggaggtgtgaaagacctttatttctctccagaggagtattatggatgtggtagagacctggctaactcatctgcagcggctttgagcaaggcttttagaaccataaggtggctggggtcctgtgtcctacaccacaggccagc

SEQ ID NO: 186629 - DNA, 522 bp, Homo sapiens
ataatctctaaaacctgttagtgttctccagattgaagccttccctctaactgctcctaaatctgtgatgtagtggaaaaggtttgaggccttgattctcatcccgggtttttcacctacagatcatatggccttagcctcttgacaccattgtctccttatggccaaagatggaactgtacttgggtggtatctgagcaccctgttggctttgacattctagggctcttcccttggcaccactctcttatttaaaaggaataggatgtggacttagragggttatttctctgcaaactatcctctctttcttatgacaagctatttctgaatgtgcacatttgaggctaagcaaatcccttcctgggaggtgtgaaagacctttatttctctccagaggagtattatggatgtggtagagacctggctaactcatctgcagcggctttgagcaaggcttttagaaccataaggtggctggggtcctgtgtcctacaccacaggccagctagttcatttcag

SEQ ID NO: 186630 - DNA, 435 bp, Homo sapiens
agtttccagaaccatataaagtaacttccaggccattgccaaggtgtgttgccatgacatttgtaaactggccatggtcccagtggtagtgtctttatgctcataagyagtgagagcaactagaggtcactttcatcatcatctgctggtttcagcaggcttcttcactgcaccctgttttgaccagatcctgctctgttcaatggtccttctggtctcctacctcatttccccatcagagattatatactcctccttaatcttaaggggcttgcagaagggtggaggttcatcttctgtaactgcttcctgctgatgttatgggcatagaccctgtctagcactggagaagtaaaatctctggatacctgttctaaaagacccaaaggcaggatgtctttattttctgggtcagaagaggggatggattgaaag

SEQ ID NO: 186631 - DNA, 435 bp, Homo sapiens
agtttccagaaccatataaagtaacttccaggccattgccaaggtgtgttgccatgacatttgtaaactggccatggtcccagtggtagtgtctttatgctcataagcagtgagagcaactagaggtcactttcatcatcatctgctggtttcagcaggcttctycactgcaccctgttttgaccagatcctgctctgttcaatggtccttctggtctcctacctcatttccccatcagagattatatactcctccttaatcttaaggggcttgcagaagggtggaggttcatcttctgtaactgcttcctgctgatgttatgggcatagaccctgtctagcactggagaagtaaaatctctggatacctgttctaaaagacccaaaggcaggatgtctttattttctgggtcagaagaggggatggattgaaag

SEQ ID NO: 186632 - DNA, 435 bp, Homo sapiens
agtttccagaaccatataaagtaacttccaggccattgccaaggtgtgttgccatgacatttgtaaactggccatggtcccagtggtagtgtctttatgctcataagcagtgagagcaactagaggtcactttcatcatcatctgctggtttcagcaggcttcttcactgcaccctgttttgaccagatcctgctctgttcaatggtccttctggtctcctacctcatttccccatcagagattatatactcctccttaatcttaaggggcttgcagaagggtgsaggttcatcttctgtaactgcttcctgctgatgttatgggcatagaccctgtctagcactggagaagtaaaatctctggatacctgttctaaaagacccaaaggcaggatgtctttattttctgggtcagaagaggggatggattgaaag

SEQ ID NO: 186633 - DNA, 560 bp, Homo sapiens
gaattcggaatcaaaaactttaaagtaaccatgacaaattgtccttaagagtctacaggaaaggatggttatattgggtttaaaaatgaagaatatcagccttacggccagaaacgccaccttccagtaattcgccaaaatgacaaacacaaagggaaagaggagaggcacccgatacatgttctytaggccttttagaaaacatggagttgttcctttggccacgtatatgcgaatctataagaaaggtgatattgtagacatcaagggaatggatactgttcaaaaaggaatgtcccacaagtgttaccatggcaaaactggaagagtttacaatgttccccagcatgctgttggcattgttgtaaacaaacaagttaagggcaagattcttgccaagagaattaatgtgtgtattgagcacattaagcactctaaaagccgagatagcttcctgaaacgtgtgaaggaaaatgatcagaaaaagaaagaagccaaagagaaagttacctgggttcaatcggaaggcaccagccctgctcccacccagagaagcacag

SEQ ID NO: 186634 - DNA, 560 bp, Homo sapiens
gaattcggaatcaaaaactttaaagtaaccatgacaaattgtccttaagagtctacaggaaaggatggttatattgggtttaaaaatgaagaatatcagccttacggccagaaacgccaccttccagtaattcgccaaaatgacaaacacaaagggaaagaggagaggcacccgatacatgttctttaggccttttagaaaacatggagttgttcctttggccacgtatatgcgaatctataagaaaggtgatattgtagacatcaagggaatggatactgttcaaaaaggaatgtcccacaagtgttaccatggcaaaactggaagagtytacaatgttccccagcatgctgttggcattgttgtaaacaaacaagttaagggcaagattcttgccaagagaattaatgtgtgtattgagcacattaagcactctaaaagccgagatagcttcctgaaacgtgtgaaggaaaatgatcagaaaaagaaagaagccaaagagaaagttacctgggttcaatcggaaggcaccagccctgctcccacccagagaagcacag

SEQ ID NO: 186635 - DNA, 500 bp, Homo sapiens
tttggaacagggattgactttgtctctctgaaagtaggcatgaagagttcggttagaggaaccgttacagatggaggagaaacttgaggaaaggtctttcctgtagtgtgactacagtattaacattcccagattatatgaaagagaaaggaagcttcattaaatgaaacattggaatcaggaagactccggcttggctccctgagcattctaacttgttctgagcctagtctcgacagaagtagcctgacacaagtggctcagatcaagggtccatattacgggcagagtaaaaataggtcccagtttcattagacttctcatacatttaaggaaaaaaagatttgttgccataggaacagaccagttgttttctgtcttgtgggattttaggagctggggagataggaggatccctgkgcttataatctaaacatcagtaaatgctggttttttttaaaacaacaacaactttatcttttatgattctgaaacctatc

SEQ ID NO: 186636 - DNA, 595 bp, Homo sapiens
aaattcggaatcaaaaactttaaagtaaccatgacaaattgtccttaaaagtctacaggaaaggatggttatattgggtttaaaaatgaagaatatcagccttacggccagaaacgccaccttccagtaattcrccaaaatgacaaacacaaagggaaagaggagaggcacccgatacatgttctctaggccttttaaaaaacatggagttgttcctttggccacgtatatgcgaatctataagaaaggtgatattgtagacatcaagggaatggatactgttcaaaaaggaatgtcccacaagtgttaccatggcaaaactggaagagtctacaatgttccccagcatgctgttggcattgttgtaaacaaacaagttaagggcaagattcttgccaagagaattaatgtgtgtattgagcacattaagcactctaaaagccgagatagcttcctgaaacgtgtgaaggaaaatgatcagaaaaagaaagaagccaaagagaaagttacctgggttcaacggaagcaccagcctgctccacccagagaagcacagtgtgtgagaaccaatgggaaggagcctgagctgctggaa

SEQ ID NO: 186637 - DNA, 576 bp, Homo sapiens
aagtaaccatgacaaattgtccttaaaagtctacaggaaaggatggttatattgggtttaaaaatgaagaatatcagccttacggccagaaacgccaccttccagtaattcgccaaaatgacaaacacaaagggaaagaggagaggcacccgatacatgttctctaggccttttaraaaacatggagttgttcctttggccacgtatatgcgaatctataagaaaggtgatattgtagacatcaagggaatggatactgttcaaaaaggaatgtcccacaagtgttaccatggcaaaactggaagagtctacaatgttccccagcatgctgttggcattgttgtaaacaaacaagttaagggcaagattcttgccaagagaattaatgtgtgtattgagcacattaagcactctaaaagccgagatagcttcctgaaacgtgtgaaggaaaatgatcagaaaaagaaagaagccaaagagaaagttacctgggttcaacggaagcaccagcctgctccacccagagaagcacagtgtgtgagaaccaatgggaaggagcctgagctgctggaaact

SEQ ID NO: 186638 - DNA, 576 bp, Homo sapiens
aagtaaccatgacaaattgtccttaaaagtctacaggaaaggatggttatattgggtttaaaaatgaagaatatcagccttacggccagaaacgccaccttccagtaattcgccaaaatgacaaacacaaagggaaagaggagaggcacccgatacatgttctctaggccttttaaaaaacatggagttgttcctttggccacgtatatgcgaatctataagaaaggtgatattgtagacatcaagggaatggrtactgttcaaaaaggaatgtcccacaagtgttaccatggcaaaactggaagagtctacaatgttccccagcatgctgttggcattgttgtaaacaaacaagttaagggcaagattcttgccaagagaattaatgtgtgtattgagcacattaagcactctaaaagccgagatagcttcctgaaacgtgtgaaggaaaatgatcagaaaaagaaagaagccaaagagaaagttacctgggttcaacggaagcaccagcctgctccacccagagaagcacagtgtgtgagaaccaatgggaaggagcctgagctgctggaaact

SEQ ID NO: 186639 - DNA, 510 bp, Homo sapiens
aaaactagaattttggtagacatgtatctgccacarcgaatttaaagacaattctaatctgtgatgagattacagcaacaatattgatgaatgtggttttcaaaaatgttgcataataaaatgtgtcaatatttgaaaattctgtgtaattcagtgaaactgtattttctaaaagactgtgtcataaaatcatacatgggaaaaagagcaattcaaaatgcaaaatagattaacagaattcattgtaagagtacagaaagttcactaatacagttttagattttatattataagtaacctttgataaactactacttgttgtacaacaaaatagaaaaaaataaaaaagaattaacctaattagaaaataggcaaaagacttgaatagacattttttcaaagaaggcatacaaatagccaacaacagatatatggaaaaatgctcaatatcactaatcatcaaggaaatgcaaatcaaagccacagcaagatatcacctcacatttgtta

SEQ ID NO: 186640 - DNA, 573 bp, Homo sapiens
tacatgtgcaggtgtgttacatggatatatcgtgtgatgctgaggtttgggcttctattgaacccataacccgaatagtaaacatagtactcagtaggtaatttttcaacacttccttcctccctcccctctttcagacttcccagtgttttttktttccatcagaaagaactttcaatattaaagccatacttacattttttctctcctttaaaaatagctactttcaactttttccaagttttataactgcataataaggcttaccatttcctagttcagaataagtttgcaaacacaatgcctgggggtgccattcatgttgtgaataatcataatcctcatggctatccactcttccctgcaaggaattgtggagtccttactgtattacttccattcctttagtcagtgccccatttggaggtcaactacctccagcaccccactgcctattaccaatttccatgtcagtctcagtggcaatcagcagaaatggattctgcttaacttaagcagaattgcaatttattgaaagggtgctgtgtagctcacataattgttgagaaggtt

SEQ ID NO: 186641 - DNA, 582 bp, Homo sapiens
gactcgtcaaagtagatattatgatcctaatattattgaagatgatcacagtaactatagtaaactaggatttactgagtgtatactacaggacactccctgtgctcagtgcattatctgcgcagcctcaatcagtcttctgagtttattgttcctgttttttcatgaggaaattgaagcctgagagcttgtgcaacttgcctaagattaaacaagtagaaaaagttagaggtaagactggaatctggatgactccattgcctggacaattacccctgtatcacacttccagagtaccttcataagggctgcactaaagtcaagtgttggccttgagtttggctccaatttgtagttcaagtttgctttgactttggrctttggaaggccaagtagctaaaggctcattgtagtgtcatttgtggcatccttgaactctccatgaacaaatcatcatcacgtagttttcattgtctctaatcaatataatcaacattagtagtgtgaacaaaacttgtcatttgtatttattgtcagtgtctgaatagtcacattcaagcataataaccatttcaaatgtaa

SEQ ID NO: 186642 - DNA, 458 bp, Homo sapiens
attgtacaccctaaatatatagaatttttgtttatcagtcattcctcaagctggaagtagaaaaagcagtatttcagtagagtcatctaaatctcagttacatggttactctttgtggaaagaagctcaatggaactcaaaggtaaaaaatgaaataaataatgtttcccttcataacccaaatattaagggaaggaagagggacatatgggaaaggagccaggatactgaaaatgctttgcctgatggcttccattaatggcatgttttggytggctaagatacaagagaaacatcacatttgccaagtggatgaacttgtatttgctcagtctctggccataaagacaaaggcagaggttgttggctgtcagtgaggaattgctgagggccatgccagaaagtgccagagtaatagtaggaaaggaccacacagtgagtccctttgtgaactaatc

SEQ ID NO: 186643 - DNA, 385 bp, Homo sapiens
aatacatcttccaaggaacagaatcgattaagtaacaacaatatgcagaccaccgggataggtgctatgggagatgtgaggatagtaagacgtgactgtggtctttaaggattttacagtataggaaaggcttaagtgagtgcacaaaaactgataatgtagggcagattgtggtaattatcataaaggtagctcaaagaaagagttcrgatgttcagagaaaggataaccccctacttctggctggattgggaggggctgaggcatgacagaattaggctgaaagtgcttgttactttgcatgatgatgaggattcttacaactagaaataataaggactttccagatattatgtgtttaagtgtagaggtctgcttggaacat

SEQ ID NO: 186644 - DNA, 478 bp, Homo sapiens
ataggtatttgttactacaaacttcacccataggactgttctcactgcatttcataaattttaatatgttatgtttccattttcatttgtgtcggtattttgatttcctttttgatttcttctgtgacccattgattgttcaggagcatgttgtttaatttccacatatttttgtattttccaggatttcccttgttattgatttctaatttcatgccacygtgatctgaaaagatacttgttgatttcaatcttcttacatttgtaagtttattttcttggagttccctgaacttctttaagatgattattctgaactttttgtcagtcattccatagatcaccatttcttctgggtccattattggagctttattagtttcttttggtgccatctttccccagtttttcaaaacccttgtgtctttacacttatacctgtgtacttaaggagaccaccacctcttctggcctttat

SEQ ID NO: 186645 - DNA, 359 bp, Homo sapiens
atttctatgatcaagaaatcatacagtattaaattcagggttcctggcttctttcattcaacattatgtttctgagagtcattcattttgttgcatgcatcactagtttgtccctttctattggtgaacaatcttctattgtaggaatatgccagtttgtttatccattctcctatggatgaacatctaagctactccctgattttgactattatcaacaaagctactrtgaatattcttatacaagtgtttttgtggatgaaggttttcatttatcatagataaatacttaggattcaaattacagggccataaagttgatatgtattaatttttaagagaaactgacagttattatc

SEQ ID NO: 186646 - DNA, 585 bp, Homo sapiens
taatattaatttttgagaatcatagaccctccctgccatcagaagaattagatattgcctaccctctcctacggcatttacttgtgattatttctgtatatgaatacstgttctaacacacttttcttaattaatgcaagaatataaaacatttagaaaaaggttgggggagtgttataccaattctccaggtccaagcagataagaggtgaaaatgagcaatacaattttatatgtaatgtatagcagttgatacattttgaatttgatagaattgtatctaagcttcatctgctgtcaacattttgagaattagaaatatattcatccagaaggagtagaccagaaagaaaaaataaagattaaaagaacttgaagtactcttcagactatatgttttacagcttcaagaagtatgtctttgcaatgtttttatcagatatggtatatgccaacaacatgtcttttcttcaggaataatgaagaatcaaaaaatctaaaatgaaacattttctgactttcccactcaaaataagaatcaccatctcaaaacaatttttatatctaactcgttaattatttatg

SEQ ID NO: 186647 - DNA, 496 bp, Homo sapiens
gttatactcacttgccagtttatacactggtttaatttatacgttgtagcctgatcgtgtctgtttaaattatctggagtatgtttcagttaaaagtataatgcagaattggaattcatttaataaatttaacaygatttgaaaagaaaataatccaaaagaaagtataaatcataaaataaactatagtgatcattcaaaaggtagattggtttaggagagagaaagacaaccagagatcagagagcatgggtgcttttgttagtctgttttgtgttgctataaaggaatacctcagactgggtaatttagtaagaaaagaggtttatttggctcacgattctgcaggctgtacaagcatagcaccagcatctactcggcttctggtgaggcctcagggagattttactcatggtataaggtgaagggggagcaggtacctcatatggcaataaagggagctcctagactctatttaataaccagttcttatgtg

SEQ ID NO: 186648 - DNA, 530 bp, Homo sapiens
gaaaaaaggaaaaatacgaaactttccagaatattcaaaattatataatattagggccaatataagcracatacacattatatttaatggggttattctttcaaatacgacagaatatcctgctggatagcaataccttacactatgcttagcacactgttggtgttgaatttttattgaataaatgcttttacatccctagctttctgtgctaataagtaactgttatgtaggtcctaagatttggctcagatgacccataaatcttattttacaagtgccctaagagtttggcatgtaaattatctgaatttttggcaaaagatgatcatttacataaagatccttgggaactcaaaatgctgaaaacagttctttctttgggtggtctcatagatgaggtcagatcacacgatggagccttgaagacatcatggaacttttacatttgaaataattataaagctccaaagtgcttaattttgcatgacacaaattaacacactactatttatgggtcaaaaaattat

SEQ ID NO: 186649 - DNA, 582 bp, Homo sapiens
ggaaaaaatgtcttaatttaacattctcatcattgcctcccatttttccaaatattttcttatcartttagtctgatccattaagaatctttttatacatgagatggaataataataattaaagtaaaaatcataatgataagaagaaggaggaggaagaagaagagacaacaatgaagatgatgatgaaaaaagaaaaaagaacagttaacatttgtgaaacatttactatgtgctaggcattctggtgtgcactttatgtggattatctcatttaatccccataaaaaatgggtagatacaaattgtgtttctatttttaaaacgaggaaaattgatctcagaggatttgaatattttttctcaaaatcacatagctagtaagtaataaatttcagattgaattcaaagcagtcatattcaagaactcactctaaccataacattctactcctttctcctcaatgccaagtttagtcatatcataaagaaactattataatgtcatccttttcaggaaaaattaagcaaaaaatgagaaaaccacctatttcctcatgagtttttttatttcagagggaa

SEQ ID NO: 186650 - DNA, 569 bp, Homo sapiens
cacttacttttcaaggcagcatctttttcagaaaactctcccttggttttaaggttgcaccaataaatctctttctggatcccaatataaccccaattattcctcaattccagagcttacagtattagactgaaattatctattgatgtgactttatcccccactagactctctctcaaatgtgttactgtcattgaagccctaatactcagtccagtattaaatatttcaaacagtagmtatccaacctatgttcattgctgcaaatttgctagtacaagcactctgatttccttgctacagagcagtcagagaaaatcctagctagataatggaagcagatagatattcaagtaggatttataacacatgttaacagagaatacgttgaggattttgcttagggaagaaaatatggagcatgtcttcagaattcaagtaatgcaaataacattcagatttcaagaaacaaaaactagagctactgtgcaagaaacattgaagtggcttgatttgggagcagatgctgtttgaattttttgctacctcttacttatcccattttatac

SEQ ID NO: 186651 - DNA, 544 bp, Homo sapiens
catgacaccacacttggcttatttttgtatttttagtacagatggggtttcaccatgttggccaggatggtctcgatctcttgacctcrtgatccacctgcctcggcctcccagagtgctgggattacaggcatgagccaccgcacccagcctaaaataatttaagtgaaatattgtagtgtttacatactgggaatgtaattcacaggggttctaggttaataaacccttcgatcatgaatgtttatcacattctaaagtcagtgtacacaaacaaatgattcctcagaatgctaagaaactttttaaatgaagtttcagtcatgtataaaactccactgaaaagcactgactttttaaagacagggtaggataatgttaaaaaagagtgccttgtgcctttttgttagcaaaattaatcatatgagtttatattagcacttattaaataatattatacaaaagcatgtgctatgcaaaaacacatatccacttagtatacccaagaagttcatagcatctaacagatgataaaccagtgcat

SEQ ID NO: 186652 - DNA, 611 bp, Homo sapiens
  misc_feature (1)...(611): n = A,T,C or G
catccaaaccacacagtttcatttttgatcaattgggtttaatgtggaaagttactcagaagaaagacacctcttagcactgtaaaaatcacttttcttcctttacactggctcaccatctactaagattattaatgcatggtaatctttatatcactatgtcattatactttattcatcaacagcttagttagaatactcctgattaacagagacaaaaataggaaaccatttagttagggagaattggcctgtactttaaaaccatctccatctccacataaacaatatttttggctttaaggagatctccttgcaaataaataatgactaaataaaaatckattcatttaaaatagatttaaaaaaggaatacatgtgggtatagccagagaaagtatgattaaaattacatatatgctttaagaaaaagattctgaatcaaaagacaattttcaaagtaacaattgtgcaagcaaacaactttatccttctgagttttactatactcatgtaaaacaatagggactgtgacagagctttacctccttacatcaaagttaacatggtgtgggaaactgtagaggaaatgtaaatattnnnnnnnnnnn

SEQ ID NO: 186653 - DNA, 611 bp, Homo sapiens
  misc_feature (1)...(611): n = A,T,C or G
catccaaaccacacagtttcatttttgatcaattgggtttaatgtggaaagttactcagaagaaagacacctcttagcactgtaaaaatcacttttcttcctttacactggctcaccatctactaagattattaatgcatggtaatctttatatcactatgtcattatactttattcatcaacagcttagttagaatactcctgattaacagagacaaaaataggaaaccatttagttagggagaattggcctgtactttaaaaccatctccatctccacataaacaatatttttggctttaaggagatctccttgcaaataaataatgactaaataaaaatcgattcatttaaaatagatttaaaaaaggaatacatgtgggtatagccagagaaagtatgattaaaattacatatatgctttaagaaaaagattctgaatcaaaagacaattttcaaagtaacaattgtgcaagcaaacaactttatccttctgagttttactatactcatgtaaaacaatagggactgtracagagctttacctccttacatcaaagttaacatggtgtgggaaactgtagaggaaatgtaaatattnnnnnnnnnnn

SEQ ID NO: 186654 - DNA, 606 bp, Homo sapiens
cattttccagtaggttattatttaggagagaccagagagagacaatcaataattttaccacagtgaagtaaattatcacaaaatggcatgtgcagagatcagagaagataagaaacttttttaaaacaactcaaggaaacatcccaaatagtgttacaattaaacttgggcttggagttttgtaacattctgttaagggaaaaccaaaatttgcatgcaagaaggaggcygacagagacagatatgaatgtcaaagtattattcacatgctttgttttccatagctgatatcttttccctaagtaccacagtggaaatagaaatacaaattaaatctacaggagagttatgtatctggcatgttgataagaaaacttttagatcagattcaggattggcaaggatgcagttaaatgagcaagctcaaaaatttctgaaaggagagaaaattcctatactactcctgtgggtgatttgacgatttgtacaatttggtaattagaaatgttaaaatccattagcctggtgacttcactgcttggagtttatactaagaaactcatcagctatgcatactaagatttacacatgaagatttttattgca

SEQ ID NO: 186655 - DNA, 535 bp, Homo sapiens
gaattcttaactcaaagtctctggatagaatctgaatctggtggggttttttgttgatgttgctatttggcgcgcgcgcgcgcgygtgtgtgtgtgtgtgtgtgtgtgtgtgtgtgtgtgacagaaagagagagagagaaattaggggagaaattgagatagaagatcagtaagacttgttttgataaccctgcagatcaaaacaggatgtagcaaagaaaccagccagccaaaaccagccaggactatgaattttattaataatatatttgcatgctatatgccactcccaccagtgccatgccaatatacaaatgccatgacggtgcctggaagttaccttatatggttccaggaacttcctactcctttcccagaaagttagtgaataacctaccccttatttagcatataattatgggtaggtataaatgtagccaggcagcaatccatgagtgctactctgcctatgtgataactctgccctgtctatggactagccattttgctgtgcaccggtgctctaatacatttg

SEQ ID NO: 186656 - DNA, 524 bp, Homo sapiens
gaatctggtggggttttttgttgatgttgctatttggcgcgcgcgcgcgcgcgtgtgtgtgtgtgtgtgtgtgtgtgtgtgtgtgtgacagaaagagagagagagaaattaggggagaaattgagatagaagatcagtaagacttgttttgataaccctgcagatcaaaacaggatgtagcaaagaaaccagccagccaaaaccagccaggactatgaattttattaataatatatttgcatgctatatgccactcccaccagtgccatgccaatatacaaatgccatgacggtgcctggaagttaccttatatggttccaggaacttcctactcctttcccagaaagttagtgaataacctaccccttatttagcatataattatgggtaggtataaatgtagccaggcagcaatccatgagtgctactctgcctatgtgataactctgccctgtctatggactagccattttgctgtgcacyggtgctctaatacatttggtttcttttactgttggcttgc

SEQ ID NO: 186657 - DNA, 516 bp, Homo sapiens
ctttcctgaccaaagccaagaaccctcccaagctgagccctaattttggggtacacctccatcaaaattccatctttacttttagtgtcrctatgagaaattcagcatatctttcaattataaatgtagacatcagccacagggctgttggcaattcctatgactttctcatcaataaacatcataggaatttcttgttgcagatatctttaactattgtttatacttatcagcaccttgaagtatcagttgttactagcccagccaagagatttgttattagtgtgttaataacaagaacatattttgaacctatgttaataaacaagaacatcaccttttaaaaatattttgagaatggtattttaatgtaatcagttttctttttaattatttgtatttcaatacttcagttatttaaaattatcattcttagaagtgcataggcttaaatagactgtcaagggagtttgttgtaacatacgcacacacatagacacagacacacacatgctc

SEQ ID NO: 186658 - DNA, 573 bp, Homo sapiens
tcattagcataggaaacattctttaggataaaccatatgttaggccacaaaataagtctcaattaaaaaaaaatctaaatcctataaagtattttttcagaccacattagaaaacaaaggccacctgaaaactatataaatgaaaattaaacatattcctgaatgactactgtatcaaaaaagaaatttttaaaaattgaaaaaattattgaaacaaattaaaatggaaatataacatactaaatcctatgcaatacaacaaaagcagtaagagggaagtttatcacaataaatggctatatcaaagaagtagatttcaaataaacaawcttgtaacaatatagctcaaggtactagaaaaacaagagcaaaccaaactcaaaattaggaaaaggaaataaataatacaaattagagcagaactaaacaaaataaagacttaaaaaaaaacacacacaaagattagtgaaatgaaaagttgattttcagaaaagataaataaaattaatgcactattagctcaactaaccaataccaaaaaagacccaaatcaataaaatcaaaattaaaaaa

SEQ ID NO: 186659 - DNA, 623 bp, Homo sapiens
acttaaaatgatgaaaactggcttaggaatgaggaaagcctggttctttccaagcatttccactaacttagtgttttgmaaacttgtctatatcttggaatgttttggggagcttcaggaattactgatgctttgtcccactccctgggattatgatttaattagtctaggatgcggcctgcacttggaatgtttagaataattcccaggtgattctaatgtgcagacaagtttgacggcctctgttctcacttgttctggaaaactaactcactcaacttccatttccccatccatgccagggcacagaggattacagaataaaggctacgtggttaacagcactgaatttgaagccagaactaattgagtgtgagtaaaattgtagtaactgatgagttcagattgttaggaaacttaatttctctgtatttcagttttcttaaccataaatacatcacctagaattataaatctcagaaggttactgtaaaaactaaatgagacaacttatacaaagtatataaaattaagttaactggcacatggttaagcttcaaaggaatgttagctattatcatgttaacagttttaattcataagtttatcgtacattaattact

SEQ ID NO: 186660 - DNA, 623 bp, Homo sapiens
acttaaaatgatgaaaactggcttaggaatgaggaaagcctggttctttccaagcatttccactaacttagtgttttgaaaacttgtctatatcttggaatgttttggggagcttcaggaattactgatgctttgtcccactccctgggattatgatttaattagtctaggatgcggcctgcacttggaatgtttagaataattcccaggtgattctaatgtgcagacaagtttgacggcctctgttctcacttgttctggaaaactaactcactcaacttccatttccccatccatgccagggcacagaggattayagaataaaggctacgtggttaacagcactgaatttgaagccagaactaattgagtgtgagtaaaattgtagtaactgatgagttcagattgttaggaaacttaatttctctgtatttcagttttcttaaccataaatacatcacctagaattataaatctcagaaggttactgtaaaaactaaatgagacaacttatacaaagtatataaaattaagttaactggcacatggttaagcttcaaaggaatgttagctattatcatgttaacagttttaattcataagtttatcgtacattaattact

SEQ ID NO: 186661 - DNA, 620 bp, Homo sapiens
taagtaggaactctgcatttaatgttgcagctcagggagtttaaaaaggttctaacagtttatttgcttggttagctgaaatatggattaaaagatggcccactgtgagcgagctggaaatgcctgatctcccttggtttaatgtagaggaagggatccaaaggcttagggagattgggatggtggagtgggttaatcgctttagacctattcatcccagctgggagggtccacaagatataccctggaccaatgccttgtgagggcagcacctgcatcttcgaagagccctgtaattgctcttctctgtatgtcagatataaccgtggcaacggcagtcattcaactacaaaatgtaawtactatatgaataattggatctcaaggtggcaggggccaagtggcagcacccaaccatcaaaggcaaggtgggcatagctaccataatggacagcagaggcaaagcagcaatcagaataggctgactcgagtagagctctggcattgtctaattaatcatagtgttgctagaggttgacattgataggaagtgaaattgttagaagtgaaattgataggaagcctactgcattcctacctacattatacaaacagaaaaa

SEQ ID NO: 186662 - DNA, 188 bp, Homo sapiens
acaagtactatggtcaaccatatatcaggaactgagcttggcactaggagttcaaagatgtaaaatacatgttgcctggcatcagggagttygacatttcattttggctgcaaacacaatgacaattataatgcactttgaaagctgcctgcctttctaggatggaatgatctatattttgatattgt

SEQ ID NO: 186663 - DNA, 617 bp, Homo sapiens
acaaataacatgcaatggagcttcaataagtctggcagcagaatttccagtgaaaactttacaggccaggagagagtggcagggcatatttaaagtgcaaaagaaaaaaaaaactttcatcttagagtactatatccagtaaaaatgttcttcaaacaaaggagaaagaaatagttttccagacaatcaaaagctgagggattttatcaacacgagacctgtcctacaagaaatactaaagggagctcttcaatttgaaagaaaaagacattaatgagtaataggaaatcatctgaaggtacaaaactcactggtaatggtaagtacatagaaaaaacacaatattataacaaacactgtaattatggtgtataaactactcatacccagaayagaaagactaaaagatgaacctagcaaaaataataactacaacaacttaagacatagcataataaataaatggaaaaaacaaaaagttagaaaacaggatgatgatgttaaagtgcagaatttttattagttttcaatttacttgcttgttttttgtttgtttatgcaataaaggttaagttgtcatcagtttaaaatcatgggttataagatattacctgcaa

SEQ ID NO: 186664 - DNA, 602 bp, Homo sapiens
aagctttacaaaaatatgacataatgaaaaggaatgtagcacaatctaatgttgaaactgtgactagccccaagcaagcrgcctgcaaggctgtctagccttcgaaacacttagaaatctggtgatgcccctgtgagttcactggaatgcttaagactgacttttaacttttattgtaaaaagtcaaggttttttatcgttaccaacagatgtttttgtgtttactacaaatggagcatcattgtgaaaaggtatgacaagttatttcatcaaacaaaggaaaaaaactttataaaatttctccttcctacaaaacacagtacagtaacataaatgtggatgcaacactataggcaactgactgcttatccttcttgctggctctgttcttaaaatggctggaggaagcaggtgatataggagatggaaactaaagttcttactttcttgtagggagtggggacagggcatgaaagaaaaaacaaagctacatggaaaatgcaggtaattccacccccaaaaacagggaggaagaagatgggttctcttgtctccaatgttctcccatatccatctccccaattctggccaataaatatcac

SEQ ID NO: 186665 - DNA, 602 bp, Homo sapiens
aagctttacaaaaatatgacataatgaaaaggaatgtagcacaatctaatgttgaaactgtgactagccccaagcaagcggcctgcaaggctgtctagccttcgaaacacttagaaatctggtgatgcccctgtgagttcactggaatgcttaagactgacttttaacttttattgtaaaaagtcaaggttttttatcgttaccaacagatgtttttgtgtttactacaaatggagcatcattgtgaaaaggtatgacaagttatttcatcaaacaaaggaaaaaaactttataaaatttctccttcctacaaaacacagtacagtaacataaatgtggatgcaacactataggcaactgactgcttatccttcttgctggctctgttcttaaaatggctggaggaagcaggtgatataggagatggaaactaaagttcttactttcttgtagggagtggggacagggcatgaaagaaaaaacaaagctacatggaaaatgcaggtaattccacccccaaaaayagggaggaagaagatgggttctcttgtctccaatgttctcccatatccatctccccaattctggccaataaatatcac

SEQ ID NO: 186666 - DNA, 460 bp, Homo sapiens
attttttctagtctgtcaatgtatttgaaattctgattctatcagccttctatcctagctttgcagcatcagcaaattgaataagatagtcttttctgtgtttccctaaactgtagaccaaaaattgccaagtctcctgaagtctaagaccttgttcccataattctttaccatgtccaaaaagcataccatcataccatctgagactacacatttaataacctgttcagaaaatgtgtgattatcattatttctttttatcaatgtgtagtttctgaaatttatttttccccattttagaaaatcaaaattacaatttccyatcacccatcaggactgtagcctttggagtcacattgctgggcttgcaacccttgatctgtaacacatttttttgtttgatgttggacatattaattagtctctgtgcacttaagttcccttatctataaaatgacgt

SEQ ID NO: 186667 - DNA, 543 bp, Homo sapiens
tgtgtgactcatattatttcctgaaatctttcctgtagagcttattttatttggcaacaattccagaggtgtggctactgatcatgtttcttccttgagttctacaaactattagtaacagagaaaaactagtgattcctaaatcaacttgctgtgccaaaaatgaaatgaagtgggcatgttgcaaaaccctgtgtcatctttcacagtcrttagtttgtatgaagcccttctgttgataaatgatagttttcctggttatttgaccaccaaacatatcttcacatctagaaaaaaagattaaattaatttatttagtgcttgaaaacttgaaacacctataaattgcttactactgaaatctgccagtgtgcataatcttatgttggagagtaggccctgttctgaattaaaaccaggtttctaacctctagagaagaaatatataccaaactcattttaaaaacacatgcaaatataagcctgaattgtatttgtaataacttttcacctagatttataagccagctaacagtggggaat

SEQ ID NO: 186668 - DNA, 610 bp, Homo sapiens
aataggttgcctaggttgcaggtatgtgcgtccaaagatcttttgtatatatacacacgtgtgtgtgtgtgtgtgtgtgtgtgtgtgtgygcatgcacctgtacgcatgctcttgagagagctaggcattctagggactttactcacctttaaaaaatcactcgttgacttggaagagaagcaaatagtgagacagtgaggcattttactgtcctgcaatcacactattggtaaaaagactcctttttccaccagttagggcagcattgattggagataatgggttaaatctgtttcagatttagaactacaatttatcaagtgctgctggtactagtattcggtaactctttttgtaaaacatattgtttacaaaaagccccaattgtccatcctgaggttcagtaatttataaattaaaaatacaagtaatacatgcaaagaaaaacttacttttataggacaactgaatttttttaaatgctcaaatgcagaaccaaggatgtttatgttgctgctagtctcaaaatacaaaccacacaattttgcagaatgctcccaaatggcagtagaatacacatgcatgtttcattactgaaatttcaacttt

SEQ ID NO: 186669 - DNA, 610 bp, Homo sapiens
aataggttgcctaggttgcaggtatgtgcgtccaaagatcttttgtatatatacacacgtgtgtgtgtgtgtgtgtgtgtgtgtgtgtgtgcatgcacctgtacgcatgctcttgagagagctaggcattctagggactttactcacctttaaaaaatcactcgttgacttggaagagaagcaaatagtgagacagtgaggcattttactgtcctgcaatcacactattggtaaaaagactcctttttccaccagttaggkcagcattgattggagataatgggttaaatctgtttcagatttagaactacaatttatcaagtgctgctggtactagtattcggtaactctttttgtaaaacatattgtttacaaaaagccccaattgtccatcctgaggttcagtaatttataaattaaaaatacaagtaatacatgcaaagaaaaacttacttttataggacaactgaatttttttaaatgctcaaatgcagaaccaaggatgtttatgttgctgctagtctcaaaatacaaaccacacaattttgcagaatgctcccaaatggcagtagaatacacatgcatgtttcattactgaaatttcaacttt

SEQ ID NO: 186670 - DNA, 610 bp, Homo sapiens
aataggttgcctaggttgcaggtatgtgcgtccaaagatcttttgtatatatacacacgtgtgtgtgtgtgtgtgtgtgtgtgtgtgtgtgcatgcacctgtacgcatgctcttgagagagctaggcattctagggactttactcacctttaaaaaatcactcgttgacttggaagagaagcaaatagtgagacagtgaggcattttactgtcctgcaatcacactattggtaaaaagactcctttttccaccagttagggcagcattgattggagataatgggttaaatctgtttcagatttagaactacaatttatcaagtgctgctggtactagtattcggtaactctttttgtaaaacatattgtttacaaaaagccccaattgtccatcctgaggttcagtaatttataaattaaaaatacaagtaatacatgcaaagaaaaacttacttttataggacaactgaatttttttaaatgctcaaatgcagaaccaaggatgtttatgttgytgctagtctcaaaatacaaaccacacaattttgcagaatgctcccaaatggcagtagaatacacatgcatgtttcattactgaaatttcaacttt

SEQ ID NO: 186671 - DNA, 300 bp, Homo sapiens
tttatctcacttgatggggaaaaaacctacatatatcattaattataattatcttcgcagttctacaacctatccaacaatagcctgtgtttattacatgaaaaaatagtaaatgttcctcaaagctcctttaaaaaagataaattaataagcataggctataccagttatttttgagtgaactttgttgctcaaggtaaatacaccaaagaaataaataagtgtscataaaaccttttagttagtataatttagagaataaaaggtttcaaacacacttctcaggaacactttgtagtc

SEQ ID NO: 186672 - DNA, 420 bp, Homo sapiens
gaagctcttatgtatgagagtgacatcatcagctatgtaatttagaaattcactaaaagagataatttggagtataattggagcatggaagattggagggagtaagatcgcttctgaggttgttgaagtaatcagagcaaaatttgatgtgattctgaaataaagcaaaagctgacarggtttagtaataagagacatgtctgagaagaattagtggaatttaagaattgattgaaagtggtacactgaagaatagagagaaatcagtgacaattcctatgtttctcatttgggaaatttcttatttgaatgttttatgcactgagagagaatatagaaagataaagttcgagaagatatatggataaaatcagtttgtacatggtttgagtgacgatggagcaatcatgtgggaatctc

SEQ ID NO: 186673 - DNA, 571 bp, Homo sapiens
atgtaaagatctggcactccaaagaattgtctaaagctttgctaatcaaagcatggtatttggaaaaatagcattggcaccacctgaaatgttattagaaatgcagaatctcaggacctaactcagatccacagaatcagaatcttcagttaaatcagatccttatgatttaaatacatgttaaattttgagaaacactgacctagaatacgtgcacacatcagcaaacatgtacccagtcrtaaatatacgttgttaacatttaggtcgtagttggagctatgcaaatgtataaattgagcaaagtgataaaaatataaaactttagagaactccaatatttaaaggaggatgataaaggatgaacccccaaaatacaactgaggtgtatttcaaaatgaagacaaaccaggaaaggagtgtataaatgaaattgtagaataaaagaatttcaagtttaaggaatgatataaaaataaaagcagcattaagcatggaggtaaatatccccatttatccaaatttgcattaattctttagaagttaaatattcagtcttaaaagtaacatt

SEQ ID NO: 186674 - DNA, 608 bp, Homo sapiens
ataggaaactctgaatattccaactttttcaagatggttgtggctagtctgagtcctttgcattgtcaaatgcaytttaggaagggtttgtcagtttgtgcaaagaaggaagctggggtttttgttaatcattgtgttaaatccatagataaacctggtgaattttaacaatattgtctttttaataacatatgggctgtcttaccatttacttagtccttctttaatttctgtcaacaatatattatagttttcagtgtacagacttgcactccttttgttaattttattccttaatgttttattttttgagactattttaaatggttttccaaattttactttggtattattcattgctagtgtatagaaatgcagtcaattgttatgtaatcatgttgtatcctataacctcactgaacttgtttttcaattcttagtaattagctgattgcttaggtttctccatgggcaagaatgttatctgtgaatacaggtttacttctatctttattttccttctttaccttgcctaattcccttggctagaactgccagtacaaggttgaataactttgcatatagtctgctgtatagtcatacttata

SEQ ID NO: 186675 - DNA, 608 bp, Homo sapiens
ataggaaactctgaatattccaactttttcaagatggttgtggctagtctgagtcctttgcattgtcaaatgcactttaggaagggtttgtcagttwgtgcaaagaaggaagctggggtttttgttaatcattgtgttaaatccatagataaacctggtgaattttaacaatattgtctttttaataacatatgggctgtcttaccatttacttagtccttctttaatttctgtcaacaatatattatagttttcagtgtacagacttgcactccttttgttaattttattccttaatgttttattttttgagactattttaaatggttttccaaattttactttggtattattcattgctagtgtatagaaatgcagtcaattgttatgtaatcatgttgtatcctataacctcactgaacttgtttttcaattcttagtaattagctgattgcttaggtttctccatgggcaagaatgttatctgtgaatacaggtttacttctatctttattttccttctttaccttgcctaattcccttggctagaactgccagtacaaggttgaataactttgcatatagtctgctgtatagtcatacttata

SEQ ID NO: 186676 - DNA, 494 bp, Homo sapiens
taagttttgaaacatgatttctctctctccagtcttcatttttgttaaaaactcatcataggactgagttgtttgaaaaaatagactttagttttatacttggcctgattatttgcataaagtgcagcaagaataattatttctacataggtcttttggattggctttgatgaaagtttgttccacaaggaatctcagataagaccttctaaagccaagctcacccatgggtatgtatcttcaaatacctgtgagttgggtgatcctcccctcttatggtcccaagataaacttggagctcctggacctgttagaaagtgacattctttactgaccacaggtcagggaccctgtayagggactgtgtagatgacagcatgaggccagtctcccatggggcatttatcagctctacaagtcaagtctgactctttatatggaagcatacacttccagtcaaaaccttggtaaaatggccagtttttccaattgtg

SEQ ID NO: 186677 - DNA, 573 bp, Homo sapiens
ctctgcaacctctgcctcccaaattcaagcaattctcctgcctcaccctcccaagtaactggcactacaggcgctcactaccacatgtggctaatgttttgtatttttagtaaaaacagggtttcatcatgttggccaggctggtcttgaactcctgacctcaagtgatccacctgccttagcctcccaaagtgctgggattacatgcatgagccaccacacctggccagagccctataactttttaattactggagattaaataaaggcagaaagcctacaatgccccaccaacctatccaagcaagcatggtggttaggagggagataaaagaatgggatatgaaaagtgtcaggagraagtagagtttctttctgtccctgtttgtcaaggattgaaagagtttccgggaagcaggagtttcactgctaaaatgaggaatatcccaggggaaatccaatgtggtaagatctggagaagcaaaaccactggatagccaagtacgattgtaatactgtgatggtagtctgtgaccagatagtccttatgaagatggttaggcagctgaaatt

SEQ ID NO: 186678 - DNA, 574 bp, Homo sapiens
ttgagctggagagagatgatttagggtatctggaggaagaaatttctaagcagcaagtattcaagaggtgattaggttttgttaaaaagatacggttttatgtattcacaaaatatggtttggaattggaacttacatttaaaagggaagcagagaataaaagtttggaaaatttgcagcctgacaaggtgatagaaaagaaaatcccattttctkgggagaaatttaagcctgctacagaaatttgcataagtaataaggagccgaatgttaatcaccaagacaatgagggaaatgtctccagggcatgtcagagaccttcacagcagcccctcccatcacaggcccagaggcctaagagggaaaaaatggtttagtggactggccacagggcccctctgttgggtgcagcctagggagttggtgtcctgtgtcccagccactctagtcatggctaaaatgggcccaagtacagcttgggccatgacttcagagggtgcaagccccaagtattgggagtttctatgtggtgttgagcctgcaggtgcatggaagtcaagaattgaggtttggg

SEQ ID NO: 186679 - DNA, 565 bp, Homo sapiens
tatgaaaaacgttgctatacatgtgatttctttttcattttttgataaaagatcaaacaaaacggcctgaggatcttaatcacttacagtgctatattatatacattatatcctgaaaaacataaatgtctatgtacaaaggaaatattatgtcgaaatattgccccaaatattactgtcttaaaagtatatagattctatttttctatttaattttggggataaaagatggtagggtaaaatgaagaaaaaaactaaagaacaaaataagagtgagatgaagtacctaataaatatatacatctatattaattttacccaaataagtataaaatatgacatttgtatgaatatgctaatttattcaaggggctgaaatattatcactttctaattttgtctactctgttcattcttctactgygtatttctgttttgattgaactaattatagaattatatattactgttctcaaaaaaattgttagtgccatgagtaccaagtcagcagcaccataattaagaactactatttgttgggtatgtagtatgtgctgcacagcat

SEQ ID NO: 186680 - DNA, 597 bp, Homo sapiens
aaaagggagaacgataccctccttaaaattttcttttgaaaactaaaagtaatatatgtaaattatatagcacagtgcctgacacatagtgagagtccaaaaaatgttagctaagtccaggcttggtggctcaagcctgtaatcccagcactttgggaggctgaggtgggcagatcgcctgaggtcaggagttcaagaccagtctgtccaacatggkgaaacccaacatggtcaaaccccatctttaccaaaaatacaaaaattatcggagcatggtggtgtgtgcctgtaatcccaactacttgggaggctgaggcacgagaatcacttgaacccggaaggcagaggttgcagtgagccaaaattgtgccactacactctagcctgggtgataaagcaagattctgtctcagataataataaagttagctaatatactaatatgcatagaatgttcaatcttacagccattgctaatattaatattttatatagacagcactaaccaaaaatatatactgtttttttctatgcctgttcctatttccacagaaatttagggaagagccacactcttttccaatatgcacagagcaa

SEQ ID NO: 186681 - DNA, 530 bp, Homo sapiens
gatgcaattatctccacctgttctgccctcaatgtgagaggactgtggggattacaattcaagacaagatttggatggggacacagagcctaagcatatcaccagggttccccaaagtgtcccttactttggcacagaaagaactggaacaaagaactatctgaccacaaggctctggacacagaactgcgcagaaatgtgtgaattggagatcaagctttggctaatggttttttcattagccaaagttgaaattcaaaaggggttttttgtcacagatggcatgggtaaacctggaggacattatgtcaagtgagataaaacccagtcgcagaaggacaaatactatgtgattccacttaaaacatgaggtatctaaaatagtcagactcattgmagttgccagggactgggggtggggaaaatagggagttagtcaatgggtataaagtttcagttgttctggatgaatacgttcaaagtatctgctgtacaaaatagtgcctatagttaacatcatggtattgtgt

SEQ ID NO: 186682 - DNA, 538 bp, Homo sapiens
tctctctccaaattgctgctttgtatatggatgtaaccatgcccaatcttcactttaaaaagtcatatgttgtataccatattcagctaaaaactatgaattacactccccctctgacactcattatggaaattcagagctaataaggatgtctttgatcaactaatccaataattttatttttacagatgaagaatctaaaaaacagaaggctaagttagagtcacacagatgrttaaactatgagcatcaactagaaggcaggtttttatttgtttttcatctctgttattgcccatatactagactgcttcacattttgtaacaaaacaactaattcctcttatacataataggaatacatagaacatgccactccaaaacagcatagtatacattttgacaatttaactgtccaattgaaaggcagagattaacagaatcaataaaataatgtttcaactacatgttgtctacaagagactcactatagtgtacacggatttctcaggtgccaatagctttctcaagtgttcat

SEQ ID NO: 186683 - DNA, 635 bp, Homo sapiens
atttcaggagatatgtaagcaaaataatttgaatgccactgatactgaattttcagaactcagagaaaggagggaattatggaatttctaaaaaacttgtgaattagaagaagtctggttcaggtcaaagctcatcacatttgggaacctcaaaacaaagggcaatgctgtcagcaaacccaatatgggacttttggtagggcacagcccagttattcgtgacaacttggatataagacttctgtgtcctgtggataattcctacattaagtaaaaacattytaggcctggaggggcacggtggctcatgcctgtaatcccagcactttgggaggccgaggcaggcggatcacaaggtcaagagattgagaccatcctggccagcatggtgaaaccacatctctactaaaaatacaaaaattagctgggcgtggtggcatgtgcctgtagtcccagctactcgggaggctgagacaggagaatcacttgaacctggcaggcagaggttgcaatgaaccgagatcgtgcccctgcactccagcctggcaacagagcgaaactccatctcaaaaaaaaaaaaaaaaaaaaaaaaaattctaggcctgtgggacagctagaaatccaacaccagaaat

SEQ ID NO: 186684 - DNA, 610 bp, Homo sapiens
aattgcaattttgcttaagattttacacaggcctgagctttgtcttttttataacctcttttttttgttgttttgtgataagaattgtactaaccttgaatgagttgggwaatgtttcttcattttctattataaatatttggaggaacaaaaacatatgtcaatgtatacttttttgctggaatttcacaggaaatctattacagtggtcacattggagaggagggataaagacttaggggacagggagtgatgaagagggagagggaggcctctattttcattatagtctcctcaggctgtttgctttattcaccatgttcatgtattacattatttcttttggaaaaattttgaagaataaagtcttccatctatcacaaatacaaagtaaactctttccattaccccctttataacaatattacagtagccttcagggcatactcacagagctcaagtgaacccccctggtgctgacttgcaattcagatttttactctatcccttagaatttatttctctacacgagtgttttgctgcccagcatccagaggttcaccgtcctaggaactaacccggctttccatctacaggaacccatactcct

SEQ ID NO: 186685 - DNA, 610 bp, Homo sapiens
aattgcaattttgcttaagattttacacaggcctgagctttgtcttttttataacctcttttttttgttgttttgtgataagaattgtactaaccttgaatgagttgggaaatgtttcttcattttctattataaatatttggaggaacaaaaacatatgtcaatgtatacttttttgctggaatttcacaggaaatctattacagtggtcacattggagaggagggataaagacttaggggacagggagtgatgaagagggagagggaggcctctattttcattatagtctcctcaggctgtttgctttattcaccatgttcatgtattacattatttcttttggaaaaattttgaagaataaagtcttccatctatcacaaatacaaagtaaactctttccattaccccctttataacaatattacagtagccttcagggcatactcacagagctcaagtgaacccccctggtgctgacttgcaattcagatttttactctatcccttagaatttatttctctacacgagtgttttgctgcccagcatccagaggttcaccgtcctaggaactaaccyggctttccatctacaggaacccatactcct

SEQ ID NO: 186686 - DNA, 571 bp, Homo sapiens
aatcatctaacagcaagaattatctactagccgggaaggggacttttttggaggaggggcaaagcatcaattttaaatagtagccacaaaaagcgttaaattattatattccagaaagttttctcagatcagtcaaaccttgggaggcagaagtaaagcacaaaagcaaagtgttggaacctgagtataatcagtggcaaagagatcagtaggcatcgaactacataaaagactctgatcagagtcacatggagcatacctcaccatggaggtccaagaaataggctctccgcctcatgatagtcacatcataataagaaaaacttcatgcagatgaagtagagaataactaatcataaatctgtaattggtctagtgggattcattttagggaagaatcgaaggaagcaggagggagatatttgtgttgcagaccaagaatcaagtcacaggaggaagaataagtctcaggtatgaaaatgttagcaggaatctgtgcactyggtgtagcaagacaagccgcagacaaaacccctcagacaccgagtcaaagaaggaagcggtttatttg

SEQ ID NO: 186687 - DNA, 614 bp, Homo sapiens
aataaaaaccatgcttaaagaaaaaatcaggtatgagaaaatgatttataaaacagcacatattaatagatattttaygaaagaaacaaatggatattctggaattgaaagtataagaactaaaataaaaatttactaaaaagtctcagtatagattgagctgatagaatcagcaaattttaggaaagataaagattatacatctgaaaatcaaaaattaatgaacaaaaataaaaactcagaaaaatataagacattttaaacccaacaacctacctataatgagaataccagaaggaaatgaaagagagaaatgaatagaaaaattattcaaacaatgactgctgaaaaatttctaaacagacttacaaacatttttgtaaatattagagaagctcagcaaactcttattatattcgactatagcaatacaatagaacaacgtgggaatgaagctatattagagtaaggaaatgaacccagatgataacaggaccaaaaaagaacatgaaacaaaccaaaaaatgctaaataagaaaactaatttataaatatttgtgattgtgctctcctttattatcatagcttctttaaaagacataaggtgatgtaaa

SEQ ID NO: 186688 - DNA, 614 bp, Homo sapiens
aataaaaaccatgcttaaagaaaaaatcaggtatgagaaaatgatttataaaacagcacatattaatagatattttatraaagaaacaaatggatattctggaattgaaagtataagaactaaaataaaaatttactaaaaagtctcagtatagattgagctgatagaatcagcaaattttaggaaagataaagattatacatctgaaaatcaaaaattaatgaacaaaaataaaaactcagaaaaatataagacattttaaacccaacaacctacctataatgagaataccagaaggaaatgaaagagagaaatgaatagaaaaattattcaaacaatgactgctgaaaaatttctaaacagacttacaaacatttttgtaaatattagagaagctcagcaaactcttattatattcgactatagcaatacaatagaacaacgtgggaatgaagctatattagagtaaggaaatgaacccagatgataacaggaccaaaaaagaacatgaaacaaaccaaaaaatgctaaataagaaaactaatttataaatatttgtgattgtgctctcctttattatcatagcttctttaaaagacataaggtgatgtaaa

SEQ ID NO: 186689 - DNA, 561 bp, Homo sapiens
tattgcattgtgtttctctctttttatcaatcactaattcagataccataaaacagtttggatttagaattctgaaacctgctgtctgtatatttcatatataatatttgcataaattatccacatatatttagataatttctttatttgttcagcatgcattttttaaataattagtatatgtgatgctttttctggataccttaaatatgaggataagaagacacactttctatttgtggggtgttctatctggtattagagataggaatttaaaaaatatgtatttgcaacattggataattaaaacaatagtaaaaatattattatgcatatttttggcattgcagtatatagtatcatgcaaatgctccactcagttcttttgctgttgaaagyatagttgattgatggccccagctgctgtccctctgtgtctaccactgacttgtgcccagacaccccccacctctggctgctctcagccaatgactgagcactgcaggcataataagacaggcccaatctagccggacataagacttctcccacaggtaatat

SEQ ID NO: 186690 - DNA, 583 bp, Homo sapiens
atgataaaatggagttcatcaaaataaaaggcttctactcaacaaaagacaccattaagacattgaataatcaaaccacagaatgagaggaaaagattcacaatacatatatctgacaaatgacttatctcttatatatatatatacacacacacayatatatatataaaatacccaagaataaaaagaaaaacagaaatttccaattcctgtcaaaatggaaacagcacatttcattctgtttctcccactgaatgtaatttaaaaccttagacagaatgcatggaacaactatctgaggattctgaaaagtaaatggtaaagtataaagtaaatggcaggaatatggagaaaggaaaccagaagtcaaagaactgtcaaatcaagagtgagtttcccaatttttttccccttcattttctcccaacttgtactaaaaggcaaccgaaaatgcacatattttgcacaacaatgcgaatatagttaacactgctgaactgtacactgttaaattacatttggcttaaatctgcctccatacataacataatctaataatatgtaaacaaactgtaacctaact

SEQ ID NO: 186691 - DNA, 583 bp, Homo sapiens
atgataaaatggagttcatcaaaataaaaggcttctactcaacaaaagacaccattaagacattgaataatcaaaccacagaatgagaggaaaagattcacaatacatatatctgacaaatgacttatctcttatatatatatatacacacacacatatatatatataaaatacccaagaataaaaagaaaaacagaaatttccaattcctgtcaaaatggaaacagcacatttcattctgtttctcccactgaatgtaatttaaaaccttagacagaatgcatggaacaactatctgaggattctgaaaagtaaatggtaaagtataaagtaaatggcaggaatatggagaaaggaaaccagaagtcaaagaactgtcaaatcaagagtgagtttcccaatttttttccccttcrttttctcccaacttgtactaaaaggcaaccgaaaatgcacatattttgcacaacaatgcgaatatagttaacactgctgaactgtacactgttaaattacatttggcttaaatctgcctccatacataacataatctaataatatgtaaacaaactgtaacctaact

SEQ ID NO: 186692 - DNA, 561 bp, Homo sapiens
ataggtccagttggggagcttcatggtagcagagacagcagaaactctgagagaaacaccatctctttgaccagaagacttaggaaaaggatccctgtgagccaaagagtgtagagtgaaatccccattaaaactatttcattttctctctcctagatctgtccccaagatggagagacagaatttgcagtttgaacctcattagattgattgcctgctaaaacaaacaaaacaaaaacaaagtcaacactttctgttttttttttagacggagtctcgctstgtcgcccaggctggagtgcagtggcacgatctcagctcactgcaagctccacctcccaggttcacgccattctcctgcctcaatctccagagtagctgggactacaggcacctgccaccacgcccggctaattttttttgtatttttagtagagtcagggtttcactgtgttagccaggatgctctcaatctcctgacctcgtgatatgcccacctcggcctcccaaaatgctgggattacgggcatgagccactgcgcccggccctatgctttctaa

SEQ ID NO: 186693 - DNA, 407 bp, Homo sapiens
ccattggccctcaggattctgcttcaaaacacagtggtttcgagaaatcatcagggggcagatttttgataccagttggtatgtgacaccaaatcctcgtcctacagtcacctgggaagacaacaacaatgcaagaaataccatcagtcattgtgctgaaaagggaggtcctttacaaatctcatcaaccagcagcatatgcaggtcctgacttaagaaaccagacacctgtggaaccaaaacagtgcatcagctatctcctcttcagctgtcttgagaaccaccaagtagaaaaaggcaaacggttgtgacaacaagagaaagctgaaaaagarttatccatgtatctcagggttgccaagatcttgaaaggtcatctggttcaatgactatgagatagaggaatt

SEQ ID NO: 186694 - DNA, 591 bp, Homo sapiens
tctgtgaactgaatccacacatcacaaagccgtttcatagatagcatgtttgtagtttttatcacaggatattcaatttttcactataggcttcactaagctctgaaatgtcccttcacagattctacagaaagagtgttgccaacctgctgaatcaaaagaaaggtttaagttygtaaactgaatgcccatatcacaaagcagtttcatggatagcttctttttagtttatatcgtggcatatttggtttttcagtataggctttagtgggctctgaagtgtcccttcacagatttctacaaaaaggttatttccaacctgctgaataaaaaaaatgtttaactataaactgaatggacacatcacaaagaggtaacagagaacttctttctgtttttatcatgagatattctgtttctcactataggcctcagagagcactgaaatgtccctttgcagatactacaaaaagcatgtttccaacctgctgaatcaaaagaaaatttaactcagagaactgaatgcaaacatcataaagcagtttctcagatagcttctatctagtattcatcgtgatattttcagttttt

SEQ ID NO: 186695 - DNA, 591 bp, Homo sapiens
tctgtgaactgaatccacacatcacaaagccgtttcatagatagcatgtttgtagtttttatcacaggatattcaatttttcactataggcttcactaagctctgaaatgtcccttcacagattctacagaaagagtgttgccaacctgctgaatcaaaagaaaggtttaagttcgtaaactgaatgcccatatcacaaagcagtttcatggatagcttctttttagtttatatcgtggcatatttggtttttcagtataggctttagtgggctctgaagtgtcccttcacagatttctacaaaaagrttatttccaacctgctgaataaaaaaaatgtttaactataaactgaatggacacatcacaaagaggtaacagagaacttctttctgtttttatcatgagatattctgtttctcactataggcctcagagagcactgaaatgtccctttgcagatactacaaaaagcatgtttccaacctgctgaatcaaaagaaaatttaactcagagaactgaatgcaaacatcataaagcagtttctcagatagcttctatctagtattcatcgtgatattttcagttttt

SEQ ID NO: 186696 - DNA, 612 bp, Homo sapiens
acaaagcagtttcatggatagcttctttttagtttatatcgtggcatatttggtttttcagtataggctttagtgggctctgaagtgtcccttcacagatttctacaaaaaggttatttccaacctgctgaataaaaaaaatgtttaactataaactgaatggacacatcacaaagaggtaacagagarcttctttctgtttttatcatgagatattctgtttctcactataggcctcagagagcactgaaatgtccctttgcagatactacaaaaagcatgtttccaacctgctgaatcaaaagaaaatttaactcagagaactgaatgcaaacatcataaagcagtttctcagatagcttctatctagtattcatcgtgatattttcagttttttaatacaggcctcagtttactccaaaatgtccctctgcagattctacaagaagagtgttgacaacctgctgaatccaaaaaaaaagttttaactctgtgagttgaatccacaagtcacaaagcaatttcacagatagcttcttcctagttttactgtgggatatacctttttcagtataggtctcagtgagctctgaaatgtcccttcacagattc

SEQ ID NO: 186697 - DNA, 400 bp, Homo sapiens
tatcaaaagcagttttacagataacgtctttctgtttttattgtgggatattcaggttttctgtataggcctcggtgggctctgaaatgtcctatcacagattcttcaaaaagagtggtttaactctgtaaactgaatgaaaacaccaaaaagcagtttcacagagagcttctttctaggttttatcaaggaatttttgtttttttcagtataggcctcagtttgctttgaactgttgtttgcagatactactaatacagtgtttccaatgtgctgaatcaaaggaaagatttaattctgtragctgaatctacacatctgaaagcagtttcacagatagcttctttcttgttttttgttttacagcatattctgtttttcaccatacacctctgtaggt

SEQ ID NO: 186698 - DNA, 631 bp, Homo sapiens
tgtcccaggcaagctgtaaagcccaaggttttggagcagagtgccagtgtctcttgtggaaggcccaaacaagtgaaaatggggccgcagagtggcgtgtttgggcatcagggacctcaggaggatgttgaggcaggcagaggggagaaccggtgagaacacaggtctcagaagcccccaaagctgttccaagtgggttgtaaagccacaggatttgcagcagtgtgcctgtgtctcccgccaaaggcccccaaaagcaaaaaccggaccacaggatggtgtggacaggccacagaaactcagggagacatggaggcactcagaagggagaaggggcaagactacagggaatgctgggagcctcccaaagaggtctcttccatcccagaagcccacagggctgttctgtgtgggctgtagaagacccaggctttgaagcagggtgcctgtgtctctcgctgaaggctccaacaagagaaaacggggcagcaaaggggcatgggtgggcctcagggacacaaggggacgttaaagcaggcaaargaaagaagtaatgagaccacagggaaggctgggagcctcacccaacggcctctcccatcccagaagcccccaggtatgtcccggatgg

SEQ ID NO: 186699 - DNA, 603 bp, Homo sapiens
ccaaaaaaaaaaaaaatacataaaagcacgcagattggttagatagaagcgaaaagggacagagggaggaaattagggtaaatattatttttccctcaatgggagtattttaaagctaaatgccctgccctaaaaagtcaagagttatgtaaagtattggtggttgtagtcatttgagaaaagtacaacccgaatatgcatttctcttatgggtcaaasagaagtcacgataattgtgtgtcctttacactaccccaagattgttatttaaagatgagcatagtgaaaactataatactatcatttgtccactacccatgtatgctagcaaataattataaatatttttaccaatgaactgaatcagaaattggtaacaattttaaaagtagcttttctgctattgtgcaacatcaatgcccttctattacaattagttccaaaaagataattctcttatctgacagcattataaaagcaaagtatttcatgcatggcagtgttgaggagcttggtcatgggggacagggtgaaaggtccaatggactaccataaatgtgtggttcacaccatcagaggcggatgcacctgctaatctggctt

SEQ ID NO: 186700 - DNA, 610 bp, Homo sapiens
ccgaagaaggttctccggccccagtcactggcaccagcatcttaaacaggggaggatcaaaccaactggaacacagttgtattttttagggtagaatttctgctcctctgaatttttccagtgatgactcctaaaccaatgtcagtaatattagtcccattttaccgaatggagaactgaggcttatagagatccaaagattttctggattgctaggaagtgggagagctcaaaattcaacctaggtctctttggccacaaatcctatgcttagttgtggttttgtctccacagtttttagcacacctggattcgctcaagggaagtaccagatcaatcactgaatatatgattagatgagtagatgaatgatggattgaaggaaggatggatggacagatgggtcacatagctagctttgtttttgatcattctgatctaaatccaaatgatacaccttcagagaaaccttccccggcacccacttaagctgctgcaatagctacattctccayccaacccttccctattttaatactttttcttagcatttactatctaaaattatcttgttgctttatctggtcactcattgattgttcacaagaga

SEQ ID NO: 186701 - DNA, 571 bp, Homo sapiens
tacttattcactatcacaagaacaacatggcaaaaactcatcatgattcaattacttcccaccaggtccctcccacaacacgtggggattctgggagctacaattcaaggtgagatttgggtggggacacrgccaaaccatatcactagctaagcttttcccagcacttagtatatgccaggtgtcatttgtaaatactttatatgagtcagcacacttaagcctcacaaagtgagaaggaaggcattagtactttacccattttattgatgaagaaactgaggtacaaggcatggaggtcagaagtcacacacctggtatgttggacgtggggctgcaaaaccagacagcatgactgcagtacctgggctcttgtatgaagtgcttcacaaagtgactggcacataggaggggcccagcaaggcagcactgttatgagagctagtttgacctcccaccccacctcacccgggtccaagcttcatgctttcagagtgattgttctgtggtcagttcatgcacccttaggcttctaggaagcagaaatccaacttacgcagagtacaaggtg

SEQ ID NO: 186702 - DNA, 598 bp, Homo sapiens
catcccacttcacttcccggtccacacgtaaagcagtgtgtctccaaggaggcagtgagcaattcccaaggtccccrtgttgtgagaagcgcgctgctttctccctttgcaggggaaaaaaaaggctttcctggtgagatcatgagtccttccggcttcatttctcattgtgggtttaacttctaaaacgcaaatggagtttagagaggatgagcagaaccacaggacctgcccccatctctcactcactgcaattgcttctactctgggcacaagtagggtgtctgaagaccatgtttccctctggttctctagtttgcagataacacagaagacactggctagaaccttaagctttctgccaaaaagatgcagagagcagggcagtagctactggcagtggggtgtgaataaagagtcctttcacaaccaagttcactgaggatttggagcaccagcttcccagcagtatcgaggggtggagaggtgtacattcaggtggaggggtacatctaggggtggagaggtgtacattctagaaacagctgttaacacactccactttaaagacagcaagctagacctgcaggatcaaagc

SEQ ID NO: 186703 - DNA, 397 bp, Homo sapiens
agttactgcactagaacactagggcaaatttgtattgtaaatgtaaattttgcatatattggagatttcaacatcttaaagaatggtaggatattgatgatcgtggaaggtgggaaatgggtgcatgggttcattatactattctatttattctktttatgttggatgttttccatgatgaatttttaaagatatttttaatgataaatttttaaaagaacctcatatattagtttatcacaacttaaaaatattgtgataactgtagttcaatataattggtttttttctgagttactatgcattttactttatgcatagtaaaaacccactttttctgagatgagatccctaggcttcaccagacaactgaagatttccttgacactaaaatatt

SEQ ID NO: 186704 - DNA, 536 bp, Homo sapiens
agtgtgacccattgcgcttctgataagcttctacatgctgccgttgctatgcttgggaccacactttgagtggcaatgccctagaccaggggtcaacaaactttctctgtaaagagcctgttgtagtttggatatttgtctcctcgttttgaaatgcgatccccagtgttgtaggtgggacctagtgggaggtgttttggtcatargggtccctcatgaatggcgtggtgtagtccctgcattgagtgagttctaactctattagttcatgaaagatctgattgttaaaaagagcatggcacccctcctctccctctcttgctctctgtctcaccgtatgacttgcctgttccctctttgccttcctgcatggtaaaagcttcctgaggcctcaccagaagcagaggctggtgccaggcttcttgtacagcctgcagaaccatgagctgaatacacctcttttctttataaattgcccagcctcaggtattcctttatagcaatgcaaaatggactaatacagagcctgaaagtga

SEQ ID NO: 186705 - DNA, 556 bp, Homo sapiens
gcccccttgtttgaattaggtttgataagcacaaagaaggaaatagttccaggagtaagagacacttactcagcctgcatagaagacgtcatagtttcccagcagtcagggccataaaataagtggtctccctgcttatggactggaaatgccaaaaatgcaatgttgraaataataccgcaggatcactgaattaattattgtgggtcctgattgtgtaaaatctgattattgtggagtggggattggattgcatgttaatatttaagtcctttggaaatggcactgaaggaagaaccctcccatactgtttggttcctccagcccatcccccatgagacaggatttcttgggacccgaacagaaatcaccttatcacatgcagcacagattgcaggcagggcttgcacttgcactatttgcatttgtataaagaaagggcctggtattatgtaactgcatgtgggttctgagggcttctaatgggcctccttttgtacagtctcttagcaaccaattgaagtttgtaagctgaaacaaagagactggagtccat

SEQ ID NO: 186706 - DNA, 490 bp, Homo sapiens
cattgcttaagcctctgataagacagtaagtctgtatacaaggtgaccatgaactgctacctgctttccaattgctgttggaagagctccttataccttacgaggctaagaagatagaagaggtatttcgctctggttttgagcaatttgttctactctgtgaacttctgtgtctgcttatccagtttcatgaaaattagattaacgagtactaattggtgctgactccgctagcttaaaatggatggtgtcaaatggaagaggagcccaccagtgtgatgtttggatcccaaagctgctgggaattaagtttctgcatggatgtcgayatcataggttacttgtggcagcttgctccaagctacttttatggaacacagtgtcacccccacagatctttgaaaggaggaaggatgctttttccaaagaggatttgcttcagatgatttggtcaaaatgctcattcattcgaggaatcttttttgagcac

SEQ ID NO: 186707 - DNA, 558 bp, Homo sapiens
aagaaaaacaaaccaaatccaaacccagcygaagaaaagaaatgaccaagatcagagcagaactaaatacaattgaaacaaaaaatacaaaagataaaagaaacaaaaaggtggtttcctaaaaagataaataaaattgatagattattagcaagattaacaaaaaaaagaaaagatccaaataagctcaattagaaatgaaacaggagctattactactgatatcacagaaatacaaaagatcattcaaggctactatgaacacctttacacacataaactagaagacctagaggagatggataaattcctggatgtatacaaccctcctagattaagtcaagaagaaatagaaactctgaacggaccaataacaagcagtgaaattaaaatggtaattaaaaacttaacaaaaaaaaaaaaacaaaaaacaaaggtccaggaccagacagaatcacagttgaattctatcagacattcaaagaaaaattgctactaatcctattgacactatttcaaaagaaagagaaagaaggaattctcctcaaattattctat

SEQ ID NO: 186708 - DNA, 594 bp, Homo sapiens
tgtggcatatatataccatggaatactactcagtcacaaaggaatgatataatggcatttgcagcaacctggatggaattggagaccattattctaagtgaagtaactcaggaatggaaaaccaaacattgtttgttctcactgatatgtgggagctaagctatgtggactcaaaggcataagaatcatacaatagactctggggactcaagggaaggggtatgaggggtgtgagggataaaagattacacattgggtacagtgtacactgcttaggtgatgggtgcaccaaaatctcagaaatcaccactgaagaacttattaatgcaatcaaacaccacctgttcccccaaaacctattgagataaataaacaaataaaaataaaggtttttactctggctgaggggaacataaattattcccagtcatgtgtgagctccagggattacttatactcagmcttttgagtagatttttctccgtcatgggtagtatcttcataaaaatatgctgcttaatactcaggacccttggcatatcctcagaactctttctctatgcagatctctcctctcaggtattttaattttta

SEQ ID NO: 186709 - DNA, 573 bp, Homo sapiens
atacagctctaatgctgctgtgacttggtgaacaaaatagatttgaatcaacacttttcagattggctagaaattcttttgcagaatctggatccttcttccataacacatatatactctgtaaatggaatgtgcagatcacgtttttctatgtttccttccttacatgttctgacttgcctgcacgttkaaaagaaaatcaagaaaaatgtttctttgagaatttccccttctgaatatttcccccaccccaatagcatctacagtgctagaaaatgttcttccagggttttaagaacaccaattagtttcacagttggaggcaaaacacttcccttggagagcatttcttaacatacagcagaatccttggttagcccctggctgtgttaaaaggagagagaaacaaaactcacttttctcctcctgttcagtcacatctttcttcacctcttcttttctagctatatatcttcttttactttgggctgttgagctgtgaagctctatgcctctcatgatggtaagttttgttcaaagaccctggagctgcaattagggcttaagcactgg

SEQ ID NO: 186710 - DNA, 568 bp, Homo sapiens
atgggaaatgggaaagcatgaacaaatatatgcaaggaagacaagctcttataatgtgaagaacttctggaataatgatttttaaaatttagatgagattgtgatgattaccattgattaccatgatatttgtgcaaattctcattttgaagcagtttggtaatataaacatttttatatccttaatataacccagagggcaaaatggaaggttattcctagctgaggttattttgttttaataaataaaaatagagcttaatgacccttatctgtatatggtttataatattaatatttgtatacagaatttggaayatgaagctgttcacactccccaagactctaaaagaggtctgtcccaggtgcattgggaaggtagtggcatggaatggcatttctgagatgtttcgtgcaccagcagcagaggtttctatcttaaattgtgtctgtttaaaaataccctgcctggccagaagaattgctatgggggtcaccttacttcctcgtccctccatatgagttttacctccattttaacaagaactgttatttacaatacaccatg

SEQ ID NO: 186711 - DNA, 368 bp, Homo sapiens
gaattcccacctcagtgagctattaggcttattacatctgcctagttacttctatttacagagaaccgcaaacaggtttcaggaaagtgaccccttggtaaaaatgtctggctattcgtagaacacgatgactrttccctgctatgattctctgatttaattgtattagtttttcagcctgagataaaataggctgtcatcaccctccaacattaagaaaacaagcattagactgaggactactgtaagtttgatggacaaagaataactacaaataaacatgtgtgtcttcatacaaccgtatgaatgattaaaatatcctgtgaccctaatctcattactagaatatacgtaccacctagcaagac

SEQ ID NO: 186712 - DNA, 368 bp, Homo sapiens
gaattcccacctcagtgagctattaggcttattacatctgcctagttacttctatttacagagaaccgcaaacaggtttcaggaaagtgaccccttggtaaaaatgtctggctattcgtagaacacgatgactgttccctgctatgattctctgatttaattgtattagtttttcagcctgagataaaataggctgtcatcaccctccaacattaagaaaacaagcattagactgaggactactgtaagtttgatggacaaagaataactacaaataaacatgtgtgtcttcatacaaccrtatgaatgattaaaatatcctgtgaccctaatctcattactagaatatacgtaccacctagcaagac

SEQ ID NO: 186713 - DNA, 548 bp, Homo sapiens
gaattctaggctaaagggtgtgggttttttcctcatgtcagagagactccctaaagatatttcagcatatgagtcatatatttaaagtaacattttaaaaggataaattgggtgggygtgtgtgaaatgaatggaagaaaggagaacagagaaacagaagacttgttaggagtttatgtttctttgggcactttaggatgagaatgggctgactggcatggcgaagcatgatgaaagcaaggtcattaccaataaagaggctgtaaggtgagatgtacgattgggcatggaatcaaaatatcctataaagtttcatgcctcagaattaggaaaaagggaaaacaaacagagttggattcttgctggaagaaccaccctaatcaaggagcagttattaaatgatcaatagatttttgatggatgtgaaagataacctattatggcacagctagcagtcctgccttcatcagagtagagttcttttggttttcactcaaattttatgagttttatgagttagcatgtaatgaaaaagaatttcatgagac

SEQ ID NO: 186714 - DNA, 555 bp, Homo sapiens
tgtgggttttttcctcatgtcagagagactccctaaagatatttcagcatatgagtcatatatttaaagtaacattttaaaaggataaattgggtgggcgtgtgtgaaatgaatggaagaaaggagaacagagaaacagaagacttgttaggagtttatgtttctttgggcactttaggatgagaatgggcwgactggcatggcgaagcatgatgaaagcaaggtcattaccaataaagaggctgtaaggtgagatgtacgattgggcatggaatcaaaatatcctataaagtttcatgcctcagaattaggaaaaagggaaaacaaacagagttggattcttgctggaagaaccaccctaatcaaggagcagttattaaatgatcaatagatttttgatggatgtgaaagataacctattatggcacagctagcagtcctgccttcatcagagtagagttcttttggttttcactcaaattttatgagttttatgagttagcatgtaatgaaaaagaatttcatgagactttcagcatagcaatctgttttatc

SEQ ID NO: 186715 - DNA, 548 bp, Homo sapiens
gaattctaggctaaagggtgtgggttttttcctcatgtcagagagactccctaaagatatttcagcatatgagtcatatatttaaagtaacattttaaaaggataaattgggtgggcgtgtgtgaaatgaatggaagaaaggagaacagagaaacagaagacttgttaggagtttatgtttctttgggcactttaggatgagaatgggctgactggcatggcgaagcatgatgaaagcaaggtcattaccaataaagaggctgtaaggtgagatgtacrattgggcatggaatcaaaatatcctataaagtttcatgcctcagaattaggaaaaagggaaaacaaacagagttggattcttgctggaagaaccaccctaatcaaggagcagttattaaatgatcaatagatttttgatggatgtgaaagataacctattatggcacagctagcagtcctgccttcatcagagtagagttcttttggttttcactcaaattttatgagttttatgagttagcatgtaatgaaaaagaatttcatgagac

SEQ ID NO: 186716 - DNA, 557 bp, Homo sapiens
gtgtgggttttttcctcatgtcagagagactccctaaagatatttcagcatatgagtcatatatttaaagtaacattttaaaaggataaattgggtgggcgtgtgtgaaatgaatggaagaaaggagaacagagaaacagaagacttgttaggagtttatgtttctttgggcactttaggatgagaatgggctgactggcatggcgaagcatgatgaaagcaaggtcattaccaataaagaggctgtaaggtgagatgtacgattgggcatggaatcaaaatmtcctataaagtttcatgcctcagaattaggaaaaagggaaaacaaacagagttggattcttgctggaagaaccaccctaatcaaggagcagttattaaatgatcaatagatttttgatggatgtgaaagataacctattatggcacagctagcagtcctgccttcatcagagtagagttcttttggttttcactcaaattttatgagttttatgagttagcatgtaatgaaaaagaatttcatgagactttcagcatagcaatctgttttatca

SEQ ID NO: 186717 - DNA, 549 bp, Homo sapiens
tcaactctgtaaatgtccaagttccccttttcttatgtctctagggcatacgcatgcttgaccacagctaatggccctaaaggcccmacgagctcctggctacctctcctccctccttcaccccatgctccttcacgtatcacaaccctcctactctttcctttctgtccctcaagctctctgtgtccttccaacctcggggcctttgcatttgccctgcttggaaaactcttccacaggctacatacatgaatattttctctcattctgtggttgttcaaatgtcctcacctcaaagaggcctttcctgaatttcatggctatctaaaggagccctgtcatgggcctctgtcacagcaacaactgtgtttttttcacagggcttatttgcatgagacattaagttgattatttatttatttgtttttttggtatattgtcactttccactagagcgtttgcctgggaaggacaggagctttatgtattagtcacttcttgactcaccaaacatttttgcaacccaccattaaagttaggaaaagatca

SEQ ID NO: 186718 - DNA, 549 bp, Homo sapiens
tcaactctgtaaatgtccaagttccccttttcttatgtctctagggcatacgcatgcttgaccacagctaatggccctaaaggccccacgagctcctggctacctctcctccctccttcaccccatgctccttcacgtatcacaaccctcctactctttcctttctgtccctcaagctctctgtgtccttccaacctcggggcctttgcatttgccctgcttggaaaactcttccacaggctacatacatgaatattttctctcattctgtggttgttcaaatgtcctcacctcaaagaggcctttcctgaatttcatggctatctaaaggagccctgtcatgggcctctgtcacagcaacaactgtrtttttttcacagggcttatttgcatgagacattaagttgattatttatttatttgtttttttggtatattgtcactttccactagagcgtttgcctgggaaggacaggagctttatgtattagtcacttcttgactcaccaaacatttttgcaacccaccattaaagttaggaaaagatca

SEQ ID NO: 186719 - DNA, 539 bp, Homo sapiens
caattatcatagtagtcctgaggtgatgtacatcctcagcttacgaagataacaggattaagagattaaagtaaaacaggtgtaagaaattataaaagtattatttgggaactgataaatgtccatgaaatcttcacaatttatgttcctctgccgcagctccagctgttccctccattcggggtccctgacttctcgcaacttctctccctttctttttatataaatgtgccatggtgatgaaggcttgttcgttctcttggttttgacacaggattctttgactggtctggcacactaaaaacaagctgattaaacagggaaacctaatcccaaaatttactacagtggagcccccaatagacttaatccaaattgtgggatttagtccagaaagactttctgccacmtgatctaacgcctcagctccaggcacaatggataaatgagcttgagagacttcaaaaatttgtttctttagtttagttatgtccaaggataaattatcttccctacccagaaggtgtcctttgaccatt

SEQ ID NO: 186720 - DNA, 672 bp, Homo sapiens
agactttattatttttaaactcttttctctcttgagtgtataactattgtgtatgttgtctatgattgtttggctttacttctgggtgttttccaggaaccaaggctctgtatgggttccttggttgtggataatttctgtttggtggctttctcagatggtgcttgttgtagcaatgtattggacataagagccaacacactatctcyggtgggacttagggtacaggggtctcagggagcttatcttgtggatttgcactaaagtccttctggcactaggatttttatttggtgatgcagttcagtatgcagacaagtagacactgcttaagtttgccctcaggtaggctaatgttgagtggaaacaccttccttgttaggggaccttaggggaaagggatcatgttgggttgcactgaggtcttggaaaaggggtgtggggtgcaccagcatctcaccctgagctggcaggaatgttctctgattatctatcacacccctgttgcacgctcatgacttcagttcataaagactttgtcctttggtttcatggtgcagtaccattgtgggctgcaaatatgaccctctgatggctaccaccaaaatcggcttatggtagaacctcttactctagtccagagaaggcaactccataacttttctgtcttct

SEQ ID NO: 186721 - DNA, 407 bp, Homo sapiens
ccctttccggtaacaattagactgatcaaaaaagccagtagacagattaccattaatgtggagcagtaacgtgtcatggttaccatttccagacagttgttgagagaacacacatctaggacagcaattaaattggacactgattctctttggagtgctggggaaatgtgtggttytataaaggtatattttgtacacacagccataagcacatatacacatttatgtacacacaactgagaaagaacaattaaattgcagttactcctagggaagataaaagagattctctaattttttgtttttgttttttctcacatccaagaagtttactgcccacagctctgcgcagaggcaagggctggtgagagcggatccacccaggaagtctctgtaacgggaagccg

SEQ ID NO: 186722 - DNA, 537 bp, Homo sapiens
atatggctctcgggggaaaatagcttgcatttagccagctgtccagagctcaacaatgttggtaacatatttcagactagataaactagaaaatatatttagaaagtgcaagccaagaaatttacattaatctcttccatttgattcaaaaacataaattgccactgcactatctcttakagtagaacttaattaaattattcctggtcacaaaagatctgattgaacaggaataatattcaacattttagaccttgagctgatgacatccatctggttaaaaccataacaataagctttctgataactggtaagttattcaagtgcatatctgacatgatttctgaaactgtaaaaattaaaagagcaagggaaaatccatatacataaaatgaatcatctgcaagttttcgctagccttcagacacttaagtaaatataaaactcattttaagattcagagtttatgaattaaaaatgagtgagttaagaaagagccctggagatatggcttagttaggggctgggactgggaaa

SEQ ID NO: 186723 - DNA, 609 bp, Homo sapiens
ggagaaatcatgatgttaatgcttttaagtatgtcttattaaagaagatcaaggtggagaagaaaaagaaggaggagcaggaggaaaaggagatttttaaataaaggagaaaatagacacaagccaaaggattttcatggaaaagcattaaagaggaataaaagaatctcattcaaaaaggatgctaaaggcattctaagaccatggaaaatgctcactggttcacaattttggactgttagagctgggagggcatctttaatctactttaatctctctctctctcacttcctcctattccatttttctctctttctctgtctctgyattcttcctctgtcacttcattctcctttggatgagggaattgggatccaaaatgttaatataatctttctcaaattatacagctctggggcagagctaaggttaaaaacctaaacctcttgatttctagcccaattttctttttgcttcagtggatggggacaaaaaatatagcaatgccaaaatacagtacactcaaacataaatcatggttaactaaactactgctgaggttgggtggctcaagaaccggacttctgtgtgtgtctaaattgggagtac

SEQ ID NO: 186724 - DNA, 609 bp, Homo sapiens
ggagaaatcatgatgttaatgcttttaagtatgtcttattaaagaagatcaaggtggagaagaaaaagaaggaggagcaggaggaaaaggagatttttaaataaaggagaaaatagacacaagccaaaggattttcatggaaaagcattaaagaggaataaaagaatctcattcaaaaaggatgctaaaggcattctaagaccatggaaaatgctcactggttcacaattttggactgttagagctgggagggcatctttaatctactttaatctctctctctctcacttcctcctattccatttttctctctttctctgtctctgcattcttcctctgtcacttcattctcctttggatgagggaattgggatccaaaatgttaatataatctttctcaaattatacagctctggggcagagctaaggttaaaaacctaaacctcttgayttctagcccaattttctttttgcttcagtggatggggacaaaaaatatagcaatgccaaaatacagtacactcaaacataaatcatggttaactaaactactgctgaggttgggtggctcaagaaccggacttctgtgtgtgtctaaattgggagtac

SEQ ID NO: 186725 - DNA, 565 bp, Homo sapiens
gttctttttggttttgtaaataaagttttattagcacatggcaacagttgctgggcacagtggctcaggcctgtaatcctatcatttttgggaggcaaaggcaggaggattgcttgagcctaggagttagagaccagcctgggcaacataacaagactctatcttcacaaaaagaaaataaaagaactcagcaatattcatttgtttatggattgtttatggttgattttactcaacaatggcagagttgcattgttacaatgatgatcatatggtccacaatgcttacactaaattatgagcttattactacttggcgttttacagaaaaaagttttctgatccctggaatagatcaacaaaawtgacaaacttctagttagattgattaagaacaaaagaatacacacataaatcacagttataatgaattttttaaaaagattatcattacatattctccaggcattaaaaggatcataacttaaaattgacaagtgttcttaaaaagtggtcctcccaaaattggcatgagaagataaagaaaatctgaatagtcctatac

SEQ ID NO: 186726 - DNA, 637 bp, Homo sapiens
cagtaccactgctttcatgagtattgccctcacctccacagggcactgatgctgccactaggcatggacactgcctctccctggtactgctttttttcagagagtgctatcagatgcttctgctacaatatgccactgccatctcaatgcacccctgacacacactctggctactgtcacctacattgggcctgtttttgcacagaaccctcaagaaaccctgtccaatactacatggggctctgtgaaaaactgcattcttctctttcgtgagatatcaaaaargggctgtttgggtcccatgctctacagaatttttattgaaagctgtgatgagataaactttttgacatatatgtgttcacagcttttttcttccttttttcccctactttagctcctttgcctctcccctctctgaagagatgatgggaaaaagatctaagtagatggattaatttgagtaaagcaatcagggaaaaagaaccacattcctggaggagcgaggcctgtagtagaaagctatgccataccagatgcatattgtgaaagttctgtgcagagaaaggagatgatggaccaggatggtgaagaaaaggctatgtagatgggagaattctgttaggatgcagtggaa

SEQ ID NO: 186727 - DNA, 573 bp, Homo sapiens
gctgcctcctccttcccattgttacctttggccagatagataggtgtactcatcatgcatgtttcagatgtaactactaaagcccaactcaagtttactatttcaaactagtgatttatttgttcacatgttggaaatgtccaggagtgggtcttgttccagtcagaggctgaaatgatgcaagctgtatctgagctctcattttcttctctacttcttcatctctactttgttgtttgtattgcctttgctcaaaaatagattttatccacatcatgctctccagaagttccagacttagatcttctaggggtaaagagaatttgtctcttcagtaattccagagaaatcttatggaaggttctcattggctcagttgttcacatattcatccctgaaccagtcataatgaacaaagttttatttggttctgtggtttctgctgaaacctggaattgatgctagaccctctatactttatgactaagagtgatgtagagagattctcaaagcaaaatccagggagctattaacagaatagggaatagggctrgataagcaaaaacactatat

SEQ ID NO: 186728 - DNA, 518 bp, Homo sapiens
cagcaaggtaaaaatgtccctacctttatgagtcttaattctagcaggaaagaaaaaataatcacataatatacagatatgcagtattaggtggtgattcttgctatgaagatacacatgaagaaagctgagtaaggggatagagaaacaagggcttaccagtagtaaatttccatgcaaacygtggcaggctaatttcaaaatcagaaatattttattatagtttttcttgggttattagtgtcagacataagaaaagtgcagtagatttactaccacagatttttgcacttgtacttattttgaatgaaatgtactgtcaaagaacgaagcaggtggactgggcttatatcctgtctccttgtagtagagaatattgagtctgatgtgcagaccagcagatcctttgtgtatcacctgcaccactccctcatcccctccataagctcacatcaggagtaactatgttcatgtactgtaatgtgaactcatcccctggcaacactttactggtatac

SEQ ID NO: 186729 - DNA, 420 bp, Homo sapiens
gaataagaagaattgcactgacttagaaaaatggttttcttttcttaaactaccagatcttttaaaacttgttatcctaccccattaaaattccaaatatttgcaagggactagagattgagctaaagttagtccttagagggaaacttattatrttttttcagatgcatctattttctgtatgtgatagaaaccataagttaatggagcttctatttagaaacactctgtccttgataaatggccttctgagattctcagcactatgttttacctcccactggcagagactgtaaaaaaaaaagtgaaacaaaaaaaaaatgtcctgacacctgagagctgtctggatggaattaacgaaggcttggggttgctagcagctagcctggcactcccaggtggttttggttctcctgttgg

SEQ ID NO: 186730 - DNA, 420 bp, Homo sapiens
gaataagaagaattgcactgacttagaaaaatggttttcttttcttaaactaccagatcttttaaaacttgttatcctaccccattaaaattccaaatatttgcaagggactagagattgagctaaagttagtccttagagggaaacttattatattttttcagatgcatctattttctgtatgtgatagaaaccataagttaatggagcttctatttagaawcactctgtccttgataaatggccttctgagattctcagcactatgttttacctcccactggcagagactgtaaaaaaaaaagtgaaacaaaaaaaaaatgtcctgacacctgagagctgtctggatggaattaacgaaggcttggggttgctagcagctagcctggcactcccaggtggttttggttctcctgttgg

SEQ ID NO: 186731 - DNA, 420 bp, Homo sapiens
gaataagaagaattgcactgacttagaaaaatggttttcttttcttaaactaccagatcttttaaaacttgttatcctaccccattaaaattccaaatatttgcaagggactagagattgagctaaagttagtccttagagggaaacttattatattttttcagatgcatctattttctgtatgtgatagaaaccataagttaatggagcttctatttagaaacactctgtccttgataaatggccttctgagattctcagcactatgttttacctcccactggcagagactgtaaaaaaaaaagtgaaacaaaaaaaaaatgtcctgacacctgagagctgtctggatgkaattaacgaaggcttggggttgctagcagctagcctggcactcccaggtggttttggttctcctgttgg

SEQ ID NO: 186732 - DNA, 420 bp, Homo sapiens
gaataagaagaattgcactgacttagaaaaatggttttcttttcttaaactaccagatcttttaaaacttgttatcctaccccattaaaattccaaatatttgcaagggactagagattgagctaaagttagtccttagagggaaacttattatattttttcagatgcatctattttctgtatgtgatagaaaccataagttaatggagcttctatttagaaacactctgtccttgataaatggccttctgagattctcagcactatgttttacctcccactggcagagactgtaaaaaaaaaagtgaaacaaaaaaaaaatgtcctgacacctgagagctgtctggatggaattaacraaggcttggggttgctagcagctagcctggcactcccaggtggttttggttctcctgttgg

SEQ ID NO: 186733 - DNA, 621 bp, Homo sapiens
aatgagactcagaagaacagcataccattttaacaagagctaatttgttacctttgtctagtagaaagagaaaaggccctcttcataaattaatagtgggaataaaatttggagttcaaaatagtactttgtccaacaattttctcagaaagcacttattgacatgccattgattccatgactaaaataacaatgggatgtgccattataattgacatcattaagagccctctaagaaattaggtagaatttatgttagttctaataaacagttataacattctctaagactgtatattttcaaattgctttagtctgactttatgcactggtgaagttttactctgaaggccaagacttctgtcttgcagtagttaaagctgcttcacaataataagagagtctagagtagcaaagtaaaaagaatacagattttgtaataagataaatatgtattccatgctgcttttcattttatcagctgcatcaccttgggcaagctactcaaaacacctgagccttaaggttattttctataaaacagaaggaaaattattrgatgatagttaatatggtaaaatgaaatgatagataagtacaattataaagttaaatacaatc

SEQ ID NO: 186734 - DNA, 402 bp, Homo sapiens
aggcgatgtgtggatgaggagattgacagaaggaaggaacctgaaaatatagatcaggaaacaaagcttcattgtacagcatatccactgcaggcagtttggtttttgttscagtcttctgtcttcaagggctattttcatagagcatgaggagccatgggactggtgaggtctgggcttctgtgccaagatcacccacattcctcatatcccctcaaatgtcccaaatgtcctgtatcacctgattttctatcttcctgctaaagcttttcccatactcctaccccttcactctccatcatcctccaattcttacccgacttccaccctggagtttcaccatggccacttgcttgtgggaggcactgtctgaacacagcccctgaatgctactgatttggt

SEQ ID NO: 186735 - DNA, 402 bp, Homo sapiens
aggcgatgtgtggatgaggagattgacagaaggaaggaacctgaaaatatagatcaggaaacaaagcttcattgtacagcatatccactgcaggcagtttggtttttgttgcagtcttctgtcttcaagggctattttcatagagcatgaggagccatgggactggtgaggtctgggcttctgtgccaagatcacccacattcctcayatcccctcaaatgtcccaaatgtcctgtatcacctgattttctatcttcctgctaaagcttttcccatactcctaccccttcactctccatcatcctccaattcttacccgacttccaccctggagtttcaccatggccacttgcttgtgggaggcactgtctgaacacagcccctgaatgctactgatttggt

SEQ ID NO: 186736 - DNA, 505 bp, Homo sapiens
gaataatacagaatattggagtggctcaacgctttcatgtgccactattgcaaacctcttgctgttgcctcttccctgcttctttttacctggtaaacttatattctgattttagattgtattctctactttaaaagcagaacctaaaattttgggaaaagaaagagagaaagggagagaagaagagaggtggagawatttattgtcttggttggggtcagaagtaatgtttgccaggcattgttctaattgctttataaccattagtactgtccctagtcactgccaagaggagcctgataagttatgcttatttataaaaacacattgatgtagatatgtccatgaggaactgttaaataaaaaatacatagaattgaaaaaaaccacattgatacctctgccacttgggatttgatgtttagggctggcacagtacaatctgtgactctaaacattttctccatcattaatactattcaggacctaggaaatgcttctccac

SEQ ID NO: 186737 - DNA, 503 bp, Homo sapiens
aatacagaatattggagtggctcaacgctttcatgtgccactattgcaaacctcttgctgttgcctcttccctgcttctttttacctggtaaacttatattctgattttagattgtattctctactttaaaagcagaacctaaaattttgggaaaagaaagagagaaagggagagaagaagagaggtggagaaatttattgtcttggttggggtcagaagtaatgtttgccaggcattgttctaattgctttataaccattagtactgtccctagtcactgccaagaggagcytgataagttatgcttatttataaaaacacattgatgtagatatgtccatgaggaactgttaaataaaaaatacatagaattgaaaaaaaccacattgatacctctgccacttgggatttgatgtttagggctggcacagtacaatctgtgactctaaacattttctccatcattaatactattcaggacctaggaaatgcttctccacag

SEQ ID NO: 186738 - DNA, 499 bp, Homo sapiens
tattggagtggctcaacgctttcatgtgccactattgcaaacctcttgctgttgcctcttccctgcttctttttacctggtaaacttatattctgattttagattgtattctctactttaaaagcagaacctaaaattttgggaaaagaaagagagaaagggagagaagaagagaggtggagaaatttattgtcttggttggggtcagaagtaatgtttgccaggcattgttctaattgctttataaccattagtactgtccctagtcactgccaagaggagcctgataagttatgcttatttataaaaacacattgatgtagatatgtccatgaggaactgttaaataaaaaatacatagaattgaaaaaaaccacattgatacctctgccayttgggatttgatgtttagggctggcacagtacaatctgtgactctaaacattttctccatcattaatactattcaggacctaggaaatgcttctccacagctttt

SEQ ID NO: 186739 - DNA, 473 bp, Homo sapiens
gcccaccttctaatcctataatattggggcttaggatttaacatatgattaggagggaacacaaacatttagtctataacatctttttccaagacatatctgttcaagtcctttgcccattttttaatcagsttgtttgtttggttggttgttttgctcttgagttgtatgagttccttatacatttttgaaattagccccttatcaaatatatggtttgcaaatattttcttccattctgcaggttatcttttcattctgtttattgttttctttgctatgcaaaagctttttagtttcacttatgctgagtgaaataagccagttacaggaagacaaatattgcagaattcctcttatatgaggtaactaaaatactcaagctcatagaagcagagaatacaatagtagttaacaagagttgggggctgggggaaatggaacgttgtcactaaaagggtataaagtgttag

SEQ ID NO: 186740 - DNA, 473 bp, Homo sapiens
gcccaccttctaatcctataatattggggcttaggatttaacatatgattaggagggaacacaaacatttagtctataacatctttttccaagacatatctgttcaagtcctttgcccattttttaatcaggttgtttgtttggttggttgttttgctcttgagttgtatgagttccttatacatttttgaaattarccccttatcaaatatatggtttgcaaatattttcttccattctgcaggttatcttttcattctgtttattgttttctttgctatgcaaaagctttttagtttcacttatgctgagtgaaataagccagttacaggaagacaaatattgcagaattcctcttatatgaggtaactaaaatactcaagctcatagaagcagagaatacaatagtagttaacaagagttgggggctgggggaaatggaacgttgtcactaaaagggtataaagtgttag

SEQ ID NO: 186741 - DNA, 473 bp, Homo sapiens
gcccaccttctaatcctataatattggggcttaggatttaacatatgattaggagggaacacaaacatttagtctataacatctttttccaagacatatctgttcaagtcctttgcccattttttaatcaggttgtttgtttggttggttgttttgctcttgagttgtatgagttccttatacatttttgaaattagccccttatcaaatatatggtttgcaaatattttcttccattctgcaggttatcttttcattctgtttattgttttctttgctatgcaaaagctttttagtttcrcttatgctgagtgaaataagccagttacaggaagacaaatattgcagaattcctcttatatgaggtaactaaaatactcaagctcatagaagcagagaatacaatagtagttaacaagagttgggggctgggggaaatggaacgttgtcactaaaagggtataaagtgttag

SEQ ID NO: 186742 - DNA, 473 bp, Homo sapiens
gcccaccttctaatcctataatattggggcttaggatttaacatatgattaggagggaacacaaacatttagtctataacatctttttccaagacatatctgttcaagtcctttgcccattttttaatcaggttgtttgtttggttggttgttttgctcttgagttgtatgagttccttatacatttttgaaattagccccttatcaaatatatggtttgcaaatattttcttccattctgcaggttatcttttcattctgtttattgttttctttgctatgcaaaagctttttagtttcacttatgctgagtgaaataagccagttacaggaagacaaatattgcagaattcctcttatatgaggtaactaaaatactcaagctcatagaagcagagaatacaatagtagttaacaagagttgggggctgsgggaaatggaacgttgtcactaaaagggtataaagtgttag

SEQ ID NO: 186743 - DNA, 531 bp, Homo sapiens
tccagatgcaattccttgtgtttgaattaatctctagaaatttgtacctgaaaaagcacacatgagaatgaggtaatataggaagcagtggttatttttgtttgttcgtttgtttgttttttgagatggagtcttgctctgtcacccaggctggagtgcagtggcgcgatctcrgctcactgcaagctccacctcccaggttcatgccattatcctgcctcagcctcccgagtagctgggactacaggcgcccgccaccacgcctggctaattttttgtatgtttagtaaagacagggtttcactgtgttagccaggatggtctcaatctcctgacattatgatccacccacctcggccttccaaagtactgggattacagttgtgagccaccacgcctggccagttattgtttttatataattcatttgttagttgtaacttaggactgaagaagagcgagaccaggaacaaataaatgtgttggaggtaagtgtaatatgaaaacactagagaatgtagggtcagtgta

SEQ ID NO: 186744 - DNA, 571 bp, Homo sapiens
gaattcctgcccttcctagaaataaagccctctcatatggagctgtggggagagggaggcctgtgctctgggctgtagcagtctagagtggagtctatgcctcactgacctcactgagctggcatgcaggagagagggagggtatagtcttggttcaaacaccacagactcttgcttttcttgccaattttcagagattttcttgaacagatgtctcattattgctgtttgtccttaagaggctcktcagaggctttaattttttaaaaatcagttgcattggagagtggatcccatagtgattatctcacaatgaagaaatgacagattaatttgtctctattaattttgtagacttccaatctttccttattgggcaggtgttactagtattataagaaaagtagtgtgttaatttttatttttttaaacaaaaaagaatatgactcactatacttttttttcacttggattttggaagtcctgtacctgctccaacaaccagtagccccgctgaaagatagctgggtattgacaccaatgaggcagtgttgcagttaaaatattctct

SEQ ID NO: 186745 - DNA, 450 bp, Homo sapiens
gagtggatcccatagtgattatctcacaatgaagaaatgacagattaatttgtctctattaattttgtagacttccaatctttccttattgggcaggtgttactagtattataagaaaagtagtgtgttaatttttatttttttaaacaaaaaagaatatgactcactatacttttttttcacttggattttggaagtcctgtacctgctccaacaaccagtagccccrctgaaagatagctgggtattgacaccaatgaggcagtgttgcagttaaaatattctcttgtacttgagaattcaccgagaaagtattgaccaatccctacttacattgcatgtatatggaggtttccttttggaccaagacttgactcataaagtagacctcttttaaatgaatactgatttttttttccaacaatgaaaatggcagatcacttggttatt

SEQ ID NO: 186746 - DNA, 497 bp, Homo sapiens
cattcttacagttcaacattgtcacactgagcacacatgctggaagattctttattaacgagagggtcaaaatcgtcttctctttcttccattgacagtttcatagaaacaactatgttttgcacccagatttcattggatagtataatctttaatggataattaattaaaataataagtacatcgtctataaataagtttgctaacacaaagaactgagtcttactcagcatataacttggaggaaagygtgtgggtgttctagaggacaacctaccagtcttgagcatttgtccttgccttagataataacagtataacttttggagacagtgatgctcgccagtattccaaagctcctgtacatttctcagtcttttctgctgttaggttggggacatttgactaacagtaaccaatggaacttgcaagtaggtgcatggtggtgtatgagatgctggaaactccataatctgagtcatttgaataactgtgga

SEQ ID NO: 186747 - DNA, 558 bp, Homo sapiens
tcggggtgggtgatagattatattctaggacattcttacagttcaacattgtcacactgagcacacatgctggaagattctttattaacgagagggtcaaaatcgtcttctctttcttccattgacagtttcatagaaacaactatgttttgcacccagatttcattggatagtataatctttaatggataattaattaaaataataagtacatcgtctataaataagtttgctaacacaaagaactgagtcttactcagcatataacttggaggaaagcgtgtgggtgttctagaggacaacctaccagtcttgagcatttgtccttrccttagataataacagtataacttttggagacagtgatgctcgccagtattccaaagctcctgtacatttctcagtcttttctgctgttaggttggggacatttgactaacagtaaccaatggaacttgcaagtaggtgcatggtggtgtatgagatgctggaaactccataatctgagtcatttgaataactgtggaattaagtctccttattgagttaagccactga

SEQ ID NO: 186748 - DNA, 575 bp, Homo sapiens
acactaacacaacaactccctggagctccctttgtgtgcagacatcctgaggaatcaagtctagttgtggttctgaygaaaccagccaccgctgccgccactaccacgagcaccactagcaccagcagcatcaccagcaccaccagcaccatcacaacagccatcttggttccatgcttgcacaagaggacttccagcacagagcaggaccacatatccctgaccttttcctgtcctcagggcccacctggaaaatgacggcatttacagggcatgctgctgcctgtgtgaggaccttcagctaggatctctggctcctcagcccagccccagccccacctggcagctccaaagactaccccatatataaccaccccctcagcacaagccagaagctccagatggacgtggagaaggcaggctgtgagcagtctggctgggtgtggaccttcagctgcacctgggcctggggtgtgggctctgggaacagtgtttaccctcaggtctcctttgcaacctagaccctggcaagatggacaggcaggctcctggaggcagctcagggtcacttgggc

SEQ ID NO: 186749 - DNA, 566 bp, Homo sapiens
ctccctggagctccctttgtgtgcagacatcctgaggaatcaagtctagttgtggttctgatgaaaccagccaccgctgccgccactaccacgagcaccactagcaccagcagcatcaccagcaccaccagcaccatcacaacagccatcttggttccatgcttgcacaagaggacttccagcacagagcaggaccacatatccctgaccttttcctgtcctcagggcccacctggaaaatgacrgcatttacagggcatgctgctgcctgtgtgaggaccttcagctaggatctctggctcctcagcccagccccagccccacctggcagctccaaagactaccccatatataaccaccccctcagcacaagccagaagctccagatggacgtggagaaggcaggctgtgagcagtctggctgggtgtggaccttcagctgcacctgggcctggggtgtgggctctgggaacagtgtttaccctcaggtctcctttgcaacctagaccctggcaagatggacaggcaggctcctggaggcagctcagggtcacttgggcacggaa

SEQ ID NO: 186750 - DNA, 395 bp, Homo sapiens
gtggaaaattgctttaagaaataagactatggaaagttgacagtgaaaattaaagaataatgccatggttcatggttaataatggggcacttgtagtctgaatggcaaccgatcctctttgaaggactagaatgggtaaaaaataatacactcactgatgtttgaaatttggggtatgatttataataaggcatttaatagaagatttaaaaactttggcttggattctttcatcagcttgaggagacactttcaagtttcttaataccttgtttgtgtttcctttyccacaatgtaaatattttctttgcattcctgaaaatgaaagcttactttccctttgtttaattctaattggatttcttcttcaggaatctgatgctctttttctgaac

SEQ ID NO: 186751 - DNA, 451 bp, Homo sapiens
tggcagatgtttgggaggcaggaaccttcctgggggctggagaggtcacctgatttctataggtgcctatgtttacttcagtctacaccatggtcaaaaaggagtggttgagagcaacaaactgactttccagccaagggcgtttcaaggacaaggattcttacagaggtatcttttctcccaactttttgactacttttttcattttttaatgtaattatttttaatgagacagggtcttgctctgtcacccatgctggagggcagtaacacgatcccagctcactgcagcctcaaactcctggactcaagaaattctctacctcagcctcctgagtagctgggaccacaggtgtgtgccaccatgcctgcctaattttttwaattttttgtagagatggggtctcactatgttgccccagctggtctttaactcctggcctcaagtgat

SEQ ID NO: 186752 - DNA, 559 bp, Homo sapiens
acctataacctatactaaagagactgaatcagtaatcaacaacccctcaacaaagagaagtccaggaccaggaccagaccaggcttcacaggagaattctaccaaatatttaaagaagaattaacaccaaccctcctcaatctcttccaaaatactgaagaggagggaatatttcctaactaattctataaggccagtattaccctgataccaaagtcakaaaaatacactataagaaaagaaaactacaaaccaatatttctgatgtatattgatgaaaaaatcctcaacaaaatacttgcatatcaaattcaatagcacattaaaaggattatacaccatgactaagtggagattattcctggaatgcaaggatgtttcaacatccaaaaatcaatcaaagtagtgcaccacataaagagacaaaaaccacataatcatctcaatcacagcataaaaagcatttaacaaaaatttaacaacttttcatgttaaaaacactcaacaaactaggaatagaagtaaactatctcaacataataaagtctgtatatgaaaa

SEQ ID NO: 186753 - DNA, 559 bp, Homo sapiens
acctataacctatactaaagagactgaatcagtaatcaacaacccctcaacaaagagaagtccaggaccaggaccagaccaggcttcacaggagaattctaccaaatatttaaagaagaattaacaccaaccctcctcaatctcttccaaaatactgaagaggagggaatatttcctaactaattctataaggccagtattaccctgataccaaagtcagaaaaatacactataagaaaagaaaactacaaaccaatatttctgatgtatattgatgaaaaaatcctcaacaaaatacttgcatatcaaattcaatagcacattaaaargattatacaccatgactaagtggagattattcctggaatgcaaggatgtttcaacatccaaaaatcaatcaaagtagtgcaccacataaagagacaaaaaccacataatcatctcaatcacagcataaaaagcatttaacaaaaatttaacaacttttcatgttaaaaacactcaacaaactaggaatagaagtaaactatctcaacataataaagtctgtatatgaaaa

SEQ ID NO: 186754 - DNA, 553 bp, Homo sapiens
gaaataaacccttacatatataatcaaatgatcttcaataagattccaagtccactcaataagaaaagaacaatcttttcaaaaaaatggtgctgggaaagctgtataacatcatgcaaaagaataaagttggaccyttaccatataccacatgcaaaaattaactctaaatggattaaagagctaaacataagacctaaaaactataacgttcctagaagaaaacggggggaaacctcatggcattggttttggcaatgacttattggatatgacacaaaaagcacaaacaacagaagcaaaaatagatgaataggactatatcaaagtttaaaacttctgtacaccaaagaaaatgatcaatagagtaaaaaggcaacctatagaatgggagaaaccatttgcaaatcatatatctgataaaaggttaagatccagaatattttttaaaactctctaacagtaaaaaaaaaaaaattttaaacaattagaaaatggtcaaaggacttgaatagacatttctgcaaggaagatatacaaatggccaacagca

SEQ ID NO: 186755 - DNA, 364 bp, Homo sapiens
aatcccacctctgctccacaccagctgggtgagcgtggcaagtcatcttgcctctctgagctttgagttyctcaccagtgaagtagccatgaccatcaggaccctatgtggccagtggaggctgcgaggcagtgacaaaggcaaagcactctgtgcacggaagcggctcagtagacggcagggaccacattgctgtggaagtgacaatgatttttgtacgttcacctccttcccatgccgcaagctcctaagggcagggaccaggcctgattcaacgccacaccctcagtgcctagctcagggcgtgccagatggtgggggctcaagaaagatgctcaccatgcagccaatttatgccaccaaa

SEQ ID NO: 186756 - DNA, 523 bp, Homo sapiens
tcagagagcaaatcagcctcgtgcagtggactgagaagccccttccaggtcacccccaatgaaaaggggcctctgttcctcaaatctcaggagtgtgttgaggaatagcctctggctcccgcagtccccatggtttgggcatcaggcatcctcacatgcacaggggcagtggggagcaagagaactggaaatcccacctcaacgccaggattccgaacctatagagaccatttgtagagatccaaagagggctagggattggcagggagcaaggagagggggagtgtcctaattctgacacattaatagagataccatctaaagactctaaatgcaggaagtggaccagggcctggggcctcattaatgccagaatcccctccataaaagaatatagtgtggaagtagcactgccctcggctctcagccactggaagcctttatgtaygttttacatgtaccatctcattaaaacctcatagtaacccattgcagtaagtaatattattatcctcattttacc

SEQ ID NO: 186757 - DNA, 562 bp, Homo sapiens
atccaatcacctcccactaggtccctcccttgacaagtgaggattacaattcgacatgagatttgggtggggatatagagccaaaccatatcaactctctattcagtgaatgatgctgggataaatggctagtcataggcagaagattgaagctggacccctgctctacaccaaaagcaatcaaaacaaaagccaaaattgaaaagtggggtctaattaaacttaagagcttctgcacagcaaaagaaactatcaacagagtcgacagacaatctacagaatgggagaaaatatytgtacactatgcatctgacaaaggtctaatatccagcatctatagggagcttaaacaaatttacaagagaaaaacaaccccattaaaaagcgggcaaaggacatgaacagacacttttctaaagacatacatgtggccaacaagcatatgccaaaaagtcaatatcactgatcattagagaaatgcaagtcaaaaccacaatgagataccatgtcacatcagtcagaatggctactaaaagtccaaaaatagcagatgctggtgagg

SEQ ID NO: 186758 - DNA, 400 bp, Homo sapiens
tttggtgtgtcgtttcaccagccagaagcctctgtggtcagtggtgcctttgcccaagttttgctctggcctactgggtcattctgctcacttggccttggcaagctgcacttggcttccactactggcctggatctcatgtctccaagggcaagcctggtgcagagtggtgargggtgtgagtgagagtggtgtctggccattgcgcatagccaggcatgcgagctgcagtggggtgggcagctccaggcactggcatgtgtgccagatacctgcgaggctgtggctggaccaggtgtaccataagcagcttccacagctgacagcaggcaacgcggtggtgcccagaagcttggagacaccaggacccacatgaccccaaagagggagtcacagtcct

SEQ ID NO: 186759 - DNA, 400 bp, Homo sapiens
tttggtgtgtcgtttcaccagccagaagcctctgtggtcagtggtgcctttgcccaagttttgctctggcctactgggtcattctgctcacttggccttggcaagctgcacttggcttccactactggcctggatctcatgtctccaagggcaagcctggtgcagagtggtgaggggtgtgagtgagagtggtgtctggccattgygcatagccaggcatgcgagctgcagtggggtgggcagctccaggcactggcatgtgtgccagatacctgcgaggctgtggctggaccaggtgtaccataagcagcttccacagctgacagcaggcaacgcggtggtgcccagaagcttggagacaccaggacccacatgaccccaaagagggagtcacagtcct

SEQ ID NO: 186760 - DNA, 400 bp, Homo sapiens
tttggtgtgtcgtttcaccagccagaagcctctgtggtcagtggtgcctttgcccaagttttgctctggcctactgggtcattctgctcacttggccttggcaagctgcacttggcttccactactggcctggatctcatgtctccaagggcaagcctggtgcagagtggtgaggggtgtgagtgagagtggtgtctggccattgcgcatagccaggcaygcgagctgcagtggggtgggcagctccaggcactggcatgtgtgccagatacctgcgaggctgtggctggaccaggtgtaccataagcagcttccacagctgacagcaggcaacgcggtggtgcccagaagcttggagacaccaggacccacatgaccccaaagagggagtcacagtcct

SEQ ID NO: 186761 - DNA, 400 bp, Homo sapiens
tttggtgtgtcgtttcaccagccagaagcctctgtggtcagtggtgcctttgcccaagttttgctctggcctactgggtcattctgctcacttggccttggcaagctgcacttggcttccactactggcctggatctcatgtctccaagggcaagcctggtgcagagtggtgaggggtgtgagtgagagtggtgtctggccattgcgcatagccaggcatgygagctgcagtggggtgggcagctccaggcactggcatgtgtgccagatacctgcgaggctgtggctggaccaggtgtaccataagcagcttccacagctgacagcaggcaacgcggtggtgcccagaagcttggagacaccaggacccacatgaccccaaagagggagtcacagtcct

SEQ ID NO: 186762 - DNA, 497 bp, Homo sapiens
taatataaaaagctgccacgattctctttttgtactctggaaggaacttcttgttactgtaaattagtactaatttaatgcagtatactctaaagttttacattgttaagctttcactgttttcttggggatggctctttcctstggggtttggaatttaacattgcatttgatttgtatggagtaattgccactaggcagagcaaggatggattgggatctacccccagtctgaacataatgagtaaatcttgattatagctttataaaggcacatggtaggcacttcccatcacacattcccacccaataagagtgccagatttgtgtgtgtgtgtgtgtgtgtcttctttttaagacagggtatcactctgtcacccaggatgagtgcagtggtgtgatcacaattcattgcagcctcctgggctcaagcaatcctcccacctcagcctgctaagtagctgggaccacaggtgtctgccactatgtctggctaa

SEQ ID NO: 186763 - DNA, 497 bp, Homo sapiens
taatataaaaagctgccacgattctctttttgtactctggaaggaacttcttgttactgtaaattagtactaatttaatgcagtatactctaaagttttacattgttaagctttcactgttttcttggggatggctctttcctctggggtttggaatttaacattgcatttgatttgtatggagtarttgccactaggcagagcaaggatggattgggatctacccccagtctgaacataatgagtaaatcttgattatagctttataaaggcacatggtaggcacttcccatcacacattcccacccaataagagtgccagatttgtgtgtgtgtgtgtgtgtgtcttctttttaagacagggtatcactctgtcacccaggatgagtgcagtggtgtgatcacaattcattgcagcctcctgggctcaagcaatcctcccacctcagcctgctaagtagctgggaccacaggtgtctgccactatgtctggctaa

SEQ ID NO: 186764 - DNA, 497 bp, Homo sapiens
taatataaaaagctgccacgattctctttttgtactctggaaggaacttcttgttactgtaaattagtactaatttaatgcagtatactctaaagttttacattgttaagctttcactgttttcttggggatggctctttcctctggggtttggaatttaacattgcatttgatttgtatggagtaattgccactaggcagagcaaggatggattgggatctacccccagtctgaacataatgagtaaatcttgattatagctttataaaggcacatggtaggcacttcccatcacacattcccacccaataagwgtgccagatttgtgtgtgtgtgtgtgtgtgtcttctttttaagacagggtatcactctgtcacccaggatgagtgcagtggtgtgatcacaattcattgcagcctcctgggctcaagcaatcctcccacctcagcctgctaagtagctgggaccacaggtgtctgccactatgtctggctaa

SEQ ID NO: 186765 - DNA, 497 bp, Homo sapiens
taatataaaaagctgccacgattctctttttgtactctggaaggaacttcttgttactgtaaattagtactaatttaatgcagtatactctaaagttttacattgttaagctttcactgttttcttggggatggctctttcctctggggtttggaatttaacattgcatttgatttgtatggagtaattgccactaggcagagcaaggatggattgggatctacccccagtctgaacataatgagtaaatcttgattatagctttataaaggcacatggtaggcacttcccatcacacattcccacccaataagagtgccagatttgtgtgtgtgtgtgtgtgtgtcttctttttaagacagggtatcactctgtcacccaggatgagtgcagtggtgtgatcacrattcattgcagcctcctgggctcaagcaatcctcccacctcagcctgctaagtagctgggaccacaggtgtctgccactatgtctggctaa

SEQ ID NO: 186766 - DNA, 335 bp, Homo sapiens
gaagtaacagtaacattcctgctcatgattcactggccagcatcagtcccatggacatgcccagccagagcaccaggatgccatcctgccatgtgcccagaagagggcaaggttggaaatattttgagagtggcaccaatgactactaaggcacaaaaggacactgccccaacctctcctgtctgtccttctccccacacattctggcctagtctcagttgctcacaatttataccccccacccytgatataatcccagtagctgggaaggtagaattatctgagactgaggctcagagcactggaatgacttgcccaaggtctcagagcttgga

SEQ ID NO: 186767 - DNA, 626 bp, Homo sapiens
cagtgggacaccgtggagttgaggtcttggtaaactagccacattcctcttggggaagatttttaaagggacttccatttgaatttaataagaatattattaaacaaatatcagctgacrctagctgctttccaggattaactctaggttcgttggaaagagctcaatagaattgacgatactgttgttctgttgcagataattacccattacacagcacccctccagcatgattttgataattgctattaaaataaggacttccactgtctctttacaaattaacctccaagaggtgtaattactatcgtggcagggaggttggctgtgtggcctgggaatgatggctggggttgaagctgttgcagtgaccaccttgtgagacccagcatggggtccagtaaggaggcatgagactagggtctgggggctcagaagttctgggttgcaggccccatcccctgccatgaaacatcacacaagtcgttcacctgtttgggtctcagctccattccctatgaaactgaggatggttcccctgagctcccacagcaatcccccacccaccccagggagagcaacagagtcttcttttgacatgtgccgcctccccagactaaggatgg

SEQ ID NO: 186768 - DNA, 626 bp, Homo sapiens
cagtgggacaccgtggagttgaggtcttggtaaactagccacattcctcttggggaagatttttaaagggacttccatttgaatttaataagaatattattaaacaaatatcagctgacactagctgctttccaggattaactctaggttcgttggaaagagctcaatagaattgacgatactgttgttctgttgcagataattacccattacacagcacccctccagcatgattttgataattgctattaaaataaggacttccactgtctctttacaaattaacctccaagaggtgtaattactatcgtggcagggaggttggctgtgtggcctgggaatgatggctggggttgaagctgttgcagtgaccaccttgtgagacccrgcatggggtccagtaaggaggcatgagactagggtctgggggctcagaagttctgggttgcaggccccatcccctgccatgaaacatcacacaagtcgttcacctgtttgggtctcagctccattccctatgaaactgaggatggttcccctgagctcccacagcaatcccccacccaccccagggagagcaacagagtcttcttttgacatgtgccgcctccccagactaaggatgg

SEQ ID NO: 186769 - DNA, 552 bp, Homo sapiens
accagaagtacctgggtgacactaagtttaagacagaaactcacatttcataacttaaattcaaagagtaagatgactttgattagttcattataatctggtgaaagaaatagactaatggatacaaacaaattttaaaacaacataatttaaaagctgcaagaggccaggtgtggtgggtggctcatgcctgtaatcccagcattccgggaagctgaggtcagatgttagaagttcgaggctagcctggctaaaatggtgaaacccccgcctccactaaaaatacaaaaaaaaaaattagccaggcatagtggcacatgcctgcagtcccagctacttgggaggctgaggcaggagaatcacttggaaccagraagcggaggttgcagtcagccgagatcgtgccattgcactccagcctgggcgacaatagcaaaactccctctctaaataaataaataaaagcgtacaagaaaaaaaattcccaaaactataattcacattaataggatttgaatctatgtaatttatgcactcataaataggaaatag

SEQ ID NO: 186770 - DNA, 609 bp, Homo sapiens
gcaaatatttttgctagtataaactaaaataaccatgactaatatgttaaagaaagtagagtagatggataaaaatagataaagaattataattttaaaatgtaacctataaaaataatgaaataaaattccattctagaaccaaaaaaaatataatatttgacattaggaaccctgaatgtattcaacaccactctcattagaacagaagacaggattagaaattcaaaacaagttgatagaaaatacccaaaatgaaggacagagaaaagacagagaaaacagaaaaaatgaaaaagatgtgtggaacacagttaaaaggtacaacatacatacaattgtggtccccaaagaaaaaraatgaagaggcactatactatctgaagaagtaatagattaaggcttttccaagcttatgaaaagcatcaatccacagatttaagaaactcaataaatataaaatagaaaaaataccaagaaaccacattttggcatgtcatgccagaaatccatagacagaaacccttaaaaggagccagagaaaaaaggcattatctccaaaggagcaaaaataacacttcaagaagcttttcaacaaaaactaaaatt

SEQ ID NO: 186771 - DNA, 406 bp, Homo sapiens
tagaatagtttttcaaatgttatcttctagaatttttgtggtttcaggtctcaggtttaagtctttgatccrtcttgagttgatttttgtataatgtgagagatgaggatctagttttattcttctacatgttgcttgccaattatcccagcaccatttattgaagagggtgtcttttccccacttcatgtttgtgttggctttgtcaagaatcagttggctgtagtatttggctttagttctgggttctgtattttgttccattgttctatgtgcctatttttataccagtaccatgctgttttggcaaatacagccttgtagtatagtttgaagttgggtaatgtgatacctccaggtttgttatttttgcttactcttctagacattggcttaggcaaagaat

SEQ ID NO: 186772 - DNA, 589 bp, Homo sapiens
tattataaaatgtacaataaattattgttgacagcagtcactgttgtgctatcaaataacagatcttattcattctaatgatamtttttgttcccattaaccatcctcattctcttcctcgctcactatccttcccagcctctgataaccattcttctgctgtctatctgcatgagttcaattgttttaatttttagttccccaaaatgagtgagaacacacaaagtttgtctttctgtgcctggcttatttcacttagtataatgatctccagttccatccatgttgcaaatgacaggatctcatgctttttttatggctgaatagtactccattgtgtgtatgtaccacatgttctgtatcttttcatctgtatgcggacacttaggttgcttccaaatgttggctattgtaaaagtgctacaacaacgcaggagtgctgatatactggtttcctttcttttgggtatatacatagcaatgagattgctgtatcatatggtagttctaattttagtttgaggatctccatactgttctccataatgattgtactaatttacattcccaccaagagtgaatgagagtt

SEQ ID NO: 186773 - DNA, 566 bp, Homo sapiens
tgaccactaaacagagccctgttggaaactcttttgatttttatccttggacatatcttgagaggtcagtagtctaccaggtgaccagagacggcatttcctccctgtcaatgcttggtacattcactttgcctcaaaygtggcaaacatctcagatttattccttgatgtctcaattttagcatgaactcctgaggccatttgagttacaaattgacaagcatgaagattaagcaatatctgtttaaaaaaaaaaaaacatagacttcatcatactaaaactccttttaatgttatgccctagcaggactttttgatgtagtaccaccccttatcaaaataaccttggagtccaatttatccctttctttatcatgattaaggaaattgccatatacgttgatggaatgataattaaacatttggctggaacttgtgcctgggaatcaattcaaaatgaaaaaattattgagtgtctactatgcacacagccagaaccaggtatcactggtccctcattgtttgtactctagctggaaacacagacattgaagcagggaatttca

SEQ ID NO: 186774 - DNA, 564 bp, Homo sapiens
tttcttctgaagcttcctcacctctctcagccctcacagaactgaatagagtgagggacttgctctggattaggttttggcttaagggaatgtcatggctggttgatattctatctggaccaccaaaactttctccaataccagcaatcaggctatttttgctttcttatcatttgtktgttcactggacccttcaagggcttttactttgtattcacaacttagctaactggtttggtgcaagaggcctagcttttagattatgttggctttcaacatgccttccttgctaagcataaacaattctagcttttgatttaaagtgagagatgttcaacgatttctttcatatgaacacttagaagttgttttagggttattaattggcctaatttcaatgcttttgtgtcttaaggaataaggaggcccaaggagaggaagagagacaggggaacagctggtcagtggagcagtcagaacacttacagcatttattgattaagtttgcttaatctgtgcccaatctgatgtgggcacagttcatggtgtccccaaacaactaca

SEQ ID NO: 186775 - DNA, 564 bp, Homo sapiens
tttcttctgaagcttcctcacctctctcagccctcacagaactgaatagagtgagggacttgctctggattaggttttggcttaagggaatgtcatggctggttgatattctatctggaccaccaaaactttctccaataccagcaatcaggctatttttgctttcttatcatttgtttgttcactggacccttcaagggcttttactttgtattcacaacttagctaactggtttggtgcaagaggcctagcttttagattatgttggctttcaacatgccttccttgmtaagcataaacaattctagcttttgatttaaagtgagagatgttcaacgatttctttcatatgaacacttagaagttgttttagggttattaattggcctaatttcaatgcttttgtgtcttaaggaataaggaggcccaaggagaggaagagagacaggggaacagctggtcagtggagcagtcagaacacttacagcatttattgattaagtttgcttaatctgtgcccaatctgatgtgggcacagttcatggtgtccccaaacaactaca

SEQ ID NO: 186776 - DNA, 506 bp, Homo sapiens
gagagcttcagcacgggcttgggtgccacgggaactcccagcagtcctcgtcgttaagcacctccactcaccccgccacatgatcacctcaccctgtgggcccagcacaatgagcatggggaatgccttggattctatacagccagatggggtgcgacttccaggccttttcagtatgggggttagtgagccagaacctatcactgaagtactgtttgaaggactctctgatctgtcttcactgactaagataatctcaaagttctggcctgcctccttgwtcttctaataagattccaccaggacctgggtgaggctttggcaggatgaacacccatgtgcagagaaatagggtcctatgtaaggcctttctgggatgctgctctccaagaactgtgagtcatttcataaacctgaaaaggttaggtccccaagggaattccataccttctgggtcatctcagatcaccagcagcccattcttgcccacaacctttgcagtggtg

SEQ ID NO: 186777 - DNA, 593 bp, Homo sapiens
tgaattctttctagaaaagcattttattttttactgagtcttacctgcttattagtatagaacattttaattttattctataagtcagaaagttaaagagtcacagatatattgaatgagttcaagkaaggccaagagagatctgaagtttggtcagttcgatttttggctactcttcaatgtagctgaaaccacagttatcactgatacatttggttgcataattcattctactgaagaatgtttgtttctcccatgccacacaagtagaactggctggactttcccagacatgagggtgctaaggaggtaatgtaggcagggtcaaggtctaggataacatatttctaccaggaaatgtgtcacaagaacaaagctggaagccttatgaactgctcctcagaattactcttcttaaattacaattggtatactattttattaaatatgtacctgagagaaagatatatactgctgatctatatcttcctttcatcattcatacataattcatacattctacactcatctacatgaaaaaaagtgggtttcttatttaggtaaaaatggatactatccctaatattacagaa

SEQ ID NO: 186778 - DNA, 619 bp, Homo sapiens
agtttcctacacaatgcttatcaatccctaagtcatctttcctcaatcacaagacagaaaagtagttttctacacaatgcttatgaatctctaagtcatctttcctcaatcactgacttagatagattcagaatgacacttggttaactgtttccagataatttattactgcaacccaaaccaaccctctgcaaagytgcaaaggtgattaagcttattgttggttgcctcatcttctccagtttataccccttcttatctttacacccatcctaagtgtaaaatctacttatttttctcttgtctttgagaacataaacggaaactctatccaagtctcaaaaagcagatataaatttgaatagtcacttctttgaggagtattttttttttgtattttaataagaatcaaaacctgggaaccctgcaaatacagcttccataggaccccttgtttgtctttttggcacagggcagggagtggatagtgctggtagccaagggctgatccaaactcaggaatgaagcataggtgtttaagaatgactcagtcccttgcctctggattcattccctataaatgtccaaaattatttttatcactgcagctgaaattcta

SEQ ID NO: 186779 - DNA, 619 bp, Homo sapiens
agtttcctacacaatgcttatcaatccctaagtcatctttcctcaatcacaagacagaaaagtagttttctacacaatgcttatgaatctctaagtcatctttcctcaatcactgacttagatagattcagaatgacacttggttaactgtttccagataatttattactgcaacccaaaccaaccctctgcaaagttgcaaaggtgattaagcttattgttggttgcctcatcttctccagtttataccccttcttatctttacacccatcctaagtgtaaaatctacttatttttctcttgtctttgagaacataaacggaaactctatccaagtctcaaaaagcagatataaatttgaatagtcacttctttgaggagtattttttttttgtattttaataagaatcaaaacctgggaaccctgcaaatacagcttccataggaccccwtgtttgtctttttggcacagggcagggagtggatagtgctggtagccaagggctgatccaaactcaggaatgaagcataggtgtttaagaatgactcagtcccttgcctctggattcattccctataaatgtccaaaattatttttatcactgcagctgaaattcta

SEQ ID NO: 186780 - DNA, 641 bp, Homo sapiens
gaaggcagaaatgagcccaagagacagagagaggagctctagccaaactcaccattttcatcagaaacacactcctataataactaacccactctgctataacagcattaatttattcataagagtgaagccctcatggtgtaaataacctcttaaagtaccctcctcataatactgttacagtggcaagtaaatttcaacatgggttttggtggggacattcaaaccatagcattccatccctggaactctgaaacatatgtccttcttatatacaaagtacattcattccattaaaataattccaaaagtcttaactcattctagcatcaactcaaagtccaaagtcctragttttatcttaatcagatatgggtgagactcaaagcacaatccttcccaaggcaaattctccagttgtgagcctgtaaaatcaaaacaaattatttatttttaaaatacaatggtcatgccatgggagaaggatggacagtggaagtgagcacacaagacggagaggggaatcagggtgaactcagccttcttgttagaagcccatgcccattataacagcataagatagacattcgcatttcaaaagggaaaaataagcaagaagaaagcagtaactggtcccaagt

SEQ ID NO: 186781 - DNA, 586 bp, Homo sapiens
tgtttctgctcttctgttactagggaagatccagtaaatttcagctcttctttcaccattatttattcattaaaacaaacttatgaggtacgtagctgtattgtccccatgtcccagaggtacaaacaggctaagtcacttgctcgaagccacatggcttaaaagtggccgacctggcaaaatatgtcagaaggacaggaaatgggagatgagcccaggtcttctgtccccargtggcccctgctctttacattcatttcaatctctcagcaggtgacatcactagtttccaaactttttttttttctcaagtacatttggggaaattagtttttatcccagagagacacttcctgggggcaattaaatattagtggattgggtcttcttgtttgataaaattttgccttctaaaaatggcaaacagagtcatgattttttttttcaagatcacatttcctcactagaaaaattcaccttggggtagagtactcggtggagaattccagtgagaaaggaaaatttctcaaagagcggtgagcaatcacaaagaagaactttgaagtagacaggaaaagtatttggt

SEQ ID NO: 186782 - DNA, 500 bp, Homo sapiens
atgttcatggatcaaaagacaaaatatttaaaactgtagttcactccccaaactgaactacagatccaatgcaatccccttcagaatytccgctagctttttgcagaaattggcagttgatcctgaaattcgtaaggcatgcaaatcacccagaataagtaaaacaatctttaaaaaaattagaggactcacatgtcttgacttcaaaacttactacaaaggcactgtaataagacaggatgtactaaagtaaactagatttatatatcaatagaataaaattgagaatctagaaataagccctcatcttcaggtttaattgatttttgacaaagatattgggaccatttaatgagaggaaaaaaatctttacaacaactggcactgtgacaactagatagccacatgcaaaaaaaattaataaatttgaaccactaatttatactgtatacagaaactaactcaaaatggatcacagacctaaatggaagagcaaaact

SEQ ID NO: 186783 - DNA, 500 bp, Homo sapiens
tgtccctttctgcatttaactcagcacacatttactaagcaccaaccaaattcttgctgaagaaacaaagatggataagtcgcagaatgcatcttcaaggaattcagagtccattagggagacagacatataagcagatgattccagcacagattggcatgtgctatattaatgatacagagtgctatgagaatacacagaattgggagtggctaattctgcctggggttgccaggaaagtctccatccaggagtgggcatttgagtgcattgacagatagagtggaaragcattccaagcaaaaggaaaagagtgaactaaagcaaggggacgggagagaacacagcttgtgtggaaagccccacacaaatagtttgaaacagctggagggtttatagaaggtgctgcaaaaccacctcaggggatgtcactaggtcacagctgccaccctccacctcatttggcatgctccctggggctacggcctgtgtccacctaa

SEQ ID NO: 186784 - DNA, 507 bp, Homo sapiens
gtttacagcagtcttattcataattactaaaacttggaagcaaccaagatgtccttctataggagaatggataaacaaattgtggtatatctatacagtggaatattatttagcaataaaaaatgagctagcaatccatgaaaaaatatggaggaaacgtacatgcataycactaatttttttaaagccaatctgaaaatgctacattctgcatgatactgtctatattacattctggaaaaggcaaaactatgaaagcactaaaaatatcaggtgttcaggggagagaggaagggataaattggtggagtacaggggacttttaaggcagtgaaactattctgtgtctataatagtggatgctataatggtgggtacatgtcattacacatttatcaaaacctgtagaatattcaacacaaagagtaaaccataatgtaaactatagacttgaattaataacactgcaacaatattgactcatcaactgtaacaaatataccacat

SEQ ID NO: 186785 - DNA, 342 bp, Homo sapiens
agatctctgcctagttcttgaaagcttcctgctaacaagcatctctagggcatttaaatatggaatccaaaaactctttactctttagttacaaaacaagaacacactttctccgtagtttaacacatgctcaaaaaagaacagtggaattattctttttttttttttttcagtgacccattcccatttctaatttcctcttccaaccccctctctaggagatggtctgatttctgtattccaggagatacaaaggacagttacttctcaaatctggatgattaattcataagtcacaccaagtgtgagaycccaatagtccagtataattaaatgatagaa

SEQ ID NO: 186786 - DNA, 477 bp, Homo sapiens
ctacttccaaacagctgtctcattttgctccattcatattgccaattgtcaggaggtgcttacgttatatcatgtataccagatttgttcattttccaaacattgccctctcttttccctcttattttaaataaaatttcaaacaccyagaaagtaatacaacaaatgtttattaatcttgctttcctgatttaataaattgatgttttgccatatatttatgagatctgtttttaaataaaaggccacagataaaagttgaatctctttgtaccctttactaatcctccctgtctccccagatataattattgtcctcaaattggcatctttgctatcctctgtttatatttgtattacatatgctaggtattcaaaaactctaaataacattgcattggtgagttttttaatttcataaatttcatcacactattcatacatttttttaactgccctttttttcacttaacacta

SEQ ID NO: 186787 - DNA, 560 bp, Homo sapiens
ttttctgtaccattatcatatttcacatttcctctgtcatcttatgtgaaacacatgtgacatttattttaattgcaaatttgattttgtatttaaacatgctaaacacaatattttaatcagacagtgtcaacaatttttagataaattgagaaattaataaaatgcatatgctactgggcgtgcttatagtataaaaataaagatagaagttttaaaaagcatagaacaaacaccaatatttatttcactatttaaaaaatactgactgtatgatgatgataatgataayaacagttttctacagataccacatttctgaggataagcaatgttaaaagaaaaactttagatcaattaaatttaacagaatttaattgagcaaaaaaggatttttgaatcaggcagccaccagaacaaaaggggtttagagagactttggcacatctctgtgggtggagaggatttatggacagaaaaaggaaagtgaggtacagaaaatggaagtgaggtacagaaacagctggatcggttacagcctgatgtttgccttatttgaa

SEQ ID NO: 186788 - DNA, 574 bp, Homo sapiens
gagtttgtaaactttacagatagcatcatcacctcacacatgatgaagctactgcttttcagtccttaaccagaatgtcctagataaagtatagaacccaagggtcagcataattggccaaactttacaaagttatattagcactggatgacttggtcaacaactggccccatctgcaaatttttacatactcttgggccaytgccaattgtctggctgtctggtacagtgaatggcaacaataatttcttatccagagtaaagaactctgggtatatcttgcccaacagatatacaaaatataaatcaaggttaaccccaatgggttaacgagtatattaatgaatccttgttgtgtggatttaacatgtatacatacatgttttagacatcattaatactgaccaaggcacatattcgcttctcagaatacataaggctgggcctttggacgaggcatttaatagaaatttcacctctcttacctgcctcaagctacaggcctcatagagtgtcatatggtgtacttaaaccaattcaaactcaattcaattaaaaaatgacacattttagt

SEQ ID NO: 186789 - DNA, 571 bp, Homo sapiens
taaagcagaaatctttccagagtcttagctgcagcgtcaccaagtagatgctgagacagtagtagctgatattggacacagttcacctctttagcaacagtgcatgcatcctcacactttccatacatatttacatttccatacaacaaccataataccatgtttctgcctaacaagccgcaactattattcacagcacaaagacattctccaaaatgaagagtctcaaaatcccaagaatcatattcatttctgataaacattcacattatccacctctgagctgtgtcaattgtttcaaaactaaagtaaaaattccatttgcagtaaactctgtgggctggattggagtaagagatgttagtataaactcatgttaattttaatatggctacatacagaagtataaatagaaaaataattctggrtatgtatgtatgtaagggtatatatctatctgtatatctatagatagatatactgtattggtccattttcacactgctataaagatactcctgggatgggcaacttttaaacaaatgaagtttaattgcctcagttacacatg

SEQ ID NO: 186790 - DNA, 571 bp, Homo sapiens
taaagcagaaatctttccagagtcttagctgcagcgtcaccaagtagatgctgagacagtagtagctgatattggacacagttcacctctttagcaacagtgcatgcatcctcacactttccatacatatttacatttccatacaacaaccataataccatgtttctgcctaacaagccgcaactattattcacagcacaaagacattctccaaaatgaagagtctcaaaatcccaagaatcatattcatttctgataaacattcacattatccacctctgagctgtgtcaattgtttcaaaactaaagtaaaaattccatttgcagtaaactctgtgggctggattggagtaagagatgttagtataaactcatgttaattttaatatggctacatacagaagtataaatagaaaaataattctgggtatgtatgtatgtaagggtatatatctatctgtatatctatagatagatatactgtattggtcyattttcacactgctataaagatactcctgggatgggcaacttttaaacaaatgaagtttaattgcctcagttacacatg

SEQ ID NO: 186791 - DNA, 615 bp, Homo sapiens
ctgcatatagtatcttattggttctgtttctctggggaaccatgactaatagaggtaatgatcttaactatccctaattaatcacattaagccgccagagttgacaagtccaggctggactgtgagaatgagtaagtcctatggccaagaaaagaacatcagatcctaattgttaagagggatcagctgtgatactggataacccaggaaaatttcatctctagtgaaaacaaaggatagacccattattggatggtaaagaactaaattcatgaagactcctatccggtgactaaagtaccacctcagctactgattaagtgcacatcaatcagtggacttttttgaaaataaaattctgcctatgtgggtgcgtatctgaagatttcaaaggcagagttaactgacgttcayacctgatgtaaagtacaaaaatccaaaacaaaaaaaagatcataactaagggtgaaaatacttcttgactagaatttttgacacatctttgacataatatcaactatgtgtaagtatcagcttggaatttacacctattcagtcacacaaatgctgcatgataacacattcctgaatgactcagaagtataaatggaacga

SEQ ID NO: 186792 - DNA, 621 bp, Homo sapiens
atgttcatggaatgtaaaatttgatattattaaaatatccatattacccaaagcaatctacagattcaatgcaatatctatcaaaataccaatgacattcttcacagaaatagaaaaaaaatcctaaagtttttatggatccatcaaagacccagaawagccaaagctatcctgagcaaaaagaacaaaactggaagaatacattacctgacttcaaattataccacagagctatagtgaccaaaacagcatggtccaggcataaaaacagacacatagaccaatggaacagaatggagaactccaaaaaatatatatatatatatatccatacacctacagtgaactcattttttacaaaggtgccaagaacatacagtggagaaaacagtttcttcatggatggtgctgggagaactggatatctatatgtaaaataatgaaactaggcccctatctcttaccacatacacaaattaaataaaaatggattaaagattattaaagacataaatcaaagacctccaactatgaaaatactataaggaagcattggagaagctccatagaacattggtttgggcaaaaatttcttgagtaataccccacaagcacaggtaa

SEQ ID NO: 186793 - DNA, 546 bp, Homo sapiens
atgtttgcacagggcaaatttatggacccaatgtccttccctgatctaacacatgttgtgttaacctattgtgtggttgcttaagaatcgaaatttacttgaccatattctttaaaaaactcttactttctctggctgcaccacagtggcctatttccatatgaagaagggctgactttccgtctgggcaaaaagcagtactcatgctttayaatttttataatagatttccacctttatccctggccatttgaccttgaaagaatataaagcagccttccttaagccatataaaatatcataatatgaggtcatttcaaaaagatgaacatcatgatatttagagaagattacgacatatttttggtggcaaaagagctgacaagaggagcacaggctaggaccacttagctagcacagagctcacttttaatttaagaacttcagatttagaattgtattctgtaattgaagttacactttaaatcgtaaagatttttttttctttttggaaactattaatttttagtataagtatttagataa

SEQ ID NO: 186794 - DNA, 546 bp, Homo sapiens
atgtttgcacagggcaaatttatggacccaatgtccttccctgatctaacacatgttgtgttaacctattgtgtggttgcttaagaatcgaaatttacttgaccatattctttaaaaaactcttactttctctggctgcaccacagtggcctatttccatatgaagaagggctgactttccgtctgggcaaaaagcagtactcatgctttacaatttttataatagatttccacctttatccctggccatttgaccttgaaagaatataaascagccttccttaagccatataaaatatcataatatgaggtcatttcaaaaagatgaacatcatgatatttagagaagattacgacatatttttggtggcaaaagagctgacaagaggagcacaggctaggaccacttagctagcacagagctcacttttaatttaagaacttcagatttagaattgtattctgtaattgaagttacactttaaatcgtaaagatttttttttctttttggaaactattaatttttagtataagtatttagataa

SEQ ID NO: 186795 - DNA, 495 bp, Homo sapiens
acagtacaataaaaaatagtacaaaaacaatgcagaataacaactatttataaggcatttacattgtattaggtatttatatataatcttataactatagagataaagtgtacaggaggatgtgtataggttatatgcaaatacaatgttattttacataagggacttgagcgtccatggattttggtatccatgatgggagtggagttgaggaatagagggtgtcctggaaccaattcyccttgaatactgaagaatgactatactctctttttatagattatctaatccaatcccatgtctaggtcagtaagtctccatctggatataccatattttatatggctcacattgaactactgcatatccctcctccaaactgacatccccagtccctgtgtttttgctgtctcagcaaataacatcaccattttctgttgctgggtccaaaccttggtgaatcttcatccatgttattcagtgctaagctcagac

SEQ ID NO: 186796 - DNA, 443 bp, Homo sapiens
tgcctgccattcattaatagctaggaacttgggccactggattttgttttgtctttcttttarttcaccaccctccaggtatcaaagggcctggctttaaagtagttcagctttgcccttaccaaatcatgtggccagccctttaaacttctttatttatcttcaataatttgagtggagggggtgataataatatcttcctggagtttaaaaaatactaagtttaaaatgcatgacaagtacccaggtacataggagttatgtaacaagattcccttcccactcatccatcattctgcatctagcaggttccatgagagaaagaatttcttgactctccattggaaagatcttgccagactcggaggtctcagctgctatgtgaatggtagttttccctctgctcttactatttttaaagcacccatgggatgccatagtgt

SEQ ID NO: 186797 - DNA, 443 bp, Homo sapiens
tgcctgccattcattaatagctaggaacttgggccactggattttgttttgtctttcttttaattcaccaccctccaggtatcaaagggcctggctttaaagtagttcagctttgcccttaccaaatcatgtggccagccctytaaacttctttatttatcttcaataatttgagtggagggggtgataataatatcttcctggagtttaaaaaatactaagtttaaaatgcatgacaagtacccaggtacataggagttatgtaacaagattcccttcccactcatccatcattctgcatctagcaggttccatgagagaaagaatttcttgactctccattggaaagatcttgccagactcggaggtctcagctgctatgtgaatggtagttttccctctgctcttactatttttaaagcacccatgggatgccatagtgt

SEQ ID NO: 186798 - DNA, 443 bp, Homo sapiens
tgcctgccattcattaatagctaggaacttgggccactggattttgttttgtctttcttttaattcaccaccctccaggtatcaaagggcctggctttaaagtagttcagctttgcccttaccaaatcatgtggccagccctttaaacttctttatytatcttcaataatttgagtggagggggtgataataatatcttcctggagtttaaaaaatactaagtttaaaatgcatgacaagtacccaggtacataggagttatgtaacaagattcccttcccactcatccatcattctgcatctagcaggttccatgagagaaagaatttcttgactctccattggaaagatcttgccagactcggaggtctcagctgctatgtgaatggtagttttccctctgctcttactatttttaaagcacccatgggatgccatagtgt

SEQ ID NO: 186799 - DNA, 443 bp, Homo sapiens
tgcctgccattcattaatagctaggaacttgggccactggattttgttttgtctttcttttaattcaccaccctccaggtatcaaagggcctggctttaaagtagttcagctttgcccttaccaaatcatgtggccagccctttaaacttctttatttatcttcaataatttgagtggagggggtgataataatatcttcctggagtttaaaaaatactaagtttaaaatgcatgacaagtacccaggtacataggagttaygtaacaagattcccttcccactcatccatcattctgcatctagcaggttccatgagagaaagaatttcttgactctccattggaaagatcttgccagactcggaggtctcagctgctatgtgaatggtagttttccctctgctcttactatttttaaagcacccatgggatgccatagtgt

SEQ ID NO: 186800 - DNA, 384 bp, Homo sapiens
aatatttttaatggaacaacaatcagaaggcttaaataacatagagcttcttattggttgataacagaaagacatctatttctattcttcttattattatcataccagcatatttaggattaatatttacagattataaggataaccatttgtcatgatgaaatttggttcagccagtctcctttacctttttgtttttaatactattccatagagtcacaaaccatggattctaagtaaataagtgcatagaatttactaaacctsacctctttggcattacagccattgttgaagatgtcattctggtttgtgaaagtgatgctgactggtgtatattgagcagttcagtagtatcagccaaatagacatgctgctgaattc

SEQ ID NO: 186801 - DNA, 522 bp, Homo sapiens
gttgtttcctattttcctcatgatattaactagtctgttgggagcaagcctgaccctcatgagcactgtgattcatcaagtggcaaaaaaaaaaaaaaaaaaaaaaaaagaagccagttactttttttagtgtagcttacttattaagaatgcttcagtcaaattttatgaaaattgagaataatagattttatggttattcttgcaaaatgtcctctttctgagttaacttgtaactaaaagtgatgatttctctcttttgtcaccccaagttctcttggaacacaaactcctccctggggataggcaactcagaagaggacataagaaaatgataacttaatgggaccccagtgggctctaaaatttaataccaccaaaaaaattaatgaagcttctaaagcaagggatgttaagtctgaggataacttatgcattgggatgatctggcttgttrctggcattatttaacatttcccaggcactgaagtacagcatgactaaacatccaaaaacaggaca

SEQ ID NO: 186802 - DNA, 536 bp, Homo sapiens
gtgagccactgcccctggcctgtactctcacctttaatccccatgtgatgccaaagcacgtgagaagtgaaatagtgcaggggtaatgttttcatggtgactgaatcctctttcttatcaatgactcaatttttaaaaaagaaaggtatgaaaactgactatagagtcagggttctccaaaaaaacagaaccaataggatatcttcagacatgcagraagaaatttattgtgagtgattggcgcaggtgattatggaggctagtgagtccctctatctgctgttcacgagctggaggcccaggaaacctagtggtgtagttccagtccaaacccaaagacccaagaaccaagggaaccaataatataagtcccaaccctagtctaagggccttaaaaccaggagcactaatgtctgaggataggagaaaacagacgtgtcagctcaagcaaagaacaaattcactcttcctctgccttttcttctgccaggccctctatggattagatgatacccggctgcactggtgaggttgat

SEQ ID NO: 186803 - DNA, 553 bp, Homo sapiens
agaacattttttcatcactacagaaatactttcacaggagaaattttccctcaaaacaaattgaagagtttaccactggataataccagggctaaggaaaccacaataaggatatacaactaatatcatgtggtttttctgggtgagaaacatattccgtttcaaggtctgtttataaactatttcttcagccatttatcctggttctgtcaccaaagatgatctgatgagctaaagaaatctttatcctcattaaataaaacataattgtgaaaacaattgttctctgaatctttggccatctcctcatgtttcatctaacaatgatgcagctcagataagaaagtacaaacrctagattataaaatataaatatttgcctcaaaagtactaatagctctcctacaaatacattttgatgtcacttctaaaattatttacataactgcaaattcatgctcttcaaaataggaattggtaaataaatttttaaggtaaaatacaaatcccccaaattacatggtgatatagaaacagcacagagaacacagcc

SEQ ID NO: 186804 - DNA, 553 bp, Homo sapiens
agaacattttttcatcactacagaaatactttcacaggagaaattttccctcaaaacaaattgaagagtttaccactggataataccagggctaaggaaaccacaataaggatatacaactaatatcatgtggtttttctgggtgagaaacatattccgtttcaaggtctgtttataaactatttcttcagccatttatcctggttctgtcaccaaagatgatctgatgagctaaagaaatctttatcctcattaaataaaacataattgtgaaaacaattgttctctgaatctttggccatctcctcatgtttcatctaacaatgatgcagctcagataagaaagtacaaacgctagattataaaatataaatatttgcctcaaaagtactaatagctctcctacaaatacattttgatgtcacttctaaaattatttacataactgcaaattcatgctcttcaaaataggaattggtaaataaatttttaaggtaaaatayaaatcccccaaattacatggtgatatagaaacagcacagagaacacagcc

SEQ ID NO: 186805 - DNA, 606 bp, Homo sapiens
gtagaaaaggctaaatgctttttcaaatctatttcactcccatcaaaagtagagtttaaatttatccacatcatcttatttggtattatccatattttcattttagttattagggtgggtattgcatatgattttaatttgaatttctctgatgactaatgagtccaagacctttccttatattaatggttattgagatgtcttttcattggaagtgcttgttcaagtcttgtacccrtttttttcttattgcattatgtttttattgatttgtaggaatcctttatattccagatatgaatcttttaagattatatgtgttataaatacctctgcccactgtatgacttgatattcactatttttaatggtattattggctaaacactctgttttaatgtactcaatgtataattcattttctttatagttggtgtttctgtgtcagtatatagaaaatttttctatccaggttcaaaaagatatttccatgtaatctattctaaagacattattgtttgcactttcatattaagacccatgatccctctgaaattgattttggatcatgatgtgtcataaagatcaacttttatccatttgggc

SEQ ID NO: 186806 - DNA, 606 bp, Homo sapiens
gtagaaaaggctaaatgctttttcaaatctatttcactcccatcaaaagtagagtttaaatttatccacatcatcttatttggtattatccatattttcattttagttattagggtgggtattgcatatgattttaatttgaatttctctgatgactaatgagtccaagacctttccttatattaatggttattgagatgtcttttcattggaagtgcttgttcaagtcttgtacccatttttttcttattgcattatgtttttattgatttrtaggaatcctttatattccagatatgaatcttttaagattatatgtgttataaatacctctgcccactgtatgacttgatattcactatttttaatggtattattggctaaacactctgttttaatgtactcaatgtataattcattttctttatagttggtgtttctgtgtcagtatatagaaaatttttctatccaggttcaaaaagatatttccatgtaatctattctaaagacattattgtttgcactttcatattaagacccatgatccctctgaaattgattttggatcatgatgtgtcataaagatcaacttttatccatttgggc

SEQ ID NO: 186807 - DNA, 383 bp, Homo sapiens
tagcaacaaattctggttgagattaaaaattactttaaagatcttgatatcayatatatataaattattgatgccatatatttataaattcatagaacattttcagtctcgtcacctttctttttgtgttctgagatcactagttttattaattgcaaaataaattagaaaaatatccttttatgtgagacctcagtcaaaactatttgagaccagaagacaatgttgtttttcatagcagtatgtgatatccctcatggtaatccacctctttgtatagtttttctggccccatatctgcatctcactcataaacaaaccctttattcaaatttcttactactttattgaatgattagtaaggaccctggcccatggggagc

SEQ ID NO: 186808 - DNA, 633 bp, Homo sapiens
aaagataaaatgttgcttcctgtgaagtgaagggttctctttgggatttatgagaagtggtaccacatctaaggctcaatattggtctctgctgctataaagtaggtcactcagtatagaagcaactagataacccttggtgaggaagaccccaagttttgtctgtacattcctctgttatggactgacttgtttcccctcaaaattcagatgttaaagtcctaacgccaatgtaactatatttggagatagagactttaaagaggtaattaatattaaataaagtcagaagggagggttcttaatccactaagactggtgtccttataagaagagggaaaggaagagacaccaaacatgtacacacagagaaaaagccaaatgagaatgcaacaagaaggtgctatctgcaagccaagaaaaaaggcctcaagagaaaccaatactgctgaaatcctcatcttatattccrtcctctacagctataagaaaattaatttctgttgtttaagccactcagttcatggtattttgttatggcatccttagcagtgtaatacaacctccattcttgcaaccataaccactctactaagtgactgagggagaggttgtctaatgaaagtgtaatgt

SEQ ID NO: 186809 - DNA, 571 bp, Homo sapiens
tagacacattgtggtatattcatataagggaatataacacagaagaataaactgtttgctgtgcagaacaaaatggaagaatctcacaaatacaataatgygctcaggagtgcagtcatgaatctggtcatcctgtatgactccatttatatgaagttcaagaacagccaaaactaatcaacagtaattgagggaagaagactgaagagttactaattcttggagtagaaaacattgtctaggaagggcacaaaggatcattctccatgatgacaatttacatgttatatgggtgattgcagcacttaacttaaatgtaagttaagtcccaatcaaagcaactgactgttcaggtaacaaacacttggtttcagaggctcagcctttgcccaacaccaccaactttataaacaagatatgtcataagaaccttgattttccagtcaacatttttaggagctcccaaatgatccaaaagtagaattggatatcatttccttcccaaattcattatttccaaatctgatgacttgaaatgtgtgatcctttagacaggagtttgcaaacaggt

SEQ ID NO: 186810 - DNA, 571 bp, Homo sapiens
tagacacattgtggtatattcatataagggaatataacacagaagaataaactgtttgctgtgcagaacaaaatggaagaatctcacaaatacaataatgtgctcaggartgcagtcatgaatctggtcatcctgtatgactccatttatatgaagttcaagaacagccaaaactaatcaacagtaattgagggaagaagactgaagagttactaattcttggagtagaaaacattgtctaggaagggcacaaaggatcattctccatgatgacaatttacatgttatatgggtgattgcagcacttaacttaaatgtaagttaagtcccaatcaaagcaactgactgttcaggtaacaaacacttggtttcagaggctcagcctttgcccaacaccaccaactttataaacaagatatgtcataagaaccttgattttccagtcaacatttttaggagctcccaaatgatccaaaagtagaattggatatcatttccttcccaaattcattatttccaaatctgatgacttgaaatgtgtgatcctttagacaggagtttgcaaacaggt

SEQ ID NO: 186811 - DNA, 596 bp, Homo sapiens
ggagaatagacacattgtggtatattcatataagggaatataacacagaagaataaactgtttgctgtgcagaacaaaatggaagaatctcacaaatacaataatgtgctcaggagtgcagtcatgaatctggtcatcctgtatgactccatttatatgaagttcaagaacagcmaaaactaatcaacagtaattgagggaagaagactgaagagttactaattcttggagtagaaaacattgtctaggaagggcacaaaggatcattctccatgatgacaatttacatgttatatgggtgattgcagcacttaacttaaatgtaagttaagtcccaatcaaagcaactgactgttcaggtaacaaacacttggtttcagaggctcagcctttgcccaacaccaccaactttataaacaagatatgtcataagaaccttgattttccagtcaacatttttaggagctcccaaatgatccaaaagtagaattggatatcatttccttcccaaattcattatttccaaatctgatgacttgaaatgtgtgatcctttagacaggagtttgcaaacaggtgagctttgtaccaaccata

SEQ ID NO: 186812 - DNA, 464 bp, Homo sapiens
tgaattttattgtggtgtttgsccttccgaatctgttcgcatcattgcattttatgctgctccctattcccaagaacactaagtctcattaaagcaggaaaacattgcaattgaaaccaccaaagaagccaagggtatccatgagacactgatatttgtcttctccctctttttctgatgtttactgtatctaacttacaacagggaataaatgcaaacaaattcttactaagagaaacaataagttgggaagaaaatcaagtgggacagaaggcacagagtcatgagttaggctggcattctgtgcagcagaatagaaagggatgggtcctcctagagatgtctatgacaggacatgtattgtgcaagaaagtgtacaggaccagaccaggaatcagagagatcaatcaacaaagctgctcccagatcactagagggtttcaattataatgggaccaggaaga

SEQ ID NO: 186813 - DNA, 550 bp, Homo sapiens
actcctcggttacctcttagtttgcctccagttgcatatttagataccctgttccctgagtgaatattctggaactagcaaattcacatatatctgtggcttttcccaccacatamcaagttctaacccctgaatttgtctgcagttttttcctctttgtgctgggtatatcctctcagttcttttcccacttcaatggataggtttagtttcaaatatggtccttcttcaatatagcttgtcctgctccaattaacaaagccatgcttggctatgtcagcaatataaacaagtaaataataattatgatcactaccattatcactagtaagtgagagcagctattctctgctctgagagctttaagcaatagtcacattcaattcttataaccatactatagtattttaatactattattatctctattttattgatgaaaaaaatgaagcccagattatatgatgtacctaaatttatacagtaaatggtagccacggagaaaccaggtagacttcaaattctctgttttaattagtctcttaacact

SEQ ID NO: 186814 - DNA, 583 bp, Homo sapiens
tgaaggggaagaaagcatctctccacatggctggcaggagagagagagagagagtgagtgaagaaggaggtgctacacactttcccacaaccagatatcttgagaaatctatcacaagacagcactagggggataatgctaaaccatcagaaaccacctccctgatcaaaacaccttccatcaggccccaactccaacactgggaattacaattcaacatgagatttgggtggggacacagagccaaatcatattaatgctcaacttttcttttctttctttttctttttttgttagataggttctcactctggcacccagcaagctggagtrtagtggcatgatcttggctcagtgcagcctctacctccttggctcaaggcagcctttcacttcagcctccagagtagcgggcacatggcaccatgcctggctaaatgtttgcattttgtgtagagacaaggtctcactatgttgcccaggctagtcttgaacacctgggctcaagtgctcctcctgcctcagcctcccaaagtgctaagattataggcatgagccacaatgactggcacagattttgctt

SEQ ID NO: 186815 - DNA, 583 bp, Homo sapiens
tgaaggggaagaaagcatctctccacatggctggcaggagagagagagagagagtgagtgaagaaggaggtgctacacactttcccacaaccagatatcttgagaaatctatcacaagacagcactagggggataatgctaaaccatcagaaaccacctccctgatcaaaacaccttccatcaggccccaactccaacactgggaattacaattcaacatgagatttgggtggggacacagagccaaatcatattaatgctcaacttttcttttctttctttttctttttttgttagataggttctcactctggcacccagcaagctggagtatagtggcatgatcttggctcagtgcagcctctacctccttggctcaaggcagcctttcacttcagcctccagagtagcrggcacatggcaccatgcctggctaaatgtttgcattttgtgtagagacaaggtctcactatgttgcccaggctagtcttgaacacctgggctcaagtgctcctcctgcctcagcctcccaaagtgctaagattataggcatgagccacaatgactggcacagattttgctt

SEQ ID NO: 186816 - DNA, 583 bp, Homo sapiens
tgaaggggaagaaagcatctctccacatggctggcaggagagagagagagagagtgagtgaagaaggaggtgctacacactttcccacaaccagatatcttgagaaatctatcacaagacagcactagggggataatgctaaaccatcagaaaccacctccctgatcaaaacaccttccatcaggccccaactccaacactgggaattacaattcaacatgagatttgggtggggacacagagccaaatcatattaatgctcaacttttcttttctttctttttctttttttgttagataggttctcactctggcacccagcaagctggagtatagtggcatgatcttggctcagtgcagcctctacctccttggctcaaggcagcctttcacttcagcctccagagtagcgggcacatggcaccatgcctggctaaatgtttgcattttgtgtagagacaaggtctcactatgttgcccaggctagtcttgaacacctgggctcaagtgctcctcctgcctcagcctcccaaagtgctaagattataggcatgagccasaatgactggcacagattttgctt

SEQ ID NO: 186817 - DNA, 509 bp, Homo sapiens
attgaataatattcagtatatattacaaaaaaataggcaaagaaaccattaaaatatagaaaattaattcattccacttactgaattgtctcaaagtttctggagaaaacagcagttttaaaatatggagttatgagctcaataatcatgtatcatataaaatttgtcaatttttaataggccaaattaatatttagcaaaaacacaaaaactccaatttaagattttttaattaaagtttttatcttcccacatttctcgtatttcttggatctgacctaaatgttgaacttttattaagttcaaaggaatttctrttttcatgtaacctaaaagaaggcataatatttatgtgtaacatgtctagaatcacacctttttaatacttgccttagtttgctttattctttggaatatatacagtccagaaagtgtctccgtcatgatactttttcactggttccattttgaaatttgataaccaaagaaagacacaatgagaacacttg

SEQ ID NO: 186818 - DNA, 509 bp, Homo sapiens
attgaataatattcagtatatattacaaaaaaataggcaaagaaaccattaaaatatagaaaattaattcattccacttactgaattgtctcaaagtttctggagaaaacagcagttttaaaatatggagttatgagctcaataatcatgtatcatataaaatttgtcaatttttaataggccaaattaatatttagcaaaaacacaaaaactccaatttaagattttttaattaaagtttttatcttcccacatttctcgtatttcttggatctgacctaaatgttgaacttttattaagttcaaaggaatttctattttcaygtaacctaaaagaaggcataatatttatgtgtaacatgtctagaatcacacctttttaatacttgccttagtttgctttattctttggaatatatacagtccagaaagtgtctccgtcatgatactttttcactggttccattttgaaatttgataaccaaagaaagacacaatgagaacacttg

SEQ ID NO: 186819 - DNA, 509 bp, Homo sapiens
attgaataatattcagtatatattacaaaaaaataggcaaagaaaccattaaaatatagaaaattaattcattccacttactgaattgtctcaaagtttctggagaaaacagcagttttaaaatatggagttatgagctcaataatcatgtatcatataaaatttgtcaatttttaataggccaaattaatatttagcaaaaacacaaaaactccaatttaagattttttaattaaagtttttatcttcccacatttctcgtatttcttggatctgacctaaatgttgaacttttattaagttcaaaggaatttctattttcatrtaacctaaaagaaggcataatatttatgtgtaacatgtctagaatcacacctttttaatacttgccttagtttgctttattctttggaatatatacagtccagaaagtgtctccgtcatgatactttttcactggttccattttgaaatttgataaccaaagaaagacacaatgagaacacttg

SEQ ID NO: 186820 - DNA, 581 bp, Homo sapiens
agctgggtattgggccacacacctgtgggacctgtggtcctagctactcaataggctgaggtaggasgattgcttgaggctgggatgtcaaggctgcagtgaggcactgcattctagccaaggtgacagagtgaggtcttgtcttaaaaaaggaacaaaataaataaataataaataaataaataaacattctgtaattccctgaaataaaatgttcatttaaggcaatctttggcatttaagccaactgttgtgacaaatttttatgataagactgagtaacacaagtaacaatagagtaagctggctattccgatgtcactggagagttttttaacataaatttttaaaaaaagctcaaactttaaatctttagcataaataataataaagaacaagaaagccgcgatgtttatcctaaaaaatatcttaatgtctcttgtagattcagggttgggctgctgaaactgaaaagcagaagcagaaacttctaaggattgcaaaattataacataaactgactttttaaacataaactgatttattagccttggcatatctcaaagaaattaggagattaa

SEQ ID NO: 186821 - DNA, 581 bp, Homo sapiens
agctgggtattgggccacacacctgtgggacctgtggtcctagctactcaataggctgaggtaggaggattgcttgaggctgggatgtcaaggctgcagtgaggcactgcattctagccaaggtgacagagtgaggtcttgtcttaaaaaaggaacaaaataaataaataataaataaataaataaacattctgtaattccctgaaataaaatgttcatttaaggcaatctttggcatttaagccaactgttgtgacaaatttttatgataagactgagtaacacaagtaacaatagagtaagctggctattccgatgtcactggagagttttttaacataaatttttwaaaaaagctcaaactttaaatctttagcataaataataataaagaacaagaaagccgcgatgtttatcctaaaaaatatcttaatgtctcttgtagattcagggttgggctgctgaaactgaaaagcagaagcagaaacttctaaggattgcaaaattataacataaactgactttttaaacataaactgatttattagccttggcatatctcaaagaaattaggagattaa

SEQ ID NO: 186822 - DNA, 553 bp, Homo sapiens
aattggtgcctgactcacagactattgttgttttgctttacttattttaagatgcaattttatctcttagaatagttttaattgattcttcaggaaccattcccacccaggcccattgttgggaattttatatctgcagtctctttgatgtgaatgaagtactttctctggctgaatataaggttctcattggcttcaaattgttgatgaatatttcatttatatttttaaataatatttattgagcacccattatgtgtcagaaactcttctaagtggattagcgaraaaagatttccaatttggaaatatatattttaaaggaggagacaaaacaataaataatagacataattaataagtagctaacataatatgttagaaagtgacatatactctgggaataagaattaataaagcagattaaagaggattgggaatgcttttgtgggactaagtcaaaattttaagtggggtgatcactgtagttcttattgagaaggtaggttgcagcttctcccattcctacatgctcaccctttgcaatgtgggt

SEQ ID NO: 186823 - DNA, 464 bp, Homo sapiens
gtaaagaaatctcattttgcattctggaagatgacagcccagctggaggtaaaactttcagctttccaaaccctttcagctcaggttctagctgaggctaaagacttccarccaagagtaattgtagaccaccgagcttcagttgagcaggcatggacaagaagacaagtagccaacccacataatcatgatgaaaaacaaactgtcattgctttaaaccaccaaaatttgtggttatccatagctaactgatacactgacattttttaaaggcttggaggaagtcacagtgtgtgccctgtggatggctgaaatagtaaatatcctgtgaaaatcccctaaagcacaagggagactatagggttgaggaagggagaggggtaggatgacaaggagaaaagggagggatgtggaagggaaaacccagattatgtatactattgtaaatactttggcttttactt

SEQ ID NO: 186824 - DNA, 408 bp, Homo sapiens
ggcttagtaggaaagggtgatgaaccytataagggaagaggacagcttggacaaagaacagtagtctgtggatcttggggctttgtgggaaatgcaagtaagtaagattgtctggagcagaactgtgcccagatatttacaacatgacatgaaggagcttattggctgggtcactcatgtaaagaggttgagaaatacccagaaacaggaatactgaatttcagctactatagcatcttctatgagatctcctgaggaaataaacacccaggaaagatccaggaagaggcagttatgtttattagtttattaatgatagctgatattgtattgccatgcagaatttgaagaatttcctctgaactatttctttaatacaaaataaaattcagaagaacttaagaattc

SEQ ID NO: 186825 - DNA, 409 bp, Homo sapiens
aggcttagtaggaaagggtgatgaaccctataagggaagaggacagcttggacaaagaacagtagtctgtggatcttggggctttgtgggaaatgcaagtaagtaagattgtctggagcagaactgtgcccagatatttacaacatgacatgaaggagyttattggctgggtcactcatgtaaagaggttgagaaatacccagaaacaggaatactgaatttcagctactatagcatcttctatgagatctcctgaggaaataaacacccaggaaagatccaggaagaggcagttatgtttattagtttattaatgatagctgatattgtattgccatgcagaatttgaagaatttcctctgaactatttctttaatacaaaataaaattcagaagaacttaagaattc

SEQ ID NO: 186826 - DNA, 584 bp, Homo sapiens
ttgttttgttggatgaaaatcataatgatagccagatcttcttaggatgcctttatcaactttggttttgttttgttttgagcagacttaatgaggcaaataaasatttatcagttccccagacacctttttactctttagcacggaattggagtgtaacggttgctgatgaagaatgacagagcattttggttagtgcacataaaactgttgtttgtacagattataacaaatatattttaaacttaatttcaagtttcctttttccgctccctatgaaccttttatttcagaatgcttctcacagccaaaatgctttaccaaatggaatggacacaccattgcttctgagacgaaattagcctccaagatgggctgcctggtgctcacactgtcagcaccaccatggtctgcaggccagttgccagtttttaacagtgtccagggagatatcagcttcctaactgatttcctccctcttcccaacctaattattcggagaccttcaagctttccagaaatatctgcaattagtcagatggtatctagggctttgtttaaaattacaatagaaaatttatcaa

SEQ ID NO: 186827 - DNA, 419 bp, Homo sapiens
gtctaggcagcaagcaaggtgaagctgttgggcagttacagtggtgggctttttgtttagaagttgactttctttcacatgcaattcttacaacttattttttattgtgtagagattatttggtgactttagatatttaaatgctggtctttttaaaaaagatgaacctgtcaatatgcatttctgtctccaaargagaaaaatgtagcttgtgccaagtcatactttattacatattggtgatgtcttattgttgtttgaatcattaattataagaaattctcatttataaaggtgtgcttggcatatcctaaaaacacaaaaaattggtctgcattagtgtgaaaataattccacatgtaccttgcttcctaaagtataaataacatggggatagccatgatgtaggatcagaattc

SEQ ID NO: 186828 - DNA, 419 bp, Homo sapiens
gaattcccatcttgataaatctggctctgtctaggcagcaagcaaggtgaagctgttgggcagttacagtggtgggctttttgtttagaagttgactttctttcacatgcaattcttacaacttattttttattgtgtagagattatttggtgactttagatatttaaatgctggtctttttaaaaaagatgaacctgtcaatatgcatttctgtctccaaaggagaaaaatgtagcttgtgccaagtcatactttattacatattggtgatgtcttattgttgtttgaatcattaattataagaaattctcatttataaaggtgtgcttggcatatcctaaaaacacawaaaattggtctgcattagtgtgaaaataattccacatgtaccttgcttcctaaagtataaataacatgg

SEQ ID NO: 186829 - DNA, 529 bp, Homo sapiens
ctccagagagaaccaataatatgccctcacatgggaraagggaagaaaggggtgaactcatccccttcaaagtcttttataaggtcactaatcctattcaggagggctcctttctcatgacttaatcacatcctaaagaccccacttcttagtactattgatatggacaggagacaggtaaatactgggtagaagagagcagttccacagcaaaggccccaccctcaagcatggatacccacagccctaaatgggaacaggcattcctgttttcacacccagaaagttgctttttggcccaccacgcccacctatcctgtacccatataaaccccaaatccccagctccaggtgaatagaagagcataagagtggcagaaaaggagagaaaagtagaaatctcaggagcagttctgctggggaccattggcaaatcggccgctggatggccaaactccaggggaagagcatcttaccactccatcccctttccagctccccattcatctcactgagagctaactcacca

SEQ ID NO: 186830 - DNA, 373 bp, Homo sapiens
aaaagtaaaaccatgtgtctaaacatatggcatgttcattggcagtgtgaatgctcattatatgagaaatatcatccagtttgtcaggaaactgaatcaaatatttcctgccatgtaagccaaagrgctcaaagcagtccccctaaggtttatggtgaattcacctgctgaaaatacttaatgctaaggataatacagaggtaagaagctaaaaccataaatgaggaaaagtaaaaattctaaaatcagtacttataagtccaaacctcaaatggatgctcttaccctactaggaaaaaaattggacaatcctggtaattagcaggttggatgaagactagaataaaaatggtgccaggcatttagccacaga

SEQ ID NO: 186831 - DNA, 373 bp, Homo sapiens
aaaagtaaaaccatgtgtctaaacatatggcatgttcattggcagtgtgaatgctcattatatgagaaatatcatccagtttgtcaggaaactgaatcaaatatttcctgccatgtaagccaaagggctcaaagcagtccccctaaggtttatggtgaattcacctgctgaaaatacttaatgctaaggataatacagaggtaagaagctaaaaccataaatgaggaaaagtaaaaattctaaaatcagtacttataagtccaaacctcaaatggatgctcttaccctactaggaaaaaaaytggacaatcctggtaattagcaggttggatgaagactagaataaaaatggtgccaggcatttagccacaga

SEQ ID NO: 186832 - DNA, 606 bp, Homo sapiens
aggaggctgttaaaagtaactctgccccacatcctctcccaggtcctctagctgtggatgaagtctgcacttagtgctacaacatagtatcaggtgaattatgtgtgcttctacattccttaggacatcagaagaatcttgactcaatcctaatctctagtttgttaaaataattaatctttttatttatagcaaacatattctgtgaatgtcaaaataataaattgaatcactgactggctggtaaaaatttgaaatagattttatagtaaattttctatttgcttgaccaggtactacctgatgttttcaattaatcaaacaaattgcatacctgcagacactattaaaaaacagagagccttgaatatttccccaatacccaatatctattaartaatgtctatgtgacttttgtttggtagaagaaagacgaaggtatcttggttataccagatatctaataggaaaggttacaaatttaattactttatggaactaatgtacagatatgtattcatcttcagttcatcattttggtttgggctacaaaggaaataaatttattgcaactctaatttgaatggctaatcttagccaacccaa

SEQ ID NO: 186833 - DNA, 232 bp, Homo sapiens
ttttccaacagaggcaatcagatatgcatttacctcagtgagcagaaggatgactgaatagaatgggaggcaggtttgccctaagcagtttctagcttgactttccctttagctcagtgatttgggggtcccacgatttatttttcttttgcactacagtacacytgttgttagattctagtcttgcctcatgtttttgaatttttattattttctacagcatggactgaat

SEQ ID NO: 186834 - DNA, 510 bp, Homo sapiens
ggattgatactttctaggaaatatcttgagatgctaatgagctgtgatggttaatactgagcgtcaacttgattggattgaaggatgcaaagtattgatcctgtgtgtgtctgtgagggtgttgccaaaggagattaacatttgagtcagtgggcttggaaaaacagatgcacccttaatctcagtgggaaccatctaatcagctgccagcacagctagaagatagagcaggcaggaacatgtgaaaagactagactggcttagcctcacagcctacacttttcttccatgctggatgcttcctggcctcaaacattggactccaarttctttagttttggggctcagactggctctccttgctcctcagcttgcagatagcctattgtgggaccttgtgatcatgtgacttaacacctaagaaactcccatatatattctattatatagatatattctattatatacccataactaataggagatatatatatatatatatatatcagg

SEQ ID NO: 186835 - DNA, 422 bp, Homo sapiens
atcgagtttgtgttttataagtgaagtcagatggggtaatggagcccgcactgggatttggatcatctcctcacagtgagtctcacctctcacagcctccctatgttgttcttgcctgggttggtggctgcccagtctcttttctctggtgacctgattattaggctttatgcctcccttctgcatcctgggrccactgccacctgctgccaggggcaataaccaggttgcattggtggatagagaagggaggatcatgttctattattgcagtttctcttagtgggggctgagcatgggcacaagaaagttcagggtcaagcccaattaacggtgtcatggggaggaggatgaggcaatgactgtcctctcccctgtgtcagcaccatggggaatttgacaggaggcttaatgagatcctc

SEQ ID NO: 186836 - DNA, 435 bp, Homo sapiens
gagtgtgaaactaactgaatctaagctgataggaaagtgtggcaccctctcatcataatacctcgccctggtaaagcatcatgtggtctgtaggaaactgtaacctcctggtttcacacctattaaggaaggagagatattggaccatgtgtccaacattctagcttgtcatggaagctacctgagagactgatttttgtctcacttgtytcagagcactgatggaattggatgtactcttcatgcctaatggctcatgagaaaattaaataaccaggcagtttcctgcctgctccagaagacttgtgccacagaagacagaggctgatacaactcagtggcctctgcctcaagggataaagagaagagtaaagagtatgtcaaatattctacccttatcaaggggctgcctaagggtctgccttttgtatagcc

SEQ ID NO: 186837 - DNA, 566 bp, Homo sapiens
aaatatccatgtcttaatctacagaacttgtcaatatgttattttgcatggagaataggctttgctgatgtgagtaatttaaggagagttaatctggattatccagatatgcccaataaaatcccaagagttgttataagagaaaaggggaggcaggagagccagaagaaacctgtgaagacataagcaagtgtcagtgagagagagagaaagagttgaagatgytataatacttgctttaaagctggaaaatgggttacaagagaaggaattcaggcttctaaaagctgaaaaaaaacagaatctcctttagagtctccaaaagaaaagcagccctgtccacaccttgattccagaaattgtgacttccagaactgtcagatgataccattatgttgttttaattttgtcagatatcctgctaaaacattaatagttttagtaccactttgaagtattattatactcatatttttaaattaagaaactgaatcttattgttgtcaataaatttgcccaagatcacaaagctgctaagtaatagaatgtagatttgaaccacagta

SEQ ID NO: 186838 - DNA, 566 bp, Homo sapiens
aaatatccatgtcttaatctacagaacttgtcaatatgttattttgcatggagaataggctttgctgatgtgagtaatttaaggagagttaatctggattatccagatatgcccaataaaatcccaagagttgttataagagaaaaggggaggcaggagagccagaagaaacctgtgaagacataagcaagtgtcagtgagagagagagaaagagttgaagatgttataatacttgctttaaagctggaaaatgggttacaagagaaggaattcaggcttctaaaagctgaaaaaaaacagaatctcctttagagtctccaraagaaaagcagccctgtccacaccttgattccagaaattgtgacttccagaactgtcagatgataccattatgttgttttaattttgtcagatatcctgctaaaacattaatagttttagtaccactttgaagtattattatactcatatttttaaattaagaaactgaatcttattgttgtcaataaatttgcccaagatcacaaagctgctaagtaatagaatgtagatttgaaccacagta

SEQ ID NO: 186839 - DNA, 221 bp, Homo sapiens
tactacattctaggtaaaggatattgttactatcctcaagttacacagaaaacactcaaggatgtaaaatcaatatttatctcaaatttgttgactgctactgctatcttttttgaagaattaaaagataaattaaaatttctaaaaatatgccatatatcaataatttacaatagctygatcagccaaaaaatccaccttgagcttaaagctagagtttg

SEQ ID NO: 186840 - DNA, 622 bp, Homo sapiens
tcctgccatgtggcagaacttaccccctatctctttcctgtcctctttcctgtcccctctcctgtccactctgtcacctctagcaaataaaaacaaaacaaaaaaccccataagtttgtgtcatttcctyatgcaggggaaatgagctcttaagcttttactttctaaactcagacctaaacccatcaaggtctttagcaggacaacaggcctttcatgtaacaagacgctcccctccttagaaatagaaagcacataaacaagcaaaaattgcccttggttacatatggaatcagtgtggattatggaacatgagaaaagacctgtggtggacattaactagcacagggtgtcctggttcccaggaaaaaaggcctgggcttgcaagcatgatgacgagggacaaagggggcagggtctctgcagggcatttgcaggcaaagtggcttcccttttgctgactctgcattccaggcggctgtcaccacttgctctttggaaaggggaccgcagaaaaacgtgccttgcttagaaatgacaagctcaccaagccctgctggaggatggcttctgagtgacaggcacatcgtaaagagtccctgcccaaagcttgtggtctcag

SEQ ID NO: 186841 - DNA, 601 bp, Homo sapiens
cttgtgtccttttatttttaattaaaatttttattttgaaataattgtggatttgcatgcagttgcaagaaataatacagagaaattttgtgtactctttacctagtttcytccaatggggaaaaccatagtataatatcataactgagatattaacactgacactgctaagacacaaaacatttccatcaccacaaggatccttcatgttggccttttagagccacacccactttcctcccatcccttacccttttcttaatcgctagtaaccactgatctgccttcttatactatgagtctttcattttaaggatgttgtaaaaatggaatcatattgtagaagccttttgagattggctttttttattcagcataattatctgcagattcatctaggcttagttttattactgtagttatataagcagatttggaatgggatagattgccgctttattctttttcaaaagtattttagctatttcagttcctttgcctttccatataagttttagaataattttgtatatatctaccgaaaaatatttatgagattttgatagaagttgtgttaaacctgcatatcaatttggggaga

SEQ ID NO: 186842 - DNA, 534 bp, Homo sapiens
gtgtttttctgcttccactccacagaactggaacttgaaaatcaatttgaatggtgtttgttcattaagctgttatttaataaccctgaaagccagccaaggtacataaccccaggtaaaagtcaagttacacttaaggaaagaactgtaatgaccactccctgaagatacataagygtctggccttcattgaaagcctgagtgcagagtctggagctgctctttgaagaagaccttagtctgtggccatgcaggtaggaagctatttctgtaatgagtcctggccttctcagctcagttgttatggacatgtattagttactctcagaccagtgctgtccaataaaaatacaatgtgaacattatatttaagcatgtaattgaaattttttctagtaaaagcaaaaaagcaagtgaaattaattttagtaatatggcttatttaattcaatatgttcaaaatactgtcatttcaacatgaatcaataaaatgaataactattgaggctgggtgcagtggctcacgcctataat

SEQ ID NO: 186843 - DNA, 481 bp, Homo sapiens
gaagaatgcattcgggataacattttttgtataagattaaaaatagctaggcacaaaaaacctaaaacatctttcaggaatatagatggtgaaactacatgttgaaaagtgaataaatgatatacacttgagtcaggagagcgggtgggcttcactaaaggacaggatgcagaaggggcacataagcacatgtaagctactgccaatattttatattatttaagaaagttaagtgatgcagaaggggcacataagcacatgtgagctactgccaatattttatattatttaagaaagttaagtcaawaaattaaaaatgacagtattttatgagaaaaaaggattatgattaatgtaattctgtgactataaggcccaaaatgcatttattttctctcctatgctcctatacgtttatctctaattgttagtgattgagctattgatggacaagaaattgcctctgtgtcactgattaaat

SEQ ID NO: 186844 - DNA, 532 bp, Homo sapiens
ttcagggaacctatggggatatgctctgatgattccaggctgttatctgacaagtgtgtcaggagaaatcrcccaaagtggtaaagttccacacagcgtaaaccttcaagagaatggactttgacagtcaacctcatgtggcctgtatccctgaattgtgggtgtgactgcacagtttgcttagactaaacctcctttgccattactaagttcatgaagaaaatgaaagtcaagattcttaacagaagaagagctaaagcttgtagttcaaagaagagagattcaagaattgcataatggacccatgttgatgggtacagagagctggagcagggggcaaatctcatagatcttggggcaaacaatatacaagaggaaaggagcatagtgtgtcccaggctggagagaggaggtgatggtaacatcaggcttaccaagggttggaggtgtagaatgggaagactgcaggaaaacctagggactatctagtcctagtcatttgtgctgtggacagagctctgagttattaaag

SEQ ID NO: 186845 - DNA, 562 bp, Homo sapiens
gctatgtgtttgtgtatgtatgtgtgtggttactaatcttttgcaagatccaaatatttttcccattctgtaggttgccttttcattctattggttgtgtcctttgatagagtttcaaatttgggggtagtccaatttatctgtttacatttgttgcctgtgcatttggtgtcatatccaaaaaccattatcaaactcaatgtcatgaagctttcccactacatttttttcctaacagttttatgattttaggtgttacctttaggcctttgatctattttgaggtgtatttgtatatggtataaggcaagggaccaactccatatttttgcatgtggatattcagttttcccagcaccataagttgaaaagactgtcctttccccattagatggtcttggcacccttgttgaagattcaatcaccatataattggacrtttatttctgccatctctattctattcattggtctatatgtatttctttacactagtcccacactattttgattactgtagctctgtagtgggtttaaaatttggaaatgagacttccaactt

SEQ ID NO: 186846 - DNA, 384 bp, Homo sapiens
acatgtctaggacttgtaactcacaagttacggggcttgaggacaggatggatggtggtgccattaattaaacagtagaaatacaggaggaaaagtactctgggggaaagagcaggtaaatgcaaagatctgttttagaccatttgawttggaggttcctttgggatatctaagaatacaacgtctaggagtcaactggcagtgcaggtctgaaattcaaggaaggttgaatccagagatctagctttgggaatcatccataagcaggtgagtgcctaaggcaggcatggtgaggcagggacagaaatgtgtggaagctcatggtgggggaagtgtggagtcaggagtcagggagggaacaggaagtaaggcctgaaccaggag

SEQ ID NO: 186847 - DNA, 446 bp, Homo sapiens
gtggctcacacctttaatcccaacactttgggaggccaaggcaggtggatcacctgaggtcaggagttctagaccagcctgatcaacatggagaaaccctgtctctactaaaaatacaaaattagctgggtgtggtggcaggcacctgtaatcccagctactcggaaggctaaggcaggagaatagcttgaacctgggaggtggaggttgcagtgagccgaagtcaaaccattgcactccagcctakgcaacaagagcgaaactccatctcaaaaaaaaaaaaaaattcatctttaactgggtgcggtagtttatgcctgtaatcccagctacccaggagaccaggagtctgaggctgcggtgagccatgattgcatcactgtgctccatcctgggtgacaaagatgacccagattctaaaaaaaaagcaaaaaacaaaagaattc

SEQ ID NO: 186848 - DNA, 578 bp, Homo sapiens
atgtttttgacttttccttcccactctctttctcactgacccagacccctttctgtggaacagagaaatggtaggcagtgtatcttagccatttattaacggggcccagacatgatccccaggactttgctgacaggtctaaataaggctaatctacatgttgccaccaggagctctattaaaaaattggacagctgrgggaaaggctggcctactgggcttttcactgttctgactgggcagcccaacatcctattgccctgatagaatagaactcctcatatctgccttgctttctaccaggctctggagccacttattagctctgttttaagaaaattattgatattctgtgtctcagttttctcaagcatgaaatggagataaaaattgtacttcccttaaattgtggttataaggattaaaagaataaatacatgtaaaatgctgaaatcaatatttagcccacagtactcttaaatgttagtgattagtaatatccatagcaagcctcttgcttcaagccctcttgggaacttcctaagctgcaaatatgtgagtaatatcacagcctgtat

SEQ ID NO: 186849 - DNA, 594 bp, Homo sapiens
tctccctatattgctgcaagctttttgctaatttccagatctgaaaaagctgattctgacaatatttatcagtacttttattgcttttatggaggataaaattttcagagatccttattctgccatttttgctgacatgtgtaaagtgatcatttctaattgtaaaattccttttgcatttattagctggaatactttacaggacttttcctcatcaacygttagttaccatttaatatagtttgtaagaatgatagaataaatgcatggcaagaatctttacttctcaaatttcagagattttgatgggaaattatatttagagatcacaatcagtgtctagatgtgctccctgctatggaggtgtcattacttttaggcttttttaatgggcaaatacatgaagtaattattttttagaaagaaaatctgagattaactcaaatcattaattcatactgatttttcctattcatagttgacagagtattattatcttttgttctgcttctcttgtacactgaaattcttggtttttgatattaacaattatttacttatatcacaatatacatacattaatttaaaaataat

SEQ ID NO: 186850 - DNA, 505 bp, Homo sapiens
atgggaaagtttgctaaaatttatatgtgccaaaataaacatgtaaaaagagttaaaagttgtataaaacttttcttaacatataggacgcctacaaataratgaataaccacatactaaaaaatggacaagggacatggacagttcatagaaaatgaaatgtgaatggctcttaagtatttaagaagatatctactattgctcataaaaagaaatgcaaattaaaactgcaacaaggtacagtttttttctcttctccaattagtgaagatcagtaagcttgatactatactatgtttggcaagcatgtgggaaaacagatactctctcatgtggcttttgagagtcaaaactgccacaaatatcatgtaggatgacaatttggcaatatgtataaaatttcagaaacactttccttgacccttttaagaatttatctgacaggctgggtgtggtagctcacgcctataatcccagcactttgggaagctaaggccagtggatc

SEQ ID NO: 186851 - DNA, 505 bp, Homo sapiens
atgggaaagtttgctaaaatttatatgtgccaaaataaacatgtaaaaagagttaaaagttgtataaaacttttcttaacatataggacgcctacaaataaatgaataaccacatactaaaaaatggacaagggacatggacagttcatagaaaatgaaatgtgaatggctcttaagtatttaagaagatatctactattgctcataaaaagaaatgcaaattaaaactgcaacaaggtacagtttttttctcttctccaattagtgaagatcagtaagcttgatactatactatgtttggyaagcatgtgggaaaacagatactctctcatgtggcttttgagagtcaaaactgccacaaatatcatgtaggatgacaatttggcaatatgtataaaatttcagaaacactttccttgacccttttaagaatttatctgacaggctgggtgtggtagctcacgcctataatcccagcactttgggaagctaaggccagtggatc

SEQ ID NO: 186852 - DNA, 607 bp, Homo sapiens
ctgtattgtttagggaatagtgacaagaaaattaatctgtacatgttcattacaaacacagcaatccattttttttctgagtattttgatctgtgattgattgaatccacagatgctggaatccatgaatacccatggggggctgactataatgttgtstatgtgcgtagaattttgtaattctcaaccaaggacacgtatagtccttgaatcttggtaggagtcttggggacttttcttaaaatattttgaccatcttctcaagatcttgactcctacccccacttgtacacgtgcacatacttgtgcacactcacacacaatacccttccttaagtcctgctcaccagcttgcttcctattgcattgagagcattcaacctgtagaccaagaacttctaccatatttttccacctctaccccaaaacacagtttagacatatccattcttttcattcttcagagtcatctcaccacttccataaattatttcctaattgttccctctgcctctgttcttttttttttttctgatgatcagttcaaagtacctctgtatgcccattcttaagtgcaaatctgaccatctataccccttcttaatat

SEQ ID NO: 186853 - DNA, 538 bp, Homo sapiens
cacatccgaaatcatacaggtacagagytgccattgtgaccagtctttccagttccttttatgatcccttaaatacagacactgaaatggaagccatagccaaaacaagcagaaagggctttccacttgtcttttaaaactccctcctcctttctccttcaatgtatatcccaaagaaactatgcaataaaactcttgtttaaaatctgttggctattctgaaaggacttcaaatcatagcaaattcaattttctacatttccagtttgagttattcactttagtctccctttgtacttcaaaaggagagttctcatgcttaaggttttcatgtttgtgctaaagcaatttcttgtgaaattaagttcattatccaaactaaaaactcacaagatagtaaatctttgtcttaatttccccgtatacttacaatattagtccctaagatttgagatctttttgagaatcttataaaagcaactggtcagtcacctcttctagtaaaatttatgtaaaattttcagtgagctcatacatt

SEQ ID NO: 186854 - DNA, 494 bp, Homo sapiens
taggacactctcactttagggacaccttgttcttagttttcctctatctctcattgctccttcttaatggccctcctctgcctcggcttattccctaaatgctggtcacctcagggggctggactggaccctcttctcttcaacattctttcatctatttatttatttatctttaacatattgttctaggttctagggatgtagggatgaacaagatagtctggattccttcaccagtgaagtttatctagacaaacaagtagccaaataaacaaacaatttcagactgatgagtgctatgagggaaataaatctgagtgatgagataaagaggactaaaacaggactatttagatagagcaggtaaggaaagactctcttgatttgctgatatctatctgaactgaatgaaaaagccaatgatagaatgaccyggaagaatgattcagctagagggaacaaaagtacaaaaggcactgaagcataaattagca

SEQ ID NO: 186855 - DNA, 517 bp, Homo sapiens
gggaagggcttctctttgcaattccatttagatgtgtcagccaaataaaaaagaaaaaatgaatctgtgcataggaattttgatcttatttcatttctcctgagatctgaggggaaggataaaggtagataatttcatcccctaaactagtratgtttctctgtggttcagtaaaatcttctaggttcaaggtaactgtcaaatgatgaacgctttaaagtagatgctgacatctttgaagcttctgtcatgggaggtcaatcatcattgaaaatacagaggatagtcaaagaagggcaaggaatgtgccatatcatgtctctgcatgatggcatcttatttttttctctctctgattctaaaaagagcatgacataacagtttcgcatttctaaagccttagcaaatttaaattatttagtgcttatttttctaccccaaacaactcatctataataaaaacttttaaaaggattgaaaagttggcctctgaacctatatgctgggtctgtactga

SEQ ID NO: 186856 - DNA, 517 bp, Homo sapiens
gggaagggcttctctttgcaattccatttagatgtgtcagccaaataaaaaagaaaaaatgaatctgtgcataggaattttgatcttatttcatttctcctgagatctgaggggaaggataaaggtagataatttcatcccctaaactagtgatgtttctctgtggttcagtaaaatcttctaggttcaaggtaactgtcaaatgatgaacgctttaaagtagatgctgacatctttgaagcttctgtcatgggaggtcaatcatcattgaaaatacagaggatagtcaaagaagggcaaggaatgtgccatatcatgtctctgcatgatggcatctwatttttttctctctctgattctaaaaagagcatgacataacagtttcgcatttctaaagccttagcaaatttaaattatttagtgcttatttttctaccccaaacaactcatctataataaaaacttttaaaaggattgaaaagttggcctctgaacctatatgctgggtctgtactga

SEQ ID NO: 186857 - DNA, 572 bp, Homo sapiens
ttcagtattggtccatgtccgtctccccacctggcacacaagctgttctctccatccttcccgttgatcccctgtagagccagcggaatgccaaccttgtccgtcctgtactcagcaagttcttgttggctggtcaacatgtaaagatgacagatgtgtcattgaacggaatatcctatgtttaaaaaaaaaatcctggttatttcaacattgataaagggctatgtgtccaacacattgcttagatactagagaatccaacttggacatggcagagtccctatctgtcctccaacgaacttacgtgttcaagcatttaaaaaattggtgaaggaggttcagccagacttgggtgaactatagtattataggcaggaccttggagttttacctgacattcagcaatccctgatgtggcccttttattgctgacacacccccaatttcatattcaaattgagatactcttacctcaccaggcacgtcccacaagcttsaaggtatttcctcctgtggcttctccctctggatgtggacagaaaatgttctacttgttgccatgatttctaaat

SEQ ID NO: 186858 - DNA, 488 bp, Homo sapiens
cattccccctccttcccacaatttaggagagtgaagccattccaagctggaaactgtaattttgaaatgatgcaaaaaattgaagataatgaaaaacatctgagttctgatacctggaaatgtcagttgccttatccaaaggctcctttgtaggaaaaaaagcaacgatcaagagggggttttctatcagaaacagctgctcaacagaacagacatcacccccaaccccacctcccrtctctcccaccatcaagggaggtcacttatttactagaacagtcacgaacaaagcatgagatgggaagataattttccagtcccctagtggctctagctattgtttgcagttaaaatgtaccttccaggaataaatgaagaaactcaagggtttgcaagcaaactgctctgacagtgtctaacccttcacacacacacacacacacacacacacacacacacacacacacacacaccccactacaagccaa

SEQ ID NO: 186859 - DNA, 557 bp, Homo sapiens
  misc_feature (1)...(557): n = A,T,C or G
tccatccatgttgttgctaatgataggatctcattttttttttcctatggctgaatagtactccattgtgtatgtgtaccacagtagccaagatttggaagcaacctaagtgtccatcaacagatgaatggacacacatatacaatnggtacacacacacacacacacacacagacatatatataatacggtagagatatctgcactcccatgtttattgcagtttacttcatatatatgatcttgccattttgtgaatagtgctgcagtaaacatgaggagtgcagatrtctctttaataaactgatatcctttcttttgggtgtatacctaggagtaggattgctggatcacaaagtagctctaattttagttttttgaggaatctccaaactcttctccatagtgtttgtactaatttacattcccacccacagtgaacaagggttcccttttctccacatccctgccagcatttgttattgcctgccttttggatataagccattttaactggggtgaaatgatatcacattgtagttttgatttgcatttct

SEQ ID NO: 186860 - DNA, 581 bp, Homo sapiens
aacaaggctaagacaccataaactcatgcatatttttatgtgccgagatttaagaaaagcagctcactgaagaggatccccgattctccatgtaccacctgaaaatgacctcaacttatttctgcagattgctggacactttttctaaaccttgatttctggaattttctctttccctttttgtaaaaaatgaacaattatctgacctttcttcagctctcaggaatctccatcgattctccttgaattgttaaaaacgggatcaatttttcaagcatttcaggaagactaccctaagatctacaggtacagtctggttttagtcaactctttttcagaatggagaggccatggtcatatgatcatacagagtctttctgcagagaccaaagaacagagtgaagggcagagcgagtgagtgtgtgtgtgtgtgtgtgtgtgtgtgtgtgtgtgtgtgtgtgtgtgtgtgtgtgacagacagaataaaaatctccagtttttaattgctttttaaatctatcacctgcaaataactaatcaaattttagtagatattcttttcttctacccyaaaaagaatt

SEQ ID NO: 186861 - DNA, 546 bp, Homo sapiens
gttggtaccccctaagtctgtaagagtcacagcattactgggctcagggtgcctcttaatgcagatacagctkcagtgaccaaagagttagatcaaaatattcaattccctttaaatacttagaaaggcttcccaagaaggatgggtacaaacaagcccaggctgtgaagactacaacaaacaactgactcttcagtgcccagataaatgatgcacatccataagcatcatggaccatccaggaaaatgtgaccttaccaaatgagctaaataagacaccaaggaccaatcctggagtgacacagatatgtgacctttcagactgagaattcaaaatagctatattaagggaactcaaaggaattcaaaataacagtgaaagaattctaaatcttatcagataaatttaacagattgaaattttttaatcaagcagaaattctggagctgaaaaattcagttgacatattgaagaatgcatcagtctcaaaagcagaattgatcaagcagaagaattagtgagcttgaagacagactatttgaaaa

SEQ ID NO: 186862 - DNA, 551 bp, Homo sapiens
acaaagttggtaccccctaagtctgtaagagtcacagcattactgggctcagggtgcctcttaatgcagatacagctgcagtgaccaaagagttagatcaaaatattcaattccctttaaayacttagaaaggcttcccaagaaggatgggtacaaacaagcccaggctgtgaagactacaacaaacaactgactcttcagtgcccagataaatgatgcacatccataagcatcatggaccatccaggaaaatgtgaccttaccaaatgagctaaataagacaccaaggaccaatcctggagtgacacagatatgtgacctttcagactgagaattcaaaatagctatattaagggaactcaaaggaattcaaaataacagtgaaagaattctaaatcttatcagataaatttaacagattgaaattttttaatcaagcagaaattctggagctgaaaaattcagttgacatattgaagaatgcatcagtctcaaaagcagaattgatcaagcagaagaattagtgagcttgaagacagactatttgaaaa

SEQ ID NO: 186863 - DNA, 546 bp, Homo sapiens
gttggtaccccctaagtctgtaagagtcacagcattactgggctcagggtgcctcttaatgcagatacagctgcagtgaccaaagagttagatcaaaatattcaattccctttaaatacttagaaaggcttcccaagaaggatgggtacaaacaagcccaggctgtgaagactacaacaaacaactgactcttcagtgcccagataaatgatgcacatccataagcatcatggaccatccaggaaaatgtgaccttaccaaatgarctaaataagacaccaaggaccaatcctggagtgacacagatatgtgacctttcagactgagaattcaaaatagctatattaagggaactcaaaggaattcaaaataacagtgaaagaattctaaatcttatcagataaatttaacagattgaaattttttaatcaagcagaaattctggagctgaaaaattcagttgacatattgaagaatgcatcagtctcaaaagcagaattgatcaagcagaagaattagtgagcttgaagacagactatttgaaaa

SEQ ID NO: 186864 - DNA, 534 bp, Homo sapiens
tttctgttcaaattgtgataaaataagtctatgttttcatgacattggttgaattggcaaagagggagaaagttggtagattactggatgtcatttttacactgggacagcaataatttaactggatacatgaaattcttggaaaactacacaacaatattccagtaagtcaaaaagggaagttggactgggaaaactcttggacttaataaatcgaagtcaaaatagcttcctattgcaaactttacagagccattatcaccatggatacacattgctaaggctcttccctgggcctgggaatagtcccatgaatgtgagggtttctgcattagcttcatgtaaagccatctctgctactgaaacaagcaactttctgcaataaggacaatgatgtgaaattctgagtgtctctatattagttcattctcacgctgctaaaaaaaagacatacctgagactgggtaatttataaagaaaaagaggtttaaatggacgcacacttccacayggctggggaggcctcacaatcac

SEQ ID NO: 186865 - DNA, 516 bp, Homo sapiens
aggctgcagacagttttggatacctaacaagtgagaggatactgtttacagtatttcctgagaaaactatcactagatggttttaaacaccaaccaaccaaaagatcatggacaaaactttggccagaagcacgacagtgaaattgagtacatttaaatgcaaaactaagytcattgcttgcctcctctccatgagatgacagctgaagtatatctgtcagaagtaagaaatcaagaatggaagaatatgcatatttcaaaatataaaagtaaatgctaaacttaaaccatcttgttgacaaaaattagatgctatagaaaagcgagtatggacaaatacagacaatgtaagccagttgaattattgctcacagtaagtaactaacataatctgttaaaagaaagaagtaactaaggccatgatagtgagatattctataaatatttatttatatttggaacaaaaaatgctgctctaaacatcagaaaaaccacatttcgaaagcaaataaaaca

SEQ ID NO: 186866 - DNA, 516 bp, Homo sapiens
aggctgcagacagttttggatacctaacaagtgagaggatactgtttacagtatttcctgagaaaactatcactagatggttttaaacaccaaccaaccaaaagatcatggacaaaactttggccagaagcacgacagtgaaattgagtacatttaaatgcaaaactaagctcattgcttgcctcctctccatgagatgacagctgaagtatatctgtcagaagtaagaaatcaagaatggaagaatatgcatatttcaaaatataaaagtaaatgctaaacttaaaccatcttgttgacaaaaattagatgctatagaaaagcgagtatggacaaatacagacaatgtaagccagttgaattattgctcacastaagtaactaacataatctgttaaaagaaagaagtaactaaggccatgatagtgagatattctataaatatttatttatatttggaacaaaaaatgctgctctaaacatcagaaaaaccacatttcgaaagcaaataaaaca

SEQ ID NO: 186867 - DNA, 392 bp, Homo sapiens
gaactttggtctttcagttttttctttccttcattatcttgtgctcacagaaagatcatttttatcatcatgtactttgaacatactgaaaaagtccttccttgacattggagcctcttctagctctctctcttctgcttcctttcatagttaagacttgtctgcatgagctgatgcagctttcttgcttcctgtttacatcccactctgacttccaccacaaccactctgttgaaactactcttttcaaagtcacgagtgaccaaggggatcatgtggtttattgtcaatgaactgttgagaatgaaaataatcactactaatgatcctacatggaaggcagaygttatctgcactactccaagcataaccaggttaagtatggtacgcta

SEQ ID NO: 186868 - DNA, 507 bp, Homo sapiens
atatgttttacaatatgtttattacaaagatagtccatttatgtaatttttaaaaagcacaacgtttaaaagagtagacagtaaaaactgaagcttcatctcatcttaaatctccaattccactcctcagatgcagctatatttaacactttcctgtgtatttkctagattggtactgcctaaagtgaaatgtcatccaagccatatatgtaatttaaagtgttttagtagcagtattttaaaattgaaagaaacaggtgaaatttccattactttatttaacccagtatattcaaaatgtcatcatttcaacttgtaatcaaaataataacttattaataaggtattttactttcctttaatactaagccttgcaaatccagtgggttctttgttctatagcatacctcagttcagattagccacatttcaaggacttaatagtcacatgtagttattggctactatattacataatacagttctagatataatgtgcttgatttt

SEQ ID NO: 186869 - DNA, 549 bp, Homo sapiens
aaagtttctggtttaatacaaataatatgatatatatatacatatacatatatttacatacacaaacacacacacacacacatatatttcacagcacaggcaggaggacctacaccagtgccacagtcaaacatattaacatttcttcaatgaagtatgagtattagtatcaagtgatatcaattaagaggtaacttcatttcagtccagtccagttctgcctcaaaggaattgaagccaggtcagatttcattgccaaatggttggtgagaacttcttacttttcagagttcttttaacttcagaattgtggaattcatatttttctggggtagagatgagagtgctgggtgatttaggcagggtcaccctctgattgttcctctccaatggtctctgaaagtaggaaacttcttgactaccatgaactgaagcaggaatatggatacccagccacatcctctgmctgtcatgggtcccaacaagtcacctgacctcagcataattacttattagagtttatgaatttttgatgatcttagtgtgtca

SEQ ID NO: 186870 - DNA, 419 bp, Homo sapiens
ggaattccctgacctcttgcgcttcccgggtgaggcgatgcctctcccagcttcggctcacactcagtatgctgcacccactgtcctgtacccactgtccagcaagccccagtgagatgaacccagtaccttagttggaagtgcagaaatcacccatcttctgcgtcgctcacgctgggagctgtagactggagctgttcctatttggccatcttggaactgcccacggtatagaaatttctaaaacttattcatcttgcataactacaacygtctatcctttgactaatacctgtttccttctcccttctaacccaaatctttggctatcaccattcttttctctgcttctatgagtttgacttctctctgcttctgtgagtttatattccttatataagtgggaccatgtagtattt

SEQ ID NO: 186871 - DNA, 331 bp, Homo sapiens
ccaacttcacttgcattacttgtaataaagagaattggtaaccacgtaaagcctaatctccttcataaagcttctttttctcatcactttcttcatgacatttgttttctcatctttaaaatggagaagttaaaataaatgaagmctggagtcctttttgtcctttgagtataagattctatgtctttagaaaacatctgaaaaaattcaaaagtgcccttgttctttcgtaagccaattgaaccaacatcattcttatattagtaacttttgtgtcatttggaaaaatatcaattctataatggtttctagtgacagctgactaggcgac

SEQ ID NO: 186872 - DNA, 331 bp, Homo sapiens
ccaacttcacttgcattacttgtaataaagagaattggtaaccacgtaaagcctaatctccttcataaagcttctttttctcatcactttcttcatgacatttgttttctcatctttaaaatggagaagttaaaataaatgaagactggagtcctttttgtcctttgagtataagattctatgtctttagaaaacatctgaaaaaattcaaaagygcccttgttctttcgtaagccaattgaaccaacatcattcttatattagtaacttttgtgtcatttggaaaaatatcaattctataatggtttctagtgacagctgactaggcgac

SEQ ID NO: 186873 - DNA, 413 bp, Homo sapiens
ttagttccttccggggctatgagggaggcatctgttccaagcctctcccttcatcccctatcttgtagatgactgtctcctccctatactgtgtctctttacatcttccctctatgcatgtctatatctgtgtccaaattcccatttttgtaaggacactagtygggctgtattaaagtccctcctaatgatctagctttaacttcattacctcagtataggtctgaggtaaagaagttaaagctggatcattaggagggacttttgtacgatactttgaagaagtatcgtaactctaatgagtctgtgtctctatataacctgacccatttttctggatcaagggaatcctcttccactgttgctggcaaactaagtggtttctaagccaatgtatcctctcctcatcattg

SEQ ID NO: 186874 - DNA, 413 bp, Homo sapiens
ttagttccttccggggctatgagggaggcatctgttccaagcctctcccttcatcccctatcttgtagatgactgtctcctccctatactgtgtctctttacatcttccctctatgcatgtctatatctgtgtccaaattcccatttttgtaaggacactagttgggctgtattaaagtccctcctaatgatctagctttaacttcattacctcagtataggtctgaggtaaagaagttaaagctggatcattaggagggacttttgtacgatactttgaagaagtatcgtamctctaatgagtctgtgtctctatataacctgacccatttttctggatcaagggaatcctcttccactgttgctggcaaactaagtggtttctaagccaatgtatcctctcctcatcattg

SEQ ID NO: 186875 - DNA, 646 bp, Homo sapiens
ttgagttgaaattcacatagcatacaattaaccgttttgaaacgtaccattcagtggcagttagtacatttagtggttcatgttatgcagccactaccctgtctagttccaaaacattttcatcatgccaaaagaaaaactctgtacacattcagcaattactctccattctcccctccctttcagagctggcaaccagtaatctsttttctgcctcttcaactatttctagatattttatatcaatgggttcattgagtacatggtcttttttatttgacttgtttcccttagcatcatgttttttgagttttatccatgttgaagcatacatccgtacttcacttctttttatggctgaataatattcctttgtttgtatatatcacaatatgttgatacattcatcaattgttggacatttggtttgtattcacattttggctgcatagactttgttgctctgaatatttatgtacaagtatttgtctgaatgcctgttttcaattcttttgggtatatacccagcagtggaatgttgggtcatatggtaatactatatttaacatgatgagaactaccaaatgttttcacatagtggctgcaccttattgttgttttagaattctttatatattctggatat

SEQ ID NO: 186876 - DNA, 646 bp, Homo sapiens
ttgagttgaaattcacatagcatacaattaaccgttttgaaacgtaccattcagtggcagttagtacatttagtggttcatgttatgcagccactaccctgtctagttccaaaacattttcatcatgccaaaagaaaaactctgtacacattcagcaattactctccattctcccctccctttcagagctggcaaccagtaatctgttttctgcctcttcaactatttctagatattttatatcaatgggytcattgagtacatggtcttttttatttgacttgtttcccttagcatcatgttttttgagttttatccatgttgaagcatacatccgtacttcacttctttttatggctgaataatattcctttgtttgtatatatcacaatatgttgatacattcatcaattgttggacatttggtttgtattcacattttggctgcatagactttgttgctctgaatatttatgtacaagtatttgtctgaatgcctgttttcaattcttttgggtatatacccagcagtggaatgttgggtcatatggtaatactatatttaacatgatgagaactaccaaatgttttcacatagtggctgcaccttattgttgttttagaattctttatatattctggatat

SEQ ID NO: 186877 - DNA, 646 bp, Homo sapiens
ttgagttgaaattcacatagcatacaattaaccgttttgaaacgtaccattcagtggcagttagtacatttagtggttcatgttatgcagccactaccctgtctagttccaaaacattttcatcatgccaaaagaaaaactctgtacacattcagcaattactctccattctcccctccctttcagagctggcaaccagtaatctgttttctgcctcttcaactatttctagatattttatatcaatgggttcattgagtacatggtcttttttatttgacttgtttcccttagcatcatgttttttgagttttatccatgttgaagcatayatccgtacttcacttctttttatggctgaataatattcctttgtttgtatatatcacaatatgttgatacattcatcaattgttggacatttggtttgtattcacattttggctgcatagactttgttgctctgaatatttatgtacaagtatttgtctgaatgcctgttttcaattcttttgggtatatacccagcagtggaatgttgggtcatatggtaatactatatttaacatgatgagaactaccaaatgttttcacatagtggctgcaccttattgttgttttagaattctttatatattctggatat

SEQ ID NO: 186878 - DNA, 646 bp, Homo sapiens
ttgagttgaaattcacatagcatacaattaaccgttttgaaacgtaccattcagtggcagttagtacatttagtggttcatgttatgcagccactaccctgtctagttccaaaacattttcatcatgccaaaagaaaaactctgtacacattcagcaattactctccattctcccctccctttcagagctggcaaccagtaatctgttttctgcctcttcaactatttctagatattttatatcaatgggttcattgagtacatggtcttttttatttgacttgtttcccttagcatcatgttttttgagttttatccatgttgaagcatacatccgtacttcacttctttttatggctgaataatattcctttgtttgtatatatcacaatwtgttgatacattcatcaattgttggacatttggtttgtattcacattttggctgcatagactttgttgctctgaatatttatgtacaagtatttgtctgaatgcctgttttcaattcttttgggtatatacccagcagtggaatgttgggtcatatggtaatactatatttaacatgatgagaactaccaaatgttttcacatagtggctgcaccttattgttgttttagaattctttatatattctggatat

SEQ ID NO: 186879 - DNA, 614 bp, Homo sapiens
tgttctagaaataataggagggggaccagctatttagcttgactgtgatgaactgtgtctctgtgcacccagactagagagcattttggctacaggacagaatttattcagaacaattatcaccaatatgacaacccaaggttatattatcaagaaaaatattttagtagaaaaaggtagcaggtctggataacgggtgtaatttctgtgatgatgagaccatttatggtaataccaaagggagaaaagatgttgcaggtcattgtggggattagggcagatgaaatatcagaaggcagattaaatggtttctaattatagtatgtggcagtcagaattttggcctcatgatttttggccctggtgttaatcttatgactatgttatgttccatggcaaatagayttcgcagaacgtaattaaggttactaattagctgaccttaaaataggaagattaatctggtttatacagttgggcctactctaagttatacatgcctctaaaagcaaacatttttctcccaatggtagcagaaattccaaacgtaagaagggtttgatgtgcccttggtaacttggagattcagagggccacatgtcaaggaaacaggg

SEQ ID NO: 186880 - DNA, 614 bp, Homo sapiens
tgttctagaaataataggagggggaccagctatttagcttgactgtgatgaactgtgtctctgtgcacccagactagagagcattttggctacaggacagaatttattcagaacaattatcaccaatatgacaacccaaggttatattatcaagaaaaatattttagtagaaaaaggtagcaggtctggataacgggtgtaatttctgtgatgatgagaccatttatggtaataccaaagggagaaaagatgttgcaggtcattgtggggattagggcagatgaaatatcagaaggcagattaaatggtttctaattatagtatgtggcagtcagaattttggcctcatgatttttggccctggtgttaatcttatgactatgttatgttccatggcaaatagatttygcagaacgtaattaaggttactaattagctgaccttaaaataggaagattaatctggtttatacagttgggcctactctaagttatacatgcctctaaaagcaaacatttttctcccaatggtagcagaaattccaaacgtaagaagggtttgatgtgcccttggtaacttggagattcagagggccacatgtcaaggaaacaggg

SEQ ID NO: 186881 - DNA, 614 bp, Homo sapiens
tgttctagaaataataggagggggaccagctatttagcttgactgtgatgaactgtgtctctgtgcacccagactagagagcattttggctacaggacagaatttattcagaacaattatcaccaatatgacaacccaaggttatattatcaagaaaaatattttagtagaaaaaggtagcaggtctggataacgggtgtaatttctgtgatgatgagaccatttatggtaataccaaagggagaaaagatgttgcaggtcattgtggggattagggcagatgaaatatcagaaggcagattaaatggtttctaattatagtatgtggcagtcagaattttggcctcatgatttttggccctggtgttaatcttatgactatgttatgttccatggcaaatagatttcgcagaacgtaattaaggttactaattagctgaccttaaaataggaagattaatctggtttatacagttgggcctactctaagttatacatgcctctaaaagcaaacatttttctcccaatggtagcagaaattccaaacrtaagaagggtttgatgtgcccttggtaacttggagattcagagggccacatgtcaaggaaacaggg

SEQ ID NO: 186882 - DNA, 540 bp, Homo sapiens
tgcctggctcaactaatttattatcacttcctattactgacagatggctgactgtgggtgaggcagccgcctgctcctttgcttctggggccaaaattctgtggtcctcagtacttctttgctcatgttcaatcgcaacatcttagactaggttagaagtggcccttcctcctgaaacatctactggtcctaatgttctatgcatttatagacacatatagawgtctgataggggaagactcaattccattcaacagataaacttctggtctctaaatagtgaagttactccattccagccagctttgcgaagggctgccctcattgccacatgtctgcagttttcactttaccttgtgtaatcagaaatgggccaccaagggaaagaaaaacttcttggccgaagaagaatatgagatgaccgttacaatggaatccagattaaagacagaactatgctaaatatagtatatattataaacaattaattggcttcaattcctttatacattcatttgagaaacagacacgtgtcgtgta

SEQ ID NO: 186883 - DNA, 487 bp, Homo sapiens
actgcatagtattccatggtgtatacgtaccatattttctttatccagtctattgctaatgggcatgtctttgctattgtgaatagtgctgcatgaacatatatgtgcatgtatctttataacagaatgacttacatttgttcctttgggtrtatacccagtaatgggatggttcggtcaaatggtatttctccaaggccaatattttgaatactaaagatgtattcagggacactagacctgttggatggtacactttaaaggaatagtaagaaagagagctggattttggaagacaggtacgatctgaagatagatgaaaaaggaagcacgtgcagattgcaggagcactccctagcacacagaagggaggatgtgccacactcaacaagagccaagttcatgttggcttcaggataaaatggttggaaaatagctcaagatccctgaagaggaaaaaggagtgcctcaaataaatggttatgca

SEQ ID NO: 186884 - DNA, 627 bp, Homo sapiens
tacaggtactattgcagacgacaaaaatcatgaaggtggtatgcaagatttgcctccttggcccctctgcctgatttcatgggatactaaaaacaagcagggaaggcaggagggccaaggtcacagtgtggacgcgcacgggctctgaagtcagacttctagggtcacatcccggctctcctgcttgttccactctctaagcttgggcaggtcacttggcttttccatgtgtcggtttcctcatctgcaaaatgtgggtgatgatagcatctacctcayggggcaaaatagagattcaaagacaggtgtctttgatatcaaaagctacatcctgacctctccggggctggcaaatgagttttagcttatgtgccaaattaacggattagaagaaggcacctgtggcaccaagttgacaagtatttgaggcttcatgagaaaaagtgaccgatggatgtgagatatctgccctgcgctctgctgctctctgcctgcaggactctgtcaccagctcgaagctcaaactgcaagtggacccacaggacgtgcactgggaacacacagtaacccaattggttgggttctttctacattttcttattgattttaccactaattctgagagag

SEQ ID NO: 186885 - DNA, 481 bp, Homo sapiens
aagaagtgcacaaaataataaaatgaagacttattttgtctttctaactaaaccaatcataaaacaactcatagatctttttaagttgtttcctgtcatgctctgcttgtctcagcctttctgtgctctcagtatcactgcagcaggaagctcaatgatcccttctgcttgcatgatgcattgtctttctctatttcaaacgtgtcttttcttcatcctccctccccaagcccaattccttttgccaagacctatttatscagtacagcattttcttccttacttgttggtttgttccaactttcagggaactccagcaatttttcatgagaaagaaagttcttttttgccttgtttttatatcttctacatccttagcactatctgctaggatcaccaaactgtgttactagtgtagcttgataggactcttctctagtacagatgatgccttaacatcaggttatcaggatgcctgtca

SEQ ID NO: 186886 - DNA, 622 bp, Homo sapiens
aataatttttttattgcttttgtggagcactggatttatggagagtctccgtctgccatttcagaagtcctgctctgctcttattatcttgatcatattttgttatttttaattcaagtttctatttctccatgaaatcttccatgatttctataacttgctgaagataaataagaactggcccaatataaatttggatttgaggctatgtcatgtgaccaaatccttggaatagaagagccaccatccaagtggctcttgagacattggctatcttattgtcagaacagtgaaaatttccttttatataactgttcatatggtaggtgacaatgaagggtaactgtaatattctcctgacccagtcataggccttgaagaggaacttggttgtaggacttcataaaagaagaggattctagttttaaaaagggcttgcaaaatggtgtcagtggctttgcagcaattttgatatataccctctatagactatagagttcagctctatggttgcacctagaatgtcactaagagccaaaatgaaggaaattaaacatcctmaggaaaacaatcaaggcaaaattaagagcaaaatgtccattacggcagaaagttggagaga

SEQ ID NO: 186887 - DNA, 519 bp, Homo sapiens
gaataattaatgccaaaccatctcaaactcttctaaaaaatctaaagtggagggaatacttccaaactcattttatgaggccagcattacccagatacyaaagccagacaggatattagaagaagagaaaattacaggacaatattcctgatgaatgtagaggcaaaaatcctcaacaaaatactggcaaacacaattcaatagcacattaaagtatcatttagcgtaatcaagtggggtttatccctggagtgcaaggatggttcaatatgtacaaattaataattgtgatacactgtattaacagaaggaaggataaaaataatgtgatcatctcaacagatacagaaaaagcatttgacaaatttcaacatggttttgtgataaaaactctcagcatatttaatatagaaggaatgtatccaacctaataaagaccaaatatgataaacccacagcaaacattatactcaatggtgaaaagctgaaggctttctctcaaacatcaggaacaagata

SEQ ID NO: 186888 - DNA, 510 bp, Homo sapiens
ctcactctgttgcccaggctggagtgcagtggcacaatctcagcttactgcaagctctgcctcccaggttcacgccttctcctgcctcagcctcctgagtagctgggactacaggcgcccaccaccacgcccagctaatttttttatttttagtagagatgggctttcaccgtgttagccaggatggtctcgatctcctgacctcatgatccacccgccttggcctcccaaagtgctgggattacaggcatgagccaccacgcctggccaatggtaatattctttttgcaaacactgaggaagagattttagaggaagccaggtgaaagcaagacagaaactctcatagaggaaatattaaaataggaagtctatttttctgtgccaagttkccctgcaatcaatgtgcaggccatattttctaggctggcccaggtaccatgctcaaaatctgaaacctgcccttgcccttttatccagcttggtactgggagtgctctgctggagccc

SEQ ID NO: 186889 - DNA, 604 bp, Homo sapiens
ctgtagattcgcagcaagaggaaattaatgaggggaattgatgtccatggatgaggaaggtggtggtgacaaaaaggacgaaggtgtcgataaaaacttcacttaaaggaattctgagatattttatgacattgaaaacacaaagaaaaaaatattgtaagctgatccaaatttaggagtttaataatttgctaagatgcaaaagatgcttcmtctgtattataaattatatgatgagaaaaagaaggcaaacaccaaacagaaaaaataaaacattttaattttcagtgttactaatgttttaaattatagtgcattaaatattagtgttgctactttttattttttatagccattttaaattcacagtaaagattttttgatgttttgaaaaaatgtttacagatcatcaagcagtcataatttttccctgttgattattaagatggcttgcatagtttcagcttgcagttcttgttatggttccacactaatgtgcagagcagcgctgcctgtatcaagtttgtgtgaaggggaaaggttaattctgaattcattttctgtcccatagtcaatttatctatgccagccccaattccacatt

SEQ ID NO: 186890 - DNA, 604 bp, Homo sapiens
ctgtagattcgcagcaagaggaaattaatgaggggaattgatgtccatggatgaggaaggtggtggtgacaaaaaggacgaaggtgtcgataaaaacttcacttaaaggaattctgagatattttatgacattgaaaacacaaagaaaaaaatattgtaagctgatccaaatttaggagtttaataatttgctaagatgcaaaagatgcttcctctgtattataaattatatgatgagaaaaagaaggcaaacaccaaacagaaaaaataaaacattttaattttcagtgttactaatgttttaaattatagtgcattaaatattagtgttgctacttttyattttttatagccattttaaattcacagtaaagattttttgatgttttgaaaaaatgtttacagatcatcaagcagtcataatttttccctgttgattattaagatggcttgcatagtttcagcttgcagttcttgttatggttccacactaatgtgcagagcagcgctgcctgtatcaagtttgtgtgaaggggaaaggttaattctgaattcattttctgtcccatagtcaatttatctatgccagccccaattccacatt

SEQ ID NO: 186891 - DNA, 572 bp, Homo sapiens
cagaaagtgcatgtctttatgcccatagtgcagagcaattcaagwtaaacacatttcaagtgcccaacagtcacatgtgggtagtattagacagcacagctctaagtgaaaaggataaaacagtttaataattggcgaggtaggactggtagaacttggagagtgattagatgtgggagagactgtacatctagactagagagaagccaaagggaacactcgggagaggcaaatggctatcccatggcaacctcattcatttccatggcttaagctctacggaggcacagaatgctcccatcttcaggtctggctatgcgcctgcatcccgtatgcacactgtcttacatgtgcgaccagaatcattatctttacctgtagagctgctgtcccccgacttcaatcttgtcaaacattacaggctaagacccccagctgccgtccctcttgccacctgaaatctgcagttattttgcctccatgatatcttccaggtacccaccctctagtgctgtcttggtacagaaggcatcacactggcccaaactggtctagtatctgagtagctccca

SEQ ID NO: 186892 - DNA, 542 bp, Homo sapiens
gcatgtgccctttgacccattaatgagaaaatgattaagtaaatactataatggtatacatagctactgaaggcaagtcttcaaaagttttctggactttgtaaactttctaaaatgtgaatgtattattttaccaatgaaaaaagttataaagtccctcctagtttcaakataagcctcacatagatactttaaaataatcactggctttaatcactctttatcttatcatcttgtttaaatttccttcattttcattaaaatgtcttcattattgtctcagttgacattattttataacttattatcttccgcatctcaactaaaatgtaatttttgtaaaattaaagacattatgtctcttattcaatgtgttctgagactctaaaccagagacaacagcagtgtgggcatgcagcagttgtttgttcaataaataaatggactgcccgctaagcacattctctcataattacatttgatatgtctctctcccctcctggcccttgcccccgctaatataaatcccatgaggacaagga

SEQ ID NO: 186893 - DNA, 572 bp, Homo sapiens
tctttttttcttccttccttctttccttccttcctactttccttcattccttctatcttttttctttcttttcttcctgttgctccactgtctttttgcttgcattgtctcaagcaagaagtctgctgtttttctttgttattgtgtatgctgtgttcatttttttctcatctaattttaacatttttctctttatcactgattttaaggagtttcgttagaatttcatagaaattccataattgtatattatttctaaattacacattttcttttcattttcacataaacagagaattttaatgctgtaagtggtgttaaagtgtactaagttcaaattctttgtttttatagaygagaaaacccagagtaaatgtctatgagtgttattcaatttaacatttgaatactcattcaattaatatttattcaactggtaaatgtaaagaaaacatgagaaggaacaactctgtaaagtaaaggtcagatagatagattggtaggcatagatatagatacagatatatgttaggtttaaagatgttggcagaatatccatgtagatgtttcca

SEQ ID NO: 186894 - DNA, 572 bp, Homo sapiens
tctttttttcttccttccttctttccttccttcctactttccttcattccttctatcttttttctttcttttcttcctgttgctccactgtctttttgcttgcattgtctcaagcaagaagtctgctgtttttctttgttattgtgtatgctgtgttcatttttttctcatctaattttaacatttttctctttatcactgattttaaggagtttcgttagaatttcatagaaattccataattgtatattatttctaaattacacattttcttttcattttcacataaacagagaattttaatgctgtaagtggtgttaaagtgtactaagttcaaattctttgtttttatagacgagaaaacccagagtaaatgtctatgagtgttattcaatttaacatttgaatactcattcaattaatatttattcaaytggtaaatgtaaagaaaacatgagaaggaacaactctgtaaagtaaaggtcagatagatagattggtaggcatagatatagatacagatatatgttaggtttaaagatgttggcagaatatccatgtagatgtttcca

SEQ ID NO: 186895 - DNA, 586 bp, Homo sapiens
attaatgaccttctaaatgatagtttttttagaaggaaaagattaacagaaagtaggagaaaataccaatgtttttggtaacacacatataatgtttactattgtgccatgaactcttctaagctgtttgtaagtattaagtcatttaattcaccttcataagaatcattatcatcccacttgtcagataagaaaattgagccacaaaccaacaaagtacttgcccaaagtctcacaactcatagatggtagaaccagagtttagattcacatctgtgtgatcatgctctgctccagaattcatacttttacccattattctacactgactctttggggaaaaaatgaagcacagtcaagtcytatttattgtctcaaatcatgggcaaaactctaattagaagcgttggagatgggggaaagattgaatattatcagaaggattttttttggtcagtttctgatcaatgtaagataaaaatcttaaacggaaaattatctactgataattaagaatccataattatggttctggccaaaacttttaccaactatatgatctttgatgggtcttagcctcgctgtc

SEQ ID NO: 186896 - DNA, 566 bp, Homo sapiens
cttccattcctcaaggaaaggagggagaatgctgctatgccagtggagggctgaggaagcttaaggttgcccctcttccctgctggccacccgcggacccgaggactggactgaggccctaacagtcccatctctttcaatggttggggaaaagtgggagaatgggaagaggaagtgctcagacctggaaatatgagctttagtgggrcagagtccttcatgaaggggaggtaaagacccagatggataactgccagcccgcaaaactatggcttagactttcaggactctgggtcactggactctgtatgggagtaagatattcttttaagttgtctcctgagtttctttgtaaaggtgttttgaaatgtttctattctctattccacaatagagaaaacaggtttctgttcacaactggatgtactgtggtgattgaggagcctgcatggagacttgtagagacctagtgggccttggggtggtgaggacaggaggctccagctgtccctggtagccactcccttcctatttgaactggtgctaccatatgtctcttcttaagg

SEQ ID NO: 186897 - DNA, 595 bp, Homo sapiens
acagtgtaaacaaagctgctgggaagtttgaactgggcagagtccactgcagctcagcaaggctgctgtggccagactaccagatttctcttctctaggcaggacatctctgaaaaaaaggcagcagccccagtcagggacttatagataaaatccccatctccaagggacagagcacctggggaaaggggcggctgtgggtgcagcttcagtagacttaaacgtccctgcctgacagctctgaaaagcacagcagatctcccagcacagtgttcaagctctgctaagggtcagactgcctcctcaagtgggtccctgatccccgtgtatcctaactgggagacagctcccagtaggggccgacagacacctcatacaggagagctctggctggcatctggcaggtgcccctctgggacgaggcttccaggggaaagatcaggcagcatctttgctgttctgcagcctctgctggtgatgmccaggcaaacagggtcgggagtggtcctccagcaaactctagcagaccagcagcagaggggcctgtcagaaggaaagctaacaaacagaaaggaatagcacaaccacccaaaga

SEQ ID NO: 186898 - DNA, 559 bp, Homo sapiens
tacatggatatgtacttgctaggttttatttttacttattttttattttttgagacagagtcttgctctgtctcaggagcagtggcacctggagcacagtggcacaatcttggctcactgcaacctccgcctcctggttcaagcaattctcctgtctcagcctcccgagtagctgggactaccagcgtatactacgacgcccagctaakttttgtatttttagtagagacagggtttcatcatgttggccaggctggtctcaaactcctgacctcaagtgatctgggattacaggcgtgagccactgcacccggcctgtacttgctaggttttaaaatagcttaattataccacaattggaatagtggatcatttttgttttcaatacatgtatatgtactcgctgatattccattttggcacgtgaactgtgtagccaaaggaatggttcttcatagagtacatgcaaaattccaaatatcaaacacataactgaactcacttaaaaactgaataccattcacgtggtgatcatttgggcccattaatatacttagaa

SEQ ID NO: 186899 - DNA, 590 bp, Homo sapiens
tttaaggcgtttccttgattttcatgaacaaacaatgaaaatggaatattataatttggatatcccaaagatgcagcatctataaagttctttttaaatttcttccaatattgactgattttcctctgtccattccaaggggcctggcttgtcttgttttataaaagtatagaaagttttagtttaaaaaaaagtttggaatccaatttcaacagtatyctgccagtcccccaaatcctctgagttgtttcttacttttgggagtaaggaatgccaagatttcttttatcctatccaggtggataaaaatatcttcctttgatgttagattactcaaaaatcttacttgtttttgacaaaagtgaatgtttttttttttgagaccttgtgtttctttaaggctaattgtagtaataagttaatcccatcttccatggaggcttgcctaccctctgaacagacaagcaaattatctacacattgcattaaaatatatttcttaatatagtcaatatctgagagatctgcttttaatatttgtgtaaagtaagttgagctctcagtgtatccctgaggcatgactgtccata

SEQ ID NO: 186900 - DNA, 526 bp, Homo sapiens
gtgtgtccagaatggcgctcttgactatctctggccctacttctgtttctactaaaatccaggaaaaagagactgctttcttctgcctctttcctcagtaaaatgcactagccttcttctaggtgctcaacctaaasctctattcatttttcagtcccatctctccttcattcctgtcatccagtcactaaatcatattgctactatatctaagtcgtatgtcccatcttctcttctgtatttccccctagaacagatctgcttttcacctgcgtgactcacagtggcctcccaacccatcctgtgctccttccctgcttgctcccacccccatactggtctccatagaggcatcagagctttttcccaggcataggtccaaacatatcagtctcttctcgtcaaccctaaaagccatagagaataaatctaaactcagccttgttgccaagacctgctttaatattgtgccaaagtagcttttatgccttattttctactacacttcactcctttatagacctga

SEQ ID NO: 186901 - DNA, 400 bp, Homo sapiens
ctaaactccagttcaatgtaatgtccacactcacatcctgattccattggcacacgaggcccaactcaccctgggaagcctgcagtaggaagaggtcagtgttgatattttttctctttctggcctcacttcctctcctactcattgctgctttggaatctgtccaagattctagttgaaggttgggaagagaggtaaggaagaggaactatcttacttatctgggtcttgtggattctaaaagttgattctttctttcctaggggatcttctgaattttttttgaagaccaaccatatcactggggttctcyttcttgggtgtgtccttctttctctaattggctgcctttgatgtctttgtcagacttatttcttgtggtttattctttcttgaattc

SEQ ID NO: 186902 - DNA, 594 bp, Homo sapiens
taactataaagttagatgtgggctttcgaaatgtctttttaaaaaccaggttaaggaagtttttttcattactactttgccaagaatgtttaytatgaatggatattgattatttttaaatgcctgttctacctcatttgatgtaatatggtttgctcttctttagactatgaatttgatgggttactcttgattgattttgactattgaataaccttgcattctaagaaaaattatacttctttatggtgtattttttgttatgtattggtgaatttgattggctaatactttttgtgtagttatcaatgtccatgaagtggtattggtctgtagttttctttacttgaaatgtcctgtgtggtttttgtatgagaataattccatactaatgaaatatataaaatacaaagagttctgattttcaagatatatgaatactcgttattaaaaagggatatgtgtaaagacacgtctcacagtatttttgttcagaatttcaatagttatcttaaaattatatgaactctaacataataataactggaaaatctccaaatacttggaactcaaacaacaaccttttcaaaaaag

SEQ ID NO: 186903 - DNA, 431 bp, Homo sapiens
gagggagagcacagcaactgggggactttacattgaactcagcactgccctgtcacagcagaaagaagaactgggctgtacccagctgacgcccacccacagagggagcacttagaccggcccaggccagagggtgatcacccatcccatggtcagaccttgagttccagcaagcctcaccactgtgggcaagagtgctctagggccctatgtaaacttgaggggcaagctaggccatgaggactgcaattcctaggcaagccctagggctgagctgggatcagttagtaaactggggtgggggagggggcatgcaacatactaagacaccagctgagatggctaagggagtgcttgtgccactcctcccccagcccctggcarcaaccacacagcatggagaaaccggtgtgcttgggagacgcggagca

SEQ ID NO: 186904 - DNA, 488 bp, Homo sapiens
agtactccagtgcctcatcattgaggactgagttgacaacagaaaaacaagggatgggggactgcaagtcacccagtcatttcagagggggaatcatctcagaagatgacaaatatgagagacttctgtcttgataagctagtggcatccttaccctggtaatccttggctgttgggcaataaaagacccaatgtggagttaggaagaaaagacttaataataacaaaaatagtttaacttttttatagcacaatgaaatttacaaagtgcatctgcaaatatyctctctcttgatctttctctctgagaagcacacagctgtgcattcttggaaaagtcacatatgctttcttgagcatcaacttcctcaattgtaagataggaaaaacaattattcttcttaggcaagttactcagtttcctcaattataaaatgggagaaatagtgggtattaggttgaaacagagttttgccgatagtcaacag

SEQ ID NO: 186905 - DNA, 512 bp, Homo sapiens
catcatgctttgacttttcaccatcaaaattcatctatcagtgagacacagatcatatgactaatcttgtttgatttggcaatgaagtgaaatgtcaataggcttcctattttgagtgaaattattaaatataccaaagggaatattacatgtgtgttagtcatcccagaataaagatgagcatacatccctgaaaacttcaactccattaatgggataatggatcaccagaatattttatatttcaaatacatactttgttcacattcttgcttcacttggagaattgtgtcactgttgcytaagtcttgggtttcctttactccatgcctggattctccattgacactaatgggaatttcaccttccagcacaagacaatatatggaactaaaatgacaatagcagaaggaaaataatacattttgtacattgtgctacagaatattttcttgactgtttctgttatagtcattgactattgctaagaaagatccatttggaaacccaaa

SEQ ID NO: 186906 - DNA, 526 bp, Homo sapiens
gtaaagattagctactaaaataataaatctgaaacaaggaatttcattaagaaacgaagctttttaaaatgcaaaataaatatttttgtcatattattacttgataaaataagagaaatgaactattacatctctttccaaagatacataatggataataacctttctattttttaccaaccaacaagcaaattctaaaataatgttactataccaaaatggaaaaatgaaaagactggaattgattttttaataaaatgtaatataatatcctatcattaaatttcctggcacaaataagtgtatgcaggaaatatgaaaaattctactcactaaaaaatatccaaatgcctctaaaagcttatcaycctgcttacctaaacacccgaatgaaaaactctcaagtacttccctaagtatctggcttacaattccttagaaattcagctggcacagagtcataaacagaattcaggtttcaatcaagtactgtctattctgcctgcattcatttttttcccaagtt

SEQ ID NO: 186907 - DNA, 458 bp, Homo sapiens
gcaccgtcattgtagtacacaatgctcattgctactggcaaatacctatttgctgaatcaggattgggctgcagtgagcaggactgggctgttctacagctttctgtttgtttcctttttagaatcaccctcttctaattaaatctaaccatttagcaaaaatgggctctttttatgttcctgtcttaaaaatatagctttatttaaacatcgagaatgactgtattttcaccttttctaaagcaactgtttgcaaaacaaaaggcagaggaaaataaaattagagttcctcaaacaatcaaaatgaatatcgctgtgtatgttgtatgttgtacattttgcttttaaattttctaatagcaaaccaaatacatgtgttagttatgatcyttttacttcttctaaagagaaaaggataataggagaagctttctgtaaacttattaaggaaaggaaat

SEQ ID NO: 186908 - DNA, 619 bp, Homo sapiens
tattagcatatcaaaggtttcttagctttagctcaattgagaaaacttcagcctgtcttccttttgcttccaagcggaggcccaaagggcaatgagaattgtaaagggtaaaaatagggaggtggattcaggctgtgtttctgaacttttactgttttgtagttatgtgggccaaaaacattgtctattgctgtggagcccttgcaaatggcaagacaattattttctattgataaatggtttgttcctagaaaaagagtgaccttttgttttatgatagtcactgttgcctgtcttttggggtcccttcagtgtaagagagagtgagaaagcctttccttctaacttaatgcttttttaggaactacactttgttttattagtaaaatgaaaaggccacttaattagtttttaattagtctctaaaacaatagaaattttgtgattaaaagactcatttgtacacgtaggtaactgttttttatgtgctaaataaatagggaaaaagtcagcggaggatgctgaaaattaaaacctcaaatgaacttgacacaacttctgttgcaaaaagaagcttggaaaagtttttttwaagtgaagattcaaatttttgtgaatt

SEQ ID NO: 186909 - DNA, 601 bp, Homo sapiens
tcactcttagttatgtttatagagttaattatttacttatttattttctttcatattttaaaagggatttaaggagatttacaaacaacaagagataaaaataagaagaagatagaggcaaagaaaaaataaaaaaattgaaaattaaaaagcaaataaagaggccaggcatagtggctcacgcctgtaatcctagcagttagagaggccgagatgggtggattacctaaattcaggagttcgagaccagcatgggcaacacggtgaaaccccgtctctactaaaatacaaaaaaaaaaaaattagccagcatggcggtgtgcacctgtagtcccagctactcaaaaggctgagacaggagaattgcctgaaccggggaggtggaggttgcaatgcgctgagatcgcaccactgcactccagcctgggcgacagagccagactctgtctcaaaataaataaataaatagcaagaaaggtgaayacaggcaaagtatgcctatatgcatgctggacataagcccttaatttgcctttaagctttctaagagccacacaaagagaagagctattacagatttccaacgcatggcaaaagcatc

SEQ ID NO: 186910 - DNA, 563 bp, Homo sapiens
aagctttgtcagtagagggcactacagrcaaactacaaggggacttttcttcctggttccacacgcttgccttcttgctccttgtcaatagcaaccagcttgtaaaggacatccagttatgctcatagcttagcacgtttcaccggcatcccagagggcagcttcccagcaaatttcagcagcacttccatgagtggctccccaggaagtcttgtcacacccccagaagacaaatccctggagagttttgtcagcaccccagaggctggtttcccactgtggcacttcagcaaacctctccatcctccagtgggctatagccacacccatccaatgaggtctgaatcccagccttgaggagagggtgttatcttccagatgtgttccttccttgggtaccctgccttagccctagaggtagtactgctccctaaatcctctattcctgcattatttcaagtaacccttacccctcagtagttaatcttccttgttgctagttagcagctctttatattaaactttccctactcaaatgagtgtgcattttctatcttctgact

SEQ ID NO: 186911 - DNA, 600 bp, Homo sapiens
gacatccagttatgctcatagcttagcacgtttcaccrgcatcccagagggcagcttcccagcaaatttcagcagcacttccatgagtggctccccaggaagtcttgtcacacccccagaagacaaatccctggagagttttgtcagcaccccagaggctggtttcccactgtggcacttcagcaaacctctccatcctccagtgggctatagccacacccatccaatgaggtctgaatcccagccttgaggagagggtgttatcttccagatgtgttccttccttgggtaccctgccttagccctagaggtagtactgctccctaaatcctctattcctgcattatttcaagtaacccttacccctcagtagttaatcttccttgttgctagttagcagctctttatattaaactttccctactcaaatgagtgtgcattttctatcttctgactggaccctgactgatacacttagagaaattcactgtaagctctctaagcttcagctccttctgcaagatgaaaataataatacctctcttgccaaattaccagaaaaaaattagagctgctgtaatatatagcacttagaatggt

SEQ ID NO: 186912 - DNA, 573 bp, Homo sapiens
atacaatgttatcaggataactacactgaagaaacaaacaattgattcattcttggttcatcataagcattcacatataattgcaacgcaactcaattttattaaataaacatgacaattttttgttccattttctaaataatttcccaccaaatcttggcctttttatgattctctatgaaaccattgtcctcattttaagtttattcatcttcagtaacacgttttgggcatgaggacgtcttttcctgttttatatggtcagacaaaaaaataaccaacttcattcatcattgatggatgaaaaggagcatgtcacttttggaaaaggaaaggacctatcaacaaaggaaacaccatatacaaaagcagaaattyataaaagtttatttggttttaaaagtgattgttaactcttggggtaggcagaggctctttgagaatctggtgagagatataaatactatcttccaaagaaacacatataggtgcaagcacacaaaattttacctacaacttcagggtgttcatgaacatccaaggtctaatcatgaccttcagattgagaaccac

SEQ ID NO: 186913 - DNA, 428 bp, Homo sapiens
ttctttcttctgctactctctagtattccaattgtcttggtccacatagtaagatacctgcygatattagcataataactgagcatttacgatgtgccaagcacacagtgcttaaccttaattgtttaatttagtcttcaatcagactgaaagttttgtgtaaagatctcatagagggccagttgatcagaagaacttagtgaccccgggcttgaggacaggatgttcctgcttcttagtacttccgtgtaaatcccagtgcttaaaagcttgggactcatttgtgttctttaaaataaatcatgacactttcagatggtggattattatctacccatgcaaagaatgaggcagatatttatgcactgatatggaatgattgcctagtgatattgttaaccagaaaaataaaggtgcagaacattgta

SEQ ID NO: 186914 - DNA, 244 bp, Homo sapiens
cctcatcccttctctgaggaatgagctaaggggtgagggtagagggtggggaggggagtaagtcccatttaagtggraagaacaaagtactgggaattcagagaaggaagagtttacatgaggacaggagaatcagagggtgctgtatgttcatccattgtcactcattcattcattcattccagaacattctctgcaagagggaaggatatatatgtatttcgactactccctgccaggtaaa

SEQ ID NO: 186915 - DNA, 468 bp, Homo sapiens
caccggcctcccgtgtctacttctatattcacattccttctagagcaatgcttggcacttwgtaagagttcaatacatatttgttgaatgaataagtatgcaacagtagttttcatgacaggctctccctggcaccgtgggcctcccttgtgcagctgggtctgcgtgcatcatggtgatctcacctgattgggactccttcagtgactatttcacagcctgaacaagcaaggcaaggatgcatggggactctaggaagcagagttaaaacagatgctgagcactctgttcatgttcagccaggaagaaaggcaaaagtcaaaaaagcaaggtcagccaggtgtggtggctcacacctgtaatcccagcactttgggaggccaaggcgagcagatcacctgaggtcaggagttcgagaccatcctggccaacatgataaaatcccgtctctactaaaaatacaaaaat

SEQ ID NO: 186916 - DNA, 468 bp, Homo sapiens
caccggcctcccgtgtctacttctatattcacattccttctagagcaatgcttggcactttgtaagagttcaatacatatttgttgaatgaataagtatgcaacagtagttttcatgacaggctctccctggcaccgtgggcctcccttgtgcakctgggtctgcgtgcatcatggtgatctcacctgattgggactccttcagtgactatttcacagcctgaacaagcaaggcaaggatgcatggggactctaggaagcagagttaaaacagatgctgagcactctgttcatgttcagccaggaagaaaggcaaaagtcaaaaaagcaaggtcagccaggtgtggtggctcacacctgtaatcccagcactttgggaggccaaggcgagcagatcacctgaggtcaggagttcgagaccatcctggccaacatgataaaatcccgtctctactaaaaatacaaaaat

SEQ ID NO: 186917 - DNA, 598 bp, Homo sapiens
acagttaataaacattacttcatgagtgaaaagaattttgaggtaaagttttgaattgacagtattacagacaatattattttttatacattttcctttctttttctttcagttatctggattagagatctgattttcaaaagttgtcatgtttttgtaaaccttcaaccaaaaggcttaaaaggagaaggtataattttaactttaccaggagtatatgctgtatttacttgcataaagacagaaaacagccctggtttctctgtgtcacttgttgtcatttataagctttggctggaggggagcaatgtcaaggtgcatggcagctggtgttagagcygctgttcagtgagctatcccagaatgcagggatgtatttagtttgtcatgactgggtcaggtggagcaggcatgcttctcagaacttgatgaaagtttggaatacccagaaactgagctcaccatctgccagagatatgtctaccttatctctgagttttatgccccttcaacatgtctaaaactctttgatatcagagaggccaatggaatcaatatgtaattcctcactgttatttatggactactgaggacagcc

SEQ ID NO: 186918 - DNA, 461 bp, Homo sapiens
tactgaatcacattaatgagttcaccactgtcctcccactcctgatacaaacacagacatccttctaataagtaaacggtctgtatattgtatatgagaattgcaccccatcccagaggtaacctaaatatggcaaacactcaataaaatatatacaaaatgagaccaactcattgctgtgaattttctaatcacagcagtccaatgactatataaagaggtgatcgcttccatratgaagcctgtattagtccattcttacattgctataaaaaaatacctggacagtgtaatttataaagaaaagaagtttaattgtcctaaggttctatgggctgtgcaggaagtgtgattctggtatcttccaggctcctggggaggcctcaggaagcttccaatcagggcagaaatcaaagagggagcgaggcatctcacatgttggcagcaggagcaacagagag

SEQ ID NO: 186919 - DNA, 566 bp, Homo sapiens
tgtcattctcctacctgtagggaggaacaatttgtccattaaagcagttacattttggcggttccaaagtttacccctgatgaatccagagagcagtaaaaaaattgctctcatcaaaattttgtcatcaactatgatgtataaatatgtagggaaaaggatacagaaatgcaattctgaaaaaattcatacttgctagaaaaaggattatgaaatgacagatcactagaattrcgcaggaaagatataagccatctcatttagcctcttgatttatagatgaataaatttaagcttggagatacttgaagatttacttaaataatccggaaagataggaaagatctaggagaaaagaccatatgatgtacctggctcctagttcaatgatttttttatagtacatgtagttgcctctttatcctatactctaatttaaacgcactgaaagttcagccaccatgctttcaaattttgtccttgtattccctttttgtgtgtgtgtgctctagagaattcagagaaaggagagatgttctcagaagaacatggtcctgtaaaggagg

SEQ ID NO: 186920 - DNA, 545 bp, Homo sapiens
ctagaaagtactaaataagtgttagctatcattatttgggagaattacaataattgtaaattaagtgacaacattatatttatttcttattttggtataatacacataaaacttaccatcttaactctttttaattatatagttcaatgttattaaatacatttataatgttgtgtaaccatcaccaccatccagctccataactyttcatcacaactaaaaccttctacccattaaacaataactctttattccactttcccccaggccctggcagtcaccattctactttctgtctctatgattttccctacactaaatatctcatataagtagaatcatacaggatttgttcttttgtgaccattttttttttcatttatgtcctcaaggtttatctatgttgtagcatatatcagaattttcttcctttttgaggctgaataatattccattgtatgtatacaccacattttgcttatttattcatccacggatggatacttgggttgcttccatgttttaactattgtgaataatgctgc

SEQ ID NO: 186921 - DNA, 328 bp, Homo sapiens
aaatgcagtttagttgcttgccgcatccaaacaacaaatgggaggtctgatgcatatgtcttgccatactgcttcactttgggagtagaaatcaggcactttcataaggtaagggaggaaatgagcaagggcaagkgtccccctgctagctcagtgccttatctatctggcagttgaattggtgctgtcctgggaagaactaagttgtaaaagtggccaagtgggcatgcttttgacatgccctcctgaggtgacctcctggaggtgagaattccatagtggggtgcaaggggcaggctttggtctgcaaattgactgtcaactctca

SEQ ID NO: 186922 - DNA, 466 bp, Homo sapiens
gataaaaaagaaacaggtaaactcaataggtgagaaatctgctgaaaccagctaattgatttgttttttttactttctttttcataaaaacccaatctgtacaaaaaaagatttccttctgccctgtgaaacaggttcattaattcataagaaatctccttctttaagatgtggtcctatgaaaaccttggtaccccaattgtttcatgcagtgttgttaggacagctatttgcagatcccaattccaaatgtaaaactaccttctcacccacaaactttcctttgcattctaaaaaaaaaaaaaaaaaaaatttaaggaaaaaaaaacctcagaawcatcataacccaaagagatccagtttactatataaaatatctccaataaatagtgtagcttcttcctcccaaactgacttttcagggcatagatccaacaggtgtgaggtttcttctaactgatttcta

SEQ ID NO: 186923 - DNA, 466 bp, Homo sapiens
gataaaaaagaaacaggtaaactcaataggtgagaaatctgctgaaaccagctaattgatttgttttttttactttctttttcataaaaacccaatctgtacaaaaaaagatttccttctgccctgtgaaacaggttcattaattcataagaaatctccttctttaagatgtggtcctatgaaaaccttggtaccccaattgtttcatgcagtgttgttaggacagctatttgcagatcccaattccaaatgtaaaactaccttctcacccacaaactttcctttgcattctaaaaaaaaaaaaaaaaaaaatttaaggaaaaaaaaacctcagaatcatcataacccaaagagatccagtttactatataaaatatctccaataaatagtgtagcttcttcctcccaaactgrcttttcagggcatagatccaacaggtgtgaggtttcttctaactgatttcta

SEQ ID NO: 186924 - DNA, 567 bp, Homo sapiens
taggaagatgccataagtaaactcttagcatctgaaatgattaagaggatttgagcctgctgaggrattacttactttagttgccagtcctagaggtaataactgattaagaagtgctgaaaaatgagtggttatactttagcttaaaagaatgatgcagatgtctaatgaatgcattagaaaaaatatccaaggacaggatcattacaaagacaggaatttctctctttttacccgtgaggtacaaataagataattctgttattttggagctttattcttgatcagattctcattgtcttcctctatttctctgttttgcattttatgtgcctgtagcctggagctttgtgccatgtatctgccaggttctcattatactaattgctgaagttgaagaaatggtcttagggttaaaaaaccaaatactcctaagcctagttctttaagccatttaatcaatgtcttaaaattattgcttgtcatttaataggtattgctatacctattgccccaggcattctgctaagtacagctcgcaaggtgaggagatatagcagagaattc

SEQ ID NO: 186925 - DNA, 564 bp, Homo sapiens
aattcgtaaagaaacgatcatgaatttcataggaagatgccataagtaaactcttagcatctgaaatgattaagaggatttgagcctgctgaggaattacttactttagttgccagtcctagaggtaataactgattaagaagtgctgaaaaatgagtggttatactttagcttaaaagaatgatgcagatgtctaatgaatgcattagaaaaaatatccaaggacaggatcattacaaagacaggratttctctctttttacccgtgaggtacaaataagataattctgttattttggagctttattcttgatcagattctcattgtcttcctctatttctctgttttgcattttatgtgcctgtagcctggagctttgtgccatgtatctgccaggttctcattatactaattgctgaagttgaagaaatggtcttagggttaaaaaaccaaatactcctaagcctagttctttaagccatttaatcaatgtcttaaaattattgcttgtcatttaataggtattgctatacctattgccccaggcattctgctaagtacag

SEQ ID NO: 186926 - DNA, 508 bp, Homo sapiens
aggcctaggccaagctagagagtgggttatgtttctatttggagtgaccaaacagtggctttggatggactttggggtcagggttgagttttttgggaaaattgtccaggatggaagaaggataaagataaagagttcggttggtgtggagatgggattgggmtgggcttagggaagtgaaggaggacaggtcagccacacacagaagcctgcacaacagcttccattgtgttctggactcagaactaggaatattcactataacagtgtgactgacttgaatttcattagaggaatattaaaagcagatgtaaaaaaagacctgtgaaggctctagatcagaatcaactgtaacttggctcataataagccaagttatttcgttattttcttatgtcccatgcctggctagcctaaacccaactaacccagggcaaggacatggctgaaaacaaggaccccagcactggctatacttcttaaggctctattcaaaccaagacacatc

SEQ ID NO: 186927 - DNA, 621 bp, Homo sapiens
gttcatttcagctgggaggtgaactaagactctgagaagttctgctttcaacctagatcttggaggtgtgatttcagtgggcagctatggattcagtgttgagggatgggggcagaaggagcttgtattagtctattttcatactgctatgaagaaatacccgagactgggtaatttataaggaaaaagaggtttaatggactcacggttccacatggctgtggaggcctcacaatcatggtggaaggcaaagaagaagcaaaggcatgccttacatggcagcaggcaagagagtgtgtgcaggggaactgccctttataaaaccatcagatctcatgaggcttaatcaccatcacaagaacaacatgggaaaaacctgccctcawgatccaattacctcgcacctgatccctcccatgacatatggggatgatgggagctacatttcaagatgagatttgggcggggacacagccaaaccatatcaagcaggagtatagaaggttcagaaacactgaggagtcaggtgtggctgaggacgaaggatcccataggtaaggctggggttaggaaaagtggtttccagcagaacagaagagctggtgggaataaagatggaag

SEQ ID NO: 186928 - DNA, 451 bp, Homo sapiens
tcacctgggtaccagatgctatttgtagacagaataattggcctgccacataacagagcaccattttactatccgcatgtgctcctgagaagcatttctgcatttctagcagccttcgtccattgcgtatttcctccgtcattaggatctaatggtagctgctggctagtgataaaataatagcagccaccattcctcaagtacctactgtgtgctggggcgctgggcttagtgatttacttgggatatctcatttaatccctacaacatccactgaggggaggggctgttatcgtcgtttttatggatgaggaaattgaggctcagagaattaaagtgccatgtccaaagacacacaggcagattgtggtgaacagaraatttgatctccggcctgcccaacaccacggtcctcaccactgctctctgctacctccaatttacaatgaca

SEQ ID NO: 186929 - DNA, 486 bp, Homo sapiens
tcttttctagttacttctaacttgttcacaatattccttacagtattttaattatgcctattcctttttggtgttttgaatgtagctttcatctctcctgtttctttttctctattccatttcatacctatgcacagacagtttggtttaacgttgtgctgttattttatagctcttatttcaatccattttattttttttaagagatatcacattgtctgttatttcttaatactatggaaaacaatttttctcatgtcttcccctgattctttgggcagttcctcttatagtttattttcttcatctgtctttatgttttttctctctttttttttttyacagcatctattcatagttcctgaatccgtttctttttaacccatttctggatggggccagctctgtgtgggatgatagtatgggaagggatgggaaagatgggctcaggtggttagcagcttccatttgagtttgttgtcttag

SEQ ID NO: 186930 - DNA, 546 bp, Homo sapiens
caaacttctcaagtcgaagatcctttattttaatgaaactggctggtactcaaggcctgaggatgttcacgtccattctcagcttcttcrtttgttctggtatagattttttagtacttggtagatatgtttcagattgtgtggatgaaatttctagtataagtcataataaaaacatacccttttgcatttgtgttgttgttgttttaggtgggttttgagggagaggaataaaatatgaatgtgtcttcatcaacattttcacctggacatcgtcttctatccattacctctttcaatcccagcaccaacccaggaaagtgggcaaggctgtgtcccctgggagcagaacagagaattggaggaccagcactcgagagctgaacaagcctgcatggccatccatcataggtaagagcagacagtgctcacatgtaccctgcaccaccccagggacaagtcctgatgtgggacccagcacgttctcatacactgggctttggcatgtgtgagacttcagctcgaacagcatgcatgtgacacttc

SEQ ID NO: 186931 - DNA, 577 bp, Homo sapiens
ctaattcagtttaaagcattcagaatagtgcctggcacaaagtacacattttataatattagctctatttgtttttatttccttatttaatattagctctacttgtttaatttccttatttgtaattccttacagatatcctcaatgccatttcacaggtgaggaaatgtgggcacagagaggtaaggtaagttgtttaacgatgcacagcttgtcaatcacagagctggagctcaaactcttccatgagactccaatgccagtgytcctaactgctaggctgccctgtccccaaggcacacactctagatcctttcctttgcatctgcacccatgggctgagtcaggcgaggtcacccaggtgctggactcaggcttttcctgccttttaagatgaaggaagagctcttgagggtaggggagggaatgagtggtggacccctgactcctttatgcccttctgagctcacctctgatcatcctccggactcaggagctctccagaaaatgggtgtcctccccagtggactctagattcaatttgctgctactcactgtgaggaagttccaactggca

SEQ ID NO: 186932 - DNA, 553 bp, Homo sapiens
gtaggggagggaatgagtggtggacccctgactcctttatgcccttctgagctcacctctgatcatcctmcggactcaggagctctccagaaaatgggtgtcctccccagtggactctagattcaatttgctgctactcactgtgaggaagttccaactggcatctctatactgggtgcttaagtaagaaagtgacagttcatcctcaggacaatgggcctgggtttcaatcccagcttcacctccttctggccccgggtttgagcccttggcgaggcctcagcctcctcatctgttaaatgggcataaacattgagtctatctcaatgggctctcatgggggatagtacacaccaagtgttcacagcacagtggcttgcacggaccaagggcttggcaagagtcagtagttagtgataatatcattctcagcacacaggcaaagccatgtgggcttttctctgacatcgtttcttcctggtctttccattgaaaatgtatctgaagtcctgagtcaccccaagctctccttgccccagaagtccctcctctg

SEQ ID NO: 186933 - DNA, 553 bp, Homo sapiens
gtaggggagggaatgagtggtggacccctgactcctttatgcccttctgagctcacctctgatcatcctcsggactcaggagctctccagaaaatgggtgtcctccccagtggactctagattcaatttgctgctactcactgtgaggaagttccaactggcatctctatactgggtgcttaagtaagaaagtgacagttcatcctcaggacaatgggcctgggtttcaatcccagcttcacctccttctggccccgggtttgagcccttggcgaggcctcagcctcctcatctgttaaatgggcataaacattgagtctatctcaatgggctctcatgggggatagtacacaccaagtgttcacagcacagtggcttgcacggaccaagggcttggcaagagtcagtagttagtgataatatcattctcagcacacaggcaaagccatgtgggcttttctctgacatcgtttcttcctggtctttccattgaaaatgtatctgaagtcctgagtcaccccaagctctccttgccccagaagtccctcctctg

SEQ ID NO: 186934 - DNA, 553 bp, Homo sapiens
gtaggggagggaatgagtggtggacccctgactcctttatgcccttctgagctcacctctgatcatcctccggactcaggagctctccagaaaatgggtgtcctccccagtggactctagattcaatttgctgctactcactgtgaggaagttccaactggcatctctatactgggtgcttaagtaagaaagtgacagttcatcctcaggacaatgggcctgggtttcaatcccagcttcacctccttctggccccgggtttgagcccttggcgaggcctcagcctcctcatctgttaaatgggcataaacattgagtctatctcaatgggctctcatgggggatagtacacaccaagtgttcacagcacagtggcttgcacggaccaagggcttggcaagagtcagtagttagtgataatatcattctcagcacacaggcaaagccatgtgggcttttctctgacatcgtttcttcctggtctttccattgaaaatgtatctgaagtcctgagtcaccccragctctccttgccccagaagtccctcctctg

SEQ ID NO: 186935 - DNA, 580 bp, Homo sapiens
ctccaaagtggcgcttggcctggagcagtctaggtgcggggcgggctccccctcagtgtagaagcagactctgtgtcacatagggctggactagagcagcttgaagatggtgactgagaaggaaagtcaatgagcccccaatgccagcacggggtattaaaggtgacatattcagaggctgcaaggtttaagactgtggggcttggcaagccttgctggtgccacttccctcaccaccccgcaccccagtcagtgatggggagctcagagatttatggtcttaataaagagagtggacagggctttctgggtaagagaacatttcagagtttggttgccctccaggagactggaggcagctccaccagtgcagagaagccagacgtcaactctttgtcttacartacatcctgtggaggggcatcaagcccagcagtggtcactgtcacattcagtaagtgatatgaggaaaactggcttccttcctcctgcccagctgacgccccagggacctcctcgacttccttcatggattattgtcttaaaatttaaaaacacagctgatttcagagctgggtca

SEQ ID NO: 186936 - DNA, 591 bp, Homo sapiens
gccaggacctggacatgagacgccctccctgtaggggtcctgatgttccctggttcagcctcatccttgacttactctctgaccttgaacaagtgtctgagtctctctgggctctgttttctcatctgtaaaatgaatgaggttggaacagaggctccacaaggtccctttagccctgttgagctgtatgctgtgaatcactccttaaatgaaatggacaggttgggtctggcaggaggaataggagggtctgattgctgaaaaggagcccagggagaagggaaggcgtgccgaggttgtggctgagtctgagtgctctgagctgtgtgcttcactggagaacacgctcacatgtcaaacagatcrcacttcagccatcttaatgttccttgcacctccaggttgcccctggcagcactgacatggtctctgttccctttgatgcgctcactcccagggtggctcagttgacaagaaattgccaggagcatcattttcctgcactctgtaatccagaaggaaaggggccttaaattacatccatcatgaagattaggtttgtaagccaggggcctgtgaaggacttgaatg

SEQ ID NO: 186937 - DNA, 591 bp, Homo sapiens
gccaggacctggacatgagacgccctccctgtaggggtcctgatgttccctggttcagcctcatccttgacttactctctgaccttgaacaagtgtctgagtctctctgggctctgttttctcatctgtaaaatgaatgaggttggaacagaggctccacaaggtccctttagccctgttgagctgtatgctgtgaatcactccttaaatgaaatggacaggttgggtctggcaggaggaataggagggtctgattgctgaaaaggagcccagggagaagggaaggcgtgccgaggttgtggctgagtctgagtgctctgagctgtgtgcttcactggagaacacgctcacatgtcaaacagatcacacttcagccatcttaatgttccttgcacctccaggttgcccctggcagcactgacatggtctctgttccctttgatgcgctcactcccagggtggctcagttgacaagaaattgccaggagcatcattttcctgcactctgtaatccagaaggamaggggccttaaattacatccatcatgaagattaggtttgtaagccaggggcctgtgaaggacttgaatg

SEQ ID NO: 186938 - DNA, 351 bp, Homo sapiens
ccggtattcctggaagtaccgccgtccatgggctaaaacatggggcacttttgtccagcagagaagggttcaagggtctattgtgccacttgctaatttatgyccttttcttagcttctctgagactcagtttctttatttataaaacgaaatcataatatgtactgcaatttgcacttgggctgttttggtttatccggcatctctttctccctctgtttttggcacctatcactcctgtcacccttgctttgggaaggtaagcttcctgcaccccccaggccctgatattctgaccaaattatcagtcagtgactctatcccacctctcttcttagagagaggtatcgg

SEQ ID NO: 186939 - DNA, 351 bp, Homo sapiens
ccggtattcctggaagtaccgccgtccatgggctaaaacatggggcacttttgtccagcagagaagggttcaagggtctattgtgccacttgctaatttatgtccttttcttagcttctctgaractcagtttctttatttataaaacgaaatcataatatgtactgcaatttgcacttgggctgttttggtttatccggcatctctttctccctctgtttttggcacctatcactcctgtcacccttgctttgggaaggtaagcttcctgcaccccccaggccctgatattctgaccaaattatcagtcagtgactctatcccacctctcttcttagagagaggtatcgg

SEQ ID NO: 186940 - DNA, 351 bp, Homo sapiens
ccggtattcctggaagtaccgccgtccatgggctaaaacatggggcacttttgtccagcagagaagggttcaagggtctattgtgccacttgctaatttatgtccttttcttagcttctctgagactcartttctttatttataaaacgaaatcataatatgtactgcaatttgcacttgggctgttttggtttatccggcatctctttctccctctgtttttggcacctatcactcctgtcacccttgctttgggaaggtaagcttcctgcaccccccaggccctgatattctgaccaaattatcagtcagtgactctatcccacctctcttcttagagagaggtatcgg

SEQ ID NO: 186941 - DNA, 351 bp, Homo sapiens
ccggtattcctggaagtaccgccgtccatgggctaaaacatggggcacttttgtccagcagagaagggttcaagggtctattgtgccacttgctaatttatgtccttttcttagcttctctgagactcagtttctttatttataaaacgaaatcataatatgtactgcaatttgcacttgggctgttttggtttatccggcatctctttctccctctgtttttggcacctatcactcctgtcacycttgctttgggaaggtaagcttcctgcaccccccaggccctgatattctgaccaaattatcagtcagtgactctatcccacctctcttcttagagagaggtatcgg

SEQ ID NO: 186942 - DNA, 517 bp, Homo sapiens
ctgtttctttatattttggtatcaatggaatgtttcacaaacagtgtgaatcatttgttttatgaagctattttaaaaaaataatcatggcctggtgctcagagacagaaacaaggtgaccttgacatcatgaccccacctggaaattgggtctcaaagccacatttgaggcttggcaggtgcaatcaagctgtggtgaaagagcagaatccaggagcccagacacccgggttcaggttctgcttcagctcctcacctgcaaggtgaccttgagaatgtcccttctctcccagcctcagtttccccagcatgcactagtgatccctaatgggcttcccagctctgatgggccaagagccctctgaraagtgagaagtcactaatactgtcagaagcccggtgtttactgattatggaagacagatgactctgaacctacttatacagaggaagaaattcgaataaatggctcctggaaagcaccccaggagcatttccaagatgattcaaatgcaat

SEQ ID NO: 186943 - DNA, 486 bp, Homo sapiens
tgtttagggtcactttatttcagtttaaaggaatccctttttacagtagatctgctgggaatagtgtctctcgattcttgtttatctgggaatgtcttaggttcctcttcatttttgaaggttagttttcctggacatagaattcttgattaaccttccttttcttctgttctttgtatatgtcatcccaygtcttctggcatccatagttttttatgagaagttagctactgatcttattgaggatacctgtggcatgatgaatcatttttctcttgttttgaagtttctctctttgtctttcaacagtttgactatgctgtgtctgtgtgtgcagctctttgagtttatcctactttgaatttgttgggctttattggatgtgtaggttaatattttaaaatcagatttgagaagttttggccattatttatatagatatagatataagagaatacagctcagctatatagaggaacaagttat

SEQ ID NO: 186944 - DNA, 486 bp, Homo sapiens
tgtttagggtcactttatttcagtttaaaggaatccctttttacagtagatctgctgggaatagtgtctctcgattcttgtttatctgggaatgtcttaggttcctcttcatttttgaaggttagttttcctggacatagaattcttgattaaccttccttttcttctgttctttgtatatgtcatcccacgtcttctggcatccatagttttttatgagaagttagctactgatcttattgaggatacctgtggcatgatgaatcatttttctcttgttttgaagtttctctctttgtctttcaacagtttgactatgctgtgtctgtgtgtgcagctctttgagtttatcctactttgaatttgttgggctttattggatgtgtaggttaatattttaaaatcagatttgagaagttttggscattatttatatagatatagatataagagaatacagctcagctatatagaggaacaagttat

SEQ ID NO: 186945 - DNA, 537 bp, Homo sapiens
ctgttaatgactccgcgttagaaagaagaggatggagattcacagacaaaagctcaggcatataccagagctcaggggaagagccaaggcttgaacccagatctgcctgacctcagaccccatggcattcatcattcattcattcattcatcaggtcactcattcagcaaacactttctgagccctcactggatgcaggcacccttctaggcaaaggaatcccatggtgttacaagatagacccagttccctgccccagtggaactgatattctactgcagggaaaagaaaataaaycttgagtgtacagcatccattgctgcgaagggctgtgaagaaattaaagcagcgtgagagggcagagagcagtgaggggccagaacatggcagtgtctgtgcagaatgaataacataaatatttcattagaaggaatttcaggagatgagctatccccatcccacttggctttgaggcagcttgaagtttatactccctcttcatggtgtaaaacgattcaaccaaaggcacccaagact

SEQ ID NO: 186946 - DNA, 537 bp, Homo sapiens
ctgttaatgactccgcgttagaaagaagaggatggagattcacagacaaaagctcaggcatataccagagctcaggggaagagccaaggcttgaacccagatctgcctgacctcagaccccatggcattcatcattcattcattcattcatcaggtcactcattcagcaaacactttctgagccctcactggatgcaggcacccttctaggcaaaggaatcccatggtgttacaagatagacccagttccctgccccagtggaactgatattctactgcagggaaaagaaaataaaccttgagtgtacagcatccattgctgcgaagggctgtgaagaaattaaagcagcgtgagagggcagagagcagtgaggggccagaacatggcagtgtctgtgcagaatgaataamataaatatttcattagaaggaatttcaggagatgagctatccccatcccacttggctttgaggcagcttgaagtttatactccctcttcatggtgtaaaacgattcaaccaaaggcacccaagact

SEQ ID NO: 186947 - DNA, 192 bp, Homo sapiens
aacattgtccaagctgagcccactcttagacagtccagccttctcagccttatctgtggtcctcaccttccacacagwtaataaaaaatctgaagctcagagaggctgagggagctcctgaggccacctagcaggttaagagcagagtcaggttcataccttgccccacccagttttcaggccacttaacca

SEQ ID NO: 186948 - DNA, 610 bp, Homo sapiens
atcagaagatctggtttcaagtaactgagtaaaaaagtttgagtaatctctctgaattgtggtttctgcatctgtcaagtttgactaatatttatcttgcgtgattggaagagaaaatgttcattcatattaaagtaataatgcaggyttagattaggaagttaagaaagctaaagggtaatgtctctggcacgtgaaataaatcaataggcaatagaaagcttaaatatattgcaacccattccaggtaggaatcactaactaaagtgtccatttcacaatactttgagggtactactataccattcagaaaaaaaatatagcagcatccatcttatcagacctcaaagtattatatgtcctaaataaaaaattaattgtgagatccaatattgaacaggcagataaatggagtggatgaagcatcccatcttttctttctctatttttataatgtttagacattccacgctcccagtactctgtcaccatgctctaaagacttttaagtggaaaaaatgtgcattgaaattgaatgctgaaatatagccaatgacctggtcatcacaagccaaacacatagcaattctatgaccagcaacatgtcatc

SEQ ID NO: 186949 - DNA, 610 bp, Homo sapiens
atcagaagatctggtttcaagtaactgagtaaaaaagtttgagtaatctctctgaattgtggtttctgcatctgtcaagtttgactaatatttatcttgcgtgattggaagagaaaatgttcattcatattaaagtaataatgcaggtttagattaggaagttaagaaagctaaagggtaatgtctctggcacgtgaaataaatcaataggcaatagaaagcttaaatatattgcaaccyattccaggtaggaatcactaactaaagtgtccatttcacaatactttgagggtactactataccattcagaaaaaaaatatagcagcatccatcttatcagacctcaaagtattatatgtcctaaataaaaaattaattgtgagatccaatattgaacaggcagataaatggagtggatgaagcatcccatcttttctttctctatttttataatgtttagacattccacgctcccagtactctgtcaccatgctctaaagacttttaagtggaaaaaatgtgcattgaaattgaatgctgaaatatagccaatgacctggtcatcacaagccaaacacatagcaattctatgaccagcaacatgtcatc

SEQ ID NO: 186950 - DNA, 606 bp, Homo sapiens
cttcctacttaatcagaatataacagtttaccacacaatcttcattaccagaaaagtaatgaaggaccataatgataatatgaaaaattcaattccttaatttttgcttctttttaagtacaaaagacagatagttatggtagrataaaatattacaatgaagaaatactgacataaaattgaacttctctgtgttcctcagatgttaaactatgtaagagaaggttatagaggcccatttccctcactgaccaaaggcagtttacacttgtgaaggacatacaagatttaagaaaaaaaaaagtacacaaattagaatacatttgatttccagagaaacagtaagctgtgaaggttaagaaaaataataaaacaggttacactgatattgtcatacctgggagcacacggtggacaagacaaaaagggaagacggaaaagatctagaggatagtgttaggacggggaagctaagtttttgacacttggagggtgggtatctattttaattttataatagcagtaaaggaagttacaaatttaaaaatgcatgtgaaactgggaggttctttattgtgtatgctgcttatttattagacaaaatca

SEQ ID NO: 186951 - DNA, 606 bp, Homo sapiens
cttcctacttaatcagaatataacagtttaccacacaatcttcattaccagaaaagtaatgaaggaccataatgataatatgaaaaattcaattccttaatttttgcttctttttaagtacaaaagacagatagttatggtaggataaaatattacaatgaagaaatactgacataaaattgaacttctctgtgttcctcagatgttaaactatgtaagagaaggttatagaggcccatttccctcactgaccaaaggcagtttacacttgtgaaggacatacaagatttaagaaaaaaaaaagtacacaaattagaatacatttgatttccagagaaacaktaagctgtgaaggttaagaaaaataataaaacaggttacactgatattgtcatacctgggagcacacggtggacaagacaaaaagggaagacggaaaagatctagaggatagtgttaggacggggaagctaagtttttgacacttggagggtgggtatctattttaattttataatagcagtaaaggaagttacaaatttaaaaatgcatgtgaaactgggaggttctttattgtgtatgctgcttatttattagacaaaatca

SEQ ID NO: 186952 - DNA, 403 bp, Homo sapiens
cgttaaataagaaatatagaaagcttcataaaacaaatgggtaggttactaaattaccaaaaggtgtacactcttgtaactctcacttatgtcaggaagtaaacctcaccagcttcctcaggacagtgctgtctgcttcctcaatcacagctcttttctttccactaagaattgccctcctgacttttaattgcctccttattttattgtccaattgtgcttccatagacactgaygttcagttttgcttgttattttttaaagtatttttaaatttataggatccctctgcatcacttgtcttttctgaaatctgtttatgaaagagccagagtcatgtgtcctgtcaattttcacaggctggattttgctgattgcgttcctgtatagtttaacacgttcc

SEQ ID NO: 186953 - DNA, 583 bp, Homo sapiens
cttcctctgcacaccatatggtattctgcacccctaaaggaggtacacactctgaacgatgagctcataccaggaagataaaccccagagcactgtgacccttgcccaagagttcagaagagatcaatggcaggatttgttttggctgcatttagataaaatttatccaataatggtattaaaaacatctgctttttttgaagcaaatgtggatgtaataaaataagtgctttattgcagatgaaaaactatgtggagatgtgagaaaggaaacttgtaactaaaagaataactcttaaagccacagtcaaactcttgtgatttaagtcagccagttcargaagaggagcaccagtcttaggccctttgctatgcagtttcatggagcatgcaggtcacttttcccttggttttatattacttctggattaatatcttgcttgctcaataatgcaaagtgttggctaatattgtacctgttatacagtacatgctttcaatgaatagttgttgaacaaaagaggggtgtgaaatagaagttttagaagttagactaaaagaaatagtttgcattaaacatatt

SEQ ID NO: 186954 - DNA, 583 bp, Homo sapiens
cttcctctgcacaccatatggtattctgcacccctaaaggaggtacacactctgaacgatgagctcataccaggaagataaaccccagagcactgtgacccttgcccaagagttcagaagagatcaatggcaggatttgttttggctgcatttagataaaatttatccaataatggtattaaaaacatctgctttttttgaagcaaatgtggatgtaataaaataagtgctttattgcagatgaaaaactatgtggagatgtgagaaaggaaacttgtaactaaaagaataactcttaaagccacagtcaaactcttgtgatttaagtcagccagttcaggaagaggagcaccagtcttargccctttgctatgcagtttcatggagcatgcaggtcacttttcccttggttttatattacttctggattaatatcttgcttgctcaataatgcaaagtgttggctaatattgtacctgttatacagtacatgctttcaatgaatagttgttgaacaaaagaggggtgtgaaatagaagttttagaagttagactaaaagaaatagtttgcattaaacatatt

SEQ ID NO: 186955 - DNA, 535 bp, Homo sapiens
  misc_feature (1)...(535): n = A,T,C or G
ttacaaacaaaacaataaaacaacttatataaaagtagataatatcaccaaataggtacccacaaaaattaaaaattgaataaataagtaaataaacaaatattttctgtctattattattattaaaaaagtagatggtatctatccttgaaagacagagtgaaattagaaggagaaacaacagtcaaactgatgggtatgatggatgagtcatggtgagatctccttgaaggcgantatctttcagaggaagagcagatgctgtaagaaaatctgaataaatgctgtaatcctaaggttacgttcagtaatgaattcacatgttccaagacctgtaaggataagtgaaaagagtattctgagaaacctcatggtgttctytgtgctcagacgaaggcctataccatgagtattagacacatataagcagttgttaacagtatgatacagtatcatagaactatgtataattggaagtttgatatctataaggatgttttaagtggttgcagctgtgatattgacagaggagcta

SEQ ID NO: 186956 - DNA, 588 bp, Homo sapiens
tttatctttacctggagcctgctctttcactatattacacagagctagcctttctgcacatgttctagtttgttcttacattaactcttttaaataatccccttggaaagataattcttctgatrcacaaaaatagaaaagaggaccaaaacgttttggaaacaattttagatgctgggctgtcaacaagcatcactgaaaataaacaatgggatttttccttccctgaaaagatgtatttctgaaacttcctctttcagatgcttagatttgaagacattttctaagacaagttgtaatgtgtgagagctagtctactcatcttatcttcagagaaagaaaggacggagaaacacccaagaggtacactgaagtgtgccaatacttcacaattttcatggcaaatcatgaatgttttctttacttctcaaattatctcatgatttatcagaagttatttattctctctagaagaaatcttattaattatagctgttcacttataaatcactaaaagtaggcagaattaatgaaaaaaattaactattctattcaccacctataccatccttaatacattgtcaagca

SEQ ID NO: 186957 - DNA, 588 bp, Homo sapiens
tttatctttacctggagcctgctctttcactatattacacagagctagcctttctgcacatgttctagtttgttcttacattaactcttttaaataatccccttggaaagataattcttctgatacacaaaaatagaaaagaggaccaaaacgttttggaaacaattttagatgctgggctgtcaacaagcatcactgaaaataaacaatgggatttttccttccctgaaaagatgtatttctgaaacttcctctttcagatgcttagatttgaagacattttctaagacaagttgtaatgtgtgagagctagtctactcatcttaycttcagagaaagaaaggacggagaaacacccaagaggtacactgaagtgtgccaatacttcacaattttcatggcaaatcatgaatgttttctttacttctcaaattatctcatgatttatcagaagttatttattctctctagaagaaatcttattaattatagctgttcacttataaatcactaaaagtaggcagaattaatgaaaaaaattaactattctattcaccacctataccatccttaatacattgtcaagca

SEQ ID NO: 186958 - DNA, 594 bp, Homo sapiens
tgacattgtattcatttttgtgttgtatgtcccatcgcttcaacttgcaacaaatattgaagaattaccctagttaaagtggctatatgcctacttccttcctttagtaaaccatctgagctttcttctcccccattccacttgtatatgtgaccatgattgacaattatcatgtgatttcaattttcataatataaaaattattctagtattctgttcacatttttgcttcttaaactccaaggtatccaggaagcttatatttttaatgaaaataaaaacaatttaaaaaatatttgttgttgtgtttagtagtgtttaatctctttttaatagaactgactgaagaggattaaatacatgagaaatgaaatgaatattaaacwcttaggaaaaaataaatggctttgtcactggagaacacaaagaataagagtcaatacattaaaatggcaaaaatatatagtgggagttcatatattctttccaactgaacttcagatataagcaattcatgagatgtgatttgtggaaaaatattgcagataaaagaaagaaattagtttaggtgaataatattctttatatttgcga

SEQ ID NO: 186959 - DNA, 623 bp, Homo sapiens
acactataagtaatcaatgagaagagtatttactatgtatcatattttccttagagagagaattaatgaacatggcattttatttaaattcattttagttatctctcatatctgagacacattgaaaattacttggatattgggaaggcagaggaaatattttccaagcactattcaaagaagccacattattttttcagacataagtgctcataatactgagttgtggtttagtcaggaactaaggctacttcaacatcaagataatttttctaaatctattttccattgtctgcctataaattattttatttttaaagctatacattgaagatattagaaaatcattgtctaagttttaaaagatttgtaatcaagggtgatgttttatgtaggggaagtgaaaaagatttcagagtggaaaaaaaactagagaagagaaaaacaagaatgggaataataagataaaattgacagacctcagaatgctttcctcagtttctccttgtagtcmgaattcataaatcttggaagctaaaaagggataatataaagcacaatgtagaaaatgtaattacaatctgatacatactgactttcaatatacaaatacgtgcaataat

SEQ ID NO: 186960 - DNA, 588 bp, Homo sapiens
tgtgctgtcatgcaggcattgttgttccatttataaaacctaggcagagtagatttgacataattcttaacaacattaagttttttggaatggtaaatgaccattgggttaaacttcaagtcaccagctgcattagccactaacaagagagtcagccagtcctttgaaactctgaaaccagacattgacatctcctctccagctatgaaagtcctagatgataccttcatttaatacaaggctgtttcatctacatggaaaatctgttgttttgtgtagccaccttcattgattaccttagctggatattctattccagataacttgctggagcttctacatcagcacttgctgcttcaccttrcacttttatgttatggagatggcttctttccttaaacaccttgagtcaacctccactagcctctaactttttttctgcagcttcctgacctctcttggccgtcacagtattcaagagagctagagccttgctctggattaagcaatggcttaagggaatgttgtgtctggtctgatttttctatccagaccactaaaactttcctcttatcaacaataaggctg

SEQ ID NO: 186961 - DNA, 618 bp, Homo sapiens
aaaatgtagggaggatgctcttccagatggtgaccttttaagggatgattgctagtgccaaatattttagcacatcaaaaaaataaaaggaagcactctggatgagacctcatggataaatagggaaagctcaccctatgcacctccttctataatagccttactatttattatgggatatgagttcttataattatgagaaaggattgtgtaaagttgaagaaatcataggtaatgtttcaatagaaggagagttttggaaatatctattgaaaaagttaattgttatgattgagacatggaaaaattttgtcattgagrctggtatgcattgattttcaataaggtctataaaactttttcaaatcagaccactctatttatattttgatatcctgttgactctagggaaggaatatgactatgggagtgtggagttattgaagcttgggactggagaaatatgcatagttgttgaaagtagctttgaggtgactgcatttttgaaagctgatcaaatagagccaagttttatatacttaacttacacaaaatcaactatatatgctcaggagatagagaaaccacaattcacatttataaaatgcagtcattccc

SEQ ID NO: 186962 - DNA, 441 bp, Homo sapiens
ttcgtagtgcagatgctgagatgtgtgggcttgacagagacaaatagtaccaggactcaccagctgatcaasgacaaagggacatcgggcctctgaagctgaagcccacttagatttctcctatatcacttaacaatgtgagaagagacttaattctttgaagctcctgatttaaggagctgaagagcaaaggaagccttttgcctgatctaatccttgttattaaaagaagcagaggagataaaacactttctatttttatcgattgatgtattttgaggtcagtattttagtctgttcatctatatcttgccctctgccctcatttcaaagtacttattcacttctgattagaattccaattaatttgctgaaatgtcctttaactgattacagttaactctttccaaattgaaagagactttgctttatttcacttgg

SEQ ID NO: 186963 - DNA, 441 bp, Homo sapiens
ttcgtagtgcagatgctgagatgtgtgggcttgacagagacaaatagtaccaggactcaccagctgatcaacgacaaagggacatcgggcctctgaagctgaagcccacttagatttctcctatatcacttaacaatgtgagaagagacttaattctttgaagctcctgatttaaggagctraagagcaaaggaagccttttgcctgatctaatccttgttattaaaagaagcagaggagataaaacactttctatttttatcgattgatgtattttgaggtcagtattttagtctgttcatctatatcttgccctctgccctcatttcaaagtacttattcacttctgattagaattccaattaatttgctgaaatgtcctttaactgattacagttaactctttccaaattgaaagagactttgctttatttcacttgg

SEQ ID NO: 186964 - DNA, 441 bp, Homo sapiens
ttcgtagtgcagatgctgagatgtgtgggcttgacagagacaaatagtaccaggactcaccagctgatcaacgacaaagggacatcgggcctctgaagctgaagcccacttagatttctcctatatcacttaacaatgtgagaagagacttaattctttgaagctcctgatttaaggagctgaagagcaaaggaagccttttgcctgatctaatccttgttattaaaagaagcagaggagataaaacactttctatytttatcgattgatgtattttgaggtcagtattttagtctgttcatctatatcttgccctctgccctcatttcaaagtacttattcacttctgattagaattccaattaatttgctgaaatgtcctttaactgattacagttaactctttccaaattgaaagagactttgctttatttcacttgg

SEQ ID NO: 186965 - DNA, 351 bp, Homo sapiens
aacctatatattaaaatctctatataaattctacatagattttaatatatagatgttaaaatacagatgttttattaaatctgttttatataaaatctacatatatttatatatagattttaaaatataaattttataaagattcttataaaatckatatagattttaatatatagatttattttcttttataaaattagaaggcctggctacaatatgtgtccctattctgtaaatggcaacaattgaccaaaactgactcacagccacaaattttatctgtccacagtttactagacatcccactactctctcttgtgttacctacctggtccctaaaccactttagag

SEQ ID NO: 186966 - DNA, 351 bp, Homo sapiens
aacctatatattaaaatctctatataaattctacatagattttaatatatagatgttaaaatacagatgttttattaaatctgttttatataaaatctacatatatttatatatagattttaaaatataaattttataaagattcttataaaatctatatagattttaatatatagatttattttcttttataaaattagarggcctggctacaatatgtgtccctattctgtaaatggcaacaattgaccaaaactgactcacagccacaaattttatctgtccacagtttactagacatcccactactctctcttgtgttacctacctggtccctaaaccactttagag

SEQ ID NO: 186967 - DNA, 577 bp, Homo sapiens
tttattctatttaattcaccttttttatttaggaggaattttctttgtggatatgaaattgctaggtttcctatctttcattgatcagcataaaatcagattaccaaacttaatgccttagtcaagggcctaaacagaacctttgaattaatctatgaagtaactgataggtgtggggctactgagttctgctatacctctgtagtgcacaacccctttcatgatattctttttttttaactatggacccatattttcccttttctaacttctgtcattctgttasttgttggaaatagctgcatagcagatcattgcaaagctcagccctaattccaaacctgtaactggcagtcaataggcaaagacacacagtgaggatattatgttgacaagtcactcaaaccccttcctctatatgtaatcattgtaaaaactctatgattagtacctagatcacttatctgtctttataaaagtcagcctggtcacttttataatgtctctttattctttactgagcacctgatacataataagacaaatgagttagtcattggagaaaagtcaaaaataa

SEQ ID NO: 186968 - DNA, 544 bp, Homo sapiens
tgatgcccattctgtaatgttatctaccctccaaggtccctgggagacagagtattggaatctaacattcaagtcrtgcttgtctgcctagaggcttgcattcatcaaaggaagtaaggacataaagtacattaaaataaactctactacagcacaaatttctatatcatactattctacacatgatcttgattctaatcttcctttttctggaaattcagaacacctaagctaatgaaaaaatgaaaattataacaccaggagggaaaggggctcataggatatttgtcaaagggccatgcagcttttatgattagaaaagcatttacctctgtaacagtgaagattacatgagaccaccatttcatctgtcagtcaaactcagattggctctgtttcaaacttctgtagctaactcaaaatggaatggccactgttcccaagcaccacctgccataacttggtatttttctgtgcttagtgaatcacatttattctcctggatttgggagagttgggatagaaaaacacagggactaagatt

SEQ ID NO: 186969 - DNA, 494 bp, Homo sapiens
tattttcataaaacaacctgttaattccagtaatccccaagaagagtgagcgtaacacaattccaaaagtaacatagaaggttttaaacttattattagaagttggacaattacatagggtaatatatcaagtcatggagtgtacagtttttatggttgagctttgaaaagtaccatattatccctgttcaaacagaagttggaaacctctcctccaggaatgaaaagactttcaggctggatacattgtttaccaatgtctgttcaacaaccctcaatttcaaaacactaaatctgtcttcttccttggtattaggaagcatttttttttttttttttttttttttttttttttagggaaagaaggtagaaaatgagcatttggggctgatgtaragactggggaaaataacacaacatgcgataccctcagaagcaaaaagtatttttgatcatgttctatgatgaaaccaaacattgcatagttcccccaa

SEQ ID NO: 186970 - DNA, 494 bp, Homo sapiens
tattttcataaaacaacctgttaattccagtaatccccaagaagagtgagcgtaacacaattccaaaagtaacatagaaggttttaaacttattattagaagttggacaattacatagggtaatatatcaagtcatggagtgtacagtttttatggttgagctttgaaaagtaccatattatccctgttcaaacagaagttggaaacctctcctccaggaatgaaaagactttcaggctggatacattgtttaccaatgtctgttcaacaaccctcaatttcaaaacactaaatctgtcttcttccttggtattaggaagcatttttttttttttttttttttttttttttttttagggaaagaaggtagaaaatgagcatttggggctgatgtagagactggggaaaataacacaacatgcgataccctcagaagcaaaaagtattwttgatcatgttctatgatgaaaccaaacattgcatagttcccccaa

SEQ ID NO: 186971 - DNA, 548 bp, Homo sapiens
aaatgtctcaggaaatttgctaaaatgaagtttccgattccatgggtagaggatgggatgcctgattttgtatttttgacaatctctcagccaatcccagtgccactggcttgcaatcataatttgagcagcaaggtggtagcacagtgagtctcaaatgtggtccatcacccacctgcaacaggttcacaggattgcttgtttaaaaaacatacagaatgctaggaatcactccagatccagtgaacctacattttgagactagagcccagtttttagcaaatcctccatgtgaaagtttacagacagcgaagtttgaaaarccttgctccacaggaattccacagttcaaaggtatatgtgcctttaaccctaaagacatcagagtcaagggcaccttttcacaaaataatcaaattgagacaaggctgtcaaacagagaactggtgcaaacaattactgcccccaagcagtaatgcctgatcatcaactgcttgagaagctgtcaccttgtctctttatttggtgacatagtctttaactccaag

SEQ ID NO: 186972 - DNA, 551 bp, Homo sapiens
tagcattttttgtaagtgtaggtgtatctgtgttcatctttctttgtctcaaagcagacagatattgcttgttcttatcttatatactctccrtctttttattaagtttaggtgcttctttctttctgaaacaatctcttgttcttccaccccttcttcagcctctccacctcagcatcctcttcaggactgcatttttctgttcactatggatgtcttctctggagatcctcagtattctacatcatcaccacttccatttctttggtaatcacatacgtcaccatttctctgtctcacactgctcttctcagttctaaagccatgtatccatttgcaaaatgtaaattttttcttacatgtcccatgagcctctcagactcaatacacccaaaacaaattccgtatctaccacctcaagttagtcatctttcaatgtcccctctgtcttggtaaattctcacctactctgttgccaaagctagaaatctggaagtcgtggatattttcttctttctccctcgcatgtagttctttttcaaatcctgtca

SEQ ID NO: 186973 - DNA, 478 bp, Homo sapiens
tttgaacattatctttattacttgattagccacttttggaactgtaaaatgtaatttaaatggctaaaaaatgaatacattaagacaataagcactttaggcatttattatgaacctgctatatttttatgaaaatgcctatcagcytattatttctttcaaactctagtcaataccaaatctcatttttgatttatgttttcctaataatgaattctttattgaatttagttacatgacactgagaacaaagattttgcctctggctgttatctaagcaaggaagctcaaaaaacattatctacatactcttaattagagaaatcccttaaaatattttaaacttcgtgaaaattcagacagtcaggagatgcatttattattaagattattttcaaaaccaaagccttattaataaaaaatgaaatgaacaacgtgacttttgaagtttcagtctgtccacagctagctgtataac

SEQ ID NO: 186974 - DNA, 393 bp, Homo sapiens
tacaacaacaaaaaaattcagacaccaaatgatgacacaatcttccaaattataaatctgatctcatttttattcagtgacatttgatatctctcaactttccacactttaatatattcagtagtaaatttgataggattgaaaaaaatgacactataattccaaagtcttttgcatagatcatttctgagaatctgtgcctaacctaacctcatttccagaaacttctcaagctgccccatgtctcaggtgagtagaatggaaaaaaagaygcgattaactgctctaatattttatttaaatttaatataagcatttgccattagtttacaagtaaatgctttaatacgtcaagattcgtagagaagattctgaatcttgaattttgtcgat

SEQ ID NO: 186975 - DNA, 628 bp, Homo sapiens
cctgttgggttaactcacagagttgttaaaattgaatgctacagaatcaaagatttctactcctggaagcaaatttagactacaatagtccaaacctgtcattttacagatawaaaattgaggtccaaagagtgtgagtaaattgtcaagattcgggagctttaaggacactgtaaaggatataaaatagattctaaatgtaatgtgcaaaccaatgcaaaacgagacaaaaaacaaaaaacccagaaactgtaatgtgatgtaaaatggaagattatatgctttccattagttcttcgaatcagtttattcctaatatggcacgtagggtgattgaggagtaagatgtgatttgtgtaagggaaagtacccaaaggctgagaactctgtctgacagaattatagagattgaaaggaaacctttaggaacgttgtttatatttgacatagatcacctgtttttatatcttttctatgaaatgatggcatctgttaaagttggaatagtgaaaaagaaaagggacttctggaataatttgcgagtttttacatttgtatttatcttcattctttcctgagagggaaaaatgaatttgatagattgcataatgtgtttgaccttattaag

SEQ ID NO: 186976 - DNA, 408 bp, Homo sapiens
aaaccaatgcaaaacgagacaaaaaacaaaaaacccagaaactgtaatgtgatgtaaaatggaagattatatgctttccattagttcttcgaatcagtttattcctaatatggcacgtagggtgattgaggagtaagatgtgatttgtgtaagggaaagtacccaaaggctgagaactctgtctgacagaattatagagattgaaaggaaacctttaggaacgttgtttatatttgacatagatcacctgtttttatatcttttctatgaaatgatggcatctgttaaagttggaatagtgaaaaagaaaagggacttctggaataatttgygagtttttacatttgtatttatcttcattctttcctgagagggaaaaatgaatttgatagattgcataatgtgttt

SEQ ID NO: 186977 - DNA, 536 bp, Homo sapiens
caatccaaggaaatgttagttttttacactttaaagacagcttgctaccattttatagataaaagaatttaagtacagaacagatatgtgatttgccaaaatcactcagctgcagtgtgcaaaatctaggccaaagtgcatatatgccaactgcctttgcttctctctctactgcagacttccttctgcaagctccccatacctgtttgctcccagctgtataatagagtgtctcatacrcactttgtaaaaaatcagacctttatttaaaatgactattttcctgttagaaatatggtagattttaattaatacaagaaatgaaagagttctaggctggtatagtgatggatgtaatacatgtgactcattcagtgatctaagagccagcacaataattgtccatattttaattataatcatattgaaaagtcactctggggaagggatgaatcaaaaaaaaaaaaaaagaaattttgaagcaagatgacatcaaaatcaagttctaaatgcaactccccaagaatccaaagatc

SEQ ID NO: 186978 - DNA, 551 bp, Homo sapiens
agtacgttgaaacccaatccaaggaaatgttagttttttacactttaaagacagcttgctaccattttatagataaaagaatttaagtacagaacagatatgtgatttgccaaaatcactcagctgcagtgtgcaaaatctaggccaaagtgcatatatgccaactgcctttgcttctctctctactgcagacttccttctgcaagctccccatacctgtttgctcccagctgtataatagagtgtctcatacacactttgtaaaaaatcagacctttatttaaaatgactattttcctgttagaaatatggtagattttaattaatacaagaaatgaaagagttctaggctggtatagtgatggatgtaatacatgtgactcattcagtgatctaagagccagcacaataattgtccatattttaattataatcatattgaaaagtcactctggggaagggatgaatcaaaaaaraaaaaaaagaaattttgaagcaagatgacatcaaaatcaagttctaaatgcaactccccaagaatccaaagatct

SEQ ID NO: 186979 - DNA, 577 bp, Homo sapiens
tacagaactttggactcatctctgatttattaactcaagttattccctggacctataattaacatctcaccagcctgatattttcctcaaccacttaacacaaaagaatgattayggagcttcacatgcaacattatcccttaaaattgactctaaacaaggatttaaaataaggttgtttccatgtgcacaggtgatcaaatcattgtgtgataaaacgatagatttttttatgatgtgttttcatatctctgtgaccttttttgttagagaggtgataccattgagtcccgggagacttaggctaactcttaatatacaaaaggataaatactttcttcttcaaataattccaagctcgttttactcctttaaaataatttttagatatacttgtcaaattctgtgaaatattcatgtatgaattttgattgaaacttcattaatgatgtatttatccatttctttttctttttaacttaaaatttatatttgtttatataaaatttctgaacatattatttttaaaaactagttataactactttagaatttttggtagctattatgggaagtt

SEQ ID NO: 186980 - DNA, 296 bp, Homo sapiens
gatctggcaccataaagctttctgactttttgttttagttgcttatttacatrttatcttaaaagttctatgagtatggtcatatgagccaacaataatgattttactaataccaattcctgtattagtttcctaggctgttgtaacaaagtgccttgactgagtggttttgaaacaaagagagcttattccttcatggttctggaagtctgaagtctgaaatccaggtgaaagtagggccgcaccctctccaaagctccagggaagaatccttcctctcctttagttttctcagt

SEQ ID NO: 186981 - DNA, 568 bp, Homo sapiens
tcaatcaattaattactaattgcattttgcatttagcacctactgcctctgaattttttaactgaaaatatacctactcttatatttttattttagcgtttrtttttcaagtctgctagtgacaatccaaattatattttttaatccagatatttttaatttagaaattaggagaggaattttggtaagccacactatcctctgaggagcaactgaatatattagaattctaaatggtaccacacgatgggaaaaaaatggcaaaaataatcccaaagtctatattatgttgaaaacttcaaatgaaattctaagtcttcactaactgaatggactcatttttggcccagcggatgccagaaaacccttaagattgaattcctggacatgacaggatgggcggtgaggtatggctcattatactccctcacttttggggtttagacacaactgaccagcatagatgttaaaatacagattataagaatggcagaacagactctctgacaatacgatatcaaattataaacagaacctaaacccatggcaggcgaggtttaagtcactt

SEQ ID NO: 186982 - DNA, 568 bp, Homo sapiens
tcaatcaattaattactaattgcattttgcatttagcacctactgcctctgaattttttaactgaaaatatacctactcttatatttttattttagcgtttatttttcaagtctgctagtgacaatccaaattatattttttaatccagatatttttaatttagaaattaggagaggaattttggtaagccacactatcctctgaggagcaactgaatatattagaattctaaatggtaccacacgatgggaaaaaaatggcaaaaataatcccaaagtctatattatgttgaaaacttcaaatgaaattctaagtcttcactaactgartggactcatttttggcccagcggatgccagaaaacccttaagattgaattcctggacatgacaggatgggcggtgaggtatggctcattatactccctcacttttggggtttagacacaactgaccagcatagatgttaaaatacagattataagaatggcagaacagactctctgacaatacgatatcaaattataaacagaacctaaacccatggcaggcgaggtttaagtcactt

SEQ ID NO: 186983 - DNA, 596 bp, Homo sapiens
aattctgacttttctgactttatcacgatttgtttgaccagttttctactattagacaattaggttgtttattttttactcgtaagatatagggataaacttcctttgatataaaacatttcatttatttgttatcattgccttagggtgtttttgtttgtttgtttgtttgtttgtttttgagatggagtctcactctgtcacccaggctggagtgcagcggcacaatctcggctcactgcaacctctgcctcctgggttcaagcgattctcctgtcccagccttccaagtacccgggactacagtgcatgccaccatgcccagctaatgtttgtatttttagtagagacggggtttcaccacgttggccaggctggtctcaaactcctgaccttgtgatctgcccacytctgcctcccaaagtgctgggattacaggcgtgagccactgcacccggctgggtgtatttttaaaagtagcctttttcattcaaaaggtttgaacatttattgcttcaatatgtattcacaactggcatctataaagtttgcattgatttgcagctttgctatcagtatatagattagcatttttc

SEQ ID NO: 186984 - DNA, 412 bp, Homo sapiens
gaattctttaaactaagatgttcctagtttattttaatgtgcatttctaattcctacttttacttttgtttttaatattattttgtttcagatgtgtttttaatttctgggtccaacctaaacattagaaacatctaatctatttattttcacccaatttttaaaaagttatactctcttaaatcacttctattttcttctattattttttgaaatcatcaaattttagaatcagaggtcatcttcatgaccataacaaatcaggaaatatcatacatgtgacaacacatatgcgaaatccaagcctccaatctgtttcttgggcactgcacatttayagtgttatcagcatatacatttatcttttcagaatgatgcctcacgaaaatttattgcaggctatacagagata

SEQ ID NO: 186985 - DNA, 556 bp, Homo sapiens
aagctgcatggacttagcctattaaggatatggggaaattaggcagggattaagctggttgatgggcatattgtaagcctatatttttctcagctcagcgtctatcctgccaacaatgggaattctggtttgggcaatggcagcatctttagaaacattttggaactggagcaaaaaaaaaaaaaaagcactgaattttgtacaattatcyacactttaaggtcacctaatgttttttaaagatgacaagcctattttaataactcatatttctattgctaaatgtatgaccactaaattgaaggcacacctgctatggtacactctgcctctgtaccaaataccatatagggaaataaatgagggctaggcccttctgtgacagtgaacttcacttttgtggagactgatcactcttgagaggtgataaatgccagtggaaaggtacagtaagccatcatatattaaatatggaaaagtacttttaaataatattgaaacgtgcaaaatacaagctgacagctaccaccaaatagaaatgtaggccaagattttg

SEQ ID NO: 186986 - DNA, 536 bp, Homo sapiens
ataaggaacccaaggtcagagagttttagtgacttgcccacggccccactgcagataaagtggaaatgggattaaaagccaagtatgtcatatgcctaggaccttcctgtatctatgccaagctgtgtggcagccttggccaaataagaggtctttcctgctccatgcttgggttgattgcctgcatctgttggtaggccaagagtgacctgaactacttatttggtgggtggacaaaatgggaaaaagtcctggaaatcccaataagcagcagagtttatgagtctaacaaggggttttgagcttaaggtatataaataaatgacataatttaggaggtgacttttccttaggattctgttctgagggaaccaggcttcttacctaaagtttgatgggactgctgaagtcagagataatgatggtgattggtccaggaaaagtctttatgggataactgagcagsctagagtattggactgattgtgagttagagaaggcagtgtacatcaggagtcatgaaggtcaaatggtaa

SEQ ID NO: 186987 - DNA, 437 bp, Homo sapiens
agtgaacgaggcttttctctttggtggggaggccaggctgctacatattacactttcttttatacctattatcactaattttaaaagaaagtcatgttaaatatcagtggggagaaatagccaattaagaaggctcacctatttgtaactcatcatccattgtgcttgtaattattaatattrtacagaaatgtttccaagttgtgctgagctctatggcctaaattgtttgtttaccttttatttttagctgcttcttcttctccttcttcttcttttttttttttttacttttatgttgtttaccaatagtagtttttagagatgagatagttgaaaatctgacttcctgtaagattttcctaaagacttcaaccagaaatcaagtatatttaaagattacatggtattttcttctcgaatgaaagaaagcgaca

SEQ ID NO: 186988 - DNA, 565 bp, Homo sapiens
aattccctgagggtgaccttagttctctccacctgagtccctgcttagcacaaacactgggaaccttcagtatcttgaaggcagcttatagtcaagaaaagtcagtactcggtgtgaatgaactatggggggagggtgttgtgaaggaaactggaaggacaaggtgtcattgtgtttttatagagctgtgtgttttcactggtttttggctacactgtatttactcattaactacaacaacttcctttggatkggggataagtaaccagcagaggatgattcagcaagagttgctgggtggactagtggaaagcacctgtcctggcaatcagaaaacccggactctggtccctgagctactgtttaattggttctataaccttgggttcaccatttacttctctggtcctcagttatttgtctatgaaatggggtattcctttcccagactatttcataactccaaccctacaaacttgttccttgaccttgctgtttattttattcaactcacacttttgtcttcattgtgtcgttttcttctggcaccttcctctcaggcttt

SEQ ID NO: 186989 - DNA, 579 bp, Homo sapiens
ccaatagtaacagcttttagattaaaaattgttttttaatcttttaaatcacatagaaaatgaagtgaagttataaaccattattacaatactacttgcttttataattgttcatgtatttacttttattaaggttattatttctatatatgccttctagttactgtctagtgtcctttcaattcaacttgctgggctcccctaagcatttcttatgggacagatctagtggtaagaaacttcttcagcttttgtttatctgcaagtgccttaatttctcccccaattttgaaggacagtcttactatatataggggttttggctggtactttttttttctttttgcactttgaataaattgacccactgacctcccgacctttaaagtttctgatgagaaatatgtagataatctcattaakaatcctttgtgtgtgatgagttgcttctctgtttttaagactctgtctttgtttttcaaataattatcatatgtgttggtgtgggttttcttttttgagttcatcttacttggaggttgttaagcttattggatgattatatcaatgtcttctatc

SEQ ID NO: 186990 - DNA, 533 bp, Homo sapiens
attcatttgccccagatatattaattaagcaatcataatgtttcagacactgtgctagggttcaaacactgtagtaaagatatgggcttcaggacattaatagtttagggaatgagatgatgagtaaataaacaattagattacagggttaagagcaacaatatatatttgaacaaggtgctgtgagaacacaaaggcagcacatttaaatttaactagtgtaattaaatgaagaaaaaatagagaggttartcaagtgatcagattagggggccactcaaggcagaaggcaagtttacaaagatacaaaggtttgaaataacatgatcctttttttttttaaatacaaacatgtactttggatgactacacagaaaaccacatgttagagatgtggtgggaatttagagaagtgtgataggtagtttctcaataatcctacctcctagtattcacacattcatgtaatattctctccatgagcgcaggttgatttagtgactttcttctaacctatacaatatagcaaaagt

SEQ ID NO: 186991 - DNA, 431 bp, Homo sapiens
tcttccctcctgtacaggaggaaagactcctgagttcaggagcttgagatcagccagagctacatgctgaaacctcatttctactaaactacaaaaagccrggcatccagcctgggtgacagagtgagactccatctcaaaaaaaaaaaaaaaaaaaaaaaaatgtatatatacacacacacacacacacacacacacacacacatacacggcactaaaaagaaacaaatcctaaatttatcacagtgaactccagcaactgagaagacccaagtgagcccttcccaaaacagcctctctcctgtcacaggtaaccaccatcctgacttgtcatactgacttctgaatgttacagagatgggctcagacaagtatgtttttgcctagattattttgctcaactttgtgtttataaaattcatcaaggtttt

SEQ ID NO: 186992 - DNA, 643 bp, Homo sapiens
taatttacattcccaccgacagtacacatgttcccttttctccctatctttatcaacactaacttttgtcttttaaaatagccattctaacaagtgtgagatgatatctcattgatttaaatttgcaattgtctatgtatgtcttcatatttatacagatttccaatatacaagatataacggggacttgtttttagatctactctgacaatgtgtctttaattggtgcatttcaaccattgctactcaaagggattactgacatggttgtgagaggtgaggccagctggacttcctgggtcgagtggggacttggggaaatctcctgtcttacagaggattttaaaatgcactaatcagcgctctgtaaaatgcaccagtcagcaggattctaaaagtagccaattgaggggaggattgaaaaaagggcactctgataggacagaaatggaacatgggtggggacaataaaggaattaaagctggtaaccccagccagcagccacaatccgctggggtccctttccacgcaatggaaggtttgtctcttcrctcttcacaataagccttgctaccggtcactctttgggtccatggcatcttggactaagagtccaaggtcagttcaacttggtggagcaag

SEQ ID NO: 186993 - DNA, 472 bp, Homo sapiens
tacttcctggaatggaaggtctttttcctggctctttgtagggtgaaaattatttcctcaccgttgggctgcacatctgttcttcctggctcttgtgggaggccagaatatgccaccctaaaactggaagcattgttgagctgaagacaattaagaagaagcagatgcagggaagttttttgttcttcctttactggccgaaaagcaagatatagagttgcgaagacaaaaggtaccctctccctccccactctccacactcacgcttttaccagggagaacaaaggctaaccactgaagaaaactttagaccctggtcagcctggaaatgataccaaaggaatttatagcaacatgcttaktaactgaatttatctgcaatttatttgcctttccgtaagttgtcacccctacggacacaatctcctttttctttatcttttcacttctctaaaaatgtacggttctctgc

SEQ ID NO: 186994 - DNA, 594 bp, Homo sapiens
attaatatggttcccttgataaatatttccaatgttgttctcatatttcatcatttctagtctattttatttcaaattttattacaatagcgttagcctagtggtagccatgacatgcttttcattgtttgcatgaacttgcgctgcaacccgctgtcatttcttacaggatcgcctgcagcaacacttacagaacaggtgtgaacaggaatggtgcaaattgcacagaaaatgctgcagcctcttttttaagaaatgttttattgccatcagtcttcctgccacacagtgygattaagatatccaagattctgcattaaagtctggtttagaactatcataagcacaatttcaagatatctattgatttacttatgaattaatttcaagattgtttatattttgatgtgactaaaacttatgcttttataactatggaagggcttttaaaataaatattaaatcgactcttatgtgtttattagtcatggctctcaaaatgatattttattctgtcaaggaaagacaacatataggagggtactctcataaggttataattgacctgagaacttcctatcacctagagatgtc

SEQ ID NO: 186995 - DNA, 590 bp, Homo sapiens
ctcgacaacactaaaaaccgcgtgacatctgcttttcctaataaaagtaatatttccattgcactggtaaagaatgatcatggraaagatgaaaataactgacaagatattttgaaaaagtgattatgaatgtatttttaaatacaaaaacgaaagttgttaatacagaatgcgaacatgcgaagttggttttagatgatgtttatgtgaaattataaaaaagaaaactgcatacaagtattaaagatatttggaccttaaaacaaaaacacaaaagcaagaatgaatattaccaggaaagcctgaagctgttaagtgttcttgatcagcaagcagaatgactggagagaaaagcctttcttatgcaaaagaactgcattcctcaaacagctccagagggaagacagggggcggctggccttgccactgcagaccccacagaaggctctgagctcagctgcagtggatgtggccccgccttggtgggcgtggtctgcagcaggacgaccgcattcatggtacaactgcgcttcgcaagaaggatgtctgcaggggtttctgcacctctggtggttgctgggtgggtagaa

SEQ ID NO: 186996 - DNA, 571 bp, Homo sapiens
ccagtctgtagcccagccaactccttagctaactctcgctggccactatttcccatattctatatacccagggcacaaaccaagtcactagagaccatccctgtagcccaaagccaaccagaattatttaaactaacccatcctatgctcaaacctgccctgtgtttcccttggagtccccagtaaaggctttgccctagatttttcccttcactcctatcttctgcctcctgaccaaaacctagtgctcctcacgtgatgtggtgtagtgtggcatgccccctttctgggaaaatgtaagtaataaaaatcttcaattggccaggcatggtggctcacacatgtaatcccagcactttcggaggccaaggcaggcagatcacttgaggtcaggagttcaagaccagacagtgctagatttagcactgtcacttcaaggttatatctaaaagaattagaagcagaaggccaggcatggtggctcacacctgtaataccagcactttgggaggccaaggygggtggatcacttgagttcaagagtttgagacctgcctggccaacatggtga

SEQ ID NO: 186997 - DNA, 525 bp, Homo sapiens
gagaggcctcagaaaacttacaatcacgrcagaaggtgaaggggaagcaggcaaatcttacatggccagagcaggaggaaaaggtgtggggtggaagcaccacacaattttaaacaaccagatctcatgcgaaaactcactcattatcacaaggacagtgttcggggggatggtgttaaaccattagaaaccattcccatgatccaatcacctcccaccaggccccacctccaacactgggattacagttgaacatgagatttgggtagggacaaagatccaaaccatatcaaggtcccaaatgtgttacttttaattttcagttgactttttttcatgctgattggttctttatttattttgaagatttttggttgtcagctcatattaaggcctaattggaaggtgtttttctctggagaacatttgcatttgctctgacaagagccagagagtgataatcgtctgaatttacattacataaacataagcagtaagtattaagcatgtgctatgtagctggcc

SEQ ID NO: 186998 - DNA, 549 bp, Homo sapiens
tattctattacatttattcaaataaaaatgatcccccttcaaagaaatgtagcagctatgctataacaaagaattgtattctttctttctgatattgaataaattaacactgtattagyccattttcacacagctataaagaaatacctgagactgggtaatttataaaggaaagaggcttaattgactcacagttccacggctggggaggcctcaggagactttcaatgatgctggaaggtgaaggggaaacaagaccttcttcacatggtggcaggaaagagaagaaagcgaagggggaagagccccttataaaactgtcagatcttgtgggaactcactatcatgagactatcatgggggaaatcacccccaggattacaattcaagatgagatttgggcggggacacagagccaaaccttatcaaacaccatttagctttggccatgtacacagagtttctgtgctactctgatgcttgctcaagggctctgctataaactagaagccaaatttgtgttttcaagaaagggcagtcttagagcct

SEQ ID NO: 186999 - DNA, 581 bp, Homo sapiens
gaattctctaaagattggttaagttattataaaaagccatttatcaaaattttggagaagagtcttcaaaatataaaaaaagaaaagatatttacatttcagaaagtttgggaaaactaaagtttaatgtggccaaaatatttgtctaattttctgaactgttcttagctagctgtctccttcagtcttttattcttacccttaatttttttttttttctcccactrcctgtggaacagagttgctaaagaaaaagatgctggaaggatttcaagagtcagaccttatttccattctaaacttctaactttagccattcgttagttcatcttctcagatggcagagaaaagccaaactgttgatgataataatagtaataattataattaaaggctctaggagaggaagagtatcaccacataaacctgtgactttggataaggcacaaattctggacctcagttttttcatgtctacatggagaggctgcactacgtgtaacattccttctcactccagcattttgattcgaactcagtatttccaatgactggatgagtcaaataatttgctaggtgta

SEQ ID NO: 187000 - DNA, 634 bp, Homo sapiens
atatgagtttagatgcccatagattggtagacattatggaggaaatagttggagactttcttctgattgttcctatttctcaatgaaataggaaataaggtcattagcagagaatgaggaaatgttggaagtttgaggaaagagtataaaattattatatcaatatacactgtctcctatttctttacacttgagaagtaaggatgtgaggggtgaataaaaatacagaggtaataggttcaatacattggcatgcctagtgagtttgaaaagttaatggaactggaagattggagagaatgagctgaaatgatagagggtagtggytaggcggaacaggagcagttatagtaaagtcaaggtctaggttgtcatcgtggagtgagcttttgaagtacatagcaggattactgtaggaagggaagccagagaactgagaggccatgttgctggagggatcatctttgtgaatattgaaattattaagaattatgacagtagtttgagagaaggtgagtttgagccaagtgcaaaactcttggtagcattcatatttttttccctcagataaatagaaaaaaagatgattgaattgtaattataaaactaattttttttaaacgacagcattttt

SEQ ID NO: 187001 - DNA, 629 bp, Homo sapiens
ataatttgtgtgtgtgtgtggtggcagtctctcaacgttgtccaggctggtcttgaactcctggcctcaagcgatcctcctgccttggcttcccaaagtgttaagattacaggcatgagccaccatgcctggcctgttcttggcttcttatttgatcatttttatttattttttttctgtattattttttaccataacattattttccaaagtaaaaacccaaggagtttaaacattcaacagtacagaaaagtgaaacaatttatagcatatccattagatagcaaattatgcagtaytgttacagcatgtaaaaagaaggaaggcataagaaaatgttcatgttgttaaataaagatgtacataaaactacatgtatataatgggggctaactgttaaaaacacaattacatatttaaaaatgtggtaggcactacaataaggaagtaatactaattaactccatatctgagggattacagatatttttgttctacttaaaacatttctaaattttctatactcagtattttataattagaaaagttataaaattttaattttttaaaagtttgcctttggcatccacgaattttggaatttaaccaactgtggagcaaaacccaca

SEQ ID NO: 187002 - DNA, 613 bp, Homo sapiens
agaaaaaacctgaataagccattactcattctccccactatcatacttcaaagacttgagcttcagatagttaaaaattcttggcgatgtgagtattttgaaccaggatcggtctgtaataagatttcataataatgatttaacagtttttcataacaatgagtatcagtrtgtaataataccgccttcctataggtctagttattgtgtttttctacttatatgcttttcaaaaaattaaaatggatttctaagtatttgaaatctcagcatgtactcttaatctgatgttgaactggaagtatcagtttatactgagggacttgcatacatttggttataggctaaagggagccgtgtatatttggttataggttaaagagtcatggactggaaccaggaaagtttcaaccaggagaatcaagttacaactctgagattaagatcataagtggttgagttattgggaggtcaaaatcatagcacagcaacaactcatcagtatccgggattaacaaaggcaagtttaacatagccaaaatagctaagaacaagaacaaggaggagagtgggacaggaaagatagcaaaattgccacagtgggtttaaactg

SEQ ID NO: 187003 - DNA, 613 bp, Homo sapiens
agaaaaaacctgaataagccattactcattctccccactatcatacttcaaagacttgagcttcagatagttaaaaattcttggcgatgtgagtattttgaaccaggatcggtctgtaataagatttcataataatgatttaacagtttttcataacaatgagtatcagtgtgtaataataccgccttcctataggtctagttattgtgtttttctacttatatgcttttcaaaaaattaaaatrgatttctaagtatttgaaatctcagcatgtactcttaatctgatgttgaactggaagtatcagtttatactgagggacttgcatacatttggttataggctaaagggagccgtgtatatttggttataggttaaagagtcatggactggaaccaggaaagtttcaaccaggagaatcaagttacaactctgagattaagatcataagtggttgagttattgggaggtcaaaatcatagcacagcaacaactcatcagtatccgggattaacaaaggcaagtttaacatagccaaaatagctaagaacaagaacaaggaggagagtgggacaggaaagatagcaaaattgccacagtgggtttaaactg

SEQ ID NO: 187004 - DNA, 613 bp, Homo sapiens
agaaaaaacctgaataagccattactcattctccccactatcatacttcaaagacttgagcttcagatagttaaaaattcttggcgatgtgagtattttgaaccaggatcggtctgtaataagatttcataataatgatttaacagtttttcataacaatgagtatcagtgtgtaataataccgccttcctataggtctagttattgtgtttttctacttatatgcttttcaaaaaattaaaatggatttctaagtatttgaaatctcagcatgtactcttaatctgatgttgaactggaagtatcagtttatactgagggacttgcatacatttggttataggctaaagggagccgtgtatatttggttataggttaaagagtcatggactggaaccaggaaagtttcaaccaggagaatcaagttacaactctgagattaagatcataagtggttgagttattgggaggtcaaaakcatagcacagcaacaactcatcagtatccgggattaacaaaggcaagtttaacatagccaaaatagctaagaacaagaacaaggaggagagtgggacaggaaagatagcaaaattgccacagtgggtttaaactg

SEQ ID NO: 187005 - DNA, 643 bp, Homo sapiens
  misc_feature (1)...(643): n = A,T,C or G
agaattataggcatgagctaccatgcccagactttctctaccctctatctacctgcaagattgctatcaactggcaccaatcttagaagtaaagctgtgatagagagaacactggactgaaaytcttaagtatacttctgctaattcattgtgagactgatactagaatttccttactctgcattagtttatcaataaaaagagagatttggctgggcgcagtggctcgggcctgtaatcccagcactttgggaggccgaggtgggcggatcacgaggtcagaagatcgagatcctggtgaaaccccgtctctactaaaaatacaaaaaaaaaaattagccgggcgcggtggcaggcacctgtagtcccagctgctcaggaggctgagacaggagaatggcgtgaacccgggatgcggagctttgcagtgagcctagattgcgccactgcactccagtctgggcgacaggagccggctccgtctcaaaaaaaaaaaaaaaaaaaaaaaaaagagatttgatcttatgctcttcaattcagcaccagaattcagctgntaggtattgtttctcacatccccatacaaatgattactgtagtcttaaacattcctctgtgcatttgctctcatttttcttgcttg

SEQ ID NO: 187006 - DNA, 409 bp, Homo sapiens
gagatctgatggttttatgaatctagcatttcccctgcttgcacttactctgtcctgcgcccccgtgaagcaggcgcctgcttctcctttgccttycgccatgattgtaagtttcctgaagcctccccagccatgcagaactgtgagtcaattaaacttctgtcttttataaattagtcagtctcgggtatttcttcatagcagtgtgagaacggactaatacactatcattcttttgagcacttccctactttctgatgtgtaccactatgtattattaaaaacccatgtgagtatatgtaccagtaagtatatgagtaccaggaaatgatctaggggaccccagagggaacatttgggcccctattagggcccacgtttggggtcttgccaacaacattggaacagg

SEQ ID NO: 187007 - DNA, 400 bp, Homo sapiens
ccacccacagtcaggacaggtcctggcccgtacctcactcctctgcctgcggctggggtttgcttaagcctcttacattccggagggattgatargattccagaagccacacccaccacccactgccaatcccagggttaggagagaaacaccgggtcttgccctccacgcctcgggctgatggtcggcaccccgccccccagcaccacccttcacatacacacatggccctgtctcttcttcacagaacagcacaactttaaggaaccccaaggagccctgccaccctctttctgctgacccttgccctgtcaatctgatgggccacacccttccacattccccacagagcatcaaccagtttcattcctttcctccctacgaaacccacaaattcaaa

SEQ ID NO: 187008 - DNA, 455 bp, Homo sapiens
atcttgcttcctgctttactgagaaaggtgaagccatcagaagagaatcccccaagcgcccaccactgccccactggctttggtgcccacttattctactttctctgggctcctgaagatgaactgtctgggctcccagcagaagctggctctcagccatgcagcagatcgcagtcaaggctgggctgcagtcaagrctgtcactcctgcaacttcctctcctacatccttaattctgtcccctctactggatctttccaatcatctcacagatatgctgtatttcttctatcataaaaaacagcactgccacactctctctccttcgcttgaaaactcctttaaagcattgcctccacctctcttggaccagctccaaccaggctttggcccctactgctccacccaaccagctctcatcaaggccaccaatgacttccctgttgctaaatctg

SEQ ID NO: 187009 - DNA, 596 bp, Homo sapiens
ataaatgttggtgacagtgaggagaaagaagaatgcttatacgctgttggtgggaatgtaaattagtacaacctctatggaaaacagaatggacatttcccaaataactaaaaacagaactaccatttcacccagcaatcccactactgtgtatctacccaaaggaaatcaattatcatatcaaaatgatacccagactcatatgtttatagcctcactactcacagtagcaataatatggaatcaaactaattgtccaccaacagatgattggataaagaatatgtggtatagatatatgycatagaatactactcagccaaaacaaaaaataaaaagaaaaaaaaagaataaaatcatgccttcagaagcaacatgtataaaactaaaggccattattttaggtaaaataattcagattcagaaagtaaaatcccacatattgtcacttataagtgagagctaaataatgcgtacatatggacagagagtgctgagtaacagacattggagactcagaaatgtggcaggatagcaggagggtgaggaataagaaattacctaatgggtgcaatgttcagtatttgggtgatgaa

SEQ ID NO: 187010 - DNA, 555 bp, Homo sapiens
aaatcatgccttcagaagcaacatgtataaaactaaaggccattattttaggtaaaataattcagattcagaaagtaaaatcccacatattgtcacttataagtgagagctaaataatgcgtacatatggacagagagtgctgagtaacagacattggagactcagaaatgtggcaggatagcaggagggtgaggaataagaaattacctaatgggtgcaatgttcagtatttgggtgatgaatacactaaaagtacagacttcaccactatgcaatatatccatgcaacaaaactgcatttggaccatctaaacatataaaacatagaaattaaaattttaaaaataaaagaacayatcataaaacaccatggaaatatcttaagaagttaaatttataatagaactggggaggatcccgagaataatgatgatataatatctgtcattgcagagtcaatgataactttatttaactgaaactaaacaacctcaaatgatttctggtctcatcatgtttataattcttgatgactgacatatacatcacaaaaa

SEQ ID NO: 187011 - DNA, 578 bp, Homo sapiens
aaatggaatcaatcggagtagaaagactcgtttgaacatctaggtcatttagtagagacatcagaagcagcttaatattctgaacaaactatctctgcggtttacccagaggctagaactgggacacagttctagcctccctaaaccagctttttaaaagcttaaaaataagccttgaaagaactaagttgacccataacaaacttagacttaaaaaaaaaattaaaacaagtaatccttggggtctyacagatgtacagacttgagaagttccaaagctgcttctcttagccaaaatacagagtgtagttaaaaaaaaaaaatccacattttggcaataataccctcttcacacctttgggtatatacccaataatgggatggctgggtcaaatggtatttctagttctagatccctgaggaatcaccacactgtcctccacaattgttgaactagtttacagtcccaccaacagtgtaaaagtgtttctatttctccacatcctctccagcacctgttatttcctgactttttaaagatccccattctaactggtgtgagatgatatctcattgtg

SEQ ID NO: 187012 - DNA, 548 bp, Homo sapiens
acagccatggggaatacgtacactagtgaacatggttgtgttccaataaaactttatggacacaaatatgtaaatttcatataaattttatgaatattttaattatcaaatgatttttcttactttaattttaaaaagatgtcaaaatgtaaaaaccattgtagtcagagccctacaaaaataggcagcaggccacagttccccatgactgtcatttgccagtccttcatctggcccaccaatcccttctgaattcatttaaattaaaaactatagacagtaactcctgtttaaatatgagtgatgygtcaagaactgttcattttaaactggactcagaaattatggggtaaggcagaaaagaagaaaattgtgctgtgtttgaaaagacttgtagataagtgccggtttcatccccaaatcgttcttaattctaccactctatctaggaaatttgtctaatagtaaatcatctttggtttctcccatgtttaactttttattttaattttatgttttacttttattttagattcgggagcacatgt

SEQ ID NO: 187013 - DNA, 548 bp, Homo sapiens
acagccatggggaatacgtacactagtgaacatggttgtgttccaataaaactttatggacacaaatatgtaaatttcatataaattttatgaatattttaattatcaaatgatttttcttactttaattttaaaaagatgtcaaaatgtaaaaaccattgtagtcagagccctacaaaaataggcagcaggccacagttccccatgactgtcatttgccagtccttcatctggcccaccaatcccttctgaattcatttaaattaaaaactatagacagtaactcctgtttaaatatgagtgatgcgtcaagaactgttcattttaaactggactcagaaattatggggtaaggcagaaaagaagaaaattgtgctgtgtttgaaaagacttgtagataagtgccggtttcatccccaaatcgttcttamttctaccactctatctaggaaatttgtctaatagtaaatcatctttggtttctcccatgtttaactttttattttaattttatgttttacttttattttagattcgggagcacatgt

SEQ ID NO: 187014 - DNA, 548 bp, Homo sapiens
acagccatggggaatacgtacactagtgaacatggttgtgttccaataaaactttatggacacaaatatgtaaatttcatataaattttatgaatattttaattatcaaatgatttttcttactttaattttaaaaagatgtcaaaatgtaaaaaccattgtagtcagagccctacaaaaataggcagcaggccacagttccccatgactgtcatttgccagtccttcatctggcccaccaatcccttctgaattcatttaaattaaaaactatagacagtaactcctgtttaaatatgagtgatgcgtcaagaactgttcattttaaactggactcagaaattatggggtaaggcagaaaagaagaaaattgtgctgtgtttgaaaagacttgtagataagtgccggtttcatccccaaatcgttcttaattctaccactctatctaggaaatttrtctaatagtaaatcatctttggtttctcccatgtttaactttttattttaattttatgttttacttttattttagattcgggagcacatgt

SEQ ID NO: 187015 - DNA, 617 bp, Homo sapiens
aactatttttgcattaattaatcactggtcatgaattggtatcaaccaatgtgatctggccttttatgtcctcaatgtcttccataatagctgagaaaacacattaaagtttaccctattgaattcctttagtcttatattttcccatgaggatctgccacaactttccaggtagagtagtaaccattcatttatgaactgccatcagaaagacaggataatcatctacgctctggcagcaggtgttctaatggagaatccctttaaactcttccttcagtagcctaagacagagcttcagcagtctctagagtgagtcccagaaaaagaggaggtatttactcatgaatatgaccaaggccattgctgtaccttcttgtagaattttccttcatataaaatttccatttaataatggaactcttttgggtattctctttttttttggtgtgtttttcagayaaaaccctgacactttggacatttcaaaagttgaaataattgtatacccttcaattattggaaccatttcaatcaatgccctatactatgccaaatgacaggtaatttgtttcttctttttttcttcattgttcttgctagaaatatatcattta

SEQ ID NO: 187016 - DNA, 586 bp, Homo sapiens
ttagtgttttgagatatttcttcttttctaatataccatttaatgacatctcacaattctatggggcatagaattttggtggggwtcaaatggataaatcttttattttctgtgtattaatggagacattcattgttattcatctggttaatattctgcggtggagggttcaatatgtcttcagtcacatatttggtgctttgccagcaacaagtgaaatttggggttcaggtgactcctgtcactctcagggcctctctacagggtacccagaattctctcatgctgattagaagctacaagacaccaaggcagaagctgctatttttttaaagcttacatccgtaactggcatagagatacttataccataacctattggtcagaaaagtcatgggttagcacaagttcaagatgatggggaaataggtcacttaatcagaggattttcaaattatttgtggacatctttaatctgcaaaacatagtaactatgatacattacatactaatattttaatttatctccactctgaggtacgtatgtgtcataaaaataattgcatttaagaatgtactccattat

SEQ ID NO: 187017 - DNA, 586 bp, Homo sapiens
ttagtgttttgagatatttcttcttttctaatataccatttaatgacatctcacaattctatggggcatagaattttggtggggttcaaatggataaatcttttattttctgtgtattaatggagacattcattgttattcatctggttaatmttctgcggtggagggttcaatatgtcttcagtcacatatttggtgctttgccagcaacaagtgaaatttggggttcaggtgactcctgtcactctcagggcctctctacagggtacccagaattctctcatgctgattagaagctacaagacaccaaggcagaagctgctatttttttaaagcttacatccgtaactggcatagagatacttataccataacctattggtcagaaaagtcatgggttagcacaagttcaagatgatggggaaataggtcacttaatcagaggattttcaaattatttgtggacatctttaatctgcaaaacatagtaactatgatacattacatactaatattttaatttatctccactctgaggtacgtatgtgtcataaaaataattgcatttaagaatgtactccattat

SEQ ID NO: 187018 - DNA, 586 bp, Homo sapiens
ttagtgttttgagatatttcttcttttctaatataccatttaatgacatctcacaattctatggggcatagaattttggtggggttcaaatggataaatcttttattttctgtgtattaatggagacattcattgttattcatctggttaatattctgcggtggagggttcaatatgtcttcagtcacatatttggtgctttgccagcaacaagtgaaatttggggttyaggtgactcctgtcactctcagggcctctctacagggtacccagaattctctcatgctgattagaagctacaagacaccaaggcagaagctgctatttttttaaagcttacatccgtaactggcatagagatacttataccataacctattggtcagaaaagtcatgggttagcacaagttcaagatgatggggaaataggtcacttaatcagaggattttcaaattatttgtggacatctttaatctgcaaaacatagtaactatgatacattacatactaatattttaatttatctccactctgaggtacgtatgtgtcataaaaataattgcatttaagaatgtactccattat

SEQ ID NO: 187019 - DNA, 586 bp, Homo sapiens
ttagtgttttgagatatttcttcttttctaatataccatttaatgacatctcacaattctatggggcatagaattttggtggggttcaaatggataaatcttttattttctgtgtattaatggagacattcattgttattcatctggttaatattctgcggtggagggttcaatatgtcttcagtcacatatttggtgctttgccagcaacaagtgaaatttggggttcaggtgactcctgtcactctcagggcctctctacagggtacccagaattctctcatgctgattagaagctacaagacaccaaggcagaagctgctatttttttaaagcttacatccgtaactggcatagagatacttataccatawcctattggtcagaaaagtcatgggttagcacaagttcaagatgatggggaaataggtcacttaatcagaggattttcaaattatttgtggacatctttaatctgcaaaacatagtaactatgatacattacatactaatattttaatttatctccactctgaggtacgtatgtgtcataaaaataattgcatttaagaatgtactccattat

SEQ ID NO: 187020 - DNA, 596 bp, Homo sapiens
gttctcattcataggtgggaattgaacaatgagaacacttagacacagggcgggggacatcacacaccagggcctatcatggggtggggggcagggggagtgatagcattaggataaatacctaatgtaaatgacgagttgatgggtgcagcaaaccaacatggcacatttatacctatgtagcaaacttgcacattgtgcacatgtaccctagaacttaaagcataataataaagataaataaataaataaaggtttacattatgaaragttgaaaaaaaaaaaccaaatgcaacggtgctgacttgccttgctttaaattaatgatcatgggcctaaatgattttgacacttcctttctcctcctctgttttattatctccctccttaaccatcagtccgcaccttgtactttgctaatgactttatttatttttttcatctagatatagaagcaatcagaagaaaactacctgctgttcacacacatccttttttgcattgtctcctgtttcactggatgttgatccttactcctatcctgttatggtctctaccagatttgatcccctcttttctatgcaaggattttgctc

SEQ ID NO: 187021 - DNA, 596 bp, Homo sapiens
gttctcattcataggtgggaattgaacaatgagaacacttagacacagggcgggggacatcacacaccagggcctatcatggggtggggggcagggggagtgatagcattaggataaatacctaatgtaaatgacgagttgatgggtgcagcaaaccaacatggcacatttatacctatgtagcaaacttgcacattgtgcacatgtaccctagaacttaaagcataataataaagataaataaataaataaaggtttacattatgaagagttgaaaaaaaaaaaccaaatgcaacggtgctgacttgccttgctttaaattaatgatcatgggcctaaatgattttgacacttcctttctcctcctctgttttattatctccctccttaaccatcagtcckcaccttgtactttgctaatgactttatttatttttttcatctagatatagaagcaatcagaagaaaactacctgctgttcacacacatccttttttgcattgtctcctgtttcactggatgttgatccttactcctatcctgttatggtctctaccagatttgatcccctcttttctatgcaaggattttgctc

SEQ ID NO: 187022 - DNA, 596 bp, Homo sapiens
gttctcattcataggtgggaattgaacaatgagaacacttagacacagggcgggggacatcacacaccagggcctatcatggggtggggggcagggggagtgatagcattaggataaatacctaatgtaaatgacgagttgatgggtgcagcaaaccaacatggcacatttatacctatgtagcaaacttgcacattgtgcacatgtaccctagaacttaaagcataataataaagataaataaataaataaaggtttacattatgaagagttgaaaaaaaaaaaccaaatgcaacggtgctgacttgccttgctttaaattaatgatcatgggcctaaatgattttgacacttcctttctcctcctctgttttattatctccctccttaaccatcagtccgcaccttgtactttgctaatgactttatttatttttttcatctagatatagaagcaatcagaagaaaactacctgctgttcacacacatmcttttttgcattgtctcctgtttcactggatgttgatccttactcctatcctgttatggtctctaccagatttgatcccctcttttctatgcaaggattttgctc

SEQ ID NO: 187023 - DNA, 596 bp, Homo sapiens
gttctcattcataggtgggaattgaacaatgagaacacttagacacagggcgggggacatcacacaccagggcctatcatggggtggggggcagggggagtgatagcattaggataaatacctaatgtaaatgacgagttgatgggtgcagcaaaccaacatggcacatttatacctatgtagcaaacttgcacattgtgcacatgtaccctagaacttaaagcataataataaagataaataaataaataaaggtttacattatgaagagttgaaaaaaaaaaaccaaatgcaacggtgctgacttgccttgctttaaattaatgatcatgggcctaaatgattttgacacttcctttctcctcctctgttttattatctccctccttaaccatcagtccgcaccttgtactttgctaatgactttatttatttttttcatctagatatagaagcaatcagaagaaaactacctgctgttcacacacatccttttytgcattgtctcctgtttcactggatgttgatccttactcctatcctgttatggtctctaccagatttgatcccctcttttctatgcaaggattttgctc

SEQ ID NO: 187024 - DNA, 386 bp, Homo sapiens
acatacatacatacataaatatacctcaatatctatcagttatctctctctctatcaacatcatctatccctgtcatcttcattttctattttaaagagaggcaaggataagcacacagagttaatatgaatccctacatgattatggacaaattactctgtctyactatgccttcatctgtaaaatcagtaagataatgttacttccacatatggattttcttttataaaattcttttgtaaaaaaatttataatttttttttaagttccagggtacatgtgcaggatgtgcaggtttgttccataggtaaatgtgtgccatggtggtttgctgtacctatcaacccataccctaggtattaagcctaattcttacatgataaaa

SEQ ID NO: 187025 - DNA, 386 bp, Homo sapiens
acatacatacatacataaatatacctcaatatctatcagttatctctctctctatcaacatcatctatccctgtcatcttcattttctattttaaagagaggcaaggataagcacacagagttaatatgaatccctacatgattatggacaaattactctgtcttactatgccttcatctgtaaaatcagtaagataatgttacttccacatatggattttcttttataaaattcttttgtaaaaaaatttataatttttttttaagttccagggtacatgtgcaggatgtgcaggtttgttccataggtaaatgtgtgccatggtggtttgctgtacctatcaacccatacccyaggtattaagcctaattcttacatgataaaa

SEQ ID NO: 187026 - DNA, 366 bp, Homo sapiens
ttgcggtgggaggctgccctgtgcattctaggatatttaatagcattatggcctctacccactagatgccagtagcatttcccacagttgcagcaaccaaaaatgtctccagacacttccaaatgtcctctcgatggctaagtcatcccagatggaaaccactgctctagaccatttstatgcaaaatctgatggtgaataaggagaaatagatcataaaccagaaaggagtaggatccagtgaatatgactggatgctgtggttttcttaaaataagatctgtgtccctttggatgcaaaaaggaagggcttagtggagatggtggacatgattctgggagaggggagatcagtaagatagcaag

SEQ ID NO: 187027 - DNA, 398 bp, Homo sapiens
gaattctatcaacttttcagaaggcacatgcccaggatgggattttatgaatcacctgtcatgttaggtcaggaatgagaaaggctgaagacagttgggagactgagtaggaacctggaataactgtgcagatgacaaggcccttccttaggccctccctcagaggtagtggaggaggaggaggaaacatttgaatgcagatttaggaagccggtggacagtgaatayagaaagtgagtgaaacagataatttgtgtactttagtgacagatggcatgataatgtgaaatgaaaaggaactaaggaaattttatttgagtttcttaactaagccctaacttgttcaataaaaacaaggttttgtatttgaacaaatgattagaattgtcagtagaaat

SEQ ID NO: 187028 - DNA, 533 bp, Homo sapiens
gatgcctgaaactgaacccatttgccatcagatagaacacatttctgttcatgtcttctacctacaaatttcatgtcttttcatcttaactaagcacttaccatgcactgtgttataatttttgcagtttgagttgggacagtaaaactaacacaattttttttttttccctgcagtttcatagatagaagacttgttcttacgatagatcttagcaacctcagtaaactttttttttctttccttaagttgagaactttcacctttttatttaaaggaagtacttcatggcttctcttcagcatatccgataccagcatcactgctcttgtgccttgggrctattattaagttaaataaggattacttgaacacaagcatcatgataccacaacagacaatcttataatcttggctactaggtgacttatagatgggtactgcaaacagtatggatacactggacctaaggatgatttatatcatggtgggagaaagctagatggcatggattcgctcatactgctcaaaat

SEQ ID NO: 187029 - DNA, 504 bp, Homo sapiens
acttctctcaaataatgtgcaatgtgatataccaccagcaatatgtgaaacttttagtatccttcaaccctgggtaatgcttaaattaatacttgtatttttaaacataaattatttaatttaataggatgaacacctgatttctgaagcaaagggtatggtacataacattttcataatcaccttcctcatcatttggaagttctaatattatagcaacctataatacagcaatacctttcaaagaaatgtataaatgtttgacattaaatgctcacctgtattacatgtttagcgtttttatcaattttgtgtagttattgtctttccccaattatctattcttacttttatacagctgccagctttattttcaccttctatttcccaatgactcataaaataaatcacatccctargttcattagaatatccaacatgcaaaatgcttatcaacaatatgcaagacatatcatctttctatatgccagccgtggagtcaac

SEQ ID NO: 187030 - DNA, 363 bp, Homo sapiens
ctccagtttatttcctttgcttcacctctactactattaccatactccatgccaccatcatcgccattgcctgaatgattgtctcctaactggccagctcactaacacttattctcttcacagtctattttctagactgtagccaaagcgattaaccctccaatcactttcccttgctcttagggaaaatattaaaatccttagcatggtttaaaagatgctccatgctgttatccctgcttacttctgtagcctcatctgatcttctctcacccctgctctctctgcaactccayacttttcgtttcagtttctataggtgacatgtctgctcaggtccttttttcctagaaagctttcttc

SEQ ID NO: 187031 - DNA, 363 bp, Homo sapiens
ctccagtttatttcctttgcttcacctctactactattaccatactccatgccaccatcatcgccattgcctgaatgattgtctcctaactggccagctcactaacacttattctcttcacagtctattttctagactgtagccaaagcgattaaccctccaatcactttcccttgctcttagggaaaatattaaaatccttagcatggtttaaaagatgctccatgctgttatccctgcttacttctgtagcctcatctgatcttctctcacccctgctctctctgcaactccatacttttcgtttcagtttctataggtgrcatgtctgctcaggtccttttttcctagaaagctttcttc

SEQ ID NO: 187032 - DNA, 606 bp, Homo sapiens
ggctgctctgagaggccccgcctaagggaaaatattgtagatgattgcattagccgaccatctcagatgcctcagcaactgttgccttttgagagcagccgagttttattcgacacaaaggaagatgagtgattattttaaacagaagtaatgactgagagatggcactgcagtgtccctgacagagtggattctaggacccacctcctacatatcatgagtcttgggtaacttacttaacttttctgagccttattttttttaatttgtaatacagatataatcacagcacttaccttaaagggttgagaagtrgtacatgatttaacattgcaaaatgcttagaagagtgctaagtaccctaattaacacttaaataccaattttattttttctaaatctgaaccatattctccctctcttacctatcatcaattatgctttcttatgtgtgaagagaaataatcagccaagcatagaatgttacatgcactattaaatatggattctcgtgggagttggccatttaatagtaagaatagattccttctgttttgcaatctgatgacacatagccataaacagttccatttggtctgagctgtg

SEQ ID NO: 187033 - DNA, 597 bp, Homo sapiens
gcaattgctttatcattttttatctagccctctgtaataagcatgatttctaaccaagtactgtttggtaaaagtaattaatgttatcaggttggtgcgaaaataattgttttgtttgtttgtttgtttgttttgccattgctttcagtggcatttcaaatggccattactttcagtggcaaataccacaattattttcacgccaacctaatacttgtagaaaaattaagggggaaagtctaaggaagcaagtcaaaattcctacagtaacaacaaatgttaacattttggtatatggcccttgaatttaactctacatacaaatccattcatayagttgatcttataccctgcatactattttacgggtttttgcacaacctaacaatttgtaacaattattatttacacttgattttcttttatagtatgatttgtactgtctattcacaatttcataaatttgtgaacaaaaaacatctggttattctaatttggcactatcagcaatgtttgaatatagattagacagacagatttagatacacataatttaaatttttatatacatatctgattatttggattacatttctg

SEQ ID NO: 187034 - DNA, 587 bp, Homo sapiens
agtttgctctttggccatataagttgagcaatgttctgcctgtggaaagtaacacccattttccaccactttgcctttttgtatgtcttttaagctgcaagcaaaatagttacgataactgtccctagactctatcacgtttcttcctgcttctttgattattgtctaaaagtgaactgggaaaaacataactaagttcccttcaataattagttcattggccaaggaataaaaattggctaaggaaaagaatgagcaattccaatctgtcactaaagccttgttatttgggggtccagttaacaccattttataaattagaagcaagaacagctggtggataagttgaaagataccaagtgcctttgatttttttctaaattctgcttctcttattattttttaaagatgaaattttactgttataaatggtaatagcaaaagtggtggcaaagttggaatctggatgcataggtatcatatrataaaataatactgaattaggggattgtaaatctgagttttgttatcacttctgttattgattaactgtggacaagttgcttaccctttcacattttcagttt

SEQ ID NO: 187035 - DNA, 496 bp, Homo sapiens
gggcctctttgtcccctgctaaagaaaaatgactgggtttttttttttttttttttttttttttttgtatttgagcttctgtgtggttcaggaactcaatgcaataactagctttgagttacacatagagagggaagagaggccttggatcaacttatgaactcaggcatttagcaagcacaggaactaaaagagagacacagatagagccacaggagagtgatcaactttttaagccgtgtgtgactcccaatcaatgtactggattctaraatgtgtcagattagcaattttttccccttctcttgggagctgaaggagcagagaggcagcacacagagtgaggccaatgcctgctgcccttattcccgcaacgtggtttcatctgttaacccagctccatttagcagccattcttgcgatcaataattcagagatataaatattttccttagatgtggatactattagagttttaagaaacatttgcctctat

SEQ ID NO: 187036 - DNA, 402 bp, Homo sapiens
tagaagctttaatatattggagctacactgtgttcagcagaaaaagaaaaagtgtggccctccttttccttcactgtcctacttttcatctgggtttcaaaagttggatggcatatgctaccgtgtcaggaggtttctttgtaaaacagctccttcagcttcttcaggcccttgttcaaaaaagctgatggcaagtgtgctattcctttcagtggcttttaggccaatgtctgaggaaaaygctgccattcttttctttcactttccattctagaactggtgctttctcccagcccaactctactaatattctccatatgtagaggaaaagagagaatttacttacacagctcgtacaagtttagtagatatgcccagatatatttaatttcctaactagat

SEQ ID NO: 187037 - DNA, 402 bp, Homo sapiens
tagaagctttaatatattggagctacactgtgttcagcagaaaaagaaaaagtgtggccctccttttccttcactgtcctacttttcatctgggtttcaaaagttggatggcatatgctaccgtgtcaggaggtttctttgtaaaacagctccttcagcttcttcaggcccttgttcaaaaaagctgatggcaagtgtgctattcctttcagtggcttttaggccaatgtctgaggaaaatgctgccattcttttctttcactttccrttctagaactggtgctttctcccagcccaactctactaatattctccatatgtagaggaaaagagagaatttacttacacagctcgtacaagtttagtagatatgcccagatatatttaatttcctaactagat

SEQ ID NO: 187038 - DNA, 402 bp, Homo sapiens
tagaagctttaatatattggagctacactgtgttcagcagaaaaagaaaaagtgtggccctccttttccttcactgtcctacttttcatctgggtttcaaaagttggatggcatatgctaccgtgtcaggaggtttctttgtaaaacagctccttcagcttcttcaggcccttgttcaaaaaagctgatggcaagtgtgctattcctttcagtggcttttaggccaatgtctgaggaaaatgctgccattcttttctttcactttccattctagaactggtgctttctcccagcccaactctactaatattctccatatgtagaggaaaagagagaatttacttayacagctcgtacaagtttagtagatatgcccagatatatttaatttcctaactagat

SEQ ID NO: 187039 - DNA, 402 bp, Homo sapiens
tagaagctttaatatattggagctacactgtgttcagcagaaaaagaaaaagtgtggccctccttttccttcactgtcctacttttcatctgggtttcaaaagttggatggcatatgctaccgtgtcaggaggtttctttgtaaaacagctccttcagcttcttcaggcccttgttcaaaaaagctgatggcaagtgtgctattcctttcagtggcttttaggccaatgtctgaggaaaatgctgccattcttttctttcactttccattctagaactggtgctttctcccagcccaactctactaatattctccatatgtagaggaaaagagagaatttacttacacwgctcgtacaagtttagtagatatgcccagatatatttaatttcctaactagat

SEQ ID NO: 187040 - DNA, 524 bp, Homo sapiens
atgcctactttcaccacttttattcaacataataggagaatttctggctaaagcaatcaggcaagaaaaagaaataaaaggcataaattagggaaagaagtcaaattagcttcactcacaggtgatctcatacctagagaaacctaaagactccaccaaagraaaaaaaaaactgttagaactgataaacaaattcagttcacacaaaagtcagtagcatctatacatgctaaccagcatacaatctgaataagaaatcaaaaaagcaattccattcacagtagctgcaagaaatataaaatatcaagactcaatctaaccaaataagtgaaagatctatatgaagaaaattataaaattctgatgagacaaactgaacaggtaacaaaaaatggaaatatattgcatcctcatggattggaataattaacattgtttaatgataatactactcaaagcaatttacagattcagtgcaatccctgtcaaaataccaacagcattcttcataagaatagaaaaaa

SEQ ID NO: 187041 - DNA, 597 bp, Homo sapiens
ccacatgtgatttatgggaatttaattaatacttcctaagtttcagtttcttcctcggaataatgaaaaaaataatgcactcctcacattttattgtgaggcttaaatggttcatttaagcctcacaacaaaaaaagtaagtgaactttctttcagtgttttacatctagcacacaaacaacctttattattagtgctttgcaattctactctcacctccccctcctctgaattacaatttaaccttacaaatactacccatcccacttgcccatatatatacccttgcaactttctttgcytagtagttaggaagttttagctactattttgtgctagattgaaacattttagtccatcataaaaatattttggaagcaagatgtaattacccaggctgccctttgggcaagagaagctgaaagaggaactctgaaccaccatatgggctgcgcatggtggggcctattggaaccaagcatttaaatccatttcttcctgagaacaattagatgaaaccatccaattcttccaggagatttgaaaatgatcacctattggacacagactctaggtaaattgctttcatttaaatac

SEQ ID NO: 187042 - DNA, 417 bp, Homo sapiens
ctttcatatttaaccttgatgtttttctctttcgtatcagagaaatagaaccccaatcataaaactttacacatgagtaagtctttaaaatttaccaaatactttcatgtgtatttcatctgattctcaccacaaccatttgagacataccaaacaggcagaattagccctgatttacagattcagagagtaagtgacaggcctgtggtcttaagaaattagtatatgcctggactagtacccaggtcttctgaayccaaggattgaagtgtcccttcccattacactggccctgcccgtaacaaaatgagaactataaaagcaacatagtaaattatttataaaactaaatatctgcaacctaaaagattttccttcaccgtaagatcatgtcctattgcctaccacaaaaagttg

SEQ ID NO: 187043 - DNA, 622 bp, Homo sapiens
tccctgttctcacccttgagtacatattagaagcaccagaggaggtttttttaataaaatacgaatcccttgatcctagctgagctttagagtgggctctgatgtcaatacattctaaaagcgagtcaggtgagtctaatgtgtagctaggtagagaaccaatggtctcaaaaatgtggatcaatgacccagaaaggatcaaggttgagagcaagctgatggcaatctgaagcagaacccagaaggaagataacaactcaaatgcctagggggccacttgaatgaatgaagtagacaatgtaagctcacatttttagactgtgtgagtgccagagagcgtgacaaactaaggagctcactgggcaagggctcctgagctctagttgatattgccatgaggaagtaacagatcttctcactggatccccccaaaaaaaacacaaatcaagattttcrtgtaaaattacccaactttcaaacgttggctcaattaataagcaataacactggatgagggaaacaaaacaaataatgaaaaacacaacatgggtttggcctcatcacatccagtctaaagggttgtttccattctacagaaaccacaacagcagcagcagcagca

SEQ ID NO: 187044 - DNA, 609 bp, Homo sapiens
gctcgctctcacttcaatcagattgatgttcattatagcattgattactaataygtgttcagtctcattcactgataattcttgagtgccggtggcagagcaaaagcattcaataaatatttattgtgtataaggaaaactttcagcactgacccagagtttgtgcttattttctacttagcagtatgaaaaataactaattcacttcaaaaaaagtgcaataaataaagatgaggatttttttgctgacttacttgggatttaattacatggagaattttgatgaaaagaaggaaaaatatcgtagtgcattatagtggtaatgtgtgggagttttcattgtttacatctcctgcctggggttttattaatgagctaactatctcgtatgtgataatgtattacaagttccatttggttgtgggtcaagataaaatagcacagtgtaatttcaatgaaatgatgtttgcttggggaatggcagactcgtttaacacttccttctctttttatgcactttagttgtgcgcaccccaagttacacagacccagccttcctcccatctagcttatgggaagaggcagttgagcaagctgtttggcaatcca

SEQ ID NO: 187045 - DNA, 637 bp, Homo sapiens
tataaagtattcctttttcctactcccacatctcacctaagttgttgctgaacatgtggtagacctcaattgatacttagtattttcttaatactttctattttgaccaatgattgtttttaaatgtaatgactatgctatttggagaaaatgaacatgtgggcacactttttgcaaaatttatttcatctctcattctaaactcttttaatggcatrgaatggattatttatttgatatatagcatattcaagtttaatttcagcacaatgagaaataagcactttgggtgccatctgtgtgaaactctttatgaaccttgcaaattgaggacaataactaaataaaatataatagacttgttcaggatgacaaatcagaagccattatgtcagtgaagacattttcagaaaatgaatattatgaccagcactgtacattgtccctgacatataagggactcatatatccttgtttttgaacacagaagcatcttaagtccagcacccaaaccctcatctgcaactagcacatatccttattttttttatcttaaattaaaaccccttctcctgagttctgtgcacctgcacatgagaggccagatgttcagctgtttgaacacaaaacaacaacc

SEQ ID NO: 187046 - DNA, 570 bp, Homo sapiens
ctaatcatccaaaaggaaatttattacacagtaatgtgaatagaatttcatttatgaagcttattttttcattctcaaatgatataaacaatgattaaaactctccttctggatctaaacagcggacttttttttccctaaaattctcagtctcagcgttttgattcctgtgggtaaagaggaagacgtgaggtatcattcccccatactggatgagtaagatcatctattcagagtaactaagcaaaaattcttaaccagttcaactacggaaagtcttgaaatcttaaaatcacaattttggttttagtctgactgattattcagcaatccccacatttgcgaaactgtagagaggggcaagtagttaagacttcarcatcttctttactcttgattataatttaatatacttaaactttaaatatgaattgctttccctttttacacaagttataaaaataagaggccctgtttacacagtttgcatttttatgaaatttgcagtttgaaaaaaaagctttttaaaaagtggtaactaatgcttttctttgaatatgctgtaacctt

SEQ ID NO: 187047 - DNA, 530 bp, Homo sapiens
atggaactcacatgtaggaaagagagcttaagagcaagtaaaggtgcactagagaaagagacaaactgaaaattcttgacagatatccaagaaaaatgtaaatttttcagttaagtccaagaccatgtgatagagtaatagtgctatttctgagtaaaagttgtacttttcatggtccatyagaaagaaaacattgttaactgccaaaaaagaatttattaaaaatgccatgttaaagtcattcaaaaaaactaaaataaatgaaatcttacttttttctgtagtgctccctggcaatctttggtcctgatctttaggaagtacatttgctttactacttgactcaaccacagattgttttactgataaagatacaagttccatagcattgtaagaatcatacaaatcccaggcagtggacattatgcctagataaagacacagaaaggtaaaaattgttttaaaccaaattccaacattttagctttatacataactagtcacagaaaaagctaagataagaatatcta

SEQ ID NO: 187048 - DNA, 435 bp, Homo sapiens
gaattcttaacatcatagaaygtaaatgtttcctacatttgtatgtatgtaatgcaactcaaatcataattccaatgagtttttttagtacagaataacaaattcatatggaagcatataagtctcataatagtcataaaaattatttctagaaaagctatagagatgggcaacttttcttactagatattaaaatttaccgcaaagctactacagtcaaaataggatagagttagcccagggaaaatagatcagtgaacagaataaacagactataatagttcaaagtataaaggaaacaacatatgactaaagtgacgtgacatttttacgggaaaaagataattcatttaataaatgatgcaggcaatatttgctatccatctggagaaaattaaaattaaccacttcatgctatgcaaaaataaatgtagg

SEQ ID NO: 187049 - DNA, 436 bp, Homo sapiens
aatgtaaatgtttcctacatttgtatgtatgtaatgcaactcaaatcataattccaatgagtttttttagtacagaataacaaattcatatggaagcatataagtctcataatagtcataaaaattatttctagaaaagctatagagatgggcaacttttcttactagatattaaaatttaccgcaaagctactacagtcaaaataggatagagttarcccagggaaaatagatcagtgaacagaataaacagactataatagttcaaagtataaaggaaacaacatatgactaaagtgacgtgacatttttacgggaaaaagataattcatttaataaatgatgcaggcaatatttgctatccatctggagaaaattaaaattaaccacttcatgctatgcaaaaataaatgtaggatgaattagatatgaattc

SEQ ID NO: 187050 - DNA, 474 bp, Homo sapiens
gggtgggtaagtctgtcaaatgtgagggtttaacaggggacttttatccataatgtgatattttggctccaattcatcatatttacccttatcatatttttcaattaattcagaacagggtgaggaaaagggatgcaattgtttggctattctcagagaccccagtagagaacaacctatgaagccttccttggcctctactttagcttcagtgggcccaatacaattacagcataattgagtcacaaaagcagtttattcttcctcccttctcctcacttgtcaaaagtatctattagtgacttatttattaactgagagcatccagagacaacctgtgcatgagatgctgtttggcccctaccttgcaattaaaaccacaaacttttctaagcacaaaactccttctagttatatggtamaacaatggttctcaaactttaccctgcaacagaatcacccaagggcttagca

SEQ ID NO: 187051 - DNA, 567 bp, Homo sapiens
actattggattagcatggtgcatttccagtgtcagccaggtacaaataaggaggattacttttgttattctggaccaatttcatgcagctacttctgtatgcaggctgtctgtcctcagcaatagcacatgtggtttcagatattcactgtatttttcattgaattacaagttgttactcttccatctgcaataatattagttagtttgttaagtgttctcaccagtggtttacgccagactttcttttattacattacttttcatctacctttctttctaaaactttataactctctgggacacgttttgccaattgaatttttttctccataaatgccagcaagctggtaaaacacatagacagcaagaatattttttatatttaaaaaataaaacygtagcattcactttacaatgagatcacgtgtctagaagggttgtcattgtaaactagggaaagtctgatgacagacaactgaaacccatccatgtgtaatattgtgatatataccccaaaaatgtattgtgccaggtatatggcactggtaattaaaattataaattt

SEQ ID NO: 187052 - DNA, 446 bp, Homo sapiens
ctttgtgagccattattctgtaagctcttactctgataaagcagacacacccctgtattttctaaaaaccattaactttctttgccaaatggcgatatcaggttttactctcacatgccttgccaacatttggtattattctcttttcttctgttttgccatttggatgggtgcaaaatggtatyttgttttaatttatattttttctgcttgaaagtgagttttagcacctcttcatattctgcttagctatttgggctttgtttctgaaaattgctgtcttctttgactattttaaaaattgttttcctagcataagttgttaatgtacagggtttaaaaaaacgtgtatgtatcttcagccagcctattaattatgtctattgtatcctttgttgagcagaagcctagattttattgtggttatatttatccaaaaatatttt

SEQ ID NO: 187053 - DNA, 432 bp, Homo sapiens
tgcccaggctggccttaatctcctggccttaagtgatcctcctgccttggcctcccaaagtgctggaattacaggcatcaaccactgtgcctgacccaccatgactttaaaaaataaaattaggggtagggagctagaaaataaataaataaataaaaattaaaattaaccttgctttcccaaagattttttgttgtttgttttgttttctcgagcaacatttacatagtttgtaargagcaaataggacttaacttttaaataaataatttattggaaaactccctccttcctactaatacttgttaaaaagctggtagtagcaatggacttcccagaacttggactataactctaataatgccctcattgtctacctacaaatttaagtattcatttaaattatttcataatctataaatgtgagagccc

SEQ ID NO: 187054 - DNA, 385 bp, Homo sapiens
tgaattcatttatcagatctaagaactttttggatgagtctttagggttttctaggtatatgatctgtctgttttgtctgctatataagtagttactcctgcttactttyggctttcatttgcagggaatacctttttccatcccttttccttaaatttatgtgcgtccgtatgtgttaggtgagtctcttgaagacaacagatacttggtggatttttattcattctgccattctgtatctttcacatggagcatttaggccatttacagtcgatgttagtattgagatatgaggtattgttctattcctgatgctagttgttgcctgaaaaccatggccttttttttcattgtgttacggttttataggccctgtgagatgta

SEQ ID NO: 187055 - DNA, 455 bp, Homo sapiens
caggttggttgataatactgctcaagttttctatattattactgattttctgtctctttgttctagcgattattgagacatatctgatgaatattgttgaattgtctgtttccttatttctgtcattttttgcttcatctgttttggagatctgttagtagatgcaggcatgtttatagttatagtttcctgattaatataaccttttaatgttataaaatgtctattattgtctgtggtaacttttctttcttagaatagattttgtcagatattggtatagctgttctctcttatgattactttttgcacggtatgtttccatttttttatttacaacctggttgcttctttgaatcaatgtrtatcttctatagacaggatatagttagatcctgtatagtttttttttaatccagtcttagaaataatctctgcttttgattaacatgttt

SEQ ID NO: 187056 - DNA, 576 bp, Homo sapiens
taaaactggtcacaattggtgtattgatggtattcatagccgtgagcctggataggatgaccaagacagtgagtgtggatagagaagagaagagtattaaggaatgtgcccttgaattcttctcttttattgtttatttatacttgttatgtttctcattttgtttggaaaattattacgctgtgtaaaataaaaaggagagttgacaattatttaaattactgaagatagtcaatcaaataattaaatttgcaaagtatattaattttccttaattacctgctctgattttctacaaatgtctgtattattcagatactatgacatctacattttgagctgttagtgttatttaatcaataacatactcatctttaggacagtaatgttcaaaaatgctttcaagcaattctctkggtggaggaatattctgcatctgtgtttattttcttaaattaagtgtgctttgttggaatatgagaattctttcctctttttctgatggttatgacttgacagtcctcattttggtgatatagtaaatggcttttaaaggttatgcctaagcatagctac

SEQ ID NO: 187057 - DNA, 576 bp, Homo sapiens
taaaactggtcacaattggtgtattgatggtattcatagccgtgagcctggataggatgaccaagacagtgagtgtggatagagaagagaagagtattaaggaatgtgcccttgaattcttctcttttattgtttatttatacttgttatgtttctcattttgtttggaaaattattacgctgtgtaaaataaaaaggagagttgacaattatttaaattactgaagatagtcaatcaaataattaaatttgcaaagtatattaattttccttaattacctgctctgattttctacaaatgtctgtattattcagatactatgacatctacattttgagctgttagtgttatttaatcaataacatactcatctttaggacagtaatgttcaaaaatgctttcaagcaattctctgggtggaggaataktctgcatctgtgtttattttcttaaattaagtgtgctttgttggaatatgagaattctttcctctttttctgatggttatgacttgacagtcctcattttggtgatatagtaaatggcttttaaaggttatgcctaagcatagctac

SEQ ID NO: 187058 - DNA, 407 bp, Homo sapiens
atttgaaaatccagttgtcttctataaatccagacattaaagagacttacaaaaatttaaaacaaaaacactattctcagtaattcttttgttttggaagatatttctcacagaaaaatgttagcataatagttgtcattttaaaatgaataaaccttcataattttctgtttaacttgacatatgatacataatgattgctataactcatataaacaaaagctctctgcggttctcaataatttttaagagtacaaagggaccctgaaaccagaaagtttgaaaactgctgatctattttagtaatctcatcaggtctaagaagaagctattattattcctatttttcaaatgaagataatgaggatcttagacatgraacaactaatctaacatggtcattctgc

SEQ ID NO: 187059 - DNA, 461 bp, Homo sapiens
atcgtgaggaccccacgctcatgaactcttccaatcctaattacctcccaaaggcctcacttcctgatactaccacagtagggaggcaagattttaatataagaatgttaagggtacacaaacattcagtccgtaacatctatcttaaaataacttttgttctaaaatagattttaagggctacctatttttcttctcaccaggtcagtttcccagctgcagagaacaaacacagcacataggatataaaattgtatattctgaaaattgtgtgtgaataatcataacctcattgatatgcatcacccaaaacaataaattgtgatggagaatggaagtatttatctatattttctgagcaacattacacacacacacacacacacacacacacacacacacamgatacggtagtgggaggaataaaataatcaaacaacgaattttactagaattacttg

SEQ ID NO: 187060 - DNA, 603 bp, Homo sapiens
tattggaggagtggcctgcaggraggtgactggatcacgggcatggtatttaatggtttagcaccattccccccgtgctgtctcatgacagagttctcataaggtctcattgttcgaaagtgtgcggcatctcctccctctcactctctctccctctctcctgctccaccatgttgagaacaatgctggcttcccttcaccttctgccattattgtaagtttcctgaggcttccctagtcatgcctcttgtatagcctgcagaactgtgaatcaattaaacctcttttcttcataaattacccagtctcaggtagttctttatagcggtgtgagaatggactaattcacctggggaaacttacaactgcaaaatagcaaatgaaaaaactttaaaacttttaccaaaagtaaaagaagttggaaatgttattcctcctcatatctttctacatttcttaataatttatagtgtttggaagaattaaaattaggatgcaggcttttccaattctgtaaaactgtatatctctatttctgtatggtagattagattcttattcttaattctttacctctccatatgttataattttacaaccata

SEQ ID NO: 187061 - DNA, 515 bp, Homo sapiens
tagaatttgagcagccaatgatctcagtgctatactgtaaaataaaaacactaatttttttaagagctccattttcatatgtcaggtaatatatgctgccttgggtatagtcttaattctctgcgtttgctctatgcttcttcagagctcagtgaatgrtactttatggttgattcaacaaagctggtttaaaaatccaaggttctctaatgagtcagaaaaagaaagatgttacattctctaccatctgatcactttcagccattgctcgtttctgaacacatatttacttattttttttataactgcatgtaattttaatttgtgcaacctttccattgggtagtggaaactcggtatcaattaattcagagtgtcctctggcaatttattttattgtggtaaaaacacaacatgagatctatattttgaacaaacgttcatagtgtgtaatacattactgttgtctgtaggtacaatgttgtacagaagatctctagagtttcttcatcttt

SEQ ID NO: 187062 - DNA, 515 bp, Homo sapiens
tagaatttgagcagccaatgatctcagtgctatactgtaaaataaaaacactaatttttttaagagctccattttcatatgtcaggtaatatatgctgccttgggtatagtcttaattctctgcgtttgctctatgcttcttcagagctcagtgaatgatactttatggttgattcaacaaagctggtttaaaaatccaaggttctctaatgagtcagaaaaagaaagatgttacattctctaccatctgatcactttcagccattgctcgtttctgaacacatatttacttattttttttataactgcatgtaattttaatttgtgcaacctttccattgggtagtggaaactcggtatcaattaattcagagtgtcctctggcaatttattttattgtggtaaaaacacaacatgagatctatattttgaacaaacgttcayagtgtgtaatacattactgttgtctgtaggtacaatgttgtacagaagatctctagagtttcttcatcttt

SEQ ID NO: 187063 - DNA, 419 bp, Homo sapiens
gaattcacatatgttttctcagatttaagtgtcttattgagaaggtttttttacrtcttctaggtagagatggtgctacagcttgaatgtgtcccctaaattcatggtttggaagtttgatttacaatgtaacattattggaaggtggagactaacaagaggtgattgtgtcaggagggtggagtcctcatgagtggattaacattgttactgaagtagtgggctagttataaaacgagtgggttgttataaaaagagatctgcccgtgctttctcttttgcatgctcacttccaccttcagcccttccaccatggatgacccttgctagatgctcttggacttcccagcctccaaaaccatgagccaaataaatgtctgttctttataaactatcctgtctcagttattctgttatag

SEQ ID NO: 187064 - DNA, 419 bp, Homo sapiens
gaattcacatatgttttctcagatttaagtgtcttattgagaaggtttttttacgtcttctaggtagagatggtgctacagcttgaatgtgtcccctaaattcatggyttggaagtttgatttacaatgtaacattattggaaggtggagactaacaagaggtgattgtgtcaggagggtggagtcctcatgagtggattaacattgttactgaagtagtgggctagttataaaacgagtgggttgttataaaaagagatctgcccgtgctttctcttttgcatgctcacttccaccttcagcccttccaccatggatgacccttgctagatgctcttggacttcccagcctccaaaaccatgagccaaataaatgtctgttctttataaactatcctgtctcagttattctgttatag

SEQ ID NO: 187065 - DNA, 419 bp, Homo sapiens
gaattcacatatgttttctcagatttaagtgtcttattgagaaggtttttttacgtcttctaggtagagatggtgctacagcttgaatgtgtcccctaaattcatggtttggaagtttgatttacaatgtaacattattggaaggtggagactaacaagaggtgatkgtgtcaggagggtggagtcctcatgagtggattaacattgttactgaagtagtgggctagttataaaacgagtgggttgttataaaaagagatctgcccgtgctttctcttttgcatgctcacttccaccttcagcccttccaccatggatgacccttgctagatgctcttggacttcccagcctccaaaaccatgagccaaataaatgtctgttctttataaactatcctgtctcagttattctgttatag

SEQ ID NO: 187066 - DNA, 601 bp, Homo sapiens
ctacttatagatgatttaagtggttatgaccagaatgttggtagactattattgacagtaaagctctttctgatgaagtctcagacagaaatgaggaacaaggtgttggaaactagataaaaggccatcttgttataaagtagcaaggaacttggctgaattgtgtctgtgtcttaggactttatgaaatacagaacttaagagctggaatatgatgagctagactatctagtggaaaagatacctgatcagtcaagcactctggctgctgcattgttacttttgaccacatacagtgacatgcaagagaaaaaaataaaggtaaaatttttaattaaaaaagaagcagaatagaaaastttggaaaacttttgtatgaccaagtgaccttttgttaaagagattaatatggatagaaggaagtcaggtgctatttgtaaagacaaggggagaaagatcctgaaggcatttctaagatcttccaggctgccctcctattataggctcagatctctaaaagggcagagtgcttttgggaaatgggtccaggaagaccttcaagagcttgctggccagggatacctcaagactttgctctcca

SEQ ID NO: 187067 - DNA, 601 bp, Homo sapiens
ctacttatagatgatttaagtggttatgaccagaatgttggtagactattattgacagtaaagctctttctgatgaagtctcagacagaaatgaggaacaaggtgttggaaactagataaaaggccatcttgttataaagtagcaaggaacttggctgaattgtgtctgtgtcttaggactttatgaaatacagaacttaagagctggaatatgatgagctagactatctagtggaaaagatacctgatcagtcaagcactctggctgctgcattgttacttttgaccacatacagtgacatgcaagagaaaaaaataaaggtaaaatttttaattaaaaaagaagcagaatagaaaactttggaaaacttttgtatgaccaagtgaccttttgttaaagagattaatatggatagaaggaagtcaggtgctayttgtaaagacaaggggagaaagatcctgaaggcatttctaagatcttccaggctgccctcctattataggctcagatctctaaaagggcagagtgcttttgggaaatgggtccaggaagaccttcaagagcttgctggccagggatacctcaagactttgctctcca

SEQ ID NO: 187068 - DNA, 601 bp, Homo sapiens
ctacttatagatgatttaagtggttatgaccagaatgttggtagactattattgacagtaaagctctttctgatgaagtctcagacagaaatgaggaacaaggtgttggaaactagataaaaggccatcttgttataaagtagcaaggaacttggctgaattgtgtctgtgtcttaggactttatgaaatacagaacttaagagctggaatatgatgagctagactatctagtggaaaagatacctgatcagtcaagcactctggctgctgcattgttacttttgaccacatacagtgacatgcaagagaaaaaaataaaggtaaaatttttaattaaaaaagaagcagaatagaaaactttggaaaacttttgtatgaccaagtgaccttttgttaaagagattaatatggatagaaggaagtcaggtgctatttgtaaagacaaggggagaaagatcctgaaggcatttctaagatcttccaggctgccctcctattataggctcagatctctaaaagggcagagtgcttttgggaaatgggtccaggaagaccttcaagagcttgctggccagrgatacctcaagactttgctctcca

SEQ ID NO: 187069 - DNA, 437 bp, Homo sapiens
catgtcactaccagcattttggtcatgaacattcaaccagtctcttaaagttccaaactttccctcatcttcctgttttcttctgagccctccacacccttacaacttctgcccattacccagttccaaagttgcttccacattttcaggtacctttctagcaatacrtcactctttggtaccaattttctgtattagtttgttatcgtattgttataaagaaatacctgagactgggtaatttataaagaaaaggggtttaattggctcatggttccacatcctgtacaggaagcatgatgctggcatctgctcagtttctagggaggcctcaggaaacttccaatcacggtagaaggcaaaggggaagagaagcatctcacatggtgggagcaggagcaagggatgggaagaggtgctacatacttttaaacaac

SEQ ID NO: 187070 - DNA, 437 bp, Homo sapiens
catgtcactaccagcattttggtcatgaacattcaaccagtctcttaaagttccaaactttccctcatcttcctgttttcttctgagccctccacacccttacaacttctgcccattacccagttccaaagttgcttccacattttcaggtacctttctagcaatacgtcactctttggtaccaattttctgtattagtttgttatcgtattgttataaagaaatacctgagactgggtaatttataaagaaaagggrtttaattggctcatggttccacatcctgtacaggaagcatgatgctggcatctgctcagtttctagggaggcctcaggaaacttccaatcacggtagaaggcaaaggggaagagaagcatctcacatggtgggagcaggagcaagggatgggaagaggtgctacatacttttaaacaac

SEQ ID NO: 187071 - DNA, 521 bp, Homo sapiens
gagacaattcttcatgagtatatcacattattttatgtcttgcaagcaagacactggctactactttttccaaactatccttttaaggacatttatatatttaagaaatataaataatatttccagcaggattttattgtacatatagacaagctgattcttaaaccttatggaaaggcaaaggaactacactagacaaaaatcattttgaawaagaacagagaagaattacattacccaatttaaaacttactataaagctatagtaaacaaaatagtatggtattgatgaaaggatagatataatagatcaatagaacagaattgggactctagaaataaacccatacacatcagttgaattgagttttgtcagaggtacgaagacaatttaataaagaatggatagtattttcaacaaatgtgctgtaacaattttacattgtattagtcacagttatctaaagggagagaactaataggatagatgaacttatgaaggggaatttattaggagaatt

SEQ ID NO: 187072 - DNA, 603 bp, Homo sapiens
cgtatttcactgatacatttgcctgatattgttgtcctcatccaacatgaatgccgttttatccatcaaagattgtggagtatttccccccacccccttttttatttttattttttttactaggaaggaaactcatcataaccagcatcaccaaaagatgtgttgtccaaaccattttaatttgcaggaaaacaygactgactaaggaagaccattccaagtaaatctgattgtatatgttgtacttctagagaaatttagacatttgtaggaaaattattttgaaagattatatagatatttaagcaattttataatcatggaaaatggcatatttgaaaagtgttatcaaatatagagcaagaactctcaacaatgcatggtgtaaggtggctggtgtacactgtatgatcgtattagtcaacacttttgcccatggacttatggatagtgagagccaccactctgattaaactaaacaatttatccctgtaaagaaccacagaatattcttatcatcaattacaactcttagaaagagattcaaacctatgtcatttaccaactagacactaaagtttcttgtccttaaaagaaatttca

SEQ ID NO: 187073 - DNA, 603 bp, Homo sapiens
cgtatttcactgatacatttgcctgatattgttgtcctcatccaacatgaatgccgttttatccatcaaagattgtggagtatttccccccacccccttttttatttttattttttttactaggaaggaaactcatcataaccagcatcaccaaaagatgtgttgtccaaaccattttaatttgcaggaaaacacgactgactaaggaagaccattccaagtaaatctgattgtatatgttgtacttctagagaaatttagacatttgtaggaaaattattttgaaagattatatagatatttaagcaattttataatcayggaaaatggcatatttgaaaagtgttatcaaatatagagcaagaactctcaacaatgcatggtgtaaggtggctggtgtacactgtatgatcgtattagtcaacacttttgcccatggacttatggatagtgagagccaccactctgattaaactaaacaatttatccctgtaaagaaccacagaatattcttatcatcaattacaactcttagaaagagattcaaacctatgtcatttaccaactagacactaaagtttcttgtccttaaaagaaatttca

SEQ ID NO: 187074 - DNA, 597 bp, Homo sapiens
acacacatcaacttagatcaaaagtagaaaaatcacctaagagttcatataatgtgactctaataaaggtatcttgtagctttataaaactacaagacaaacaaaactaaaacaacatacactttaggaatacatgcatggaggcaaaactcaaagaacaacaaagcaataattaacacaaaattcaagacagtggttacttgaggtcaggggagaggctggttttgactggggaccccacaggggtgtctatggtcctggcaatgttctacttcttaagtcaggaggtggacacccaggtgttcattttattattgatctttaaactgtacataaacattttataactcttttttaatgtactctatatttcacaaaaataaataaaagtagaggtaagttgctgtctatttaagagaaatggtattgaaacaatttttgccagtagctgcttgcctgactgacagatttcccagcaggaactggatttggaaagcagctttccttctgtccatttcctgataaattattaatgaggctttgaawtacagagaaaagaggacatagagcacatagaaaatgttacagaccttattt

SEQ ID NO: 187075 - DNA, 573 bp, Homo sapiens
ggccactgttggaggctgacaagttagggcatttgttagaggttgactagttaggatattgctggagtctgaccagttagcacactattggaggctaaccagttagggcattgttggaggctgactagttagggcacatgagtaaaggaaggtgggaggcaaggcacccaattctgaccagttagcacactattggaggctgactagttagggcacatgagtaaaggaaggtgggaggcaaagcacccaattatcctacccttgccargaaatacaagattccattttaaatcttatgtcagtcatttagtcagaattgcacacacacacacagtataatacatggaaggaatatcaataactcgtaatttgaaatctcaacccataggacaatcactgttttctattcaaatattttgtaaaatgtcaaaacatcctttgcttctctgtaaatgtaaactgtgttagttatattcaaacagttaatatgattacccatcttttaaaacctagttccttagaggtgattaacaagttcaacaattacaatcaaaccaatgaatatttgaaaat

SEQ ID NO: 187076 - DNA, 553 bp, Homo sapiens
cacactgggcaaagcaggtagttcttccaaaamtacaacatgctgagtacacagtgtgaattgtcagtgaagagtttaagagacacaaatagagcagagttacttctaaagtaataaaaatatggaaatactttgacaacaagcctgacattcatgcattcaaaaaacatttaaagaggatacaaagtaaaataaatatatcatctcatccttgtcctggaactcatgtaaaaattccacaaaccagagtgactcagaacaataaaaaatatttccatggacaaaatggtcttaatgttgtagtaaatacattcagtgacctcttttaacagcagaataggttttcctatgtaataggaagtggaattgttgctacagcataaaataaggagcaaacacaatatttaccatgacttgttgggctactatgaacccaggaaaacacaactgtttccttttgacatctctgcctctttgtccatggaaaattcactgagcttagggagagatcatgagaacagatatacagttactttttgtttctattactaat

SEQ ID NO: 187077 - DNA, 566 bp, Homo sapiens
ggtcaacagaactggaaattatttaatcacgataatctttaaaagttatcaaagtcaaataaatattaaccctgtgattattcagagaactcatgattttatcaaatggtcaatacgtgttaaagttttataaccatttagctcattttccctcttattgaacttttgttataacttttacatgaataagatctcttgaaacatttcccacagactgttacatacccatttcattttttcccattgatttcttggatttccaaacatatgggttyatttctagtggaaactgctaaaaattaaccaagatatttagcattttggtttccatattagtaaacggagggcacaaagcttaaaaatgaggtcatttccggctctagacttctaaaagttgcagtctcagaaaaaattttggcattcataaatatgactctaactgtaatcctattttcctcccatagaatttactgaaaataccccagatggttactcatgagtaaagtattctggtgtttaaccaaatccaatcagaggcaagaggctggatatatgaatgcagacaa

SEQ ID NO: 187078 - DNA, 545 bp, Homo sapiens
ccagagatagaacaaaataaaaatatttagctgccaaaaagaagttgttctgagacatcagtacaggttttcttctgtgatgatatcaagttggtcttgcagcaaatgttgagaaagtaactttacaactgcaaaataatcattggatgttgcacagagagaggtccctctgttctctgtggatatacagagcaaacccagaatgcacctggtcaactcgagccctcattatcttgaagacacctgatattccataagastagatgaggctgccagctccttgtccacactgactacatgccatgtaccccattttataactaaaaaggatttaaaattcatgaagcttgttgaaagctcaactgtcacattctactcattccaaagtgtatgggaaaaagagcagaacagacatttcaactgaagccattattgtgcttgaatagccatattccattaaattgctaataaacctactagacggtgttgatcacatcagccatacagttgcattcctttcctttataccaacttgcccagtttca

SEQ ID NO: 187079 - DNA, 645 bp, Homo sapiens
cttcctaaattaatatctaatttaacaagaagtttattgaggattttcattcacttatttatttccccaataatgaaaacggctttatgcttttctgactatataagtaatgaattttkaaaaaattcaaaaacaagttatagacagaaagaaagtaaaaatgtcctgaaacctcatcaccctgtgataaccacgttaacattttggcacctgtcctttcacacatcacacatctccgtatacacatttatataaagagagtaacatgcatgctattcttattatggcccttaatttttaaaatattgcttggttggttgttttcttcatctttgggaatcaatatcaaaatatggtatacatatgttcttttccttccccatgcttatgaaatcagatacatatataccctgtgtgtctgtgggtaataggcattctatgcattttgcctctctcatctaaactgtcatggattcccctccaaaaaccctggatagttctaaatcattctttttaatagctgcataatttttctattgtatgcatgaagcataatttatttaatcgtttttctacctaacacttaatttttaactttttttatcccagtggcacaccaggatgcagtaaatatctttctgtgtg

SEQ ID NO: 187080 - DNA, 317 bp, Homo sapiens
tcagtcttaaattttagccattgtagtgggtatgcctttctggttttaattgtaattcctgatgattaatgatattgagcactttttcactgcttattggycatagttttttgtgtgtcagttcactctgactagctggaatttaaatgtcttgcagccctgtgacaactctgggaattgtttagcttacagttgttcttttttcctttagttattctttgcccatcctcaaggaatcttaccctacacaggagctgtttagaattcaggctgaggctgaaggagagacctccttgcatatttctggaactctactt

SEQ ID NO: 187081 - DNA, 589 bp, Homo sapiens
tatcaggtatcaaatatatggcctactggaaagtatatatactctacattatagtttgataggtcatttacagaactgcgtaactcatgcaggaatgtacaccaaaacaaaaagatgtttaatgatagtgtagtaactgttaagttacctttgcatacatgttgaactaaaacatgtttttgtaaatatctttaagaactgaaacaatcaatgtactatattgttttaagttctctaagacaaatctgttgaataatacataaacacttgagtagtcattaaatgagtccatgttgaatttgattaaactggaagattcctgggtccaggaaattaaaaccatrcacaataacttagtgttctttctagttggtataaaacaggttgttacaacaaatataatgagaatttagataatatttgtaaaaacgtattcattgatggaagggtttcattggcaatcttcatgtccatttttggtcctttgacttgaatacagcagggggattctgataatgttagatttaaaggtctttccaaaccatacacttgatcaagtttggaaattaggggtaaggtccattgaggc

SEQ ID NO: 187082 - DNA, 366 bp, Homo sapiens
agctaatggcagacttgttgcctgtacaagaacctatgaagagagcatcaaaggaagttgtgggcaaaaggaaaacaaaattaaaactgtaattatgttttttaatttaaaaatattcttaaattgtgggtagttttaaagggaaatatgttktattttaatactgttcatttcagtgttaaatctttttaattttatttcagaattacttacttttatgtgtgatttgtaaactaccttgtgtcaaaacagtggtgggtaggtgccaaataccacttgatacaggtctcagaagcatttttggttcctccacattctatccttatctttacttttcatcatcattttctctgtcatccttttttc

SEQ ID NO: 187083 - DNA, 604 bp, Homo sapiens
gctttgggcactatggtcctctggttataacataggcttatggggctgggctcggtagctcacgcctgtaatcccagcactttgggaggccaaggagggtggatcacaaggtcaggagatcgagaccagcctgactaacacgctgaaaccctgtctctactaaaaatacaaaaaattagccagatgtggtggcacgtgcctgtagttccagctactcaggaggctgaggcaggagaatcgcttgaacccgagagggggggggttgcagtgagctgagatcgcaccactgcactccagcctgggcaacagagtgagactccatctcaaacacacacacacacacacacacacacacacacacacacacamaaccaaaaaaaacatagacttaatggaagccaggtaataaatggagttctggcccaagtctgtctcacagtgactccactgggactatgcaattttcagctggcagaatcctcacactggttccctcacctagagagtaagagttattatggcaggaagaacaacatgagagctcctgaaactgaaaggcagcaaatcagaagctatattgaattattggagggacagccaagat

SEQ ID NO: 187084 - DNA, 582 bp, Homo sapiens
tgaattcaggcacattcatttccctatggttcagttgtcctcatctatcaaagaggaataaatgatgatgacctcatcaytcaatgacctgcctcattgaatcactgtaggaattaaatgagtttaaactgtgagaacaccttaagacagggaatgtctggaatgtactaagcactctatatgtgtttactggtttttaaaaaattacatgctttttgtgaatttgcacttaatcttatcagagtagcagttttattatcccaatcttgcagatgttgggtatcatcactctgcctttgttatcactagtctttaataccttatcacagcaaaaggcaataactaggagctccaacttttctttcagattttcctcttccctttgcaactgattaactgtttaagtcttactgtgaaaaaccagcaaggaacaactcacttgtgcttttgcttttagcaactgggttggagataagatgaccatgatttatgataaaaaaataaaagtgcttaacccagacatcttattaacaaatgtggttactgttaagacatgtaatttttttttctgttatcttattc

SEQ ID NO: 187085 - DNA, 489 bp, Homo sapiens
ataatagtgtctaggagcaattttgtgagctcagattaaaccttttcattgtcaccaaggagtcaacctaaaagcctatgaaaatgatgttcattttgtattctacccttacaaagttyttataggcctatagtaacagctatgactcctgacccccgcaccaaaaagtaaggcacacgcttggactaagtcggttaggaataggaatggataaataatggggcaatacaaagatccctggtcaacttcacagtctgtcatctaggtgctccggtttttaacatcttctgcaaccttcgggaaacagaacagatcatcgcaatctactgtttttttttttttttcctctaagaaaatgcccatggaaaagtgctggatgtcttgcaaatctgttatcgcaatgcaaaatcacaccgagtttctttaagaatcacagtgcattccctctctcccagaactaaataaagcctgccttgggaagcaattcaa

SEQ ID NO: 187086 - DNA, 489 bp, Homo sapiens
ataatagtgtctaggagcaattttgtgagctcagattaaaccttttcattgtcaccaaggagtcaacctaaaagcctatgaaaatgatgttcattttgtattctacccttacaaagttcttataggcctatagtaacagctatgactcctgacccccgcaccaaaaagtaaggcacacgyttggactaagtcggttaggaataggaatggataaataatggggcaatacaaagatccctggtcaacttcacagtctgtcatctaggtgctccggtttttaacatcttctgcaaccttcgggaaacagaacagatcatcgcaatctactgtttttttttttttttcctctaagaaaatgcccatggaaaagtgctggatgtcttgcaaatctgttatcgcaatgcaaaatcacaccgagtttctttaagaatcacagtgcattccctctctcccagaactaaataaagcctgccttgggaagcaattcaa

SEQ ID NO: 187087 - DNA, 519 bp, Homo sapiens
gaattcaaagcagaacttataagagtggtaaaactttataatagtgtctaggagcaattttgtgagctcagattaaaccttttcattgtcaccaaggagtcaacctaaaagcctatgaaaatgatgttcattttgtattctacccttacaaagttcttataggcctatagtaacagctatgactcctgacccccgcaccaaaaagtaaggcacacgcttggactaagtcggttaggaataggaatggataaataatggggcaatacaaagatccctggtcaacttcacagtctgtcatctaggtgctccggtttttaacatcttctgcaaccttcgggaaacagaacagatcatcgcaatctactgtttttttttttttttcctctaaraaaatgcccatggaaaagtgctggatgtcttgcaaatctgttatcgcaatgcaaaatcacaccgagtttctttaagaatcacagtgcattccctctctcccagaactaaataaagcctgccttgggaagc

SEQ ID NO: 187088 - DNA, 584 bp, Homo sapiens
aacctctgggatacagcaaagatggtgctaagaggaaagttcatagcattaaatatctacagcaaaaagtctgaaagagcacaaacatacaatctaaggtcacacctcaaggaactagagcaacaagaacaaaccaaacccaaatccagcagaagaaaagaaataacaaaggtcagaacagaactgaatgaaattgaaacaaacaaaaatacaaaagataaatgaaaccaaasctggttccttgaaaagataaacaaaattgatagaccattaatgagattaaccaaaaaaagaagagagaagttccaaataagctcaactagaaataaaaagggagatattacaaccaatatcacagaaacccaaaagatcattcaatgctactatgtaaaccttcatatgcacaaactagaaaatctagaggagatggataaattcctggaaatatacaaccctcctagactagtcaggaagaaataaaaactctgaacagaccaataacatgtagcaagattgaaacagtaatttttaaaattgccaacaaataaaagagtccaggaccagatggattcacagctgaattc

SEQ ID NO: 187089 - DNA, 455 bp, Homo sapiens
gtgaagggtggatgagggataaaagactacacatttggtacagtatacactgcttgggtgatggggagcgccaaaatctcagatatcaccgctaaaaaacttacccatgtaaccaaaaaccacctgtttccaaaacactattaaaataaaaactcatactcagaccttggatcaactttatatttttgttttttatttagaggcaatgcatattttttctctatactttcagaagcagaccaaaaacattcataatgrtaagtaatgcatgggtttctttgtttgtttgttaagttacatcctcttgagtgttgatgggattggaaaaattaatgttaaggggtgaggagagtgtggaagaaagaagtgatgggaagaaattaaataaataaaactggaaagtctcagaatataaaatcaatgtgcaaaaatcacaagcattccaaaacaccaat

SEQ ID NO: 187090 - DNA, 513 bp, Homo sapiens
taatccaaataatctacttagctaattatcttaaaacaaattagctattgactaataaaatattatatgaatataaaacattgattaatactatgttacaaatataaaaatatttaaaataaaatcttttgtaaatctaaacccaaaccccctagttttatcattgacatccttcttttgccatcatgacctacctgctagtcatgtggcagaaaagtagagagaatcaaggtatctggactgggagacactattactatcacaaaatgagaggctgttttgaatattgaaatgaagtctggaagagaactaagattcttgacctctgacatgaagttattgtacaacttggaccagttacagaatttctgagccttagtttcctaatctgtaaaatgcaaagaatagcctcatactacttagtgtatctagttgrtttgaatatcaaataagataatgaaggtacaaatatatagaaaaataaaaggcattattgctgtcattatgaagcca

SEQ ID NO: 187091 - DNA, 557 bp, Homo sapiens
gatataaatggcaggccccgtctatcccagacagaaaaagacgcaaaatagagcagaagccatcctactagaaaagtgagctgtacaaggtsacctttaggttaaaataaaggccactgtacagcaaggttattcgtacagtacaaggcaagggcatggagggttttggtagcttgattctaaagaaacttcaggtctgaaaaaataactaaaaataagacttaaacatgaaagataacaagaaaatcaaggaaaatcaaataaagtaagcaaggaataggaaaacgtataaacgttaacaaaaggagtccctaagcctagagaaagaaactggctcgtgacaagtatctcctgcgatctggacctacatgttgtttccaccccttcaacctttcccctactcccttccccgaaacacatgcacacacaaagccatcgaccattgtggactttaaccctattttgtttgtttgtcttttacttaatgctcgtattttttacttttttcactttgcctctcactttagccaaaaatactggctctaccatcacctgaa

SEQ ID NO: 187092 - DNA, 593 bp, Homo sapiens
aatgcccggtggaattcaagttttatggagagtttggaaccctgttatatgttgtttttcagtatagtcaggtctgttttacttccattatgacctcccacattaaggggatgttatcaacagtagaagcctccagatttgaattttggttatcatactcttgccacttatactagaattttggttcaatgtaagctttaaagactatttttcttttaaaaaggtcatcacaaagtcagaaatgattgaataccatgacataagtggctgttatattcttcgtccctgggcctatgccatttgggaagccatcaaggacttttttgatgctgagatcaagaaacttggtgttgaaaactgctacttccccatgtttgtgtctcaaagtgcattagagaaagagaagactcatgttgctgactttgccccagaggtaagtgagcttgcttttttattttttgcaatgttctctgacaaactggaaaatatattttcaacttttaacaaccaattttgaaaaatataaagccatttttrttaaaaagttctgtttctacctttatagcaagtaatgattttgttacattaattaa

SEQ ID NO: 187093 - DNA, 423 bp, Homo sapiens
ctgagtcagagatgaaggattatattattcacagcacagaaagtggcatcatgtttgtattagttccatttgcctgctgagtctcagcggggtgacatagaatgaaaaggtggatattacacatgcaacaggcagagggcatgttttgtgttgcagttgcggaacatcgagcttgggagacccacttttcaaagagtaaataagcagacctgctcgtcatactggagggagagcgtatttcatccctctaagattgctttctacaaatacagccctatgaaatggccccagggccccagcagtcagagccttgcattcctggcctagcaatatgagtaggaaaatgtgtacaactattatgcatcagtgaaaaatgaaagatgtgtagkagcactccatcagttctatctcccaatggttata

SEQ ID NO: 187094 - DNA, 514 bp, Homo sapiens
ttactttgataaaataattatatatatatatatatatatatatatatatatatatatatatgtatatacacactcacacacacacacacatacacagagagagagagatcagttattacttgaaggaaagacctgagttctcaaaaagaaagaaaacaaaactcagggaataagaagaaaatatataataaatatgttatatgtaataaatacaatatttattttacaattttatcacaaatttcagctgagtgtatgtaaattttggaatgtgcatattcctttttattctttcaaggcttggaagaaaattatttattccatattccagaaaggaactttaatttgtgcaagtggtrcttgctggtgttttccaacacaggctaaccacaggtggcatggagtttaacacataataggagatcaataatcatcttgtttattaaaggaacatcagctcctcaaaccttccctgcaatgtgggatagggtgtggagcatgggcgtgaggattc

SEQ ID NO: 187095 - DNA, 545 bp, Homo sapiens
tctagtacttatttccccaagttcactactctaaggagataggaaggagaacccatttgggagctgtattagtttgctagggctgcggtaatgaagtaccacaaactgggtggtttaataacagaaatttattgtctcacagttctaaaggcaagaagtctgagatcaaggtgtcatcaaggttggwtccttttgagggctgtgaggaagaatctgttccatgccttcttggcttctggtggtttgctgacactctgctgttcgttgacttgtagacatatcaccccatctctgctctggatttcacatggagttcttctttggtgcatgtctgtccccagatttctcctttttattggggcaccagtcattacggatgagggctcacctaatgagctcattttaatgtgattattcggtaaatgtcctatctccaaatcaggtcatattctgaggtactagatgttagaacttcaacatacaaatgggggcagggggaatataattcaacccataacaagggctctctaattctcagtttagta

SEQ ID NO: 187096 - DNA, 422 bp, Homo sapiens
gggtttatttcatagtttatctttaaacattttttagtataagaaagcatgtaaaataatctgcattcctccatatttttaggtaaatagcagccccagtacaattttctggaaaaagttattccattttacagatttgcaataccacttctgtcatatctattatgtccatyatatatgtaggtctttcaacacacacaattctgttccattggtctatccaacaccagtagtaccttgtcctcattatgacagctttatgataaaacttgatagctggtagggaaagtcctcctgactgatttttcctcaaggattttttggctttccttggccctttggatatttgttttaaagtttaggttcagcttactgaatgtcttaaaaaagtgctctgatattatcaacaggacattacatgt

SEQ ID NO: 187097 - DNA, 621 bp, Homo sapiens
gagactctgcttttgtcattcacagtatctgtcagctaaagcaaggaacgcaacctcagtttaatttacactaaggaaagactaggtttcttcctctctaaagtagagaaatgcctgcttcccaagacttctgtatgggctgarttgaataattaatgtgaagtactttgcaaacttatgtaagttatgtgatgtattattttctttactaaaattgctacctatggattgatgacttaaacaggtgccgagaaggatccagatactgcaagacaaaagatagtttattatgaattaaaaattgcatatttgaaagaaacacaccatgtaaattaaagccatatgtataaatgatataatgattttggtgacataaaaaaaaagagtcagaatcataagatctaaaacctaggaccggttttgctactcttataagtatgtgatttttggcaagttcctctccttgctttctttaatcaggagacaggactgagtgattttgaagtcttttccagttctgtgattcagtgatgcagatcctagcagactcaagagcatgtcaagttcttcattcttaaattcatatgtatgtgtttctgtacacctcaaattttattttgt

SEQ ID NO: 187098 - DNA, 551 bp, Homo sapiens
gagtatattagtacagcctatgtatgttatatgcttatgatgtgtgtatgtataaacaacttacattaattggagttttactagatactargcttatgttaggttatttaatccttactatatcctgtaagataagtactgaagtccagagaagttatgtagcctgctgaagatcaagtgtaatataaaagtacataaatacagtatactgatggtgcatcctcaaattttttttaaactgaggagttaagtgatcaaaatattttggaggttgtgatctgcagcttggcttgcttctcactctatttactcctaccagattatcttaaatgtactatggttttaacaaccattcataagcatttgattcctttttttccacctccagccctggagagcttcagacctgaatttccaaagccttctggttacttccactttaatatgtggaagacataatgagaagactttgaggctcacgtattgaatttttgctagtataattgattctaattataaagaaagttaaattttcagaaaaaatgtaaaaa

SEQ ID NO: 187099 - DNA, 551 bp, Homo sapiens
gagtatattagtacagcctatgtatgttatatgcttatgatgtgtgtatgtataaacaacttacattaattggagttttactagatactaggcttatgttargttatttaatccttactatatcctgtaagataagtactgaagtccagagaagttatgtagcctgctgaagatcaagtgtaatataaaagtacataaatacagtatactgatggtgcatcctcaaattttttttaaactgaggagttaagtgatcaaaatattttggaggttgtgatctgcagcttggcttgcttctcactctatttactcctaccagattatcttaaatgtactatggttttaacaaccattcataagcatttgattcctttttttccacctccagccctggagagcttcagacctgaatttccaaagccttctggttacttccactttaatatgtggaagacataatgagaagactttgaggctcacgtattgaatttttgctagtataattgattctaattataaagaaagttaaattttcagaaaaaatgtaaaaa

SEQ ID NO: 187100 - DNA, 485 bp, Homo sapiens
gaatgactgaagatgatattatattttaatataatataatattaaataaaaattactccgcatctttttttttttttcccatgcaactttcttaggatttgtgtccttccctttgaatgctttggaccactctctaggaaggttttctctctggtaacctgttaaacacttatactttatcaaataaatatagttttgaaacacaataaataaatgcatgtgaatatgttttagggctttaaaaaataatcgataaagtgctagtttcatgtttctacctgttctaacagtgctttttaatttacaggaaaccttcatgaagtgctctatttaaatttgaggataaggagaatttggagacggtccagatagagtaataaaaatcagtaagcctagatgcaaatacattttgggaaaatgataatgtgtgccaagattttagtcaacctgccaaaaaytgcattttacaaaatacagtggtgtta

SEQ ID NO: 187101 - DNA, 339 bp, Homo sapiens
aattgagtggcgcttccatctaaccgtcaattgcaagtgattgatctgataaaagacaaayagaggaagtagaatctaatagaattctgcaaatgccttccaagtgctaaatgctcagttaaaaccatgttatgctgatatcatgaattggtatcagtgtttggcagcaagaatctgtgtgaaaatacattttcaaggatgaaatatgcaaaatctcattacccatcagcactgacaaatcaatatagacaactgattttgatgacagggcacactaaactttgaacttcaataagtgaactgttatcccaaataaaatcatttcattcttcttagtaa

SEQ ID NO: 187102 - DNA, 429 bp, Homo sapiens
gtctacgatcaaggcaccagcaggttcagtgtcaggagaaggctcattcctcacgagatgcactgcccggcttcttcaaatggcagaagggagggagggacaagatagagtgctcccttgcagccttgcccttttagtaagctctgccttcatgatgtcatcacttcccaaagaccacacctctattaatactatrgcattgcggattcagtttcaacatagattttgaatgggacaccatcactcaaaccatagcacttggcgaaatagcacagaaaaaggactataccatgtgaccttctttgggtttttatggtcattagctagatcggaatgatatagcaggcaggaatactttggtttgccaggaatactcctggcagtgactgttcaggacttggtatcaagcaccgctatagttatctaaat

SEQ ID NO: 187103 - DNA, 429 bp, Homo sapiens
gtctacgatcaaggcaccagcaggttcagtgtcaggagaaggctcattcctcacgagatgcactgcccggcttcttcaaatggcagaagggagggagggacaagatagagtgctcccttgcagccttgcccttttagtaagctctgccttcatgatgtcatcacttcccaaagaccacacctctattaatactatggcattgcggattcagtttcaacatagattttgaatgggacaccatcaytcaaaccatagcacttggcgaaatagcacagaaaaaggactataccatgtgaccttctttgggtttttatggtcattagctagatcggaatgatatagcaggcaggaatactttggtttgccaggaatactcctggcagtgactgttcaggacttggtatcaagcaccgctatagttatctaaat

SEQ ID NO: 187104 - DNA, 429 bp, Homo sapiens
gtctacgatcaaggcaccagcaggttcagtgtcaggagaaggctcattcctcacgagatgcactgcccggcttcttcaaatggcagaagggagggagggacaagatagagtgctcccttgcagccttgcccttttagtaagctctgccttcatgatgtcatcacttcccaaagaccacacctctattaatactatggcattgcggattcagtttcaacatagattttgaatgggacaccatcactcaaaccatagcacttggcgaaatagcacagaaaaaggactatascatgtgaccttctttgggtttttatggtcattagctagatcggaatgatatagcaggcaggaatactttggtttgccaggaatactcctggcagtgactgttcaggacttggtatcaagcaccgctatagttatctaaat

SEQ ID NO: 187105 - DNA, 549 bp, Homo sapiens
gttgttgaaaaccaggatattgtatgtaaatgtgacaaaaaatttgtgaaataagtaaggataagatatagagacatatatcttgttataaggcaacagagggtcagaccaaatcgttgccatagggaacaacgtgataaataatattttactatttgtacaagtcaatgtccagtcttttgacatttaatgagatattcaaaaagaccraatattttttgaggcatgaaggaccaaatgagtaactgtggattgccacagtactgagtgagctatttcagaagatgttatttttgatgctacacagatcataaagataccaaaactacaaactcacagtactgaatctatgccaacttatttatttaaagtctgttaccgccatgagaaagtaactttcttgagaccaataatctgtttcctattcatcatagctgacttccatgccaagaaatatgttttaaataggagttatgaaatatatgaatggctagtgggcctttaactcttcttctgtacagaatattcacaaaaacttagaggcacaag

SEQ ID NO: 187106 - DNA, 530 bp, Homo sapiens
aaatgttcattcatggaatggacaaaaaatgtcctaccaaactactgaatccaaagaatggtttaactctgtgacatgaatgcacacatcacaaagcagtttctcattaagcttctttctagtttttatctgaataaatttcctttttcacgataggcctgaatgctctacaaaatatctctttgcagattctaagaaaagagtgtttccaaactgctgaatgaaaagaaaagtttaaccctgtgagatgaatgcacatatcacagatcagtttctcaggtaacttacttctagtttttatcctgagttattcactttttcgccattggccccagtgatctgcaaatgtccatttgcagaatggagaaaaacagtgtttctaaactgtggaatccaaagaaagttttaactctttgagatgagtgaacaccttwcaaagcagtttctaagaaagcttctttctagtttttacctgaagaaaattcctttttcaccataggcctcaagtgctcccaagtatcccttcacaa

SEQ ID NO: 187107 - DNA, 497 bp, Homo sapiens
tatcttccttctattttttatcctgtgatattcgtttttttgcctttggcctgaatgagttcccaaatgtccattcgcagaatggacaaaaacagttttttccaaactgctgaatgaaaagaaaggttaactcttttaggtgaatgcayacatcacaaattggtttctcagataaattccttctagtttttatcctgatatattttcttcttcgccctggcctcagtgagctcccaaacgttgatttgtagaatgggcacaaacagtgttgccaaactgttgaatccaaagaaagttataactctgtgagatggatgcacacatccaaagcagtttctcattaagcttctttctaatttatctgaagacaaagcctttttcaccatctgtcttaatgcgctacaaaatacctcttctcagattctaagaaaacagtttttccaaatgtctgtttgagaagaaaagtttaactctgtgagatgaatgctcacatcata

SEQ ID NO: 187108 - DNA, 577 bp, Homo sapiens
ctgctgaatcaaaataaaaatttaactctgttagatgaaagaatgcatcccaaagcgtttctcagaaagtgtctttctaattttaatttgaagatatttcctttttcaccataggcctcaaagagttgccaaatatcccatcacagattctacaaaaacagtgtttccaaactgctgaatggaaagaaaggtttaactctgtgagatgaatacacatatcacaaagcaatttctcagatagctatcttctagttttttttttcctgagactttcgyttttctgccattggcctaaatgagctcccaaatgaccattcacagaatgggcaaaaacagcgttaccaaactactgaattaaaggaaaagtttaactctgtgagatgaatgcacacatcccaaaccagtttctcattaggcttctttctagtttttatctgaagatattttctttttcagcataggactcaatgagctaaaaaaaaatctctttacagatctaacaaatcagtgtttcctaactgctaaatgaaaagaaacgtttaactctgttagatgaatatccacataataaattggt

SEQ ID NO: 187109 - DNA, 577 bp, Homo sapiens
ctgctgaatcaaaataaaaatttaactctgttagatgaaagaatgcatcccaaagcgtttctcagaaagtgtctttctaattttaatttgaagatatttcctttttcaccataggcctcaaagagttgccaaatatcccatcacagattctacaaaaacagtgtttccaaactgctgaatggaaagaaaggtttaactctgtgagatgaatacacatatcacaaagcaatttctcagatagctatcttctagttttttttttcctgagactttcgtttttctgccattggcctaaatgagctcccaaatgaccattcacagaatgggcaaaaacagcgttaccaaactactgaattaaaggaaaagtttaactctgtgagatgaatgcacacatcccaaaccagtttctcattaggcttctttctagtttttatctgaagatattttctttttcagcataggactcaatgagctaraaaaaaatctctttacagatctaacaaatcagtgtttcctaactgctaaatgaaaagaaacgtttaactctgttagatgaatatccacataataaattggt

SEQ ID NO: 187110 - DNA, 317 bp, Homo sapiens
gtttccaaactggtgaatgaaaagaaaggtttacctctatgagatgaatgcrcacatcacaaatcggtttctcagatggcttccttctagtttttacccaggtatattcactttatcaccattgacctcaatgagttcccaaatatttactctcagaatggacaaaaacagtgtttccaaatggctgaatccaaagaaatgtttcactctgtgagatgaatgaacacatcacaaagcagtttctcataacagtgttttccacttactatcgggcaatatttccttttccaccataggcttcaatgtgttgccagata

SEQ ID NO: 187111 - DNA, 317 bp, Homo sapiens
gtttccaaactggtgaatgaaaagaaaggtttacctctatgagatgaatgcacacatcacaaatcggtttctcagatggcttcyttctagtttttacccaggtatattcactttatcaccattgacctcaatgagttcccaaatatttactctcagaatggacaaaaacagtgtttccaaatggctgaatccaaagaaatgtttcactctgtgagatgaatgaacacatcacaaagcagtttctcataacagtgttttccacttactatcgggcaatatttccttttccaccataggcttcaatgtgttgccagata

SEQ ID NO: 187112 - DNA, 374 bp, Homo sapiens
ccattctcagaaaggacaaaaatagtgtttgcacactactgaattcacagaaagactgaactctgtgagatgaatgcacacatcagaaagcagtttgtcagaaagcttctacttttcatctgaagatatttcctttttccccataggcctcaaatcgctcccaaatatccctttgcagattctatgaaaacagtgtttcsaaactgctgagtgaaaagaaaggtttatctctgagagatgaatgcacacatcacaaagcggtgtctcagatagcttctttccagttttttccctgtgatatgcactttttcacctatgtccttaatgagctatcaaatttgcctttgcagattttacaaaaacagtgtttccaa

SEQ ID NO: 187113 - DNA, 609 bp, Homo sapiens
cccagtataaaaactagaaggaagctatctgagaaaatgctttgtgatgtgtgtatccatctcacagatttaaacatttatttggattcagtagtttggatacactgtttttgtagaatctgtgaattaaaatttgggagctctttgaatccgaagcaaaaaagttaatatccctggataaaaactcaaaggaaacagagaaactgctttgtgatgtgtgcattcatctagcagatataaaaatttcttctctttcagtaggttggaaacactgtttttgcagaatctctgaagggatatttggaagtgcattgaggcctatggtgaaaaaggaaatatcttcagataaactcraaagaagctttctaagaaactgctttgtgatgggtgcattcctctcaaagagttaaaccattcttcggatttagccgtttagaaacactgtttttttccattctgtgaaaggagttttgggagctaattctggccattggtgaaaaagcgaatttcccaggataaaaactagaaggaagctacctgagaaacacccttgtgatgtgtgcgttcatcttgcaggattaaacctttcttttcattcagctgtttgaa

SEQ ID NO: 187114 - DNA, 609 bp, Homo sapiens
cccagtataaaaactagaaggaagctatctgagaaaatgctttgtgatgtgtgtatccatctcacagatttaaacatttatttggattcagtagtttggatacactgtttttgtagaatctgtgaattaaaatttgggagctctttgaatccgaagcaaaaaagttaatatccctggataaaaactcaaaggaaacagagaaactgctttgtgatgtgtgcattcatctagcagatataaaaatttcttctctttcagtaggttggaaacactgtttttgcagaatctctgaagggatatttggaagtgcattgaggcctatggtgaaaaaggaaatatcttcagataaactcaaaagaagctttctaagaaactgctttgtgatgggtgcattcctctcaaagagttaaaccattcttcggatttagccgtttagaaacactgtttttttccattctgtgaaaggagttttgggagctaattctggccawtggtgaaaaagcgaatttcccaggataaaaactagaaggaagctacctgagaaacacccttgtgatgtgtgcgttcatcttgcaggattaaacctttcttttcattcagctgtttgaa

SEQ ID NO: 187115 - DNA, 378 bp, Homo sapiens
catctcacaaggaggtcttggcctaagcacattgtcaccaggttatccaaagttaagacaaaggaaagaatcttaagagctgtgagacagaagctccaggtaacctatacagaaaaacctatcagattaagagcagatttctcagcagaaaccctacaatgyggaagggattggagctctatcttcagcctccccaaagaaaacaattatcgaccaaaaattttgtatccagaaaaactaagcatcatgtatcaaggaaagacagtctttttcagccaaacgaatcctgaaagagtttgccattaccaagccaccactacaagaactgctaaaaggagcttgaaatcctggaacaaacctgaaaacaccaaaaaacag

SEQ ID NO: 187116 - DNA, 378 bp, Homo sapiens
catctcacaaggaggtcttggcctaagcacattgtcaccaggttatccaaagttaagacaaaggaaagaatcttaagagctgtgagacagaagctccaggtaacctatacagaaaaacctatcagattaagagcagatttctcagcagaaaccctacaatgcggaagggattggagctctatcttcagcctccccaaagaaaacaattatcgaccaaaaattttgtatccagaaaaactaagcatcatgtrtcaaggaaagacagtctttttcagccaaacgaatcctgaaagagtttgccattaccaagccaccactacaagaactgctaaaaggagcttgaaatcctggaacaaacctgaaaacaccaaaaaacag

SEQ ID NO: 187117 - DNA, 470 bp, Homo sapiens
gcaaatgggcaccaaaagaaagcaagcaggggtagctatgcttatatcagacaaactttaaagcaacagcagataaaagagacaaagcaggacattatataatggtaaagcaacttgtccaacaggaaaatatcacaatcctaaatatatgtgcacctaacactggaactctcaaatttataaaacaattactaatagacytaagaaatgacataggcagcaacacaataatagtgggagtcttgaatattccaatgacagtactggacaggtcatcaacagaaagtctacaaagaagcaatggatgtaaactatacctgggaacaaatgggattagcagatgatatatacagaacatttcatccaacaaccacagaagacactttcgattcagcagcacacagaactttctccaagacagaccataagatagaccataaaatgagccttgataaatttaaggaaactga

SEQ ID NO: 187118 - DNA, 494 bp, Homo sapiens
ttcctccaccattggcaacaacagtgaggcctataaagtaggtgtcagtgtgtgccagttccaataatgggtacatgtcacagaaaaagtggtcaatgatattgggaccacagaaaaggagactgtacgcaactaaaatttgaaacacagaatgcacaaaacccgcagtgacagccaccaccaacagaaggatgcaaacctgtcaattcatgatggtgaaatagtgcagtggcttacagatgrctacatagcgattataggccatcaccaacagaatgaaggcctcagcaccaccaactaagtggtctataaaagggctgacccatgcaagctcggaaggaaatagtctttttatcatggagatagcttacaatcaatttgggaggaatggtggtggaatacacaacatctataaatgacaagcagacaatgaagaagtacactggggagcctaaggtgggggtggcaataatagtcaccacaatgggcaggtt

SEQ ID NO: 187119 - DNA, 494 bp, Homo sapiens
ttcctccaccattggcaacaacagtgaggcctataaagtaggtgtcagtgtgtgccagttccaataatgggtacatgtcacagaaaaagtggtcaatgatattgggaccacagaaaaggagactgtacgcaactaaaatttgaaacacagaatgcacaaaacccgcagtgacagccaccaccaacagaaggatgcaaacctgtcaattcatgatggtgaaatagtgcagtggcttacagatggctacatagcgattataggccatcaccaacagaatgaaggcctcagcaccacyaactaagtggtctataaaagggctgacccatgcaagctcggaaggaaatagtctttttatcatggagatagcttacaatcaatttgggaggaatggtggtggaatacacaacatctataaatgacaagcagacaatgaagaagtacactggggagcctaaggtgggggtggcaataatagtcaccacaatgggcaggtt

SEQ ID NO: 187120 - DNA, 335 bp, Homo sapiens
atgacaagcagacaatgaagaagtacactggggagcctaaggtgggggtggcaataatagtcaccacaatgggcaggttccccaccatagtcataatgtatgtgagtaaatgtacgacaaataatgcattttacacatcaggatcctgagtaaggcctaggaggacaaatgctgtaacatcgctactcagtctcattttctattctctgaggcttgtatcagagtaaagagctcaggagaacaggacctgtaacaaaatactgaacaggaatatgaacacatccaygatgtcacagagcacttcttcatcattgtatcttcaatagtgatttaca

SEQ ID NO: 187121 - DNA, 385 bp, Homo sapiens
aataccagagtggaagaggatgcttcctcagccaagctttcatatgagatggtagccccaaccatcaycttgattacagttttgtgagagaccttgaaggatgggaacctaagccatccttagtttcctgacctacagaaattgagaatgagtacatattgtttgaatcactaaattttgaaataatttcctttgtataaataaataactcataaatatatctagagtatgcttcaaatattgggaagcatgccaataaatatttagtgaacctatgaatcaaagaaaaaagtataatgtaaataagcaaatatttagaactcagcaataacaaaaaacaccaaaatgtttgaggtgtgatcaaaacagtacttaaagtaacatg

SEQ ID NO: 187122 - DNA, 385 bp, Homo sapiens
aataccagagtggaagaggatgcttcctcagccaagctttcatatgagatggtagccccaaccatcaccttgattacagttttgtgagagaccttgaagsatgggaacctaagccatccttagtttcctgacctacagaaattgagaatgagtacatattgtttgaatcactaaattttgaaataatttcctttgtataaataaataactcataaatatatctagagtatgcttcaaatattgggaagcatgccaataaatatttagtgaacctatgaatcaaagaaaaaagtataatgtaaataagcaaatatttagaactcagcaataacaaaaaacaccaaaatgtttgaggtgtgatcaaaacagtacttaaagtaacatg

SEQ ID NO: 187123 - DNA, 385 bp, Homo sapiens
aataccagagtggaagaggatgcttcctcagccaagctttcatatgagatggtagccccaaccatcaccttgattacagttttgtgagagaccttgaaggatgggaacctaagccatccttagtwtcctgacctacagaaattgagaatgagtacatattgtttgaatcactaaattttgaaataatttcctttgtataaataaataactcataaatatatctagagtatgcttcaaatattgggaagcatgccaataaatatttagtgaacctatgaatcaaagaaaaaagtataatgtaaataagcaaatatttagaactcagcaataacaaaaaacaccaaaatgtttgaggtgtgatcaaaacagtacttaaagtaacatg

SEQ ID NO: 187124 - DNA, 385 bp, Homo sapiens
aataccagagtggaagaggatgcttcctcagccaagctttcatatgagatggtagccccaaccatcaccttgattacagttttgtgagagaccttgaaggatgggaacctaagccatccttagtttcctgacctacagaaattgagaatgagtacatattgtttgaatcactaaattttgaaataatttcctttgtataaataaataactcataaatatatctagagtatgcttcaaatattrggaagcatgccaataaatatttagtgaacctatgaatcaaagaaaaaagtataatgtaaataagcaaatatttagaactcagcaataacaaaaaacaccaaaatgtttgaggtgtgatcaaaacagtacttaaagtaacatg

SEQ ID NO: 187125 - DNA, 532 bp, Homo sapiens
agacaaaaaaacttaagcttcctaagaacgtgactttttcaaatgataaaatcccatagtaacaaaaataatcccttatagataaaatttataaaacaatacggttttgtaaatctctctaaagaatagtaggctcaatactttcctgaacytgtatatgctgagataatttttagattcacacataaaagaccatatcatgcttccagaacatattaggcattgatttctttacactctaacacacttgatatagtctgcaattttaaattttccaatcaaatatatctaaaaataattctatacctatgttaatgtatcacataataaaatattctacatactagattataaatctattggtttacttattttatgtgtaacatggaacatgtttctcctgttacttggcaaattagaaaataaacacttataaggctgtatatgaaaaccaaatgtacttgtatactctgattaatgtctgtgttttgcttgcttaattttcccaattaagattcctccaatgaaaaca

SEQ ID NO: 187126 - DNA, 513 bp, Homo sapiens
tatcacgagaacagcatgggggaaactacccccatgattcaattacctccacattttctctccctagacatgtggggattatggggattacaattcaagatgagatttgggtggggacacaaagtctaatcatatcattctaccctgggcccctcccaaatctcatgtccctttcgtcttttaaagagacagttatgccttcctaacagtccctygaagtcttaattcattccagcattagcccaaactccaagtccaaagtctcatctgaaacaaggcaaaaaatgtacttcaaagcatttaaaaaactaacaaggaacaaagaaggatatggtggcatgtttctctgtcctagctacttggaaggctgaggtcggagtatcacttcagcctaagagtttgagtttagcatgggcaatatagcaagagagaagagaagggaaggtaaaggagaagggaaggcgtaagggaagggggaatttaagtctttaatccattttaattagatttttg

SEQ ID NO: 187127 - DNA, 496 bp, Homo sapiens
cccatgattcaattacctccacattttctctccctagacatgtggggattatggggattacaattcaagatgagatttgggtggggacacaaagtctaatcatatcattctaccctgggcccctcccaaatctcatgtccctttcgtcttttaaagagacagttatgccttcctaacagtccctcgaagtcttaattcattccagcattagcccaaactccaagtccaaagtctcatctgaaacaaggcaaaaaatgtacttcaaagcatttaaaaaactaacaaggaacaaagaaggatatggtggcatgtttctctgtcctagctacttggaaggctgaggtsggagtatcacttcagcctaagagtttgagtttagcatgggcaatatagcaagagagaagagaagggaaggtaaaggagaagggaaggcgtaagggaagggggaatttaagtctttaatccattttaattagatttttgtatttggagaaaa

SEQ ID NO: 187128 - DNA, 501 bp, Homo sapiens
tctttcaaatgcccctccctttaaaaagacaaaggaaataccataaaattaatttcttcatggaccccactgatcattcaggagcattttgtttaatttccatgtactagtatcgtttacaaaatttctcgttattaatttctagttttatttccttgttgtcagagaagataattgatattatttcaaattttttgaatgtttttggacttgttttgtaacctaacatatggtctatccttgagaatgatttgtgtgctaaggaaaagaaaatgtttcctacagccactggatgaaatgttctgtaaatacttattatatccatttagtctttattgcagattaagtctgaagtttctttgataatattctatcygaaagaccttggatacaaaaaaaattgataaattgaacttcatcaaaataaaaactttggctcataaaaactgttaataatatgaaaaagtgagccatgcattgtgggtatgcttacaatacata

SEQ ID NO: 187129 - DNA, 566 bp, Homo sapiens
tgcatttcttaaagtatagattagagggttcaacataggtgtgataacagtgtaaaacacagtcaaggatttatcaatgggtaaggtcaaaggaggtctcacatacatgaaaatacaagggacaaagaagaggatcaccacagtgatatgggagccacaggtggataaggctttgtgcctcccttcctgactaagattcttcagggagtgcagaatgaccccataggagaagagtaagagcataaagatgaccacacagattgccccatcattggcaaccacagtgaggccagtaacataggtgtcagtgcaggcaagttttaataargggtacatgtcacagatgaaatggtcaatgacattggggccacagaagggaaggttgtaaacaaaaagaagttgaactacagcatgcaagaaacctccagcccaggccaacagcagcagtagaatgcacacccgttggttcatgatggtcaaataatgcaggggtttgcagatggtcacgtagccatcataggccatgacaacaaggagtaaaatctcagcacccccaaataggtgtc

SEQ ID NO: 187130 - DNA, 566 bp, Homo sapiens
tgcatttcttaaagtatagattagagggttcaacataggtgtgataacagtgtaaaacacagtcaaggatttatcaatgggtaaggtcaaaggaggtctcacatacatgaaaatacaagggacaaagaagaggatcaccacagtgatatgggagccacaggtggataaggctttgtgcctcccttcctgactaagattcttcagggagtgcagaatgaccccataggagaagagtaagagcataaagatgaccacacagattgccccatcattggcaaccacagtgaggccagtaacataggtgtcagtgcaggcaagttttaataaagggtacatgtcacagatgaaatggtcaatgacattggggccacagaagggaaggttgtaaacaaaaagaagttgaactacagcatgcaagaaacctccagcccaggccaacagcagcagtagaatgcacacccrttggttcatgatggtcaaataatgcaggggtttgcagatggtcacgtagccatcataggccatgacaacaaggagtaaaatctcagcacccccaaataggtgtc

SEQ ID NO: 187131 - DNA, 566 bp, Homo sapiens
tgcatttcttaaagtatagattagagggttcaacataggtgtgataacagtgtaaaacacagtcaaggatttatcaatgggtaaggtcaaaggaggtctcacatacatgaaaatacaagggacaaagaagaggatcaccacagtgatatgggagccacaggtggataaggctttgtgcctcccttcctgactaagattcttcagggagtgcagaatgaccccataggagaagagtaagagcataaagatgaccacacagattgccccatcattggcaaccacagtgaggccagtaacataggtgtcagtgcaggcaagttttaataaagggtacatgtcacagatgaaatggtcaatgacattggggccacagaagggaaggttgtaaacaaaaagaagttgaactacagcatgcaagaaacctccagcccaggccaacagcagcagtagaatgcacacccgttggttcatgatggtcaaataatgcaggggtttgcagatggycacgtagccatcataggccatgacaacaaggagtaaaatctcagcacccccaaataggtgtc

SEQ ID NO: 187132 - DNA, 400 bp, Homo sapiens
ttatcatgtttgagtctgtcattttaattcctaaacaatcagtcatgtgaatactgctataaacaaatactcttcaaaataagggcagaagtctgtggatactttatccacatttgaactgcagcacatattgttgagtcattcaactggtgcatctccaaaggtgaytcttctctaattaaattcattgggacctttatcataattctgagggtaggctctgtatctccggagatgccacagggataataactatgtataacaagatttatagaatcatgtcctctagggaaaaaattacaaaaggataccaaagtcaaatcaccaaaaggaaacagtccagtctgaatataaacgaaatatataaaacctagtatttaagtcatgacctgcaaaatag

SEQ ID NO: 187133 - DNA, 574 bp, Homo sapiens
ggaacactgaatttcaacaactaattgcacacacacaaaagcgcaasgataacaacagaaaaccgggtgagcaatccaagtacctggttttaacttcacatcattgaatgaaacatacttaagagggtaggaaagacagtctcaaatcaccaataacacccctcctaaattccacagcagtggctgcatggtgcaaagagataatctgtgcacttgaggaaaaaaagagtatagacatggggtttggcattgaactcagtactaccttgtcacagcagagagcaaagccatgctgagctcaactgtcacccacccatggagactgcatttggaccagctctagacagaggggaatcactcatcacagaagtcaaaactagaatttcttggcaagtctcaccactgtgggctaaagtgctctgggctcttaggtaaacttcaaaggcagcctaggacacaaggcctgcaattcctaggcaagtcctagtgctgggttggacttagagccagtgcaataggggagcacatgacctatggagacaccagccagggctgccaaggaagtgcttgtgcc

SEQ ID NO: 187134 - DNA, 576 bp, Homo sapiens
agtggctcaggccgttaatcccagcactttggaaggctgagacaggcagatcacctgaggtcaggagttcgagaccagccttaccaacatgcagaaaccccgtctctactaagaaaaaatacaaaattagccaggcgtggtggcacatgcctgtaatcccagctactcgggaggctgaggcagcagaatcacttcaacctgggaggtgcaggttgtggtgagctgagatcacgccattgcactccagcctggacaacaagagtgaaactccgtctcaaaacaaaaaaaaaaaaaatgaaaaaggagaaacaaataaaaaaactaaataaatgaagaaatatttcatattcrtggataggaagactcaatattgtcaagatgtctattcttcccaacttaatctatgcattcattttaatcccagtcaaaattccagcagagtattttgtaaatattgacaaactaattctaaagcttatatggaaaggcaaaagaccaagaatagctaatgtgatactgagggaaagaacaaagttggagaactgatactacccaaattcaagacttgctatagag

SEQ ID NO: 187135 - DNA, 490 bp, Homo sapiens
ccatgggccatgaggaaatctccatcttggataaatgagatgtactaggttgggcaaattggtattatgtagagtttctgtagcttgacagtgttgtcacttgtggcttggggcataggctaagtgaattacaaaatagaaaaacatccatttaaggataagtctagttgaaaccactaggatctatggctaatggtcctatgaaatagccaagaaactgtgttgtaatatttgaccctagcaaatactgctcatagttttacagaactttatacttcaccacattttggttggcttactgggctatgtcattattctgctcatcattatatgttattcatgcatatattaaagtggccaccatctgaaaatcctaggccagaggcattttytttgttttatgagtcaaaacctgggttctttgttggaacctatgcccacttataacttccctcagaatacttttatgaccttccataatagcattctc

SEQ ID NO: 187136 - DNA, 410 bp, Homo sapiens
ccatgttacagaggctggattacccatcactcacgataaaattcaactgaccactcctgctcaatatttaggaatggtggttgataaacaacgtatttaacctcaaaaagttcatattaggagagattccttaaaaactttaaaagacttccaaaaacttttgggtaacattaaytatttaagacctattttaggtattctgacctatgcactgtctaacttgttttctaccctgtggggagattccaacctctgcagtcccaggactttgacacctgaggcttcactagaactggaattcttagaggaaagaatccaggccacccagttatctagagtacagccacttcagccttttcagcttctggttttcccttcattacattcccctactggactaatagttcaaa

SEQ ID NO: 187137 - DNA, 642 bp, Homo sapiens
tctcactcatgtcaatgctgctggattaaaagataaatttgctcttacctggaaacaggctaagtttattgttcacagctgccctcagtgtcaggtctttgtacttccaaatcaggaacctgacattaatcccagaggcctaactcctaatggtttacagcaaatggatgtgactcawgttagctcctttggcagactgtcatatgtgcatgtttctgtagctaccttctcaggtttcatctgggctacttatcaaacaggggaaggcatggcccatgttaaaaaaatctgttttcttctgttgcagttattgggcttccatatcaaataaagacagacaaggtccctggatatgttagtaaggcttttgacttatttatgcaacagtggggaatttcccatattactggaatcccttataatcctcagtgacaagctgtggtggaatgggccaatcacactttaaaaacccaattgtccaaacagtctgaacaacaaaaacataatttaactaacccccactcccaattacatttagcattgtttactttaaattttttaaatgttcctaaagataataatctaactgcagccaaacgccattatacaggcaaaaaattctccctaaacaaaggcaaccca

SEQ ID NO: 187138 - DNA, 642 bp, Homo sapiens
tctcactcatgtcaatgctgctggattaaaagataaatttgctcttacctggaaacaggctaagtttattgttcacagctgccctcagtgtcaggtctttgtacttccaaatcaggaacctgacattaatcccagaggcctaactcctaatggtttacagcaaatggatgtgactcatgttagctcctttggcagactgtcatatgtgcatgtttctgtagctaccttctcaggtttcatctgggctacttatcaaacaggggaaggcatggcccatgttaaaaaaatctgttttcttctgttgcagttattgggcttccatatcaaataaagacagacaaggtccctggatatgttagtaaggcttttgayttatttatgcaacagtggggaatttcccatattactggaatcccttataatcctcagtgacaagctgtggtggaatgggccaatcacactttaaaaacccaattgtccaaacagtctgaacaacaaaaacataatttaactaacccccactcccaattacatttagcattgtttactttaaattttttaaatgttcctaaagataataatctaactgcagccaaacgccattatacaggcaaaaaattctccctaaacaaaggcaaccca

SEQ ID NO: 187139 - DNA, 405 bp, Homo sapiens
aatgatttaagacagtctgttatttggcttgtagatcgggtagtgagtcttgaacatagcatgaaaatgcagtgcgattggaaaacaytggatttctgtatcaccccatattcctataatgagactgatcattcatggaaaatggtcaaaggacaacttctgggtagggaagataatttatcactggacataactaaattaaagaaacaaatttttggaggctctcaagctcactattccattgtgcctggagctgaggcattagatcaggtggcagataatctttatggaataaaccccacgacttggattaagtctatttggggctccactgtagtaacttttggaattatgtttctctgtttaatcagcttgttttagtgtgctggaccagtcaaagaattc

SEQ ID NO: 187140 - DNA, 351 bp, Homo sapiens
tgacgtgtgcactcacctcaccgagttaaacctttctttggattcagcagtttggaaacaatgtttttgtccatcctccaaaaagacatttgggagctcrttgaggacaaaggcaaaaaagaaaatatcccagtgtaaaaactagaaggaagctatctgagaaactgcctggtcatgtgtgcattcatctcacagagttaaatgttacttttctttcagcagttttgaaacaccatttttgtagaatttgtgaagggatttttgggagcacattgaggcctatggtgaaaaagcaaatatctcctgataaaaaccataaagaaagtttctaaataaatgctttttgatgtg

SEQ ID NO: 187141 - DNA, 351 bp, Homo sapiens
tgacgtgtgcactcacctcaccgagttaaacctttctttggattcagcagtttggaaacaatgtttttgtccatcctccaaaaagacatttgggagctcattgaggacaaaggcaaaaaagmaaatatcccagtgtaaaaactagaaggaagctatctgagaaactgcctggtcatgtgtgcattcatctcacagagttaaatgttacttttctttcagcagttttgaaacaccatttttgtagaatttgtgaagggatttttgggagcacattgaggcctatggtgaaaaagcaaatatctcctgataaaaaccataaagaaagtttctaaataaatgctttttgatgtg

SEQ ID NO: 187142 - DNA, 580 bp, Homo sapiens
tacatagtcatgcaatgataatatttttggttttttatgaagaaattttccagcaggtgagattatttaactacctttgtgtattatgtttaagcctctttatattttggtcatctgctttggatatttccatacctctgtaacaactgagataatgagaatcctgtgtggaattgtggaaactgtagccattagaaactagttctctaaccctggatcagtcattcatatttacatgttctgtgatcacaaataggtgcatgagatgtctacattaacactcagtgaaagaagcattgcttttctggattacagtgtgagcatttgaaaccagtgacaggagatattcattgaaaattcttgtgatatgaggaaatgtagctaatatcttaaataccatatgatattgttgaaggaatttaattgggaaagttagccaggaaacatgaaaactttttggaayatacaatgtatatttggttttaatatatagcctaatttatttttcttcttttctatttgttaaataaaaaaaaagttccatactacatgcttaataaaccaatagatttataattat

SEQ ID NO: 187143 - DNA, 621 bp, Homo sapiens
tctgccacatctataggcattatatatatcttgcacgtaacaatgaatcttttgcatagccagccctaagtcttgcatctgcctttttaaagttaattcccttagttcctgtaggtcacctttaacctgatttataactgggggtggccgaccaaacaaaatctcatagggctaatacccagtttgttttgtggggctgcacctgactcagaggaggaccatgggcaagacctgatsctatcttagatgagtttcttgacaaaatttcttcaacagctgcttgagtgtccagttaatgcgctccacttttcctgagctctgcagctggtgggctatgagtaacttccactttatttttgatagtcaagttaagtcctgaactatttcagccacaaatgctggtccattgtctgatcctagagttagaggcagttcaaatctggggatagtgtctcttaacaacactttgatcacctcttgtgctttctccatctgggcggggaaggccttgacccatcctgaaaaggtgcaaacgaataccaacatgtatcaataacccccccgcttgcagcaatttggggaagtccataagcaggttttcacagggtgtggctcttgttt

SEQ ID NO: 187144 - DNA, 520 bp, Homo sapiens
aaactgtggagtccgttcctcacccacctcctgagccctaggttccgaggctcccaggtcagggggttcagtggcgcaggagggtccagggcaggagtcggtgagttgccgctcaggtccgcctgtaaargaactctgacccagagcgtgagggggaccaggaagccgctgcgcccacccagggaaagcccgccccaccccattgtccctggatcccggcccgccgcttccgtccctctggagcaggcggccgcccctcttcccagagtgggcggggcagcaattgcctgctcagctttccttgtgacgcctcacacccacctggacgcgctgctgcctgcctcgcctcctttctctgtcatctttctcatcgaccaatggacttggaggatggcgccacgccccctattctgcgctgtagtaggccctggttacgcctcctctggtcagtcgcacagttgcgcggtggccgacaggacttgttccccagtggtaagccgcaatctagctgacgtggccc

SEQ ID NO: 187145 - DNA, 520 bp, Homo sapiens
aaactgtggagtccgttcctcacccacctcctgagccctaggttccgaggctcccaggtcagggggttcagtggcgcaggagggtccagggcaggagtcggtgagttgccgctcaggtccgcctgtaaaagaactctgacccagagcgtgagggggaccaggaagccgctgcgcccacccagggaaagcccgccccaccccattgtccctggatcccggcccgccgcttccgtccctctggagcaggcggccgcccctcttcccagagtgggcggggcagcaattgcctgctcagctttccttgtgacgcctcacacccacctggacgcgctgctgcctgcctcgcctcctttctctgtcatctttctcatcgaccaatggacttggaggatggcgccacgccccctattctgcgctgtagtaggccctggttacgcctcctctggtcagtcgcacagttgcgcggtggccgacaggamttgttccccagtggtaagccgcaatctagctgacgtggccc

SEQ ID NO: 187146 - DNA, 563 bp, Homo sapiens
tatttatctcttaaaactgttagctactgccaccaatagctataaattaaactaataatgccacactggacactataaccatactctaaattttaacgatgtatatccaatcaataatcaatgtcatttctgtaaattaatgaaaatttctgataaacaattttatatcagccatctctctgtccttctcttttgctttcggatcgacttataactgctcctaatcaaagtgtagatgacctgcaacttkaaggtttgctcccaggttacaatcctcaagctttgcctcaataaactgtctacttatattcatgttgccttagctttatttcttttaggtagatatatcatttagaacgtgctaaagcagcctctataaagggatctttcctttgattgtactctgcttgctgtaacacccaagaatgaaaagccaggttgatcccacctagaatctgtaaataaggtctggcgtcttcctggaatttataagataaggccagactttgaattgagaatgtagaaaaaaccaacaagagacattttctgcattgtcagatgtc

SEQ ID NO: 187147 - DNA, 563 bp, Homo sapiens
tatttatctcttaaaactgttagctactgccaccaatagctataaattaaactaataatgccacactggacactataaccatactctaaattttaacgatgtatatccaatcaataatcaatgtcatttctgtaaattaatgaaaatttctgataaacaattttatatcagccatctctctgtccttctcttttgctttcggatcgacttataactgctcctaatcaaagtgtagatgacctgcaactttaaggtttgctcccaggttacaatcctcaagctttgcctcaataaactgtctacttatattcatgttgccttagctttatttcttttaggtagayatatcatttagaacgtgctaaagcagcctctataaagggatctttcctttgattgtactctgcttgctgtaacacccaagaatgaaaagccaggttgatcccacctagaatctgtaaataaggtctggcgtcttcctggaatttataagataaggccagactttgaattgagaatgtagaaaaaaccaacaagagacattttctgcattgtcagatgtc

SEQ ID NO: 187148 - DNA, 347 bp, Homo sapiens
taggtggaatgagagacttggaaaagaaaaagacaaagtatagagaaagaaataagggggcccaggggaccagcgttcagcatacggaggatcccgccagcctctgagttcccttagtatttattgatcattcttgggtgttttttggagagggggatgtggcagggtcataggataatartggagagaaggtcagcagataaacacatgaacaaaggtctctgcatcatagacaaggtaaagaattaagtgctgtgctttagatatgcatacacataaacatctcaatgccttacagagcagtattgttgctcgcatgtcccacctccagccctaaggctgttttc

SEQ ID NO: 187149 - DNA, 522 bp, Homo sapiens
  misc_feature (1)...(522): n = A,T,C or G
ngaattcacaaggcattgcttacattcacagtaaaaggtatttcttagttgtttttgttttttgttttcaggtggagtcttgctctgtcgcccaggctggagtgcaatggctcaatctcagctcactgcaacctcagcctcctgggttcaagcaattctcgtgcctcagcctcccgagtagctgggactacaggcacacgccaccataccctgctaatttttgtatttttagtagagacggagtttcaccttgttggtcaggctggtctcgaactcctgacctcaggtgatccgcccacctcagccacccaaagtgctggaattacaggcatgagccaccgcacctggactattacaaattttttaatagggkgatgggtaattttatgtgtcaacatgactgggctaatggatgccccggtagctagtaaaacattatttctgggtgtgtctgtaaagcatttccagaagaggttagcatctgaattggtagaccgagatcaccctcaccaatgtgggtgg

SEQ ID NO: 187150 - DNA, 555 bp, Homo sapiens
atttatagtgtaagtgaaaggcaaatgctgtttaaagaagtraaagtttttgttttttactgtagcataacctagcttatcctgatggacacacttgaggtttctggatgtgagaaacatcaaatgtatttctataaagtaacagcaacaaataggaagtttaaaaaaaaattttttttttgagggacaggatcttgcttttttacccaggctggaatgcagtggcatgatcaccatttactgcagtctcaaactcctgggctcaagtgatcctcttgcctcagcctctcgagcagctgggattacagatgcatgccaccatactcagctaattaaaaaaaaaaaatttgtagagacaggttcttgctatgttgcctaggctggtcttgaactcctgggctcaagtgatcctcccaccttggcctccaaagtgctgtaactacaggcatgtgcactgcacccagctgaaagtaaaaatttaaaggtactgtttgtaatagcataaaaaatagtgagtacctttgggacaaatataataaaatatgtgaaagacct

SEQ ID NO: 187151 - DNA, 508 bp, Homo sapiens
tgtgtgagctaaaatttgtctttgacaaatgacattttgattataacatggcttagagagaatctttttacactgagtctaactggggaattkttagcttcctggatttggatgtccatatctcgctcaagtattgtgaagttttcaatcattattgtgtaaaataggttttctgtgcctcctacagtaatatgatgctccaaatatttgttcatgtaatgatgtttcataagtactgtagtatctctttattctcttttatttctatatttttctgactttgttatttcaaaggacttgtttccaagttcagaaattccttcttttgtttgagctagtcttttgttgaaactctcaattgtgttttatatttcattcattgaattattcaggtctaagatttctgcttggttcttttatatgatacttatcttattgttgaacttctcgttcctatcacaaattattttcttgaattcattgaattgtttgtctgtattttgttgta

SEQ ID NO: 187152 - DNA, 389 bp, Homo sapiens
gcatcccagctgcttttcttatagaaaatgtcaaaattattccaaaatttatatgagaatataaagcccaaagaacagccaggacatatgtgaagaaaaaattttaaytcttgttgatatctaaacttactaaaaagacactttacttgctaaacttactaaaaagacactttaattatgacagtgtgacattggtgcaagaaaagctaaatagatccctagcacttactaaaaagtccagaaaaagattcactgggacagtcacttgatatttgataaagataaactgcaaatgattaaaagaaaagaggacattttaagtgaattatatgggtccaactatataactatatgagagaaaacagactttgattcctactttactacaa

SEQ ID NO: 187153 - DNA, 389 bp, Homo sapiens
gcatcccagctgcttttcttatagaaaatgtcaaaattattccaaaatttatatgagaatataaagcccaaagaacagccaggacatatgtgaagaaaaaattttaactcttgttgatatctaaacttactaaaaagacactttacttgctaaacttactaaaaagacactttaattatgacagtgtgacattggtgcaagaaaagctaaatagatccctagcacttactaaaaagtccagaaaaagattcactgggacrgtcacttgatatttgataaagataaactgcaaatgattaaaagaaaagaggacattttaagtgaattatatgggtccaactatataactatatgagagaaaacagactttgattcctactttactacaa

SEQ ID NO: 187154 - DNA, 389 bp, Homo sapiens
gcatcccagctgcttttcttatagaaaatgtcaaaattattccaaaatttatatgagaatataaagcccaaagaacagccaggacatatgtgaagaaaaaattttaactcttgttgatatctaaacttactaaaaagacactttacttgctaaacttactaaaaagacactttaattatgacagtgtgacattggtgcaagaaaagctaaatagatccctagcacttactaaaaagtccagaaaaagattcactgggacagtcacttgatatttgataaagataaactgcaaatgattaaaagaaaagaggacattttaartgaattatatgggtccaactatataactatatgagagaaaacagactttgattcctactttactacaa

SEQ ID NO: 187155 - DNA, 389 bp, Homo sapiens
gcatcccagctgcttttcttatagaaaatgtcaaaattattccaaaatttatatgagaatataaagcccaaagaacagccaggacatatgtgaagaaaaaattttaactcttgttgatatctaaacttactaaaaagacactttacttgctaaacttactaaaaagacactttaattatgacagtgtgacattggtgcaagaaaagctaaatagatccctagcacttactaaaaagtccagaaaaagattcactgggacagtcacttgatatttgataaagataaactgcaaatgattaaaagaaaagaggacattttaagtgaattatatgggtccaactatataactatatgagagaaaayagactttgattcctactttactacaa

SEQ ID NO: 187156 - DNA, 447 bp, Homo sapiens
gaaagcatcccagctgcttttcttatagaaaatgtcaaaattattccaaaatttatatgagaatataaagcccaaagaacagccaggacatatgtgaagaaaaaattttaactcttgttgatatctaaacttactaaaaagacactttacttgctaaacttactaaaaagacactttaattatgacagtgtgacattggtgcaagaaaagctaaatagatccctagcacttactaaaaagtccagaaaaagattcactgggacagtcacttgatatttgataaagataaactgcaaatgattaaaagaaaagaggacattttaagtgaattatatgggtccaactatataactatatgagagaaaacagactttgattcctactttactacaattccaagtggattttaaatttcaaagtgaaatrtaaaacaacaaagcttcttga

SEQ ID NO: 187157 - DNA, 301 bp, Homo sapiens
tgtcagccccagtatcccaaagtggaatatagtaggacatcgttggggctggaaacaatagcttaaaaactggcacagtccacctcttgtctatcaggcattgatacacatttaccctcccatacataattaaatttcacacaataacaataacaaacttatgctagttttttcaaacsaagattatttcattctatgcacatgaagaggtaactaatgtcccaaaagccatttctgattaattattcctttttgattaatagccatattatccatctctgggagatgttatataaacctc

SEQ ID NO: 187158 - DNA, 301 bp, Homo sapiens
tgtcagccccagtatcccaaagtggaatatagtaggacatcgttggggctggaaacaatagcttaaaaactggcacagtccacctcttgtctatcaggcattgatacacatttaccctcccatacataattaaatttcacacaataacaataacaaacttatgctagttttttcaaaccaagattatttcattctatgcacatgaagaggtaactaatgtcccaaaagccatttctgattaattattcctttytgattaatagccatattatccatctctgggagatgttatataaacctc

SEQ ID NO: 187159 - DNA, 651 bp, Homo sapiens
ttcaaaataggggatgggttatagcagtacatgttattgaataagtataatgaattaattgcacaaataaaaataaagtgacccacagtgaacactgcataaactatgccctgttctttgacagtagaataaaaaacttagtttttataactgaaaaggaaaaacaaataatgtcttgtattgttgatatgaaaattaaataaaataacatacctactgcttagcatgatgcctgatgtgcttaataaatagtagttattagagcagggatgagtctgcaccaggacgtttgcctgatggcccttctgacaaaagttatatacagtttaaagatgattcagaaaggtaaaatatagattttcatctcctatgaatttaaaggaaatgaaagcaagcctatgctttaatgtcttttagaaacacattttaaacaactaagataaaggaatatcaagatattatctgatttacaaataaytgaaaattcaaaagtgaaaattgaagtttcttttcttgggttatataaatacatcctgcactaaaaatatttcttttgatgctcatgtcttcttatgttctcctaagcttcactcactgactaaaatgactagaattaatatttctctgaatatgaatataacacataacacg

SEQ ID NO: 187160 - DNA, 482 bp, Homo sapiens
accttaaaaatagcatatgacttgttcacaacgtgcaggtttgtaccctagaacttaaagtataataaaaataaataaataataaaacactaaaaaaatagcatatgactttaggctctctggatctgaacatttctaaacagctctcagaactccaagttcactgcactacaggctggaggttggattttcctcactcatttccacagacctctcagcatgcattatcccaacagcacagtcaggatcttgccaactgccttyagtactttgaggaagaatcccctgaagcttcctttatccatattttatgagtgttcttacttcttagtatgcagatcttgaaacacatacatagacactacggcatgggaccttcgtgtccccaaatgcagaagatcctctacattgttcaatagagaaactgagtacatgaaggttaaggggcttgttcaaggtcatgtttctctagagatctgccc

SEQ ID NO: 187161 - DNA, 482 bp, Homo sapiens
accttaaaaatagcatatgacttgttcacaacgtgcaggtttgtaccctagaacttaaagtataataaaaataaataaataataaaacactaaaaaaatagcatatgactttaggctctctggatctgaacatttctaaacagctctcagaactccaagttcactgcactacaggctggaggttggattttcctcactcatttccacagacctctcagcatgcattatcccaacagcacagtcaggatcttgccaactgccttcagtactttgaggaagaatcccctgaagcttcctttatccatattttatgagtgttcttacttcttagtatgcagatcttgaaacacatacatagacactackgcatgggaccttcgtgtccccaaatgcagaagatcctctacattgttcaatagagaaactgagtacatgaaggttaaggggcttgttcaaggtcatgtttctctagagatctgccc

SEQ ID NO: 187162 - DNA, 591 bp, Homo sapiens
tctttgcatgtgtgaagaaaatcataataagaggggcctccagagccatgccacatctctcaggcagtacagcctctttaatggaatcatatgaatgattaaaccaaagctgcctgatttgtcttcctgttttatagcagaaacttttctacaggttctggcatcagaaataatctttccactccgaaatttgggaagtattggagatgaaagggtatgtttgttgttgttgttgttgtttgagagagttttgctctgtcgcccatgctggattgtagtggcggtgtattctcggctcactgaagtctctacctcyagggctcaagtgattctcatgcctcaacctcctgggtagctgggattacaggcacccaccaccaagaccagctaattttttttttttttatatttttagtagtgatggggtttcatcacgttggtcaggctggtcttgaactcctgacctcaggtgatctacctgccttaggctctcaaagtgctgggattacaggtgtgagccaccatgcccagctgaaagggtttgttcttgatatgacatttttctgtacaaagcctagacagtatggaatg

SEQ ID NO: 187163 - DNA, 487 bp, Homo sapiens
aattcaggccccaggcctcactctcacacctgacaattctgtgtattttgaagcactccgaaatctttatgagggcagacttgccccatactattatcagggaagacttatcttgcttctgggtgcaaaaatagttgtaaactgtcaaagctatttatcttctcatgtcaactccctgctcattattaggggttcagggaaatgtcatttctactgagaaatggtttttacaacccaaatccaaatccaatgctcctttttctgtgatcccttaacaattttaatcttattatagcacttatcacagcctaccagatagttattaaaattatttgagcatscatcttgctcatggactagaagtgaatccctagtggttagagattaggtaacacttattcatgtagcctcccacttcttataaagtacatcacgtttgaaaagtatggaaagacttcaatctttaaggcttatattttttattcta

SEQ ID NO: 187164 - DNA, 436 bp, Homo sapiens
aaagacaaatcaaatgataggaaatactatatcatgctaacackatcaaaagaaaggtagaatggcaaacttaatatcacagtataattcagagtaaaaattattacaaagaataactgaataatttcataattacaaagaattaattcatcaagaagataataatgcatctaatagcagaacttcacaagacagaaagcataatcttatactaataaaaggaggaataaatccaaaagatatttgagcatatctctcaacatttcacagaacaagcagacagacaattagcaaagatatataaaactttaacctcattatcaacttatctgatttatttgacatttaggcaacttttcatccaacatcataatatgtgtattatacaagtacataagaaacattacaaaattagaccatcttctggttcattaaa

SEQ ID NO: 187165 - DNA, 494 bp, Homo sapiens
atgtatgtgctgcaggacaatcattgtacgtaatagaataacctaagggaatagattcaggggtccttttatctgagtcacagttcacctctattttatcagtgtgacctcagggagttatattatgtgtgatgctcatgttttttcatctgtaaaataatgttaatatttacctccatgtaaagctstcttggcacagtgattctgtgatatatcgtgtgattctcatgttttttcatctgtaaaataaggttaataatatttacctctttgtaaagttctcttggcacagtgtctggcacatatacataatagaaagtaaaatattttcccttcccttccctttatgccagcatttctaaagtatgacttctgtgcttttggtgtcagaatcacttgctatatattaaaatctaatctttgagaatataattgcagaaagtacaatttattaagcattgaaattgggcatgcaatgatcatctgatgcccct

SEQ ID NO: 187166 - DNA, 494 bp, Homo sapiens
atgtatgtgctgcaggacaatcattgtacgtaatagaataacctaagggaatagattcaggggtccttttatctgagtcacagttcacctctattttatcagtgtgacctcagggagttatattatgtgtgatgctcatgttttttcatctgtaaaataatgttaatatttacctccatgtaaagctctcttggcacagtgattctgtgatatatcgtgtgattctcatgttttttcatctgtaaaataaggttaataatattyacctctttgtaaagttctcttggcacagtgtctggcacatatacataatagaaagtaaaatattttcccttcccttccctttatgccagcatttctaaagtatgacttctgtgcttttggtgtcagaatcacttgctatatattaaaatctaatctttgagaatataattgcagaaagtacaatttattaagcattgaaattgggcatgcaatgatcatctgatgcccct

SEQ ID NO: 187167 - DNA, 494 bp, Homo sapiens
atgtatgtgctgcaggacaatcattgtacgtaatagaataacctaagggaatagattcaggggtccttttatctgagtcacagttcacctctattttatcagtgtgacctcagggagttatattatgtgtgatgctcatgttttttcatctgtaaaataatgttaatatttacctccatgtaaagctctcttggcacagtgattctgtgatatatcgtgtgattctcatgttttttcatctgtaaaataaggttaataatatttacctctttgtaaagttctcttggcacagtgtctggcacatatacataatagaaagtaaaatattttcccttcccttccctttatgccagcatttctamagtatgacttctgtgcttttggtgtcagaatcacttgctatatattaaaatctaatctttgagaatataattgcagaaagtacaatttattaagcattgaaattgggcatgcaatgatcatctgatgcccct

SEQ ID NO: 187168 - DNA, 594 bp, Homo sapiens
gggcagcattcatgtcaccatgggaaacagcaaagagaacaatataatgttggctcagctttcactgaatcttttaaccatactggcagcatcttgctgccagactgcttgttatgtgagagctgtaatccatgtatcttaagtcacttaagtcatcgtttaacaggttttctttacctgcatccccaaacactcctaactgatacattgatcatccaacaaggcaattttagagtgaataagacatagcaggcactgtaagacattatatgattttgataggtggaagtaatttcatatttgttctagacgataatatttcaaagacccactggatcccagattgaaagagaggaagccaagaacttcatacactcaaactgaaagcccatacctttcattcccaaaatatccatgaccatgacagaatctgggtttcctcactcataagatgaaagtaaataataaatactttayagaactgttgtgaggattaaatacaatagtctatgaaaattttctttcatagtgcctggcagtagaaatcactcaggaattggtatccatttacatcatgaaagcaacatattatca

SEQ ID NO: 187169 - DNA, 580 bp, Homo sapiens
aatagaacaaaagaaacaccaagaaaaacagagaagaaagttttaaaaaatgargacaagattatataaaagtcatggaaaaagcaacaagactaaagaatgtattatggaagtaagcagaaatacttgcctaaatggaaaaccaaactgggaagtcaaataatttgtctctaagacttgcctaaacttgctttggtaaaacttacagtcctatggccaaagctaagtcagatctgccctagagcctttgaaggtaaaaataagatactggttaccactgaaatcgtcaaatttattaggactaaccacattctaacaataaacttaaatgagagttcaaggtatttaaactctcattaatttagaagttaatcaaattaatgaatctgattgatctgattcagacctatactttgatccaagggctgcacagatatctatcaatctatgctgaggagcaagagaaaggatttggaaggcaggcaggctgatggtcaaactgtaggccagctactttgttaaccatgggatcatgaggcaattaatcagctctaatccatagttgtttatttaacagtag

SEQ ID NO: 187170 - DNA, 580 bp, Homo sapiens
aatagaacaaaagaaacaccaagaaaaacagagaagaaagttttaaaaaatgaagacaagattatataaaagtcatggaaaaagcaacaagactaaagaatgtattatggaagtaagcagaaatacttgcctaaatggaaaaccaaactgkgaagtcaaataatttgtctctaagacttgcctaaacttgctttggtaaaacttacagtcctatggccaaagctaagtcagatctgccctagagcctttgaaggtaaaaataagatactggttaccactgaaatcgtcaaatttattaggactaaccacattctaacaataaacttaaatgagagttcaaggtatttaaactctcattaatttagaagttaatcaaattaatgaatctgattgatctgattcagacctatactttgatccaagggctgcacagatatctatcaatctatgctgaggagcaagagaaaggatttggaaggcaggcaggctgatggtcaaactgtaggccagctactttgttaaccatgggatcatgaggcaattaatcagctctaatccatagttgtttatttaacagtag

SEQ ID NO: 187171 - DNA, 526 bp, Homo sapiens
gtcatggaaaaagcaacaagactaaagaatgtattatggaagtaagcagaaatacttgcctaaatggaaaaccaaactgggaagtcaaataatttgtctctaagacttgcctaaacttgctttggtaaaacttacagtcctatggccaaagctaagtcagatctgccctagagcctttgaaggtaaaaataagatactggttaccactgaaatcgtcaaatttattaggactaaccacattctaacaataaacttaaatgagagttcaaggtatttaaactctcattaatttagaagttaatcaaattaatgaatctgattgatctgattcagacctatactttgatccaagggctgcacagatatctatcaatctatgctgaggagcaagagaaaggatttggaaggcaggcaggctgatggtcaaactgtaggccagctactttgttaacyatgggatcatgaggcaattaatcagctctaatccatagttgtttatttaacagtaggttataggaacacagat

SEQ ID NO: 187172 - DNA, 497 bp, Homo sapiens
ggccaaaaaacatcatttaaaataccctataaattataatcgtacatgtgatacaaaaatatcctacttcagtaaatattggaatgttatatattttatgagaaacaattaaaatgtgtaaatagcccagtaataaagttttataatcttttaaatcatcatagaatttttccttaagactttatggttaaatattctcttcattagatgtggcttacccgtggattctagagaagaaagyagatgggagcaagtgtacaatacagcaacggctggaaagaaaaataaagaattttgttctttacctaaaacacttcagttaactaagtatgagtttaaaaactaaagacttgagaactttatcagagttaataagaatgagatatgtatgtacatttacaatacaaaattactatttaataatttacacatggcattaattctaattgtgtttaaatatcagagctttttcagtcttcattcatgtaatcaacagc

SEQ ID NO: 187173 - DNA, 497 bp, Homo sapiens
ggccaaaaaacatcatttaaaataccctataaattataatcgtacatgtgatacaaaaatatcctacttcagtaaatattggaatgttatatattttatgagaaacaattaaaatgtgtaaatagcccagtaataaagttttataatcttttaaatcatcatagaatttttccttaagactttatggttaaatattctcttcattagatgtggcttacccgtggattctagagaagaaagcagatgggagcaagtgtmcaatacagcaacggctggaaagaaaaataaagaattttgttctttacctaaaacacttcagttaactaagtatgagtttaaaaactaaagacttgagaactttatcagagttaataagaatgagatatgtatgtacatttacaatacaaaattactatttaataatttacacatggcattaattctaattgtgtttaaatatcagagctttttcagtcttcattcatgtaatcaacagc

SEQ ID NO: 187174 - DNA, 497 bp, Homo sapiens
ggccaaaaaacatcatttaaaataccctataaattataatcgtacatgtgatacaaaaatatcctacttcagtaaatattggaatgttatatattttatgagaaacaattaaaatgtgtaaatagcccagtaataaagttttataatcttttaaatcatcatagaatttttccttaagactttatggttaaatattctcttcattagatgtggcttacccgtggattctagagaagaaagcagatgggagcaagtgtacaatacagcaacrgctggaaagaaaaataaagaattttgttctttacctaaaacacttcagttaactaagtatgagtttaaaaactaaagacttgagaactttatcagagttaataagaatgagatatgtatgtacatttacaatacaaaattactatttaataatttacacatggcattaattctaattgtgtttaaatatcagagctttttcagtcttcattcatgtaatcaacagc

SEQ ID NO: 187175 - DNA, 541 bp, Homo sapiens
gtgtcattgcactgcagcctggtcaacaagarcaaaactctgtctcaaaaaaatataagtaaataaaattaaaaataaagatattcactgaacctgttactatgatatatttaagcaagacatggcgaccctaaaaattagagatcattgaagaccaaagtaacaacatgtggtcattatttctcaaattgaagtatataaaataaataaatttaattgcatgcttaggtaagaaaatattgataaaaatgattgaatattttatcttatttcataattctaagcagggctttagcacaatatgaaaactagattattcatgtaatccaaataaaagacaattttcattctaattttaactcagaaattattttgcttatttaacaattttactgaaaggtaaatgagataaataggacagattataattacctaacattgctatggtaacttatgtacaaatagctgttcgtcactgaaagtcaaaaaagtaaccagcgctgcaacttaagatggatcatacaacagaaattagtaccaa

SEQ ID NO: 187176 - DNA, 541 bp, Homo sapiens
gtgtcattgcactgcagcctggtcaacaagaacaaaactctgtctcaaaaaaawataagtaaataaaattaaaaataaagatattcactgaacctgttactatgatatatttaagcaagacatggcgaccctaaaaattagagatcattgaagaccaaagtaacaacatgtggtcattatttctcaaattgaagtatataaaataaataaatttaattgcatgcttaggtaagaaaatattgataaaaatgattgaatattttatcttatttcataattctaagcagggctttagcacaatatgaaaactagattattcatgtaatccaaataaaagacaattttcattctaattttaactcagaaattattttgcttatttaacaattttactgaaaggtaaatgagataaataggacagattataattacctaacattgctatggtaacttatgtacaaatagctgttcgtcactgaaagtcaaaaaagtaaccagcgctgcaacttaagatggatcatacaacagaaattagtaccaa

SEQ ID NO: 187177 - DNA, 424 bp, Homo sapiens
ttgttctttacctaaaacacttcagttaactaagtatgagtttaaaaactaaagacttgagaactttatcagagttaataagaatgagatatgtatgtacatttacaatacaraattactatttaataatttacacatggcattaattctaattgtgtttaaatatcagagctttttcagtcttcattcatgtaatcaacagccacatgctaaggtactagaaccagcactggaattacaagatgaagatggcatggtccacctcccaacagtcataagctctaacctaaaaaacagacaggcaggcaatgtccatatagagtcatagataccatgacaggtatagagcagggcactactggaacacagagaagggacatctatccacttttatgtcaatatcatgggctttctggtggaggag

SEQ ID NO: 187178 - DNA, 269 bp, Homo sapiens
cagtttcaagccctaatttacctctaattactcttacagcaatgcaatgaatcatgatttaaaatttwaaaaaaaaatgctgttaaattattagtcaagcgcccagggcaatggacagtaaagaaataatgtaggccatgggccgagatgacaaaacggtccttttatttaaagctataacaataatctgaagccagccctgtaaaatagacatccattgaaaaaggcatgctagttcttttgcttttttgtgtacttggcctcctgtg

SEQ ID NO: 187179 - DNA, 269 bp, Homo sapiens
cagtttcaagccctaatttacctctaattactcttacagcaatgcaatgaatcatgatttaaaatttawaaaaaaaatgctgttaaattattagtcaagcgcccagggcaatggacagtaaagaaataatgtaggccatgggccgagatgacaaaacggtccttttatttaaagctataacaataatctgaagccagccctgtaaaatagacatccattgaaaaaggcatgctagttcttttgcttttttgtgtacttggcctcctgtg

SEQ ID NO: 187180 - DNA, 269 bp, Homo sapiens
cagtttcaagccctaatttacctctaattactcttacagcaatgcaatgaatcatgatttaaaatttaaaaaaaaawtgctgttaaattattagtcaagcgcccagggcaatggacagtaaagaaataatgtaggccatgggccgagatgacaaaacggtccttttatttaaagctataacaataatctgaagccagccctgtaaaatagacatccattgaaaaaggcatgctagttcttttgcttttttgtgtacttggcctcctgtg

SEQ ID NO: 187181 - DNA, 510 bp, Homo sapiens
cagacttcttgggaactgtttaagctttggaacatgatgaatttatggtgcataagtacagtcttctctgtgaaagtttttgttttcacatctttcattagatgtgtgtaagaaaaaaaatattgatgtagtatctactaacccaagaatgaaaagtaatgccatttgctatttacactttatttctaaaataaacctaaatttaattaataaattttgtcaacgtayttctctttgtttctctaattatttattctacacagtccggccccatctaaaataagtaaaaataataataatgtctaaattaaacaagaaacattatcatgaaaatcatgtatcacttacaaaatgtggcctttagtatttttagtgactagacataacttgaagtttgcttaaatagaaaaataatcacataaataaaataaaatttctacttaagtttaaataacagaggatgtatatgtgtaatgctgtttagagtaatctgacaaaaatgcagttaat

SEQ ID NO: 187182 - DNA, 488 bp, Homo sapiens
tataatatcacagaagttgtacaccccctctgtgatattgttcctaatatcaaagacagaagggtatgatgttcttcccaaaatcacaggaagtgtatacacaccctgtgctatttttcctaatatcgagagtgagagacaatgatacttccaatatcrtaaggagtgtacactctccccgtgataccaggtggggaaatgttgatattactccaaatgtcacagtgggtgtacacacgttttgcgatattgttcctaatagcaagtggggaggaggattgtattactcccaccatattactccccacaccccattatactgttcttaatatccagatttggagaggatgatattactcccaaaatctcaggaggtgtagaccccttctgtgatactgtttcttatatccaggggaagactagatgatagtactcccaacagtgcagggtgttacacgccaccccccatgatattgtctctaatatca

SEQ ID NO: 187183 - DNA, 488 bp, Homo sapiens
tataatatcacagaagttgtacaccccctctgtgatattgttcctaatatcaaagacagaagggtatgatgttcttcccaaaatcacaggaagtgtatacacaccctgtgctatttttcctaatatcgagagtgagagacaatgatacttccaatatcgtaaggagtgtacactctccccgtgataccaggtggggaaatgttgatattactccaaatgtcacagtgggtgtacacacgttttgcratattgttcctaatagcaagtggggaggaggattgtattactcccaccatattactccccacaccccattatactgttcttaatatccagatttggagaggatgatattactcccaaaatctcaggaggtgtagaccccttctgtgatactgtttcttatatccaggggaagactagatgatagtactcccaacagtgcagggtgttacacgccaccccccatgatattgtctctaatatca

SEQ ID NO: 187184 - DNA, 488 bp, Homo sapiens
tataatatcacagaagttgtacaccccctctgtgatattgttcctaatatcaaagacagaagggtatgatgttcttcccaaaatcacaggaagtgtatacacaccctgtgctatttttcctaatatcgagagtgagagacaatgatacttccaatatcgtaaggagtgtacactctccccgtgataccaggtggggaaatgttgatattactccaaatgtcacagtgggtgtacacacgttttgcgatattgttcctaatakcaagtggggaggaggattgtattactcccaccatattactccccacaccccattatactgttcttaatatccagatttggagaggatgatattactcccaaaatctcaggaggtgtagaccccttctgtgatactgtttcttatatccaggggaagactagatgatagtactcccaacagtgcagggtgttacacgccaccccccatgatattgtctctaatatca

SEQ ID NO: 187185 - DNA, 555 bp, Homo sapiens
ttactccccacaccccattatactgttcttaatatccagatttggagaggatgatattactcccaaaatctcaggakgtgtagaccccttctgtgatactgtttcttatatccaggggaagactagatgatagtactcccaacagtgcagggtgttacacgccaccccccatgatattgtctctaatatcaagttggggagagggtgatattgctccaaatagtgtaaagggtgcacaccagcactgtgatattattcctagtatccagagaaggagagaatggtattatttttaatatcacagagggtgcacaccccccttgtgatactgctcctaacatccaaggggtagaggatgaaattactcccaatatcacagtgggtatacaccccccgtggtattgttcctaatacccagggggtataggatgatagtactataaatatcgcaaggggtgtacaccccttctgatattgttactaatatccgtggggggagtcgatgatattacttccaatatcacagggcatgtacaccccccttgtgatattgtt

SEQ ID NO: 187186 - DNA, 555 bp, Homo sapiens
ttactccccacaccccattatactgttcttaatatccagatttggagaggatgatattactcccaaaatctcaggaggtgtagaccccttctgtgatactgtttcttatatccaggggaagactagatgatagtactcccaacagtgcagggtgttacacgccaccccccatgatattgtctctaatatcaagttggggagagggtgatattgctccaaatagtgtaaagggtgcacaccagcactgtgatattattcctagtatccagagaaggagagaatggtattatttttaatatcacagagggtgcacaccccccttgtgatactgctcctaacatccaaggggtagaggatgaaattactcccaatatcacagtgggtatacaccccccgtggtattgttcctaatayccagggggtataggatgatagtactataaatatcgcaaggggtgtacaccccttctgatattgttactaatatccgtggggggagtcgatgatattacttccaatatcacagggcatgtacaccccccttgtgatattgtt

SEQ ID NO: 187187 - DNA, 555 bp, Homo sapiens
ttactccccacaccccattatactgttcttaatatccagatttggagaggatgatattactcccaaaatctcaggaggtgtagaccccttctgtgatactgtttcttatatccaggggaagactagatgatagtactcccaacagtgcagggtgttacacgccaccccccatgatattgtctctaatatcaagttggggagagggtgatattgctccaaatagtgtaaagggtgcacaccagcactgtgatattattcctagtatccagagaaggagagaatggtattatttttaatatcacagagggtgcacaccccccttgtgatactgctcctaacatccaaggggtagaggatgaaattactcccaatatcacagtgggtatacaccccccgtggtattgttcctaatacccagggggtataggaygatagtactataaatatcgcaaggggtgtacaccccttctgatattgttactaatatccgtggggggagtcgatgatattacttccaatatcacagggcatgtacaccccccttgtgatattgtt

SEQ ID NO: 187188 - DNA, 555 bp, Homo sapiens
ttactccccacaccccattatactgttcttaatatccagatttggagaggatgatattactcccaaaatctcaggaggtgtagaccccttctgtgatactgtttcttatatccaggggaagactagatgatagtactcccaacagtgcagggtgttacacgccaccccccatgatattgtctctaatatcaagttggggagagggtgatattgctccaaatagtgtaaagggtgcacaccagcactgtgatattattcctagtatccagagaaggagagaatggtattatttttaatatcacagagggtgcacaccccccttgtgatactgctcctaacatccaaggggtagaggatgaaattactcccaatatcacagtgggtatacaccccccgtggtattgttcctaatacccagggggtataggatgatagtactataaatatcgcaaggggtgtacaccccttctgatattgttactaatatccgtggggggagtygatgatattacttccaatatcacagggcatgtacaccccccttgtgatattgtt

SEQ ID NO: 187189 - DNA, 510 bp, Homo sapiens
cagacttcttgggaactgtttaagctttggaacatgatgaatttatggtgcataagtacagtcttctctgtgaaagtttttgttttcacatctttcattagatgtgtgtaagaaaaaaaatattgatgtagtatctactaacccaagaatgaaaagtaatgccatttgctatttacactttatttctaaaataaacctaaatttaattaataaattttgtcaacgtatttctctttgtttctctaattatttattctacacagtccggccccatctaaaataagtaaaaataataataatgtctaaattaaacaagaaacattatmatgaaaatcatgtatcacttacaaaatgtggcctttagtatttttagtgactagacataacttgaagtttgcttaaatagaaaaataatcacataaataaaataaaatttctacttaagtttaaataacagaggatgtatatgtgtaatgctgtttagagtaatctgacaaaaatgcagttaat

SEQ ID NO: 187190 - DNA, 549 bp, Homo sapiens
tggtatgaaccacagctaaactayaatcaattagagagtaagccaaagcatctcaaagtatatcatcagttatcaggcaataacatgcaatttctaaaacctaacttaaatgcagcttttaaagacatttcaaacgtgtcagtttagtcacatttattgaataaagttagcaaatggatatctcttgaaaatgagagctccagggaattaaaaaatgtaaagttcccatttcctttctgtgttaacacagctaattatgatctttacttcacatgcaaaagtcaacagaacaactcagtatttcaccaaattataaacaagaattacgctagagaaatgaaaccctaaagagaaacggtcatataactaacctcagtcaagtagttctggcagttatttgaagtctgaggtttgaagtaggaattcttacgggcatttggggaatatattttctgttgagtcctatactagtaagattttcaacacaaggtgactctcgacctcgccttgtaggaagagtgctgagaaaatatttcacctgctctttct

SEQ ID NO: 187191 - DNA, 556 bp, Homo sapiens
ctaaactacaatcaattagagagtaagccaragcatctcaaagtatatcatcagttatcaggcaataacatgcaatttctaaaacctaacttaaatgcagcttttaaagacatttcaaacgtgtcagtttagtcacatttattgaataaagttagcaaatggatatctcttgaaaatgagagctccagggaattaaaaaatgtaaagttcccatttcctttctgtgttaacacagctaattatgatctttacttcacatgcaaaagtcaacagaacaactcagtatttcaccaaattataaacaagaattacgctagagaaatgaaaccctaaagagaaacggtcatataactaacctcagtcaagtagttctggcagttatttgaagtctgaggtttgaagtaggaattcttacgggcatttggggaatatattttctgttgagtcctatactagtaagattttcaacacaaggtgactctcgacctcgccttgtaggaagagtgctgagaaaatatttcacctgctctttctccataaagagctgatactgatc

SEQ ID NO: 187192 - DNA, 536 bp, Homo sapiens
agctaaactacaatcaattagagagtaagccaaagcatctcaaagtatatcatcasttatcaggcaataacatgcaatttctaaaacctaacttaaatgcagcttttaaagacatttcaaacgtgtcagtttagtcacatttattgaataaagttagcaaatggatatctcttgaaaatgagagctccagggaattaaaaaatgtaaagttcccatttcctttctgtgttaacacagctaattatgatctttacttcacatgcaaaagtcaacagaacaactcagtatttcaccaaattataaacaagaattacgctagagaaatgaaaccctaaagagaaacggtcatataactaacctcagtcaagtagttctggcagttatttgaagtctgaggtttgaagtaggaattcttacgggcatttggggaatatattttctgttgagtcctatactagtaagattttcaacacaaggtgactctcgacctcgccttgtaggaagagtgctgagaaaatatttcacctgctctttct

SEQ ID NO: 187193 - DNA, 556 bp, Homo sapiens
ctaaactacaatcaattagagagtaagccaaagcatctcaaagtatatcatcagttatcaggcaataacatgcaatttctaaaacctaacttaaatgcagcttttaaagacatttcaawcgtgtcagtttagtcacatttattgaataaagttagcaaatggatatctcttgaaaatgagagctccagggaattaaaaaatgtaaagttcccatttcctttctgtgttaacacagctaattatgatctttacttcacatgcaaaagtcaacagaacaactcagtatttcaccaaattataaacaagaattacgctagagaaatgaaaccctaaagagaaacggtcatataactaacctcagtcaagtagttctggcagttatttgaagtctgaggtttgaagtaggaattcttacgggcatttggggaatatattttctgttgagtcctatactagtaagattttcaacacaaggtgactctcgacctcgccttgtaggaagagtgctgagaaaatatttcacctgctctttctccataaagagctgatactgatc

SEQ ID NO: 187194 - DNA, 556 bp, Homo sapiens
ctaaactacaatcaattagagagtaagccaaagcatctcaaagtatatcatcagttatcaggcaataacatgcaatttctaaaacctaacttaaatgcagcttttaaagacatttcaaacgtgtcagtttagtcacatttattgaataaagttagcaaatggatatctcttgaaaatgagagctccagggaattaaaaaatgtaaagttcccatttcctttctgtgttaacacagctaattatgatctttacttcacatgcaaaagtcaacagaacaactcagtatttcaccaaattataaacaagaattacgctagagaaatgaaaccctaaagagaaacggtcatataactaacctcagtcaagtagttctggcagttatttgaagtctgaggtttgaagtaggaattcttacgggcatttggggaatatattttctgttgagtcctatactagtaagattttcaacacaaggtgactctcgacctcrccttgtaggaagagtgctgagaaaatatttcacctgctctttctccataaagagctgatactgatc

SEQ ID NO: 187195 - DNA, 408 bp, Homo sapiens
aaaatgaatatgttgatttgcttgattataagaaccacttcactagaaataattatatcaaaacatcatgttgtactccttaatgtaggttaagaaaactaaaatgaatgaaaaaaaatctaggaayacttgtgtttagtaaaccagttttggatttcactcttgtacatttcacccatgtatgtagggaccgattaaacatttggcacggaggaataatgcagagcaacaactcctaggggagaactagattgtctggttggtgatcaaaaagaactaaagcatctctgagggcaattagcccccaacactgtgaccaaggccctggaggtggggcatgtgctttctgccttccacacaccgcttcaggctgaacaaggtgttattttttaacagctttgtgaatga

SEQ ID NO: 187196 - DNA, 408 bp, Homo sapiens
aaaatgaatatgttgatttgcttgattataagaaccacttcactagaaataattatatcaaaacatcatgttgtactccttaatgtaggttaagaaaactaaaatgaatgaaaaaaaatctaggaatacttgtgtttagtaaaccagttttrgatttcactcttgtacatttcacccatgtatgtagggaccgattaaacatttggcacggaggaataatgcagagcaacaactcctaggggagaactagattgtctggttggtgatcaaaaagaactaaagcatctctgagggcaattagcccccaacactgtgaccaaggccctggaggtggggcatgtgctttctgccttccacacaccgcttcaggctgaacaaggtgttattttttaacagctttgtgaatga

SEQ ID NO: 187197 - DNA, 476 bp, Homo sapiens
aacatttattttaggttcagcgggtacatgtgcaggtttattatrtgggtaaaatgtgtgtcagtgggatttggtgtacagattacgtagtcatccaggtagtgaacgtagtatctaatagggagttttttgatcctcactctccccccaccctccacccacagtagaccttgtgtctattgttcccttctctgtgtccatgtggactcaatgtttagcccccacttataagtgagaacatgcagtgtttgtttggttttctgttcctgcattaattcacttagaataatggtatccagctccattcatgttgctgcaaaagacattatttcatcctattttataggtgtgtagtattccatggtgtatgtacgctgcatttttttaatccagtcttctgttaacaggcatctaagttgattccgtgtctttgctattgtgaatagtgttataatgaaaatatgcgtgcatatgtc

SEQ ID NO: 187198 - DNA, 476 bp, Homo sapiens
aacatttattttaggttcagcgggtacatgtgcaggtttattatatgggtaaaatgtgtgtcartgggatttggtgtacagattacgtagtcatccaggtagtgaacgtagtatctaatagggagttttttgatcctcactctccccccaccctccacccacagtagaccttgtgtctattgttcccttctctgtgtccatgtggactcaatgtttagcccccacttataagtgagaacatgcagtgtttgtttggttttctgttcctgcattaattcacttagaataatggtatccagctccattcatgttgctgcaaaagacattatttcatcctattttataggtgtgtagtattccatggtgtatgtacgctgcatttttttaatccagtcttctgttaacaggcatctaagttgattccgtgtctttgctattgtgaatagtgttataatgaaaatatgcgtgcatatgtc

SEQ ID NO: 187199 - DNA, 583 bp, Homo sapiens
taacagctttgtgaatgacagttctttaaattcctgtgatagatattccgtatgtcccaagggtgcctttctgtaacatcttgtatatgtaacacgaatagtctatcttgagagagacgctggtgataatactaaagatcgcgatcataatcggttgtgcatagagtagcagtaccactttgcatttaggttgtgatccactgaaaagtaaattaaacayattaatatttctatttagggaaattctgacaagtaattttataacaagatcacttcattaattataaagcttcaaaaatacttagtgaaaaaaactaacagatctggttaattacatgagacttttcaggaaaaaaagccagacaaaagcaaaaaaaaaaaaatgagaggagagacaaaaactatctttgactaacattttaaaggtaaaattatttactaacattatttttcaaaattgcattgtcaaattagcattcacttccttctaatctcctgaagccatctcactaaaaattatgcttttgaaacaaattaatgagcttaattcattttctatgagtgtatgttttgacttacttag

SEQ ID NO: 187200 - DNA, 583 bp, Homo sapiens
taacagctttgtgaatgacagttctttaaattcctgtgatagatattccgtatgtcccaagggtgcctttctgtaacatcttgtatatgtaacacgaatagtctatcttgagagagacgctggtgataatactaaagatcgcgatcataatcggttgtgcatagagtagcagtaccactttgcatttaggttgtgatccactgaaaagtaaattaaacacattaatatttctatttagggaaattctgacaagtaattttataacaagatcacttcattaattataaagcttcaaaaatacttagtgaaaaaaactaacagatcwggttaattacatgagacttttcaggaaaaaaagccagacaaaagcaaaaaaaaaaaaatgagaggagagacaaaaactatctttgactaacattttaaaggtaaaattatttactaacattatttttcaaaattgcattgtcaaattagcattcacttccttctaatctcctgaagccatctcactaaaaattatgcttttgaaacaaattaatgagcttaattcattttctatgagtgtatgttttgacttacttag

SEQ ID NO: 187201 - DNA, 583 bp, Homo sapiens
taacagctttgtgaatgacagttctttaaattcctgtgatagatattccgtatgtcccaagggtgcctttctgtaacatcttgtatatgtaacacgaatagtctatcttgagagagacgctggtgataatactaaagatcgcgatcataatcggttgtgcatagagtagcagtaccactttgcatttaggttgtgatccactgaaaagtaaattaaacacattaatatttctatttagggaaattctgacaagtaattttataacaagatcacttcattaattataaagcttcaaaaatacttagtgaaaaaaactaacagatctggttaattacatgagacttttcaggaaaaaaagccakacaaaagcaaaaaaaaaaaaatgagaggagagacaaaaactatctttgactaacattttaaaggtaaaattatttactaacattatttttcaaaattgcattgtcaaattagcattcacttccttctaatctcctgaagccatctcactaaaaattatgcttttgaaacaaattaatgagcttaattcattttctatgagtgtatgttttgacttacttag

SEQ ID NO: 187202 - DNA, 583 bp, Homo sapiens
taacagctttgtgaatgacagttctttaaattcctgtgatagatattccgtatgtcccaagggtgcctttctgtaacatcttgtatatgtaacacgaatagtctatcttgagagagacgctggtgataatactaaagatcgcgatcataatcggttgtgcatagagtagcagtaccactttgcatttaggttgtgatccactgaaaagtaaattaaacacattaatatttctatttagggaaattctgacaagtaattttataacaagatcacttcattaattataaagcttcaaaaatacttagtgaaaaaaactaacagatctggttaattacatgagacttttcaggaaaaaaagccagacaaaagcaaaaaaaaaaaaatgagaggagagacaaaaactatctttgactaacattttaaaggtaaaattatttactaacattatttttcaaaattrcattgtcaaattagcattcacttccttctaatctcctgaagccatctcactaaaaattatgcttttgaaacaaattaatgagcttaattcattttctatgagtgtatgttttgacttacttag

SEQ ID NO: 187203 - DNA, 381 bp, Homo sapiens
caagtcaatgaaaagagcaaaaaatgcaaaagtgaaactcgaaaggtcatttccccatcaagggctcatgatcactggacattcacaaactatactgttcaaaacattagatctgaattttgatccgagtatccctttagtagcagtttcattcaaggatgyccaagaggtaaaataagacaatatcatttgctattttcagttttcttttctgagaacagcccagcattcttcttcagagaaatgaattgtcctaacttcataggctaaaggctcatgagtcatagttctaagggcattaataaaatatggtggtgcatgcttgtattctgaacttttcaggtttaaactctcatatacaaacagattaaagaaaagccc

SEQ ID NO: 187204 - DNA, 512 bp, Homo sapiens
atttccccatcaagggctcatgatcactggacattcacaaactatactgttcaaaacattagatctgaattttgatccgagtatccctttagtagcagtttcattcaaggatgcccaagaggtaaaataagacaatatcatttgctattttcagttttcttttctgagaacagcccagcattcttcttcagagaaatgaattgtsctaacttcataggctaaaggctcatgagtcatagttctaagggcattaataaaatatggtggtgcatgcttgtattctgaacttttcaggtttaaactctcatatacaaacagattaaagaaaagccctcttaatctgacattatttttctttttatttcttcatttatcagcaacaggagagtctaactaaatgtggtaaagtggtatgagggaatacaatgaacagtgtaaaatgaattaaaccagagataatcacaccaatgtgggtacaagtggaaaatataatacaaaacacaccaaagaaa

SEQ ID NO: 187205 - DNA, 512 bp, Homo sapiens
atttccccatcaagggctcatgatcactggacattcacaaactatactgttcaaaacattagatctgaattttgatccgagtatccctttagtagcagtttcattcaaggatgcccaagaggtaaaataagacaatatcatttgctattttcagttttcttttctgagaacagcccagcattcttcttcagagaaatgaattgtcctaacttcataggctaaaggctcatgagtcatagttctaagggyattaataaaatatggtggtgcatgcttgtattctgaacttttcaggtttaaactctcatatacaaacagattaaagaaaagccctcttaatctgacattatttttctttttatttcttcatttatcagcaacaggagagtctaactaaatgtggtaaagtggtatgagggaatacaatgaacagtgtaaaatgaattaaaccagagataatcacaccaatgtgggtacaagtggaaaatataatacaaaacacaccaaagaaa

SEQ ID NO: 187206 - DNA, 512 bp, Homo sapiens
atttccccatcaagggctcatgatcactggacattcacaaactatactgttcaaaacattagatctgaattttgatccgagtatccctttagtagcagtttcattcaaggatgcccaagaggtaaaataagacaatatcatttgctattttcagttttcttttctgagaacagcccagcattcttcttcagagaaatgaattgtcctaacttcataggctaaaggctcatgagtcatagttctaagggcattaataaaatatggtggtgyatgcttgtattctgaacttttcaggtttaaactctcatatacaaacagattaaagaaaagccctcttaatctgacattatttttctttttatttcttcatttatcagcaacaggagagtctaactaaatgtggtaaagtggtatgagggaatacaatgaacagtgtaaaatgaattaaaccagagataatcacaccaatgtgggtacaagtggaaaatataatacaaaacacaccaaagaaa

SEQ ID NO: 187207 - DNA, 512 bp, Homo sapiens
atttccccatcaagggctcatgatcactggacattcacaaactatactgttcaaaacattagatctgaattttgatccgagtatccctttagtagcagtttcattcaaggatgcccaagaggtaaaataagacaatatcatttgctattttcagttttcttttctgagaacagcccagcattcttcttcagagaaatgaattgtcctaacttcataggctaaaggctcatgagtcatagttctaagggcattaataaaatatggtggtgcatgcttgtattctgaacttttcaggtttaaactctcatatacaaacagattaaagaaaagccctcttaatctgacattatttttctttttatttcttcatttatcagcaacaggagagtctaactaaatgtggtaaagtggtatgagggaatacaatgaacagtgtaaaatgaattaaaccagrgataatcacaccaatgtgggtacaagtggaaaatataatacaaaacacaccaaagaaa

SEQ ID NO: 187208 - DNA, 335 bp, Homo sapiens
aatgaaaaacaaccaacttatgatgttggcaggctctatgaaatcatgttttaaaaactttaacaccaaaaaggctcaaaatcaccattttaaaagactgtgtctaccagtcataaatgaatcattactttcatcatttgtaatagtcaaagatgccacaagcgcacgcatacacacatctatatatacacctacacacacagtcttgctcattagaacatctgatagtcttcagatcatcagtgtaataayactagcagcaagactctgaaattaaaacagaaactgacactttaataagtaaagctttcctctaggtaaagatcagaactcca

SEQ ID NO: 187209 - DNA, 233 bp, Homo sapiens
gcaccagtccatgccttggggttcatatggcactgtgggccacagaaggctgagtcccctgggtggtaatcctgcctgctttctgcacttgaacataaagtcctcctcaagacggcctgtggtctacttcttggccccacctttagggtagaagaactgatgtaccaygtctgacagtgagtgaggttggcggctgatccacctgctcctggcacaccttgcagaggtggctg

SEQ ID NO: 187210 - DNA, 438 bp, Homo sapiens
cagtgaacttgctttttatttcagagactcataggcaaaagagaatgtagccttgacccagatgagactttgsactttgtaactttgagttaatgctgaaatgagttaagactttgggaaactgctggcaaggcatgactgtattttgcaatgtgagaaggacatgagatttgtggggtcagggaaagaataatacggtttttctctatgccccttccaaaactcatgtgaaagtacactccctaatgttagagtcggggcctaggtggaaaaagctttaatcataaaggagtgggagtggatccttcacaaatggcaaagcaccaagcccttaatgccatcctcctgatagtgagtgagttctcatgagatctagtagtttaaaaggctgtggaacctctttcctctgtcttgttccaacttctgccatatgaaaca

SEQ ID NO: 187211 - DNA, 438 bp, Homo sapiens
cagtgaacttgctttttatttcagagactcataggcaaaagagaatgtagccttgacccagatgagactttgcactttgtaactttgagttaatgctgaaatgagttaagactttgggaractgctggcaaggcatgactgtattttgcaatgtgagaaggacatgagatttgtggggtcagggaaagaataatacggtttttctctatgccccttccaaaactcatgtgaaagtacactccctaatgttagagtcggggcctaggtggaaaaagctttaatcataaaggagtgggagtggatccttcacaaatggcaaagcaccaagcccttaatgccatcctcctgatagtgagtgagttctcatgagatctagtagtttaaaaggctgtggaacctctttcctctgtcttgttccaacttctgccatatgaaaca

SEQ ID NO: 187212 - DNA, 266 bp, Homo sapiens
tctgagaggacaaaggtaaaggaagggccagagtggctgcagagatggtcacagtctatgggctgcacaggatgaaggaggccagggaacaggcagggtgggcagttggggttcagggagaggcaggtgcatgctgggaggtcagaccctgtgarggctttgggggcgtcaggttgggtaggctccaggcactctcactcacataggattccagaacactgctacaaggctctgagtgtttgtccctcacgtaggattccagaaca

SEQ ID NO: 187213 - DNA, 453 bp, Homo sapiens
agaattccagaacactgctgtgaggatctgaatgcttgaccctcacatgggattccagaacactgttgcgagggtctaaatgtctgtccctcacacaggtttcccgaacaatgttacgaggttctgaatgtttgtccctaacgtaggattccagagcactcctgctgtgctctgaatgcttctccctcacataggattccagaacactgcyacgagggtctgaatgcttatccctcatataggattccagaacacttctgctgtggtctgaatgtttgctcctcacataggattccagaatactcctgccgtggtctgaatgtttgtccctcacataggattccagaacattcatgctggggtctcaatgtttcccttaacataggatttcagaacactgctcttggggtctgaatgtttgtcactcacataggattacagaacactgttgct

SEQ ID NO: 187214 - DNA, 366 bp, Homo sapiens
gtctgaatgtttgtccttcacataccattccagaacactgctgccgtggtctgaatgtatgtccctcacataggattccagaacactgctactaggttctgaatgtttttcccacacctaggattccagaacacttctgctggtgtctgaatkgttgttcctcagatatgattccaggacactgctatgagagtcttaatgtttgtccttcacgtaggattctagaacactgctcccgtggtctgaatgtttgtccttcacatagcattccagaacactgctgctggggtctgaatgtctgcctctcaaatcagattccagaacactgctgctggggtttgaatgtctttccctcacatagaattc

SEQ ID NO: 187215 - DNA, 505 bp, Homo sapiens
gtttaaatgtctctccctcacataagatttcaggacactgctrcgaggttctgaatgtttgtccctcacataggattccacagcactcctgctgtggtctgaatatttgtccctcacataggattccagaacactgccacgtgggtctgaatgtttgccctcacataggattccagaacactcctgctgtggtctgaatgtttgaccctcacataggattccagaacactcctgctgtggtctgaaagtttgctcaccacataggactccagaacactgctaagagggtatgaatgtccctcacattgtattccagagcactccttctgtggtctgaatgtttgttcctcacataggattcgagaacactcctgctgtggtctgaatgtttgtcccttacctaggattcgagaacattcacactgggatgtaaatgcttgcccttaacataggatttcagaacactgctcctggggtctgaaagtttgtccctcacataggattc

SEQ ID NO: 187216 - DNA, 505 bp, Homo sapiens
gtttaaatgtctctccctcacataagatttcaggacactgctgcgaggttctgaatgtttgtccctcacataggattccacagcactcctgctgtggtctgaatatttgtccctcacataggattccagaacactgccacgtgggtctgaatgtttgccctcacataggattccagaacactcctgctgtggtctgaatgtttgaccctcacataggattccagaacaytcctgctgtggtctgaaagtttgctcaccacataggactccagaacactgctaagagggtatgaatgtccctcacattgtattccagagcactccttctgtggtctgaatgtttgttcctcacataggattcgagaacactcctgctgtggtctgaatgtttgtcccttacctaggattcgagaacattcacactgggatgtaaatgcttgcccttaacataggatttcagaacactgctcctggggtctgaaagtttgtccctcacataggattc

SEQ ID NO: 187217 - DNA, 251 bp, Homo sapiens
acacacacacacacacacaggcacacatgcatacwcaaatacattgcatacacacatgtcagttcaggggatagaggacactgactctgggccctgttgacccaagcagactcccatggtggtgggttgtgtcaccccacaatgtcactgttgctgagtccccatcgcctctgtgttgtggagcagttagagacacacagcagtgtctgtgagtagctctgcgtgaaggaccattttctagatgagaggca

SEQ ID NO: 187218 - DNA, 286 bp, Homo sapiens
aaatggagccacatagaggaaatgagcagcaggctcagaactggggtgtgtgccgcctttggggctccagtccaagcatcggggcttctacagcactgtgggcttctcrggtgccaagaggcagaccacaggccatcttgaggaggactctggtaagagcttccttgtgtatgtggatgatgtccagaatgttggcctggtgtccctgagacagcactaacaggtccatgactgggtccagatcctgcctgggttgatgggcaaagagctcactgacagtgtggaa

SEQ ID NO: 187219 - DNA, 285 bp, Homo sapiens
tggggtgtgtgccgcctttggggctccagtccaagcatcggggcttctacagcactgtgggcttctcgggtgccaagaggcagaccacaggccatcttgaggaggactctggtaagagcttccttgtgtaygtggatgatgtccagaatgttggcctggtgtccctgagacagcactaacaggtccatgactgggtccagatcctgcctgggttgatgggcaaagagctcactgacagtgtggaaggcatctatggtgaagtggatctatgttcaagtgcagaaa

SEQ ID NO: 187220 - DNA, 285 bp, Homo sapiens
tggggtgtgtgccgcctttggggctccagtccaagcatcggggcttctacagcactgtgggcttctcgggtgccaagaggcagaccacaggccatcttgaggaggactctggtaagagcttccttgtgtatgtggatgatgtccagaatgttggcctggtgtccctgagacagcactaacaggtccatgactgggtccagatcctgcctgggytgatgggcaaagagctcactgacagtgtggaaggcatctatggtgaagtggatctatgttcaagtgcagaaa

SEQ ID NO: 187221 - DNA, 210 bp, Homo sapiens
gtgccacattttttgtcacttcctgatgtgccccaccagcactgaagagatagcctggagacagggcaagaggaaggctgagaaagatgagatggtgagtgccagattcttcctggccctgagcccacccccagtgtgacactcaacttttaggagtgggagagcaagaytgatggcttcaagtgcttcaccaagaagatggacaacagg

SEQ ID NO: 187222 - DNA, 572 bp, Homo sapiens
gcacctctttcctctctcagtctttcttctacccctgccatttgaaacatctcattgccccttggccttctggtatgattggaaggcttcctgatctgatcctcccagaagcagaagccactgtgcttcytttacagcctgctggaccgtgagccaaataaacctcttttctttatgatcatgcagaaaattagtactatgaagtggagccatgaaatgccttcaaggccctttcccctttgtcttggcaaccagcactcagcttcttttcatgcaaatatctgaatccttcatgaactttccccctgaaaatggacttttctgttttaccacattgccaggctgtgataaagatagctgacaatgtagaaccaggttcagaagtgggtaaaagacagaggtcagaagagttggaaaaacttagaagacagcaagatgaggaaaatattggaccactatagagaattgttaaatacttgtgataggaaggctgacaaaagtgtaaacactgaagtccagacctaaaagttctcagatgaaaatgaggaatttcctatgaacaagagacaaga

SEQ ID NO: 187223 - DNA, 618 bp, Homo sapiens
tgattatataacagggggtggcacctctttcctctctcagtctttcttctacccctgccatttgaaacatctcattgccccttggccttctggtatgattggaaggcttcctgatctgatcctcccagaagcagaagccactgtgcttcctttacagcctgctggaccgtgagccaawtaaacctcttttctttatgatcatgcagaaaattagtactatgaagtggagccatgaaatgccttcaaggccctttcccctttgtcttggcaaccagcactcagcttcttttcatgcaaatatctgaatccttcatgaactttccccctgaaaatggacttttctgttttaccacattgccaggctgtgataaagatagctgacaatgtagaaccaggttcagaagtgggtaaaagacagaggtcagaagagttggaaaaacttagaagacagcaagatgaggaaaatattggaccactatagagaattgttaaatacttgtgataggaaggctgacaaaagtgtaaacactgaagtccagacctaaaagttctcagatgaaaatgaggaatttcctatgaacaagagacaagattacatttgattggccttagcaaaga

SEQ ID NO: 187224 - DNA, 572 bp, Homo sapiens
gcacctctttcctctctcagtctttcttctacccctgccatttgaaacatctcattgccccttggccttctggtatgattggaaggcttcctgatctgatcctcccagaagcagaagccactgtgcttcctttacagcctgctggaccgtgagccaaataaacctcttttctttatgatcatgcagaaaattagtactatgaagtggagccatgaaatgccttcaaggccctttcccctttgtcttggcaaccagcactcagcttcttttcatgcaaatatctgaatccttcatgaactttccycctgaaaatggacttttctgttttaccacattgccaggctgtgataaagatagctgacaatgtagaaccaggttcagaagtgggtaaaagacagaggtcagaagagttggaaaaacttagaagacagcaagatgaggaaaatattggaccactatagagaattgttaaatacttgtgataggaaggctgacaaaagtgtaaacactgaagtccagacctaaaagttctcagatgaaaatgaggaatttcctatgaacaagagacaaga

SEQ ID NO: 187225 - DNA, 619 bp, Homo sapiens
tgattatataacagggggtggcacctctttcctctctcagtctttcttctacccctgccatttgaaacatctcattgccccttggccttctggtatgattggaaggcttcctgatctgatcctcccagaagcagaagccactgtgcttcctttacagcctgctggaccgtgagccaaataaacctcttttctttatgatcatgcagaaaattagtactatgaagtggagccatgaaatgccttcaaggccctttcccctttgtcttggcaaccagcactcagcttcttttcatgcaaatatctgaatccttcatgaactttccccctgaaaatggacttttctgttttaccacattgccaggctgtgataaagatagctgacaatgtagaaccaggttcagaagtgggtaaaagacagaggtcagaagagttggaaaarcttagaagacagcaagatgaggaaaatattggaccactatagagaattgttaaatacttgtgataggaaggctgacaaaagtgtaaacactgaagtccagacctaaaagttctcagatgaaaatgaggaatttcctatgaacaagagacaagattacatttgattggccttagcaaagaa

SEQ ID NO: 187226 - DNA, 551 bp, Homo sapiens
aaaactcatgtggaattgtaatcccaaattttggagatggggcctggtgggagattatttaatcatggatgggaggggtaggggtggaagaaaaaaggggtgggtagggtggggaagaataggctggctgtagggcggtgggagggtgatggatagtaggaagggggagtagcctgctgcaggggccgaggctcatggaaaacttctaccagggcagccacctgtggctttgcaggctttagccccatggctgctctcatgggctgggctggtgttgagagcctatcacttttccatactgagggtgtgaactgttggtaggtctatgaatctggggtctcgaggatggtggcctcctgcatagtcagtcaaagcccttattttccttctgcactgccatagtacaggattcccaagagcctctgcctctgcagcaggcttctgtctggaacastaggaggtggagctgtgttggggggcggatccttcaccaatggttaagcaccatcttcttgatgctgaccaagtgatagtgagttctcatgagatct

SEQ ID NO: 187227 - DNA, 551 bp, Homo sapiens
aaaactcatgtggaattgtaatcccaaattttggagatggggcctggtgggagattatttaatcatggatgggaggggtaggggtggaagaaaaaaggggtgggtagggtggggaagaataggctggctgtagggcggtgggagggtgatggatagtaggaagggggagtagcctgctgcaggggccgaggctcatggaaaacttctaccagggcagccacctgtggctttgcaggctttagccccatggctgctctcatgggctgggctggtgttgagagcctatcacttttccatactgagggtgtgaactgttggtaggtctatgaatctggggtctcgaggatggtggcctcctgcatagtcagtcaaagcccttattttccttctgcactgccatagtacaggattcccaagagcctctgcctctgcagcaggcttctgtctggaacactaggaggtggagctgtgttggggggcggatccttcaccaatggttaagcaccatcttcttgatgctgaccwagtgatagtgagttctcatgagatct

SEQ ID NO: 187228 - DNA, 368 bp, Homo sapiens
aacggtgtggcacctctttcctctctcagccttgctcctactcctgccgtatgaaatatttcattgytgttttcctattggtatgattgggagtcttcctgagtcctcccagaagcaaaagccactatgctttctttacagcctgcagaaccatgagccaattaaaccccttttcattatgatcatacagaaaataaagtactgcgaagtggagctatgaaatatcttcaatgacatttccccatcgtcttggctattagcactggacttctttttaatgcaaatatctgaagcctttttgaagtttccccctgaaaatgtacttctttttcttctacattgtcaggctgcaacaaagatagctgaaa

SEQ ID NO: 187229 - DNA, 368 bp, Homo sapiens
aacggtgtggcacctctttcctctctcagccttgctcctactcctgccgtatgaaatatttcattgttgttttcctattggtatgattgggagtcttcctgagtcctcccagaagcaraagccactatgctttctttacagcctgcagaaccatgagccaattaaaccccttttcattatgatcatacagaaaataaagtactgcgaagtggagctatgaaatatcttcaatgacatttccccatcgtcttggctattagcactggacttctttttaatgcaaatatctgaagcctttttgaagtttccccctgaaaatgtacttctttttcttctacattgtcaggctgcaacaaagatagctgaaa

SEQ ID NO: 187230 - DNA, 368 bp, Homo sapiens
aacggtgtggcacctctttcctctctcagccttgctcctactcctgccgtatgaaatatttcattgttgttttcctattggtatgattgggagtcttcctgagtcctcccagaagcaaaagccactatgctttctttacagcctgcagaaccatgagccaattaaaccccttttcattatgatcatacagaaaataaagtactgcgaagtggagctatgaaatatcttcaatgacatttccccatcgtcttggctattagcactggacttctttttaatgcaaatatctgaagccttyttgaagtttccccctgaaaatgtacttctttttcttctacattgtcaggctgcaacaaagatagctgaaa

SEQ ID NO: 187231 - DNA, 368 bp, Homo sapiens
aacggtgtggcacctctttcctctctcagccttgctcctactcctgccgtatgaaatatttcattgttgttttcctattggtatgattgggagtcttcctgagtcctcccagaagcaaaagccactatgctttctttacagcctgcagaaccatgagccaattaaaccccttttcattatgatcatacagaaaataaagtactgcgaagtggagctatgaaatatcttcaatgacatttccccatcgtcttggctattagcactggacttctttttaatgcaaatatctgaagcctttttgaagtttccccctgaaaatgkacttctttttcttctacattgtcaggctgcaacaaagatagctgaaa

SEQ ID NO: 187232 - DNA, 593 bp, Homo sapiens
ggtgtggcacctctttcctctctcagccttgctcctactcctgccgtatgaaatatttcattgttgttttcctattggtatgattgggagtcttcctgagtcctcccagaagcaaaagccactatgctttctttacagcctgcagaaccatgagccaattaaaccccttttcattatgatcatacagaaaataaagtactgcgaagtggagctatgaaatatcttcaatgacatttccccatcgtcttggctattagcactggacttctttttaatgcaaatatctgaagcctttttgaagtttccccctgaaaatgtacttctttttcttctacattgtcaggctgcaacaaagatagctgaaaatgtaaagcaggttcagaagtgggtaacagccagaggttggagagtttggagagcttgaaagaagacaggaagatgaaagaaattttggaccatcrtaggcacttgttgaatagttgtgattaaaaggctggcagaatgatggacagtgaaggccaggcttacaaggtctcagatgaaaatgaggaaattactgggaacaggagccaaggttacttttgttttgctgt

SEQ ID NO: 187233 - DNA, 593 bp, Homo sapiens
ggtgtggcacctctttcctctctcagccttgctcctactcctgccgtatgaaatatttcattgttgttttcctattggtatgattgggagtcttcctgagtcctcccagaagcaaaagccactatgctttctttacagcctgcagaaccatgagccaattaaaccccttttcattatgatcatacagaaaataaagtactgcgaagtggagctatgaaatatcttcaatgacatttccccatcgtcttggctattagcactggacttctttttaatgcaaatatctgaagcctttttgaagtttccccctgaaaatgtacttctttttcttctacattgtcaggctgcaacaaagatagctgaaaatgtaaagcaggttcagaagtgggtaacagccagaggttggagagtttggagagcttgaaagaagacaggaagatgaaagaaattttggaccatcgtaggcacttgttgaatagttgtgattaaaaggctggcagaakgatggacagtgaaggccaggcttacaaggtctcagatgaaaatgaggaaattactgggaacaggagccaaggttacttttgttttgctgt

SEQ ID NO: 187234 - DNA, 274 bp, Homo sapiens
ccggggtttgattgtggcaaggatgctgctggtgtcaaaaccacaacgtgggaaccacagaaccactagttgsttttcagtgtttcagtgcatacaattcctaatatatctggccaagaaaacttggaagttcttagattgtcccaaaggtggcgcatgaaatcaaagcaggagaacagtttcctacgaggtgtagcctgggaaagttgggggtgactgacggaaaggaggagtgaagctcgccctttccgctgctaggctgcgcccgaggcta

SEQ ID NO: 187235 - DNA, 619 bp, Homo sapiens
tggtataactggatattgcacttctttcctctctctgtcttgcttctactcctgccatatgaaacatttcattgctgcttggccttctggtataattgggaggcttcctgagtccccctacaagcagaaaccactatgctttytttacagcccgaagaactgtgagtcaattagacctcttttctttatgtagatacagaaaattaatgctgtgaagtgaagttatgaaatgacttcgaggaatttcccccattctcttggctattagcactgagcttttttcagtgcaaatattggaggccatcttgatgtttccgcctgataatggacttttcttcttttaccacattgccaggctgcagcaaagatagctgacagtgtagacgcaggttccaaattgggtagtggccagaggttagagagtttggagagcttggaagaagacaggaagatgagggaaagtttggaccattgcagagacttattaaatagttgtgagtaaaaagctgacagaaggatggacagtgaagaccagccttgtaaggtctcagatgaaaatgaggaacttactgggaaaaggagccaaggtttttttgttttgacttagcaaagtaattgg

SEQ ID NO: 187236 - DNA, 616 bp, Homo sapiens
tataactggatattgcacttctttcctctctctgtcttgcttctactcctgccatatgaaacatttcattgctgcttggccttctggtataattgggaggcttcctgagtccccctacaagcagaaaccactatgctttctttacagccygaagaactgtgagtcaattagacctcttttctttatgtagatacagaaaattaatgctgtgaagtgaagttatgaaatgacttcgaggaatttcccccattctcttggctattagcactgagcttttttcagtgcaaatattggaggccatcttgatgtttccgcctgataatggacttttcttcttttaccacattgccaggctgcagcaaagatagctgacagtgtagacgcaggttccaaattgggtagtggccagaggttagagagtttggagagcttggaagaagacaggaagatgagggaaagtttggaccattgcagagacttattaaatagttgtgagtaaaaagctgacagaaggatggacagtgaagaccagccttgtaaggtctcagatgaaaatgaggaacttactgggaaaaggagccaaggtttttttgttttgacttagcaaagtaattgg

SEQ ID NO: 187237 - DNA, 456 bp, Homo sapiens
accattctgttaaaggcaatctacaaattcaatgcaatccccatctgaatgccaccatcattcttcacagaattacaaaaacaattctaaaattaatatggaaccaaaagagagccatgtaaccaaaccaagcctaagcaaaaagaacctggaggtatcacactacttgatttcaaactgtacagtaaggccatagttaccaaaacaccaacgtactggtttaaaaataggaacatagaccaatggaacagaagagagaacccagaaattaacccaaatacttacagccaactgatcttcgacaaagtaaacaaaaacataaagtggggaaaggacccccttttcaacacatgawgtcgggataattggcgagccacatgtaggggaataaaactggattctcatctctcatcttatacaaaaatctactcaagatggattaagaacttaaatcta

SEQ ID NO: 187238 - DNA, 456 bp, Homo sapiens
accattctgttaaaggcaatctacaaattcaatgcaatccccatctgaatgccaccatcattcttcacagaattacaaaaacaattctaaaattaatatggaaccaaaagagagccatgtaaccaaaccaagcctaagcaaaaagaacctggaggtatcacactacttgatttcaaactgtacagtaaggccatagttaccaaaacaccaacgtactggtttaaaaataggaacatagaccaatggaacagaagagagaacccagaaattaacccaaatacttacagccaactgatcttcgacaaagtaaacaaaaacataaagtggggaaaggacccccttttcaacacatgaagtygggataattggcgagccacatgtaggggaataaaactggattctcatctctcatcttatacaaaaatctactcaagatggattaagaacttaaatcta

SEQ ID NO: 187239 - DNA, 519 bp, Homo sapiens
gagtgaattatccctaatgcaaatagatccgtgaaccactcctgaatacctaatgtccaagcatcttaaaggtttatataaggatttcagaaactgacttctgggttgggcayggtggctcatgtctgtgatcccagcactttgggaggctgaggcaagtggatcatttgaggtcaggagttcaagaccagcctggccaacaaggtgaaaccccatctctaataaaatacaaaaattagcaggtggtagtggcacgcgcctgtaatctcagctactcaggaggctgaggcaggagaattacttgaacatgggaggccgggttgcagtgagctgagatcatgccactgccctccagtctgggagacagagtataaccttgtcccaaaaaagaaaagaaaaggaaactgatttctgcccaaatctccatctgtatccctttccccatctgcctttttctctggaattactgagctgctggtaatggccccctcaccattcctcttctgcagagaaatacat

SEQ ID NO: 187240 - DNA, 519 bp, Homo sapiens
gagtgaattatccctaatgcaaatagatccgtgaaccactcctgaatacctaatgtccaagcatcttaaaggtttatataaggatttcagaaactgacttctgggttgggcacggtggctcatgtctgtgatcccagcactttgggaggctgaggcaagtggatcatttgaggtcaggagttcaagaccagcctggccaacaaggtgaaaccccatctctaataaaatacaaaaattagcaggyggtagtggcacgcgcctgtaatctcagctactcaggaggctgaggcaggagaattacttgaacatgggaggccgggttgcagtgagctgagatcatgccactgccctccagtctgggagacagagtataaccttgtcccaaaaaagaaaagaaaaggaaactgatttctgcccaaatctccatctgtatccctttccccatctgcctttttctctggaattactgagctgctggtaatggccccctcaccattcctcttctgcagagaaatacat

SEQ ID NO: 187241 - DNA, 581 bp, Homo sapiens
actgtttatacaaagatgattcaaaagattgtcctctacagtctagcagcaaagggggtcaacatgtaaagacatgatgtgcaggtcaggtggtaaagtgacactagaaaaattgacaaggtactgagggaccccaaggaagcagacacctgtgtgtgtgcagaaagatagctagaatcaaggaagatctcacatagcattctgagcctttgttttcctctttttggagacaagttcttactctatcacccaggattggagtgcaatggcatgattgagactcactgaaacctcagactyctgggctcgagggatcttctcatctaagcttcttgagtagcggggacaacaggaacatatcaccatacctgtctaattttttgtagagtcaaggttacctatggttcccaggctggtcttaaactcttggccttgagcaattctcccattttggccttccaaagtgctgggattacagatgtgagctattatgcccagcctactttctgagtcttaaaagatggaaataaatttttcagaatagcaggggaaaacatttgtgatgtaaaaaatggggtgca

SEQ ID NO: 187242 - DNA, 411 bp, Homo sapiens
cacatagcattctgagcctttgttttcctctttttggagacaagttcttactctatcacccaggattggagtgcaatggcatgattgagactcactgaaacctcagactcctgggctcgagggatcttctcatctaagcttcttgagtagcggggacaacaggaacatatcaccatacctgtctaattttttgtagagtcwaggttacctatggttcccaggctggtcttaaactcttggccttgagcaattctcccattttggccttccaaagtgctgggattacagatgtgagctattatgcccagcctactttctgagtcttaaaagatggaaataaatttttcagaatagcaggggaaaacatttgtgatgtaaaaaatggggtgcacactaattgaggtataaaga

SEQ ID NO: 187243 - DNA, 581 bp, Homo sapiens
actgtttatacaaagatgattcaaaagattgtcctctacagtctagcagcaaagggggtcaacatgtaaagacatgatgtgcaggtcaggtggtaaagtgacactagaaaaattgacaaggtactgagggaccccaaggaagcagacacctgtgtgtgtgcagaaagatagctagaatcaaggaagatctcacatagcattctgagcctttgttttcctctttttggagacaagttcttactctatcacccaggattggagtgcaatggcatgattgagactcactgaaacctcagactcctgggctcgagggatcttctcatctaagcttcttgagtagcggggacaacaggaacatatcaccatacctgtctaattttttgtagagtcaaggttacctatggttcccaggctggtcttaaactyttggccttgagcaattctcccattttggccttccaaagtgctgggattacagatgtgagctattatgcccagcctactttctgagtcttaaaagatggaaataaatttttcagaatagcaggggaaaacatttgtgatgtaaaaaatggggtgca

SEQ ID NO: 187244 - DNA, 575 bp, Homo sapiens
aagcttcttgagtagcggggacaacaggaacatatcaccatacctgtctaattttttgtagagtcaaggttacctatggttcccaggctggtcttaaactcttggccttgagcaattctcccattttggccttccaaagtgctgggattacagatgtgagctattatgcccagcctactttctgagtcttaaaagatgraaataaatttttcagaatagcaggggaaaacatttgtgatgtaaaaaatggggtgcacactaattgaggtataaagaacaataattttgcaaattattagtaactgccaactcaattagtgtcttgttaaaaagatactgttatgaagtatagtaaagcattacattgtatattttgaatgtatttcaaatttctgttttgtttccaacagttttgttgacttatgttgggtggaacaatttgtgagtgaccctgagattttgcatggcttgaatctggtgatatctggtgtctccccaagtggtttgttgaagttctggataattagaactatttcttacagaagtaaatatttcagtaaacattgtttcattca

SEQ ID NO: 187245 - DNA, 575 bp, Homo sapiens
aagcttcttgagtagcggggacaacaggaacatatcaccatacctgtctaattttttgtagagtcaaggttacctatggttcccaggctggtcttaaactcttggccttgagcaattctcccattttggccttccaaagtgctgggattacagatgtgagctattatgcccagcctactttctgagtcttaaaagatggaaataaatttttcagaatagcaggggaaaacatttgtgatgtaaaaaatggggtgcacactaattgaggtataaasaacaataattttgcaaattattagtaactgccaactcaattagtgtcttgttaaaaagatactgttatgaagtatagtaaagcattacattgtatattttgaatgtatttcaaatttctgttttgtttccaacagttttgttgacttatgttgggtggaacaatttgtgagtgaccctgagattttgcatggcttgaatctggtgatatctggtgtctccccaagtggtttgttgaagttctggataattagaactatttcttacagaagtaaatatttcagtaaacattgtttcattca

SEQ ID NO: 187246 - DNA, 575 bp, Homo sapiens
aagcttcttgagtagcggggacaacaggaacatatcaccatacctgtctaattttttgtagagtcaaggttacctatggttcccaggctggtcttaaactcttggccttgagcaattctcccattttggccttccaaagtgctgggattacagatgtgagctattatgcccagcctactttctgagtcttaaaagatggaaataaatttttcagaatagcaggggaaaacatttgtgatgtaaaaaatggggtgcacactaattgaggtataaagaacaataattttgcaaattattagtaactgccaactcaattagtgtcttgttaaaaagatactgttatgaagtatagtaaagcattacattgtatattttgamtgtatttcaaatttctgttttgtttccaacagttttgttgacttatgttgggtggaacaatttgtgagtgaccctgagattttgcatggcttgaatctggtgatatctggtgtctccccaagtggtttgttgaagttctggataattagaactatttcttacagaagtaaatatttcagtaaacattgtttcattca

SEQ ID NO: 187247 - DNA, 499 bp, Homo sapiens
tggtgatatctggtgtctccccaagtggtttgttgaagttctggataattagaactatttcttacagaagtaaatatttcagtaaacattgtttcattcaaactctcaaaatataaaatacaaagaaatgttattctctatttatttttataaagattatagtctttatctaactcttcttagttcatttgaactaaatcaatgaatttgtcaacagaacaaaccttaccagtggctttagaggaagagcaagaaaggtgtgaaagaagtgaaaagaagcaatcacaggtatatgaaaatttaagttcttgtttaatattaggttttttttttttgctttactaacaaagcatagtccaaatgacatgacctttcagactatacctttagaatccaatagatcataattttatatktaatttttaaaacatcataaccagttatgaaacttaagatattcttactatctcgagtaactattagttattctagtaattct

SEQ ID NO: 187248 - DNA, 576 bp, Homo sapiens
cataatacacaaggtaacatgaagtattgggtcatattactgaggaatagaaattatgaacagtttaacaacaatggccactgagttaaactagtgttaaaggagtcatcattgccagtgcttcaaatgttgcagttttatattgctggtcaccagtgccgaggttaaagatttattctgttttgtggtcaccagttgacttctgtgtctgtgttcagggagtgaatggggtcataaaagtcaatgcagttgcctattaagagaatcctaccttgcagaatgggayctttggtgtcagggtgtgaacaataactttatttcaacataaatacatagtaaacattactaaaatttaaaaaatccaaaccctatcactaccggaacttaaaatatattaaaagtggatataagcagaaattctatctagatacataacactatcatagtatatcatttgaattagaatttaaaattttgattctctttcttattggtgttcagtttagctcttaataatttagtgtttgcctagtgctctagttaatcttcagaaataaacatgcactgtaggggctt

SEQ ID NO: 187249 - DNA, 576 bp, Homo sapiens
cataatacacaaggtaacatgaagtattgggtcatattactgaggaatagaaattatgaacagtttaacaacaatggccactgagttaaactagtgttaaaggagtcatcattgccagtgcttcaaatgttgcagttttatattgctggtcaccagtgccgaggttaaagatttattctgttttgtggtcaccagttgacttctgtgtctgtgttcagggagtgaatggggtcataaaagtcaatgcagttgcctattaagagaatcctaccttgcagaatgggacctttggtgtcagggtgtgaacaataactttatttcaacataaatacatagtaaacattactaaaatttaaaaaatccaaaccctatcactaccggaacttaaaatatattaraagtggatataagcagaaattctatctagatacataacactatcatagtatatcatttgaattagaatttaaaattttgattctctttcttattggtgttcagtttagctcttaataatttagtgtttgcctagtgctctagttaatcttcagaaataaacatgcactgtaggggctt

SEQ ID NO: 187250 - DNA, 576 bp, Homo sapiens
cataatacacaaggtaacatgaagtattgggtcatattactgaggaatagaaattatgaacagtttaacaacaatggccactgagttaaactagtgttaaaggagtcatcattgccagtgcttcaaatgttgcagttttatattgctggtcaccagtgccgaggttaaagatttattctgttttgtggtcaccagttgacttctgtgtctgtgttcagggagtgaatggggtcataaaagtcaatgcagttgcctattaagagaatcctaccttgcagaatgggacctttggtgtcagggtgtgaacaataactttatttcaacataaatacatagtaaacattactaaaatttaaaaaatccaaaccctatcactaccggaacttaaaatatattaaaagyggatataagcagaaattctatctagatacataacactatcatagtatatcatttgaattagaatttaaaattttgattctctttcttattggtgttcagtttagctcttaataatttagtgtttgcctagtgctctagttaatcttcagaaataaacatgcactgtaggggctt

SEQ ID NO: 187251 - DNA, 519 bp, Homo sapiens
cttgaattataaaatgcgggttattctttgccacatagtgagagaacatcaaaaatatagctagaagacttacagcaagatattccaaggtcactaacatagcacatgtatacataygtaacaaacctgcacattgtgcacatgtaccagaacttaaagtataataatagtaaaaagaatgaggtaggcatgttacaagtagagttcctggctttggagaaagagaaagtccaacttcaaaaagacagaggttcacttgctgcttcttttttctctttatcaattatttgatttagtcaaattttctattcaagaaaatctcatgtgtacagttacagcggggttttctaaatgtgtaattatgtgtcaaagtagattagtcctgctatctaaacaaaggttctggagaatgttctcataatgtttcttcattaatcaacctaagtctcactctcagtcttccaagtggcatatgagctgggaaactaattcagccatataccatgtgaccttctgaac

SEQ ID NO: 187252 - DNA, 357 bp, Homo sapiens
acatatgtaacaaacctgcacattgtgcacatgtaccagaacttaaagtataataatagtaaaaagaatgaggtaggcatgttacaagtagagttcctggctttggagaaasagaaagtccaacttcaaaaagacagaggttcacttgctgcttcttttttctctttatcaattatttgatttagtcaaattttctattcaagaaaatctcatgtgtacagttacagcggggttttctaaatgtgtaattatgtgtcaaagtagattagtcctgctatctaaacaaaggttctggagaatgttctcataatgtttcttcattaatcaacctaagtctcactctcagtcttccaagtg

SEQ ID NO: 187253 - DNA, 357 bp, Homo sapiens
acatatgtaacaaacctgcacattgtgcacatgtaccagaacttaaagtataataatagtaaaaagaatgaggtaggcatgttacaagtagagttcctggctttggagaaagagaaagtccaayttcaaaaagacagaggttcacttgctgcttcttttttctctttatcaattatttgatttagtcaaattttctattcaagaaaatctcatgtgtacagttacagcggggttttctaaatgtgtaattatgtgtcaaagtagattagtcctgctatctaaacaaaggttctggagaatgttctcataatgtttcttcattaatcaacctaagtctcactctcagtcttccaagtg

SEQ ID NO: 187254 - DNA, 417 bp, Homo sapiens
atttagagatgaattacatttatttgatgatagaatgggaatacaatgrgagggaagcaatgactgagatgagccacaaaaacacgtctagccttgagagttgcaatgaatattcccagccaaatgagtctgtttaatgtgttttcatgcacgccagtttatctgcttagctcaaactgtttgaatttatagttccatcatggttatttccaatattttgaaaacaaatatatacatccacatattttaaaaaatcaccactccaatatttctgttgaatcagaccttacattatgttgtttaataaagtatggtaagttttggcatgtatgatttttatcatgtaagaaagaagcataatttcttagctaaaaatttagcctttgactctttagtagaaagttgagttctgtacat

SEQ ID NO: 187255 - DNA, 382 bp, Homo sapiens
tttatttgatgatagaatgggaatacaatgagagggaagcaatgactgagatgagccacaaaaacacktctagccttgagagttgcaatgaatattcccagccaaatgagtctgtttaatgtgttttcatgcacgccagtttatctgcttagctcaaactgtttgaatttatagttccatcatggttatttccaatattttgaaaacaaatatatacatccacatattttaaaaaatcaccactccaatatttctgttgaatcagaccttacattatgttgtttaataaagtatggtaagttttggcatgtatgatttttatcatgtaagaaagaagcataatttcttagctaaaaatttagcctttgactctttagtagaa

SEQ ID NO: 187256 - DNA, 408 bp, Homo sapiens
tgaattacatttatttgatgatagaatgggaatacaatgagagggaagcaatgactgagatgagccacaaaaacacgtctagccttgagagttgcaatgaatattcccagccaaatgagtctgtttaatgtgttttcatgcacgccagtttatctgcttagctyaaactgtttgaatttatagttccatcatggttatttccaatattttgaaaacaaatatatacatccacatattttaaaaaatcaccactccaatatttctgttgaatcagaccttacattatgttgtttaataaagtatggtaagttttggcatgtatgatttttatcatgtaagaaagaagcataatttcttagctaaaaatttagcctttgactctttagtagaaagttgagttctgtacat

SEQ ID NO: 187257 - DNA, 382 bp, Homo sapiens
tttatttgatgatagaatgggaatacaatgagagggaagcaatgactgagatgagccacaaaaacacgtctagccttgagagttgcaatgaatattcccagccaaatgagtctgtttaatgtgttttcatgcacgccagtttatctgcttagctcaaactgtttgaatttatagttccatcatggttatttccaatattttgwaaacaaatatatacatccacatattttaaaaaatcaccactccaatatttctgttgaatcagaccttacattatgttgtttaataaagtatggtaagttttggcatgtatgatttttatcatgtaagaaagaagcataatttcttagctaaaaatttagcctttgactctttagtagaa

SEQ ID NO: 187258 - DNA, 404 bp, Homo sapiens
aattacatttatttgatgatagaatgggaatacaatgagagggaagcaatgactgagatgagccacaaaaacacgtctagccttgagagttgcaatgaatattcccagccaaatgagtctgtttaatgtgttttcatgcacgccagtttatctgcttagctcaaactgtttgaatttatagttccatcatggttatttccaatattttgaaaacaaatatatacwtccacatattttaaaaaatcaccactccaatatttctgttgaatcagaccttacattatgttgtttaataaagtatggtaagttttggcatgtatgatttttatcatgtaagaaagaagcataatttcttagctaaaaatttagcctttgactctttagtagaaagttgagttctgtac

SEQ ID NO: 187259 - DNA, 214 bp, Homo sapiens
gaatttatagttccatcatggttatttccaatattttgaaaacaaatatatacatccacatatttwaaaaaatcaccactccaatatttctgttgaatcagaccttacattatgttgtttaataaagtatggtaagttttggcatgtatgatttttatcatgtaagaaagaagcataatttcttagctaaaaatttagcctttgactctttagt

SEQ ID NO: 187260 - DNA, 417 bp, Homo sapiens
atttagagatgaattacatttatttgatgatagaatgggaatacaatgagagggaagcaatgactgagatgagccacaaaaacacgtctagccttgagagttgcaatgaatattcccagccaaatgagtctgtttaatgtgttttcatgcacgccagtttatctgcttagctcaaactgtttgaatttatagttccatcatggttatttccaatattttgaaaacaaatatatacatccacatattttaaaaaatcaccactccaatatttctgttgaatcagaccttacattatgttgtttaataaagtatggtaagttttggcawgtatgatttttatcatgtaagaaagaagcataatttcttagctaaaaatttagcctttgactctttagtagaaagttgagttctgtacat

SEQ ID NO: 187261 - DNA, 214 bp, Homo sapiens
gaatttatagttccatcatggttatttccaatattttgaaaacaaatatatacatccacatattttaaaaaatcaccactccaatatttctgttgaatcagaccttacattatgttgtttaataaagtatggtaagttttggcatgtatgatttttatcatgtaagaaagaagcataatttcttagctaaaaatttarcctttgactctttagt

SEQ ID NO: 187262 - DNA, 504 bp, Homo sapiens
ttaacaagttttatagttttaccagggatatttagccctgcctggtaatcagaaaartgcaaattaacataaaataagatatattttgtaaagtcatgctgatattgaaaaagtaattactaccattgaaaatgtgaggaaaaaagcattctcatacactgttggtatatgaaattggtaaattatttctgaagggtaacttagtgctgtgtatcaaaatttcaaataacctgacatccctttaactcaacaactccacttctgggactagatttcacaggaaaacataacttgtgtaaacatacacacacttattaagggcattaattatatattacacataatgaacaatagcttaataaatatataaaatatatgtaataagaaggtgaattggaagtattaagaaagaattataaaaagtgtggggtaacagatgttagactctttagcctagttttagatgacaatcatctgcagatatagtttgtgtgagagacatct

SEQ ID NO: 187263 - DNA, 504 bp, Homo sapiens
ttaacaagttttatagttttaccagggatatttagccctgcctggtaatcagaaaaatgcaaattaacataaaataagatatattttgtaaagtcatgctgrtattgaaaaagtaattactaccattgaaaatgtgaggaaaaaagcattctcatacactgttggtatatgaaattggtaaattatttctgaagggtaacttagtgctgtgtatcaaaatttcaaataacctgacatccctttaactcaacaactccacttctgggactagatttcacaggaaaacataacttgtgtaaacatacacacacttattaagggcattaattatatattacacataatgaacaatagcttaataaatatataaaatatatgtaataagaaggtgaattggaagtattaagaaagaattataaaaagtgtggggtaacagatgttagactctttagcctagttttagatgacaatcatctgcagatatagtttgtgtgagagacatct

SEQ ID NO: 187264 - DNA, 504 bp, Homo sapiens
ttaacaagttttatagttttaccagggatatttagccctgcctggtaatcagaaaaatgcaaattaacataaaataagatatattttgtaaagtcatgctgatattgaaaaagtaattactaccattgaaaatgtgaggaaaaargcattctcatacactgttggtatatgaaattggtaaattatttctgaagggtaacttagtgctgtgtatcaaaatttcaaataacctgacatccctttaactcaacaactccacttctgggactagatttcacaggaaaacataacttgtgtaaacatacacacacttattaagggcattaattatatattacacataatgaacaatagcttaataaatatataaaatatatgtaataagaaggtgaattggaagtattaagaaagaattataaaaagtgtggggtaacagatgttagactctttagcctagttttagatgacaatcatctgcagatatagtttgtgtgagagacatct

SEQ ID NO: 187265 - DNA, 504 bp, Homo sapiens
ttaacaagttttatagttttaccagggatatttagccctgcctggtaatcagaaaaatgcaaattaacataaaataagatatattttgtaaagtcatgctgatattgaaaaagtaattactaccattgaaaatgtgaggaaaaaagcattctcatacactgttggtatatgaaattggtaaattatttctgaagggtaacttagtgctgtgtatcaaaatttcaaataacctgacatccctttaactcaacaactccacttctgggactagatttcacaggaaaacataacttgtgtaaacatacacacacttattaagggcattaattatatattacacataatgaacaatagcttaataaatayataaaatatatgtaataagaaggtgaattggaagtattaagaaagaattataaaaagtgtggggtaacagatgttagactctttagcctagttttagatgacaatcatctgcagatatagtttgtgtgagagacatct

SEQ ID NO: 187266 - DNA, 418 bp, Homo sapiens
agtataaatggaaatgtttacacctgaaatgagtattttcaaattaaaatttaattgattttctttgacacttaattctagatttcccagatgaactgaagtgtattgctttgtcttgtaataccttgctttaagtagctttttatgtattttarttggtatatctttgttattaatcatattaatttaacaaatctgaaaatatgtcaaattacatatttttatgactatgtaatgttttaaaggcacctacttgttataaaatcataatttaggatacatgtggtaatatttagcaaaattatatttggtttagtcttcccactggtattcatagtttactttgaatatttctattaataattagctcctaatttttatttcaaggctcaatgactatcattggaatataattttg

SEQ ID NO: 187267 - DNA, 418 bp, Homo sapiens
agtataaatggaaatgtttacacctgaaatgagtattttcaaattaaaatttaattgattttctttgacacttaattctagatttcccagatgaactgaagtgtattgctttgtcttgtaataccttgctttaagtagctttttatgtattttagttggtatatctttgttattaatcatattaatttaacaaatctgaaaatatgtcaaattacatatttttatgactatgtaatgttttaaaggcacctacttgttataaaatcataatttaggatacatgtggtaatatttagcaaaaytatatttggtttagtcttcccactggtattcatagtttactttgaatatttctattaataattagctcctaatttttatttcaaggctcaatgactatcattggaatataattttg

SEQ ID NO: 187268 - DNA, 598 bp, Homo sapiens
ctttactattgtgaagagtgctgcagtgaacatgtaaatgcatgtatctttataatagaataatttatattccaacgtakggtaattttaaatcagttttggtattaaaaatcatgcattttggaaaatattgataatggaaaaatccaaattctgccaaaatatgttgagaaaatagagggtaaatatatcttttcaaactttaaatgcctcaggctcttagttaatcttccccagatctgggaagacctagaaggggagagattgggctaccttaatgagggccatttcaatctcttggccctgcagcagcaatttcaaaataagtcaaaaaaatatatttgggggtaaaatattttgatttccttcagcttcttctctctgtgatgctgcaccagaatcagattagaaaggaagccacattataagtgttaataaaacccatctgatgagatttgatagtttgaagggtgtgtttcccagaccctttagatagaaattggggccaaagaaaacaaggtcttattcctctatataaatctgtcagtgctttaagcagtgaaagaaagatttttcatttaattttacagacttgata

SEQ ID NO: 187269 - DNA, 598 bp, Homo sapiens
ctttactattgtgaagagtgctgcagtgaacatgtaaatgcatgtatctttataatagaataatttatattccaacgtatggtaattttaaatcagttttggtattaaaaatcatgcattttggaaaatattgataatggaaaaatccaaattctgccaaaatatgttgagaaaatagagggtaaatatatcttttcaaactttaaatgcctcaggctcttagttaatcttccccagatctgggaagacctagaaggggagagattgggctaccttaatgagggccatttcaatctcttggccctgcagcagcwatttcaaaataagtcaaaaaaatatatttgggggtaaaatattttgatttccttcagcttcttctctctgtgatgctgcaccagaatcagattagaaaggaagccacattataagtgttaataaaacccatctgatgagatttgatagtttgaagggtgtgtttcccagaccctttagatagaaattggggccaaagaaaacaaggtcttattcctctatataaatctgtcagtgctttaagcagtgaaagaaagatttttcatttaattttacagacttgata

SEQ ID NO: 187270 - DNA, 598 bp, Homo sapiens
ctttactattgtgaagagtgctgcagtgaacatgtaaatgcatgtatctttataatagaataatttatattccaacgtatggtaattttaaatcagttttggtattaaaaatcatgcattttggaaaatattgataatggaaaaatccaaattctgccaaaatatgttgagaaaatagagggtaaatatatcttttcaaactttaaatgcctcaggctcttagttaatcttccccagatctgggaagacctagaaggggagagattgggctaccttaatgagggccatttcaatctcttggccctgcagcagcaatttcaaaataagtcaaaaaaatatatttgrgggtaaaatattttgatttccttcagcttcttctctctgtgatgctgcaccagaatcagattagaaaggaagccacattataagtgttaataaaacccatctgatgagatttgatagtttgaagggtgtgtttcccagaccctttagatagaaattggggccaaagaaaacaaggtcttattcctctatataaatctgtcagtgctttaagcagtgaaagaaagatttttcatttaattttacagacttgata

SEQ ID NO: 187271 - DNA, 452 bp, Homo sapiens
agacctagaaggggagagattgggctaccttaatgagggccatttcaatctcttggccctgcagcagcaatttcaaaataagtcaaaaaaatatatttgggggtaaaatattttgatttccttcagcttcttctctctgtgatgctgcaccagaatcagattagaaaggaagccayattataagtgttaataaaacccatctgatgagatttgatagtttgaagggtgtgtttcccagaccctttagatagaaattggggccaaagaaaacaaggtcttattcctctatataaatctgtcagtgctttaagcagtgaaagaaagatttttcatttaattttacagacttgatactaatgaaaaggatagcttgtaaaatataaatctctttttctataaaaaggacatgttgttgattctcttagaccttgaaccctggccagggattttaa

SEQ ID NO: 187272 - DNA, 452 bp, Homo sapiens
agacctagaaggggagagattgggctaccttaatgagggccatttcaatctcttggccctgcagcagcaatttcaaaataagtcaaaaaaatatatttgggggtaaaatattttgatttccttcagcttcttctctctgtgatgctgcaccagaatcagattagaaaggaagccacattataagtgttaataaaacccatctgatgagatttgatagtttgaagggtgtgtttcccagaccctttagatagaaattggggccaaagaaaacaaggtcttattcctctatataaatctgtcagtgctttaagcagygaaagaaagatttttcatttaattttacagacttgatactaatgaaaaggatagcttgtaaaatataaatctctttttctataaaaaggacatgttgttgattctcttagaccttgaaccctggccagggattttaa

SEQ ID NO: 187273 - DNA, 452 bp, Homo sapiens
agacctagaaggggagagattgggctaccttaatgagggccatttcaatctcttggccctgcagcagcaatttcaaaataagtcaaaaaaatatatttgggggtaaaatattttgatttccttcagcttcttctctctgtgatgctgcaccagaatcagattagaaaggaagccacattataagtgttaataaaacccatctgatgagatttgatagtttgaagggtgtgtttcccagaccctttagatagaaattggggccaaagaaaacaaggtcttattcctctatataaatctgtcagtgctttaagcagtgaaagaaagatttttcattkaattttacagacttgatactaatgaaaaggatagcttgtaaaatataaatctctttttctataaaaaggacatgttgttgattctcttagaccttgaaccctggccagggattttaa

SEQ ID NO: 187274 - DNA, 492 bp, Homo sapiens
ggtcttattcctctatataaatctgtcagtgctttaagcagtgaaagaaagatttttcatttaattttacagacttgatactaatgaaaaggatagcttgtaaaatataaatctctttttctataaaaaggacatgttgttgattctcttagaccttgaaccctggccagggatttkaaaccaagcagtacctatctccagatctctagtaccaaattaatttggggtggggataacaggtttattgagaaataatgaacacaccatgcaattcactcatttaaagtatacaattcattaactttagtattttcagagagttatgccgtcatcattacaattaattttagaacattttcatcaccctaaaaacaaaccccacaacatttagccatcttcactagttttcccttcctccctcagccctagggaaccacccaccttctttgtatagatttgcctataagcctctgaaataaaaagcaagtggtc

SEQ ID NO: 187275 - DNA, 492 bp, Homo sapiens
ggtcttattcctctatataaatctgtcagtgctttaagcagtgaaagaaagatttttcatttaattttacagacttgatactaatgaaaaggatagcttgtaaaatataaatctctttttctataaaaaggacatgttgttgattctcttagaccttgaaccctggccagggattttaaaccaagcagtacctatctccagatctctagtaccaaattaattyggggtggggataacaggtttattgagaaataatgaacacaccatgcaattcactcatttaaagtatacaattcattaactttagtattttcagagagttatgccgtcatcattacaattaattttagaacattttcatcaccctaaaaacaaaccccacaacatttagccatcttcactagttttcccttcctccctcagccctagggaaccacccaccttctttgtatagatttgcctataagcctctgaaataaaaagcaagtggtc

SEQ ID NO: 187276 - DNA, 409 bp, Homo sapiens
agaacattttcatcaccctaaaaacaaaccccacawcatttagccatcttcactagttttcccttcctccctcagccctagggaaccacccaccttctttgtatagatttgcctataagcctctgaaataaaaagcaagtggtctgctgggactggcttatttcacttagcataatttttcatgctgcatctgtgctgtagcaggtattgatgccgggtttttgctccttagttcagctacatctgggttcttctctcatgaccaggaaaaatcaagcatgcagacacattgaggagggcagaatttatttgtgaaaggacagctctcagcaaagagagggatcctgcaaagaggtttccacctcacaattgaataccaggatcacatgagctgaaatggccaggctcc

SEQ ID NO: 187277 - DNA, 409 bp, Homo sapiens
agaacattttcatcaccctaaaaacaaaccccacaacatttagccatcttcactagytttcccttcctccctcagccctagggaaccacccaccttctttgtatagatttgcctataagcctctgaaataaaaagcaagtggtctgctgggactggcttatttcacttagcataatttttcatgctgcatctgtgctgtagcaggtattgatgccgggtttttgctccttagttcagctacatctgggttcttctctcatgaccaggaaaaatcaagcatgcagacacattgaggagggcagaatttatttgtgaaaggacagctctcagcaaagagagggatcctgcaaagaggtttccacctcacaattgaataccaggatcacatgagctgaaatggccaggctcc

SEQ ID NO: 187278 - DNA, 438 bp, Homo sapiens
tttcagagagttatgccgtcatcattacaattaattttagaacattttcatcaccctaaaaacaaaccccacaacatttagccatcttcactagttttcccttcctccctcagccctagggaaccacccaccttctttgtatagatttgcctataagcctctgaaataaaaagcaagtggtctgctgggactggcttatttcacttagcataatttttcatgctgcatctgtgctgtagcaggtattgatgccgggtttttgctccttagttcagctacatctgkgttcttctctcatgaccaggaaaaatcaagcatgcagacacattgaggagggcagaatttatttgtgaaaggacagctctcagcaaagagagggatcctgcaaagaggtttccacctcacaattgaataccaggatcacatgagctgaaatgg

SEQ ID NO: 187279 - DNA, 409 bp, Homo sapiens
agaacattttcatcaccctaaaaacaaaccccacaacatttagccatcttcactagttttcccttcctccctcagccctagggaaccacccaccttctttgtatagatttgcctataagcctctgaaataaaaagcaagtggtctgctgggactggcttatttcacttagcataatttttcatgctgcatctgtgctgtagcaggtattgatgccgggtttttgctccttagttcagctacatctgggttcttctctcatgaccaggaaaaatyaagcatgcagacacattgaggagggcagaatttatttgtgaaaggacagctctcagcaaagagagggatcctgcaaagaggtttccacctcacaattgaataccaggatcacatgagctgaaatggccaggctcc

SEQ ID NO: 187280 - DNA, 409 bp, Homo sapiens
agaacattttcatcaccctaaaaacaaaccccacaacatttagccatcttcactagttttcccttcctccctcagccctagggaaccacccaccttctttgtatagatttgcctataagcctctgaaataaaaagcaagtggtctgctgggactggcttatttcacttagcataatttttcatgctgcatctgtgctgtagcaggtattgatgccgggtttttgctccttagttcagctacatctgggttcttctctcatgaccaggaaaaatcaagcatgcagacacattgaggagggcagaatttatttgtgaaaggacagctctcagcaaagagagggrtcctgcaaagaggtttccacctcacaattgaataccaggatcacatgagctgaaatggccaggctcc

SEQ ID NO: 187281 - DNA, 515 bp, Homo sapiens
acagctctcagcaaagagagggatcctgcaaagaggtttccacctcacaattgaataccaggatcacatgagctgaaatggccaggctcctcctctgcataaggcttgaattcctggtgactccaccccatcccccccactgcatgtgggcctccggtctgctgcgggcatgtccaggcaagacaagtccaggttcccttatctgcamataacatctggtgtaaacacttgtagggctggttggagattctccggggacccttctgtatctgcctaggcattttgctgtctcctcctaatacggtatctgtacttaatttcttcttattgctgagtaatattccattgtatggatacatcaaacattttatttatccattcgccaggtgatggacatttgggttctctcccacccaaaggtgacagacgttctggttctttccaccttttgactactattaataatgctgctgtaaacatttatgtatgagtttttgtgcttgcctatgttttta

SEQ ID NO: 187282 - DNA, 515 bp, Homo sapiens
acagctctcagcaaagagagggatcctgcaaagaggtttccacctcacaattgaataccaggatcacatgagctgaaatggccaggctcctcctctgcataaggcttgaattcctggtgactccaccccatcccccccactgcatgtgggcctccggtctgctgcgggcatgtccaggcaagacaagtccaggttcccttatctgcaaataacatctggtgtaaacacttgtagggctggttggagattctccggggacccttcygtatctgcctaggcattttgctgtctcctcctaatacggtatctgtacttaatttcttcttattgctgagtaatattccattgtatggatacatcaaacattttatttatccattcgccaggtgatggacatttgggttctctcccacccaaaggtgacagacgttctggttctttccaccttttgactactattaataatgctgctgtaaacatttatgtatgagtttttgtgcttgcctatgttttta

SEQ ID NO: 187283 - DNA, 515 bp, Homo sapiens
acagctctcagcaaagagagggatcctgcaaagaggtttccacctcacaattgaataccaggatcacatgagctgaaatggccaggctcctcctctgcataaggcttgaattcctggtgactccaccccatcccccccactgcatgtgggcctccggtctgctgcgggcatgtccaggcaagacaagtccaggttcccttatctgcaaataacatctggtgtaaacacttgtagggctggttggagattctccggggacccttctktatctgcctaggcattttgctgtctcctcctaatacggtatctgtacttaatttcttcttattgctgagtaatattccattgtatggatacatcaaacattttatttatccattcgccaggtgatggacatttgggttctctcccacccaaaggtgacagacgttctggttctttccaccttttgactactattaataatgctgctgtaaacatttatgtatgagtttttgtgcttgcctatgttttta

SEQ ID NO: 187284 - DNA, 515 bp, Homo sapiens
acagctctcagcaaagagagggatcctgcaaagaggtttccacctcacaattgaataccaggatcacatgagctgaaatggccaggctcctcctctgcataaggcttgaattcctggtgactccaccccatcccccccactgcatgtgggcctccggtctgctgcgggcatgtccaggcaagacaagtccaggttcccttatctgcaaataacatctggtgtaaacacttgtagggctggttggagattctccggggacccttctgtatctgcctaggcattttgctgtctcctcctaatacggkatctgtacttaatttcttcttattgctgagtaatattccattgtatggatacatcaaacattttatttatccattcgccaggtgatggacatttgggttctctcccacccaaaggtgacagacgttctggttctttccaccttttgactactattaataatgctgctgtaaacatttatgtatgagtttttgtgcttgcctatgttttta

SEQ ID NO: 187285 - DNA, 404 bp, Homo sapiens
taagtcccttatcagatacacgcttttcaaatactttcttctacttggygtcttaccttttcacttcttcatactgtcttctgaggcacagcagttttcaattttgaagtccattgaatccatttttcctttggagtcatagctaagaaaacactggcaaatgcagtcacaaagatttatgccagtgttttcttctgagggatttatagttttagcttttacagttaactattttattttgagttaattattaaataagatatttggtcgaactttatttattttttgcttatggatacccagttgtcccagcaccatttgttgaaaagactattcttttcccattttgctcttttgttaagcttgtataaaatcaattgactgtaaaagtgcaggcttatttt

SEQ ID NO: 187286 - DNA, 502 bp, Homo sapiens
tttcacttcttcatactgtcttctgaggcacagcagttttcaattttgaagtccattgaatccatttttcctttggagtcatagctaagaaaacactggcaaatgcagtcacaaagatttatgccagtgttttcttctgagggwtttatagttttagcttttacagttaactattttattttgagttaattattaaataagatatttggtcgaactttatttattttttgcttatggatacccagttgtcccagcaccatttgttgaaaagactattcttttcccattttgctcttttgttaagcttgtataaaatcaattgactgtaaaagtgcaggcttatttttagattgtcaattcttagcttgtttatgtctattcttatgtcaaggcccaatcgaattgaatgagaagtttttttcaatcatgttgcatattaccagttgtcttatgtcataataaaaattaaatttagtagaatgtctgtaacttcacctttttt

SEQ ID NO: 187287 - DNA, 502 bp, Homo sapiens
tttcacttcttcatactgtcttctgaggcacagcagttttcaattttgaagtccattgaatccatttttcctttggagtcatagctaagaaaacactggcaaatgcagtcacaaagatttatgccagtgttttcttctgagggatttatagttttagcttttacagttaactrttttattttgagttaattattaaataagatatttggtcgaactttatttattttttgcttatggatacccagttgtcccagcaccatttgttgaaaagactattcttttcccattttgctcttttgttaagcttgtataaaatcaattgactgtaaaagtgcaggcttatttttagattgtcaattcttagcttgtttatgtctattcttatgtcaaggcccaatcgaattgaatgagaagtttttttcaatcatgttgcatattaccagttgtcttatgtcataataaaaattaaatttagtagaatgtctgtaacttcacctttttt

SEQ ID NO: 187288 - DNA, 502 bp, Homo sapiens
tttcacttcttcatactgtcttctgaggcacagcagttttcaattttgaagtccattgaatccatttttcctttggagtcatagctaagaaaacactggcaaatgcagtcacaaagatttatgccagtgttttcttctgagggatttatagttttagcttttacagttaactattttattttgagttaattattaaatawgatatttggtcgaactttatttattttttgcttatggatacccagttgtcccagcaccatttgttgaaaagactattcttttcccattttgctcttttgttaagcttgtataaaatcaattgactgtaaaagtgcaggcttatttttagattgtcaattcttagcttgtttatgtctattcttatgtcaaggcccaatcgaattgaatgagaagtttttttcaatcatgttgcatattaccagttgtcttatgtcataataaaaattaaatttagtagaatgtctgtaacttcacctttttt

SEQ ID NO: 187289 - DNA, 502 bp, Homo sapiens
tttcacttcttcatactgtcttctgaggcacagcagttttcaattttgaagtccattgaatccatttttcctttggagtcatagctaagaaaacactggcaaatgcagtcacaaagatttatgccagtgttttcttctgagggatttatagttttagcttttacagttaactattttattttgagttaattattaaataagatatttggtcgaactttatttattttttgcttatggatacccagttgtcccagcaccatttgttgaaaagactattcttttcccattttgytcttttgttaagcttgtataaaatcaattgactgtaaaagtgcaggcttatttttagattgtcaattcttagcttgtttatgtctattcttatgtcaaggcccaatcgaattgaatgagaagtttttttcaatcatgttgcatattaccagttgtcttatgtcataataaaaattaaatttagtagaatgtctgtaacttcacctttttt

SEQ ID NO: 187290 - DNA, 456 bp, Homo sapiens
tgagccaccagctttcctcagtggaaatcaagtgaagtcatcatcttgcagtttacagaccctctttcctcctggtagctggttctcttgggtagcactgtggctaatccttttcttagtgcagatcttgcattctcagaaaccacagttccctgtattgacctccttttactgaaacagagatgcacagctctgctttctatctcagtagaggattcttggaataaaacgtttaactcattccaagaaagtcttaggagtgcagcacttcaaaatcaggtaacgttcaggcaatttatcagagacacatagtaaattagtattttgactttcaaaatttcagagccaagttgtgtgctatagagaagcattgtggcataacatagagatgggatgrtcttaacttctccatacaaacaagcttggagtaaggtaaaggagaaattgcatttgtgt

SEQ ID NO: 187291 - DNA, 512 bp, Homo sapiens
tgaaaattgaatactaggttgattaataaatactcaaaacttcttcttttagaattttagttaattgaaatcaggtaaatgtctgattttgcctatgtcacccagtatttctagttgtttttcaaatcatacatcttcttgcttcccagtcttacttcctaacttgaggggaaattgtaagaagacacccttgccttgttwtcagagttcataattgaaggagttttaggaaaattcctcctcagcagcttatgtctctctcctggttatctactgcttctcaataatgtttgacatcgataaataaatatcaacatttattagatcctgctttaaaggagactcttttctgctgcataagttatgtttcctgttgtctctttttaaaacttattttcctaacaattacccagagtcttgtggcttgaaagaaaaacatttattttgttcatgaacctgtggtttgggaaaaacttggccaggacagcttgtctctgctcccttcagcttcc

SEQ ID NO: 187292 - DNA, 512 bp, Homo sapiens
tgaaaattgaatactaggttgattaataaatactcaaaacttcttcttttagaattttagttaattgaaatcaggtaaatgtctgattttgcctatgtcacccagtatttctagttgtttttcaaatcatacatcttcttgcttcccagtcttacttcctaacttgaggggaaattgtaagaagacacccttgccttgttttcagagttcataattgaagkagttttaggaaaattcctcctcagcagcttatgtctctctcctggttatctactgcttctcaataatgtttgacatcgataaataaatatcaacatttattagatcctgctttaaaggagactcttttctgctgcataagttatgtttcctgttgtctctttttaaaacttattttcctaacaattacccagagtcttgtggcttgaaagaaaaacatttattttgttcatgaacctgtggtttgggaaaaacttggccaggacagcttgtctctgctcccttcagcttcc

SEQ ID NO: 187293 - DNA, 512 bp, Homo sapiens
tgaaaattgaatactaggttgattaataaatactcaaaacttcttcttttagaattttagttaattgaaatcaggtaaatgtctgattttgcctatgtcacccagtatttctagttgtttttcaaatcatacatcttcttgcttcccagtcttacttcctaacttgaggggaaattgtaagaagacacccttgccttgttttcagagttcataattgaaggwgttttaggaaaattcctcctcagcagcttatgtctctctcctggttatctactgcttctcaataatgtttgacatcgataaataaatatcaacatttattagatcctgctttaaaggagactcttttctgctgcataagttatgtttcctgttgtctctttttaaaacttattttcctaacaattacccagagtcttgtggcttgaaagaaaaacatttattttgttcatgaacctgtggtttgggaaaaacttggccaggacagcttgtctctgctcccttcagcttcc

SEQ ID NO: 187294 - DNA, 512 bp, Homo sapiens
tgaaaattgaatactaggttgattaataaatactcaaaacttcttcttttagaattttagttaattgaaatcaggtaaatgtctgattttgcctatgtcacccagtatttctagttgtttttcaaatcatacatcttcttgcttcccagtcttacttcctaacttgaggggaaattgtaagaagacacccttgccttgttttcagagttcataattgaaggagttttaggaaaattcctcctcagcagcttatgtctctctcctggttatctactgcttctcaataatgtttgacatcgataaataaatatcaacmtttattagatcctgctttaaaggagactcttttctgctgcataagttatgtttcctgttgtctctttttaaaacttattttcctaacaattacccagagtcttgtggcttgaaagaaaaacatttattttgttcatgaacctgtggtttgggaaaaacttggccaggacagcttgtctctgctcccttcagcttcc

SEQ ID NO: 187295 - DNA, 607 bp, Homo sapiens
ttttccctatatttacttagagtagtttgataattttgggccttacatttcagtcttcaatcgattctgagtttatgttgttatatggtgttacataggaagctaatatcattcttctccatatggatatttagttttcccagtgtcattcatttgaagaggctgtcctttccccagcgtatgttcttggcatgttcgtccaaaatcagttggctggaaatatgtggatttatttctgggtgccgtattctatggtctttaccccaagaawcattacttcttaaaatgcaattcaaattagcatgaaacatttgcagtttaaggaaaggcttatagcatcagaatccttaatcatagatttcattattttgtgtttttttttttgagatagggtctttgtctgtcatccaggcagaagtgcagtgataataattcactgcagccctgaactctgggtacaagccatccttttgcctcagtatcccaactagctgggtctacaggcatgagccaccatgcccgggtaattaaaaaacatttttttttttgtagagatgggggtctcactatgttgctctggctgatctcaaattcctggcctcaagtg

SEQ ID NO: 187296 - DNA, 607 bp, Homo sapiens
ttttccctatatttacttagagtagtttgataattttgggccttacatttcagtcttcaatcgattctgagtttatgttgttatatggtgttacataggaagctaatatcattcttctccatatggatatttagttttcccagtgtcattcatttgaagaggctgtcctttccccagcgtatgttcttggcatgttcgtccaaaatcagttggctggaaatatgtggatttatttctgggtgccgtattctatggtctttaccccaagaatcattacttcttaaaatgcaattcaaattagcatgaaacatttgcagtttaaggaaaggcttatagcatcagaatccttaatcatagatttcattattttgtgtttttttttttgagataggktctttgtctgtcatccaggcagaagtgcagtgataataattcactgcagccctgaactctgggtacaagccatccttttgcctcagtatcccaactagctgggtctacaggcatgagccaccatgcccgggtaattaaaaaacatttttttttttgtagagatgggggtctcactatgttgctctggctgatctcaaattcctggcctcaagtg

SEQ ID NO: 187297 - DNA, 385 bp, Homo sapiens
ccctgaactctgggtacaagccatccttttgcctcagtatcccaactagctggktctacaggcatgagccaccatgcccgggtaattaaaaaacatttttttttttgtagagatgggggtctcactatgttgctctggctgatctcaaattcctggcctcaagtgatctttctgccacagctttttaaagtgctaggattacaggaatgagccaccatgcctaatatagagtgtaatatcattttcaaagtcttattcctagacccatttattgactttggcctaaataactcaatatgatatctctgaaactttttttgacatactgtggggaatgataatgaaggaagggggttagacactttttactaggagataactttgt

SEQ ID NO: 187298 - DNA, 385 bp, Homo sapiens
ccctgaactctgggtacaagccatccttttgcctcagtatcccaactagctgggtctacaggcatgagccaccatgcccgggtaattaaaaaacatttttttttttgtagagatgggggtctcactatgttgctctggctgatctcaaattcctggcctcaagtgatctttctgccacagctttttaaagtgctaggattacaggaatgagccaccatgcctaatatagagtgtaatatyattttcaaagtcttattcctagacccatttattgactttggcctaaataactcaatatgatatctctgaaactttttttgacatactgtggggaatgataatgaaggaagggggttagacactttttactaggagataactttgt

SEQ ID NO: 187299 - DNA, 445 bp, Homo sapiens
gtaatatcattttcaaagtcttattcctagacccatttattgactttggcctaaataactcaatatgatatctctgaaactttttttgacataytgtggggaatgataatgaaggaagggggttagacactttttactaggagataactttgtgccatttaaggaggaacaaaaatgaattatcagaaaaataaaagtaaaatgaagtacaaaaattctgtggcaaagatgatgatagtaaagaatatatttttatgactcatggtagctttaactttgttcttaaaattctgagtaatttaagggttcacatttgaagaatctgctgcactacagataacattttattgcaagtaaatgcatttcaaaatttgctattggttttctattagattattctcagcctacttcattatcaagctatactattttattcatgcaattt

SEQ ID NO: 187300 - DNA, 445 bp, Homo sapiens
gtaatatcattttcaaagtcttattcctagacccatttattgactttggcctaaataactcaatatgatatctctgaaactttttttgacatactgtggggaatrataatgaaggaagggggttagacactttttactaggagataactttgtgccatttaaggaggaacaaaaatgaattatcagaaaaataaaagtaaaatgaagtacaaaaattctgtggcaaagatgatgatagtaaagaatatatttttatgactcatggtagctttaactttgttcttaaaattctgagtaatttaagggttcacatttgaagaatctgctgcactacagataacattttattgcaagtaaatgcatttcaaaatttgctattggttttctattagattattctcagcctacttcattatcaagctatactattttattcatgcaattt

SEQ ID NO: 187301 - DNA, 161 bp, Homo sapiens
gattcaaaaatatacataattaattaccttcaaggaaggatgttttgcaggaggccctacaaagcaaaggggatatgtcatcaattatatgtaagtatgacagggccaamcaaacattcatgcagtgttactgtcgagctgaattctcaggcctggctata

SEQ ID NO: 187302 - DNA, 538 bp, Homo sapiens
tttgaatcaactagccatgtgtatgtttttctctgaccagctttccattaccaccataaaacaatgataggtaaaccactgctaaatttgaaaagtaaatactatgcaaaactacacycagagtgagaagattaattttacaagagaccactttaccttagtagcaacactcaagtcttcatcatccaatgtaggcaatgaatccacacacagttcatgcaaaatgcttgagagcaaaaatacacaatgaaaatgagcaagttgatttctttacaatttttttaactgccagtttatatccagcttccccctcaaaaaaaggaaaacataatctggggaaaggtcagtgatctatatattaaattatgattcttgatataattaaaatatatcctctgttctaaaaatagattttagttacctatttctgcctccacctgtctaaatctataaaatattcaatgaaaactaaccttgaggtttataacaaatagtgacagtcaatatattggcagagcctgacaataatgtgccctca

SEQ ID NO: 187303 - DNA, 538 bp, Homo sapiens
tttgaatcaactagccatgtgtatgtttttctctgaccagctttccattaccaccataaaacaatgataggtaaaccactgctaaatttgaaaagtaaatactatgcaaaactacactcagagtgagaagattaattttacaagagaccactttaccttagtagcaacactcaagtcttcatcatccaatgtaggcaatgaatccacacacagttcatgcaaaatgcttgagagcaaaaatacacaatgaaaatgagcaagttgatttctttacaatttttttaactgccagtttatatccagcttccccctcaaaaaaaggaaaacataatctggggaaargtcagtgatctatatattaaattatgattcttgatataattaaaatatatcctctgttctaaaaatagattttagttacctatttctgcctccacctgtctaaatctataaaatattcaatgaaaactaaccttgaggtttataacaaatagtgacagtcaatatattggcagagcctgacaataatgtgccctca

SEQ ID NO: 187304 - DNA, 538 bp, Homo sapiens
tttgaatcaactagccatgtgtatgtttttctctgaccagctttccattaccaccataaaacaatgataggtaaaccactgctaaatttgaaaagtaaatactatgcaaaactacactcagagtgagaagattaattttacaagagaccactttaccttagtagcaacactcaagtcttcatcatccaatgtaggcaatgaatccacacacagttcatgcaaaatgcttgagagcaaaaatacacaatgaaaatgagcaagttgatttctttacaatttttttaactgccagtttatatccagcttccccctcaaaaaaaggaaaacataatctggggaaaggtcagtgatctatatattaaattaygattcttgatataattaaaatatatcctctgttctaaaaatagattttagttacctatttctgcctccacctgtctaaatctataaaatattcaatgaaaactaaccttgaggtttataacaaatagtgacagtcaatatattggcagagcctgacaataatgtgccctca

SEQ ID NO: 187305 - DNA, 538 bp, Homo sapiens
tttgaatcaactagccatgtgtatgtttttctctgaccagctttccattaccaccataaaacaatgataggtaaaccactgctaaatttgaaaagtaaatactatgcaaaactacactcagagtgagaagattaattttacaagagaccactttaccttagtagcaacactcaagtcttcatcatccaatgtaggcaatgaatccacacacagttcatgcaaaatgcttgagagcaaaaatacacaatgaaaatgagcaagttgatttctttacaatttttttaactgccagtttatatccagcttccccctcaaaaaaaggaaaacataatctggggaaaggtcagtgatctatatattaaattatgattcttgatataattaaaatatrtcctctgttctaaaaatagattttagttacctatttctgcctccacctgtctaaatctataaaatattcaatgaaaactaaccttgaggtttataacaaatagtgacagtcaatatattggcagagcctgacaataatgtgccctca

SEQ ID NO: 187306 - DNA, 333 bp, Homo sapiens
agaagagaataagaaaataatcatctggtaaccatcatagtaataattgttcaaacacaagtcatccatgaaatgctaaatctagtgggttctgaggagtaaccagatatttacagagcctcaaagtatctccatacaaaatacrgttgaactacaaaaagaaaattgtaacattagcatggacaaacctggcaggtactccttaactctcctaagtaataaaaactgtaaaatgcaaataagccttcgatgacctttactaacctttactaaagtatcagtgatgacttggttgtttaaacagctgacatttgggcaatttgagtatgtcaa

SEQ ID NO: 187307 - DNA, 333 bp, Homo sapiens
agaagagaataagaaaataatcatctggtaaccatcatagtaataattgttcaaacacaagtcatccatgaaatgctaaatctagtgggttctgaggagtaaccagatatttacagagcctcaaagtatctccatacaaaatacggttgaactacaaaaagaaaattgtaacattarcatggacaaacctggcaggtactccttaactctcctaagtaataaaaactgtaaaatgcaaataagccttcgatgacctttactaacctttactaaagtatcagtgatgacttggttgtttaaacagctgacatttgggcaatttgagtatgtcaa

SEQ ID NO: 187308 - DNA, 529 bp, Homo sapiens
ctcattggagcagattaagtccttgaaccttgagtacaatcatcttaggccttagtttttcacaacaggcaatcagagaaagtgttgtcagttctctcttcaatttatcgaaaggcctttccactctgcaagagtttagagatgtagctagatccttacctctttctaggactacaaaatggcatyccattgcggttaatcttttaagattcctttatcacagtttaatcattctcttaaaagggctgtgcctttctcacacgaggttctgtctcattattaatggaaagaaactatattttccttttctgtggtagaagaggaattgatcttaaaggaagcaagaaacagagttaaaactgaggaggctccttagaatgttgctattaattacattggatgttaaccccagcaaagtatttagaattacactagtgatttttcttcatcccaaacttgacaaatgaattgatagatgtgtcacaaagaatttccttcctggttaacagatggcatgttccaattagat

SEQ ID NO: 187309 - DNA, 574 bp, Homo sapiens
ctatgggtaataagttatctaaatcaatttatgcaaactgtattttttccaackcaagttaaggaagtgtggcaagtcagtctagtggttactgtgatgcttggctattacttgactgcttgacttttttttgagatggagttttgctctgtcacccaggctggagtgcagtggcaccatctcagctcactgcaacctccacctcctgggttcaagtgatttttctgcctcagcctcctgagtagctgggattacaggtgcacaccaccacgcctggctattttttttttttttttttgtatttttagtagagacaggatttcacgatgttggtcaggctggtgtcaaactcctgaccttctgatctgcctgccttggtctcccaaagtgctgggattacaggtgtgagccaccacgccagcctgactgcttggtttaacatgaattaggtgatttctcaggagctttttgagtatggtcagtgtgaggcatttcctccaaagattggggatgaacaccaatttctgattttagaatttttgttccaaattatctttgtcataatacatctaag

SEQ ID NO: 187310 - DNA, 574 bp, Homo sapiens
ctatgggtaataagttatctaaatcaatttatgcaaactgtattttttccaacgcaagttaaggaagtgtggcaagtcagtctagtggttactgtgatgcttggctattacttgactgcttgacttttttttgagatggagttttgctctgtcacccaggctggagtgcagtggcaccatctcagctcactgcaacctccacctcctgggttcaagtgatttttctgcctcagcctcctgagtagctgggattacaggtgcacaccaccacgcctggctattttttttttttttttttgtatttttagtagagacaggatttcacgatgttggtcaggctggtgtcaaactcctgaccttctgatctgcctgccttggtctcccaaagtgctgggattacaggtgtgagccaccacgccrgcctgactgcttggtttaacatgaattaggtgatttctcaggagctttttgagtatggtcagtgtgaggcatttcctccaaagattggggatgaacaccaatttctgattttagaatttttgttccaaattatctttgtcataatacatctaag

SEQ ID NO: 187311 - DNA, 574 bp, Homo sapiens
aattatctccacctggccccacccttgacatgtggggattactataattcaaggtgagatttgagtggggacacagccaaaccatatcagggggaaacaaacttattgactttcttattgacataggtgctatgtattctgtagttaatgcctgcctatacccttatttgataaagactataatagatacaggaatgccagggaaaactgtgacttacttctttccacaatctttagattgtcattttggagaacacaattgatgaaaaaaactggtaagtcatgtcctaaaaaaaaggtattgtccaaatacgtcaagaaactaatctgacttgggataagrtgtttccagttgctctgttgtgtattagaacagctctccaaaataggctcaaattgagtctctttgaaatattatatggtaggtcattccaggattctaccctggtgggaaaaccaactgaggtgttaagaaagttaacaattgccaaatatgttaagacacagggcactatactaacttctgttcgtgtttgcttcttgcaagaccactcatcccatagatgtggcctta

SEQ ID NO: 187312 - DNA, 498 bp, Homo sapiens
agacacatcattagctttcctttcttaattaaagtattgactttgccaatctttacctttatccatctgatatggtttggctctgtattcccacccaaatctcatggtgaattttaattcccagtgttgggggaaggcctgctgggaggtgattgaatcatgggggtggatttcccccttgctgttcttatgacagtgagtgaattatcaggagatctgatggtttaaaagtgtatagcacttcctccttcactctctgtctctcctgctctgccatagtaagatacgctttcttccactttgccttctgccctgattgtaagtttcctgaggcctctcagccatgcttcctgtatagccwgtggaactttgagtcaattttacctcctttcttcacatattgcccagtatcaggtaattctttataacagtgtgagaatggactaacacatcctcctttcatatctaaggatgtatttcttcagtcaaagaccactt

SEQ ID NO: 187313 - DNA, 547 bp, Homo sapiens
atataaaatatataattataatataattaatttgtatttaatcataggttataagtagacttaattaattataacaacatattttgaagtatatgataagaaatatacattatactaataatagtataaaccactggcatgacctaaagtgctgaaggaaaaaaaatgatctaagaacagtgtatctggtgaaaatattcctcaaacatgaaggagaaataaacgctttctcagatcaaataaaagctaagggattttattaataccagacctgtgtaacaagaaatgctaaagggagtccttcaatctgaaagaaaaggacattaatgagcaataagaaatcatctaaaggtaaaaaactcattggtacagtgtactgtaaatgtggcatataaactacccatatcttaattagaaaaactaaaagatgaaattataaaaaataatagttacaataacttttcaagrtatagacagtacagacagatataaacagaagaaacaagaaatttaaaaagcagggggccaaagttaaggtatagggttt

SEQ ID NO: 187314 - DNA, 561 bp, Homo sapiens
acaccaaggtctcaaatatttaaatgacttattcaaagttaaacaacagcgagataatccattttagctttgaaacaaaatcattttattccaaatttaatatagctgcctcttgacgttgtatttatgaacattgaaacaaaatgttagctcattctagtttgtactgtaaaatgttgaatgtgagaaatgcaaatacctttgtaaaaatgcaactaatatcttaattttgagtcttcctatcttcttaagatagaaaatttttcttaaaatgtatatgttcagagttcagagatatgttctaattttcttcattttgtagtcagggcataatttgttagcactactttcacattttagtgtrctttttttcagagtgatcaaaaactttctttccaaagcaccaacaatgaacaaattttttctagaagaaagctagtttagaaatgcagaggaaaatggattaatgattcaaaaagaagtctttgaaaacaaattttttacctacctactcaagctccccttgctgagaataaattttttgaataaatagcatgtcat

SEQ ID NO: 187315 - DNA, 561 bp, Homo sapiens
acaccaaggtctcaaatatttaaatgacttattcaaagttaaacaacagcgagataatccattttagctttgaaacaaaatcattttattccaaatttaatatagctgcctcttgacgttgtatttatgaacattgaaacaaaatgttagctcattctagtttgtactgtaaaatgttgaatgtgagaaatgcaaatacctttgtaaaaatgcaactaatatcttaattttgagtcttcctatcttcttaagatagaaaatttttcttaaaatgtatatgttcagagttcagagatatgttctaattttcttcattttgtagtcagggcataatttgttagcactactttcacattttagtgtgctttttttcagagtgatcaaaaacttyctttccaaagcaccaacaatgaacaaattttttctagaagaaagctagtttagaaatgcagaggaaaatggattaatgattcaaaaagaagtctttgaaaacaaattttttacctacctactcaagctccccttgctgagaataaattttttgaataaatagcatgtcat

SEQ ID NO: 187316 - DNA, 160 bp, Homo sapiens
ttttaatattgaattctgaacttcagaatatttgctggtaatgtactgagtgattaaggattataaaatttgctattartaagctaatacttttcacattattatcatgtcctgatggctttaattccatgttctacaaagaagattgcctgccatgcaa

SEQ ID NO: 187317 - DNA, 511 bp, Homo sapiens
ttgaagtaatcagaattttctttttttcttagtctttcttgtattaagggactatattttgttaactttaaatataaatgctctcattttgtttgaaaatgaaaattaaagaaatcactagtgccacctattggtggraatccatattgtgagctgtgttaattcatcctcagatgtgccctgtgggacgctagaagatgtaaagtggagacacaaatcgaagtgaagtgaagtatatagctgagtatcatgcatcacaaggagtaaggggtgtacatgataagcatcctcattttatcctaagttgtgatattgcagtgtagataatccttgttttacagaagaagaaactgaggcttaaagggattaaatgctactttattcaatatattatgtaatcgttagaaaagttgtgattttaaatacaactctattctttttactgaatcagaacacttacgcaaaaatttcaatgtacattaactacacatctgatgagggatatgaattc

SEQ ID NO: 187318 - DNA, 530 bp, Homo sapiens
gcaggtggattattacttacattaggttgctcaggttaagttgatgcaggaaggtgaggagcaggaattatggcaggaaaaggcctttaggaggcaaagtggcctccatatttggattcaatcataatttttctgttactaaaactgcctaaagtagaagggatgtgcatccttaactctttgctagtataattaaaaaagaattatttcatgtagatggtgcaaattcactatttctttttaagaaatacatgcatarggaaaaacatgcataaggatttcttggaaaagcatgcataaggatctgtacataccaaaaccaagtataaggagattctgaaatatgaactctctgataaaacctatgctaataaaattaatgtctaaaatctgtgagactattgtgaaagtgtacagaactgttatcttaagatgcacccctccagaaagtgtggcacctatgaaatgacagtcattgaaagcctagctttgcgtatagaaaccaagaaaagcagtcatagctaagacca

SEQ ID NO: 187319 - DNA, 416 bp, Homo sapiens
tgaattcattcttacattatatattttttctaacaataatacaataataatacagttcttctatatacctggaagcaaaaatrcacttcttctgtaacaataatacatttcttctgtatacctagaaacagccaagatatctggtgtaatacaaatataaatgattgaatccctgacaagtgttcaagtacttcattcaagtaaagacagactttcttaaacctaactagaatgcaattcttagtcttttattattagtatatattacttcctgatttcacagtgttggtttcatttgtttggcctgaatttgtcatttttaccaagtattattaataaatatttcatgagaatggccaggttgggcttgggagatttatactccatttccagtttcaactatagtcttttctagc

SEQ ID NO: 187320 - DNA, 544 bp, Homo sapiens
gcattatatgagatgaacaagtagattttcttttattatttattgaaacagtaaactttgctacatactatttatgagcaccttaagagcattatcttatttaattttcagaacaggtatttgaaaaaagtgtttccactcttctyattttacaaagagaaaaagtttcaaagaggtcatataactttccatggttgcataactgctagatggcagaactgggagttataatcagatcagtgtgatgtctgaaaatgctcttaatgattagataatttttttgtgaattctgatgtataccctaacctcaattcattttttctatacttagatttgcatcaaagacctaaacacaagtccaggaattattatttaacatcatttttttggagatcaattacacattctgtggtttcaacactgtgcacatttctatcaaactttcacctaacggattcatcaagctattttgcaaaggtgcaaaaaaattatttggattgaagaactgacgctaactattctagactcataaacaattagaaat

SEQ ID NO: 187321 - DNA, 524 bp, Homo sapiens
ttaatgggtgcagcacagcagcatggcacatgtatacatatgtaactaacctgcacattgtgcacatgtaccctaaaacttaaagtataataataataataataataataataataaaaatatatcaatgggataacattttcactctaaagatctggaaaaaaaatatgacagtatcatgaattatcaaaaacatgaggcagtcataataagaaataagttttcctacttatttagaatatacattttcatactctttcagcagaaatttaatagactccagaaagttgcagatttgatacaatccagaaagtttctagcgaacaaaattccatttttatggttgaaatatcttgtagtaatataaataattawatccaggacaacttggaaaggaacaaggtttacaatatgaataaaattctacctctcttaattatatagtatagagtgatacatattgctcaaagcaatctacagattcaatgcaatccctatcaaagtgccaacatcattcttcacag

SEQ ID NO: 187322 - DNA, 468 bp, Homo sapiens
acccgaaaacataaaaattatagaagaaaacctaggaaaaactcttctcaatattgctgaggcaaagcattttgactaataccccaaaaacaaatgcaacaaaaacaaaaataaataaatgagacctaattaaactaaaagcttctgcacagcaaaagaaacaatcatcaaagtgaacagaaaacccacagaatgggagaaaatatttacaaactatgaatccaacaaaggactaatattcagaatctatraggaacccacaatctataatagaccctaaatggtataacgaacattggagactcagaaaggaggagagtgggagatgaggggaggaataaaaaaatacacattgtgcaaaaggcatattactcaggtgacatcagcaagaaaacataatcccaccaaatagtgggcaaatgatatgaatagacacttttcaaaataagatatacaattggccaacaa

SEQ ID NO: 187323 - DNA, 623 bp, Homo sapiens
aatagtcaactgccaggtacagaaaccaacagtaagcccaaaacataacatcattcctcaagaagcaactggtcaattgttaactagacaacaattttaaactcttcctgtcctataaagttcagtagtttagatacttctcttgggcatgattttgcctttcctgccgaaagagcctaagtcagtgtctgtaagagcttcttaaaatgtttacttcatggcaccacataatacaacatttcaccaggggccccactacacagagaagaagatacaggaatagacccttaatcatatgatctaccgattgtattatataacacaccatctggaagctgctagcctagtaaagtgctraacaccttagtagaggcacaggtaaagcacctccttagaggcaatattctgaaaggatgagatgctttcagaatatagtagatacattaaactcaagatgtgtatattatgccatatatcagtagaaagaatccaagtaccaattagcaagaagagtgctggcctcacttaacaagattctcaatgatcaactgggaaactgtgttatttgaccctgaaactcagatctcctcaaagggaacacagaaacattgccattgatgtac

SEQ ID NO: 187324 - DNA, 623 bp, Homo sapiens
aatagtcaactgccaggtacagaaaccaacagtaagcccaaaacataacatcattcctcaagaagcaactggtcaattgttaactagacaacaattttaaactcttcctgtcctataaagttcagtagtttagatacttctcttgggcatgattttgcctttcctgccgaaagagcctaagtcagtgtctgtaagagcttcttaaaatgtttacttcatggcaccacataatacaacatttcaccaggggccccactacacagagaagaagatacaggaatagacccttaatcatatgatctaccgattgtattatataacacaccatctggaagctgctagcctagtaaagtgctaaacaccttagtagaggcacaggtaaagcacctccttagaggcaatattctgaaaggatgagatgctttcagaatatagtagatamattaaactcaagatgtgtatattatgccatatatcagtagaaagaatccaagtaccaattagcaagaagagtgctggcctcacttaacaagattctcaatgatcaactgggaaactgtgttatttgaccctgaaactcagatctcctcaaagggaacacagaaacattgccattgatgtac

SEQ ID NO: 187325 - DNA, 369 bp, Homo sapiens
agagaactggctgcagggagcatagttaacagcccagtggccactcttatgaaatcaccataatgttcacaaccagaccacatattccccaggctgttgttagccaatgactgagcatggcaaggtatcaatgctggctcatttctgtaggacatggagctcctttactgagaaattttgacttggggactccccactattctgatcaaaactctcttaaaactgtgcagtaatctggattyttcttgcccaattcttccttaaactgttgtcagacctgcaatgtagcatgaagacttccccctactttcaatctcttcagtggattcttaacagggttgcccctaggaaatctcttgtacttttaat

SEQ ID NO: 187326 - DNA, 592 bp, Homo sapiens
taggcagctagtgtgaaccacggagaggaaggaagaacagtgtagtgctgtggcttacctgagagctacacagggcaggggagcccccacccccagccaagagaggcagtgagtgagcatgctactcagcctggaaaaccatgcttttttcatggaactgtgcaacccatggattggaagctcccactcatgagcccacaccactggggccttgagtcctaaccacagagccgcacagattttcgcttgggtagaattggcctaagcctgcygagttcccaggggaagggatgagagccaacattggaactgcagggcctccctgaaggaaccccaactccagccaggagctcagggacagaactcagatttccctgggcctgagcccttgggagaaggaaggccatagtctccatggaccagcagacttagtctttcctcctgctagctctgaggaatctggggagcccaaaagagtggattttccccacagcacagcacaccccctccaccaatgaacagccaaagtgctttattgaatgggtcctgcttcccatgccacccaactgtgtgagatccccccaacaggggt

SEQ ID NO: 187327 - DNA, 415 bp, Homo sapiens
ctggcaaggctgcagagaaaaatggacacttatatgctgttggttgaaatgtaaattagttcagccactgtggaaataagtttggagatttctcaaataacttcaaacagaactaccatttaacacagcactccctttactaggtatatagaaaaargaaaacaaatcattctaccaaacagacacgtgcactcacattttcattgcagcactattcataatagcaagaaaatggaatcaagcttggtgcccatcaatgatggattggataaagaaaatgtggcactgacaacactgaatactaagcagccataaaaataatgaaatcatgtcttttgcagcaacttaaatgtggttggacaccatcatccaaacgaaataacacaggaaaagaaaaccaaatacctaattattt

SEQ ID NO: 187328 - DNA, 583 bp, Homo sapiens
ttgctttttctcagctaatagagaatcatagggtcacagagtcaaacaagggattgttggaggattgggggaagagagagagaatagagtatacgaccatagaaaaactgagaaaaacgtgtttttttaaagtcacatggaacattacccaagatatggctacaaagcaagtctaaattacttttaagtgattaaaattatagtgagtatgctctctgacaatgaattggattaaaaacaaataaaaataaaacaattatatccctagatatttgtaaataagcaacatacttttaacatttttatatttkaaatgctgggatacatgtgcagaacatacaggtttgttacttatgtgtacatttgccatggtggtttgctacacccatcaacccatcaaaaaaagtttaaaaccccacatgcattaggtacttttcctaatgctatccctcacctttccccccactccctgacaggccccagtgtgtgatgttcccctccctgtgtccatgtgttctcattgttcaactcttacttatgagtaaaaatatgtagtgtttggttttctgttcctatgttattt

SEQ ID NO: 187329 - DNA, 460 bp, Homo sapiens
gaattcttaataagggataaccttataactaaaaggaaagagamctcaaaatggatgagtgtgggaggagtgaaagaatatacagttgtattaagtaccagtcatatctctagcactttaaaaatattatagaattgttatcacaataaccctgtgatgtgaggtaatgtaaaaaaagttttatataagtgtctttactagtaacgtttagagaggttacataacttcctcattttatattcatttattgagtacatgttagtcactgtcttaatttttctaacttatttatttctcactacaacattcaaagttagatgttatttttatccccatttaacagttggccaaactgaggcacagaaacatttcaaacatgctcaaggtcacaagtagaggagccaggattcaaacgcaggcactctgactttatactttgtgcttttaaccaatacgtcaa

SEQ ID NO: 187330 - DNA, 460 bp, Homo sapiens
gaattcttaataagggataaccttataactaaaaggaaagagacctcaaaatggatgagtgtgggaggagtgaaagaatatacagttgtattaagtaccagtcatatctctagcactttaaaaatattatagaattgttatcacaataaccctgtgatgtgaggtaatgtaaaaaaagttttatataagtgtctttactagtaaygtttagagaggttacataacttcctcattttatattcatttattgagtacatgttagtcactgtcttaatttttctaacttatttatttctcactacaacattcaaagttagatgttatttttatccccatttaacagttggccaaactgaggcacagaaacatttcaaacatgctcaaggtcacaagtagaggagccaggattcaaacgcaggcactctgactttatactttgtgcttttaaccaatacgtcaa

SEQ ID NO: 187331 - DNA, 463 bp, Homo sapiens
taaccttataactaaaaggaaagagacctcaaaatggatgagtgtgggaggagtgaaagaatatacagttgtattaagtaccagtcatatctctagcactttaaaaatattatagaattgttatcacaataaccctgtgatgtgaggtaatgtaaaaaaagttttatataagtgtctttactagtaacgtttagagaggttacataacttcctcattttatattcatttattgagtacatgttagtcactgtcttaatttttctaacttatttatttctcactacaacattcaaagttagatgttatttttatccccatttaacagttggccaaactgaggcacagaaacatttcaaacatgctcaaggtcacaagtagaggagccaggattcaaacgcaggcactctgactttatactttgtgcttttaaccaatacrtcaatattcaaagtggtggaattc

SEQ ID NO: 187332 - DNA, 621 bp, Homo sapiens
taagtcacagacacttttaagacaagtgtgagaatattatcacctttctggggtattcagagttccccaaggagcctcaggaaaatagtatgttcagtgtgataattgatagctctgattcatctggctattcctcttccttccagagcttcctgccatgtcataccattcctttcacatcatcactgtgtgtccatgtaaatgtatctagacagccatcctayacttttttttaaatctccaacttctgctcagcattcatattgaagtcttccccaggtgaagcagttttagaagtcgactccgaatctccttggttctagctccatagagaataggattgagtacaggaggcaccagcacatagagattagccagaaagatgtgcacatgcttggggacttcgtggtgaccaaagcggtgggtgaggaaggagaagaaggcagggatgtagaaaaccaggatgatgccaatgtgggagccacaggtactcagagctttgtgctgggcatcatgagatggaagatgaaagactgcatggaggataaagccataggaaatggcaatgagaatggaatccagtcccatggccagcagagccacagttagcccatagacaat

SEQ ID NO: 187333 - DNA, 623 bp, Homo sapiens
ccaacaaagccaattctgcctatgacagcatggttgagaatggttgtgtaccttaatgggttacagatagccacatacctatcaaaggccatggcaagtagaattgaggactccagagcatagatagaatggacacaaaacatctgggccaggcatccaccaaaggaaatctcaccagcatggagccacaaaatggccagcatcttgggcacagtggtagaactgagagccaggtctgtgagtgagagaaggcagaggaagaggtacataggtgcatgaagagcattgtccatggcaatgaccaggatgagggcagcatttccaaccagtgctacaagatacatggcacagaaagggatggcaatccagaagtgggcagcctccagccctgggatccctgttaagaagaaggtgtctggaagatggttatcactgaggttggaatctgacattcttcctggcaaatgaagggctctttctgaatagtattgttatgcttgccctgtaacatcagatatttggttgatttatgtaaaacaaagatctttctgtgaaataatcttttttrgactaaaaaaatttgtttttcacttgtacaaacatctgaaatgactaccacatat

SEQ ID NO: 187334 - DNA, 600 bp, Homo sapiens
aagttttaatacaagtttccctgcttcccagaggccttccctttctaaactggtcttggtaatctctaattttgtatttttcctacttccactatcttacaaaattctgctgggttagaactatgtctttatgcaacygtaacctctacactgcccatgactgtatttgtacctagacattttgacaacttcaataaagactaaattctgatcattcttagtaacatggcattgatgttttaaattaatgatataatgatgcattaactttttttctgcatttgttatgtgccaaatatacaccaaatcacttttgtatatatatatcatctgaagtgcctatgaagaggctaggcaacctgaatatgctttcatatcatgattgaatatatacagcaatttgagcattcacatgggtataccagaaggaagtgtgaggtaaatcagatatgcttgttgaggatactgcactcaaccatgacaaagccagcgtatagtcctccaatccaccactataatggctggctgtgaggtcagatcagaatggcaagtgctattagagacagatataaaaagtgaggtattctggatttaccaccc

SEQ ID NO: 187335 - DNA, 600 bp, Homo sapiens
aagttttaatacaagtttccctgcttcccagaggccttccctttctaaactggtcttggtaatctctaattttgtatttttcctacttccactatcttacaaaattctgctgggttagaactatgtctttatgcaaccgtaacctctacactgcccatgactgtatttgtacctagacattttgacaacttcaataaagactaaattctgatcattcttagtaacatggcattgatgttttaaattaatgatataatgatgcattaactttttttctgcatttgttatgtgccaaatatayaccaaatcacttttgtatatatatatcatctgaagtgcctatgaagaggctaggcaacctgaatatgctttcatatcatgattgaatatatacagcaatttgagcattcacatgggtataccagaaggaagtgtgaggtaaatcagatatgcttgttgaggatactgcactcaaccatgacaaagccagcgtatagtcctccaatccaccactataatggctggctgtgaggtcagatcagaatggcaagtgctattagagacagatataaaaagtgaggtattctggatttaccaccc

SEQ ID NO: 187336 - DNA, 600 bp, Homo sapiens
aagttttaatacaagtttccctgcttcccagaggccttccctttctaaactggtcttggtaatctctaattttgtatttttcctacttccactatcttacaaaattctgctgggttagaactatgtctttatgcaaccgtaacctctacactgcccatgactgtatttgtacctagacattttgacaacttcaataaagactaaattctgatcattcttagtaacatggcattgatgttttaaattaatgatataatgatgcattaactttttttctgcatttgttatgtgccaaatatacaccaaatcacttttgtatatatatatcrtctgaagtgcctatgaagaggctaggcaacctgaatatgctttcatatcatgattgaatatatacagcaatttgagcattcacatgggtataccagaaggaagtgtgaggtaaatcagatatgcttgttgaggatactgcactcaaccatgacaaagccagcgtatagtcctccaatccaccactataatggctggctgtgaggtcagatcagaatggcaagtgctattagagacagatataaaaagtgaggtattctggatttaccaccc

SEQ ID NO: 187337 - DNA, 600 bp, Homo sapiens
aagttttaatacaagtttccctgcttcccagaggccttccctttctaaactggtcttggtaatctctaattttgtatttttcctacttccactatcttacaaaattctgctgggttagaactatgtctttatgcaaccgtaacctctacactgcccatgactgtatttgtacctagacattttgacaacttcaataaagactaaattctgatcattcttagtaacatggcattgatgttttaaattaatgatataatgatgcattaactttttttctgcatttgttatgtgccaaatatacaccaaatcacttttgtatatatatatcatctgaagtgcctatgaagaggctaggcaacctgaatatgctttcatatcatgattgaatatatacagcaatttgagcattcacatgggtataccagaaggaagtgtgaggtaaatcagatatgcttgttgaggatactgcactcaaccatgrcaaagccagcgtatagtcctccaatccaccactataatggctggctgtgaggtcagatcagaatggcaagtgctattagagacagatataaaaagtgaggtattctggatttaccaccc

SEQ ID NO: 187338 - DNA, 568 bp, Homo sapiens
agacaaaaatccctgccgtgaaagagcttagattttagcaaaggcagataaatagcaaacaaaatgcagaagtaaaatatatgttagataatgataaggactttgaaaaaataaaacagaaagaaaaagaggtagtgggagtggggtaaattctaattagggcattgtattagtttgctagggctgtcaccacaaagcaccacagactgagaggtttaataacagaaacatattctctcacagttstggaggctggaagtctgatatcgcgatgttggcaggtttggttctttgtgagtcctttctccttgccttgtagatgacccccctttgtgtcttcagttggtcttccctctctgcctgtgccctcatctccccttgttaaaaggtcaacagccatatcggattagggcacatcctagtgaccacattttttaaaaaaactatcacatctttaaagatcttatcattaaatacagtcacattctgagatgctgagggttaattaagaccttgacatatgaatttgggggtgtggagaccaacacaattcagcctgtaacagaca

SEQ ID NO: 187339 - DNA, 568 bp, Homo sapiens
agacaaaaatccctgccgtgaaagagcttagattttagcaaaggcagataaatagcaaacaaaatgcagaagtaaaatatatgttagataatgataaggactttgaaaaaataaaacagaaagaaaaagaggtagtgggagtggggtaaattctaattagggcattgtattagtttgctagggctgtcaccacaaagcaccacagactgagaggtttaataacagaaacatattctctcacagttgtggaggctrgaagtctgatatcgcgatgttggcaggtttggttctttgtgagtcctttctccttgccttgtagatgacccccctttgtgtcttcagttggtcttccctctctgcctgtgccctcatctccccttgttaaaaggtcaacagccatatcggattagggcacatcctagtgaccacattttttaaaaaaactatcacatctttaaagatcttatcattaaatacagtcacattctgagatgctgagggttaattaagaccttgacatatgaatttgggggtgtggagaccaacacaattcagcctgtaacagaca

SEQ ID NO: 187340 - DNA, 404 bp, Homo sapiens
gctccatacttctttattgcattacattaccttgcattgcagtatgtatgtatgtgtttatttttgtctctgttctgtttctgttcattgtattttcagtacctaggtgtaaaagtaattgcagttcttgccattgaaagtaatggtaaaaaccacaattacttttgcaccaacctaatagaattatgtctgccatgtaatacaatttcaatatgtatttattgaatcaattaatgaataattattgaaataattgaatattgarataattattgaaataagattaatggtaatgatacatatttaataatttattcaaataatatttaaaggattccaatgatatggtggctaaaaaagtcaatccctagagctaatattaaaattaaaaaagagacagtcat

SEQ ID NO: 187341 - DNA, 521 bp, Homo sapiens
gactggagtgagcaaggaagagtaataatcattatagatggatgaagcagcttgctgtaaacagtgaaagctaatttggaactgcagcaaatgwaagatatttgatattgctgtagttcagagagaaaaagagtgatgtaagatgtagcttcagggacggtcagtgaaaaattgaaaaaggtatcataagccctgtgaaaatatgtttttggggagggaagccagaattattgaaatatagactgaaagtgaatattttcaaaatatattctctcaaatcttttgaaatttcaagcatgtgaatgtttaacctttgtcaataacattttattaaaatgtggatacaaaattaatcattattgataggaaaaatggcagagaggaaatatatggtaattaaaaataaattatttgcttatttgaagagaatgaaggatattttgaataacattgaaatttataaagtacagatattaaaagtgtacccatgagaatagaagtacagtttataactccagaat

SEQ ID NO: 187342 - DNA, 520 bp, Homo sapiens
ttcatgtatttaaggcagctgaaactcaggaagaggggatgataccatgtggaactcaatgcaaaagacttagtaaaagtcaatgtgtagagattcactcatcaccacacaggcaggtgattattattatatgctttttaattggcatagaatattcatagataaaagtgtccatcttctaagtatatagctcaaaaattrtcacaaaatgaatatatcctgtaccctcaatacagatcaagaaatatgccccacagtactgtcagttttggtaggcattctccatgcacttaaaaaatgggtagtacataattgttattttcttgctttttaattattaataagatcagtatttttaatgatgtttttcaaatcttttaaatcattaattttgtggttttgggctagttgtgttatttactagaaaaggtgtagtacaaattttcactgtcattatgcatttgagtacttatttttgtagctctgacagttgtctccttgtactccaaccctctgagtt

SEQ ID NO: 187343 - DNA, 451 bp, Homo sapiens
aaattggctataatctgagaaacatctaaggagaagttatctttacagarcttcagtatttccaatggccatacatttactaaatatagcaataatatttaagaaggctgagaattcactatgcaatctcagaaagaaaatggaaatgacttcctaagattctcattttatgttaagccatttaacaatctggtcctaacgtcttttcctgtacctccctagttgtgggacatctttttacagatactctaatgttactcagatgtttcttctcttctcatctcaggaaataatcactgtcttatttatctggccattgatgaaatgattcttcttgtggatttacttgcttggtttccattgataatttggaggcattgtcctctatggagttgtgtcacctatcagcgggctattaatttagggtatggttatagacaactgcagatcc

SEQ ID NO: 187344 - DNA, 451 bp, Homo sapiens
aaattggctataatctgagaaacatctaaggagaagttatctttacagaacttcagtatttccaatggccwtacatttactaaatatagcaataatatttaagaaggctgagaattcactatgcaatctcagaaagaaaatggaaatgacttcctaagattctcattttatgttaagccatttaacaatctggtcctaacgtcttttcctgtacctccctagttgtgggacatctttttacagatactctaatgttactcagatgtttcttctcttctcatctcaggaaataatcactgtcttatttatctggccattgatgaaatgattcttcttgtggatttacttgcttggtttccattgataatttggaggcattgtcctctatggagttgtgtcacctatcagcgggctattaatttagggtatggttatagacaactgcagatcc

SEQ ID NO: 187345 - DNA, 448 bp, Homo sapiens
tcagtaaattggctataatctgagaaacatctaaggagaagttatctttacagaacttcagtatttccaatggccatacatttactaaatatagcaataatatttaagaaggctgagaattcactatgcaatctcagaaagaaaatggaaatgacttcctaagattctcattttatgttaagccatttaacaatctggtcctaacgtcttttcctgtacctccctagttgtgggacatctttttacagatactctaatgttactcagatgtttcttctcttctcatctcaggaaataatcactgtcttatttatctggccattgatgaaatgattcttcttgtggatttacttgcttggtttccattgataatttggaggcattgtcctctrtggagttgtgtcacctatcagcgggctattaatttagggtatggttatagacaact

SEQ ID NO: 187346 - DNA, 448 bp, Homo sapiens
tcagtaaattggctataatctgagaaacatctaaggagaagttatctttacagaacttcagtatttccaatggccatacatttactaaatatagcaataatatttaagaaggctgagaattcactatgcaatctcagaaagaaaatggaaatgacttcctaagattctcattttatgttaagccatttaacaatctggtcctaacgtcttttcctgtacctccctagttgtgggacatctttttacagatactctaatgttactcagatgtttcttctcttctcatctcaggaaataatcactgtcttatttatctggccattgatgaaatgattcttcttgtggatttacttgcttggtttccattgataatttggaggcattgtcctctatggagttgtgtcayctatcagcgggctattaatttagggtatggttatagacaact

SEQ ID NO: 187347 - DNA, 551 bp, Homo sapiens
cttgggaaaatgaattaacatctcagaacctttcttagccatatgtaaaatgaggataattatacatatwtgagaagatcacataagattacatagaaaagtatgtaaaacataggtgatgatatgtatttattagatgaaagaatggctaaaagagtcaataaatagacgaataagaccttcaatacattgtcaaccttgctagggaggtaggcccaacacacagaatgttaaaagccagtgtgtgtgaaaatgtgatatagacctgttgcgagagagagacatgaatctaggttgaaccagtcattgaagagctccagttgaagctcaactcagaaagatcagtgttactgaaaattagtattactgaaaataatattcccaaaattctatgcttatctaaaatgtattgtataggccacaatttgtagcatataactcatatgtgctatactttgtagcctataaaatacatttacacgccttggaaccctctcaaaatctataggtaatcaggacttacagaacaatgttaagagataagattactc

SEQ ID NO: 187348 - DNA, 551 bp, Homo sapiens
cttgggaaaatgaattaacatctcagaacctttcttagccatatgtaaaatgaggataattatacatatttgagaagatcacataagattacatagaaaagtatgtaaaacataggtgatgatatgtatttattagatgaaagaatggctaaaagagtcaataaatagacgaataagaccttcaatacattgtcaaccttgctagggaggtaggcccaacacacagaatgttaaaagccagtgtgtgtgaaaatgtgatatagacctgttgcgagagagagacatgaatctaggttgaaccagtcattgaagagctccagttgaagctcaactcagaaagatcagtgttactgaaaattagtattactgaaaataatattcccmaaattctatgcttatctaaaatgtattgtataggccacaatttgtagcatataactcatatgtgctatactttgtagcctataaaatacatttacacgccttggaaccctctcaaaatctataggtaatcaggacttacagaacaatgttaagagataagattactc

SEQ ID NO: 187349 - DNA, 551 bp, Homo sapiens
cttgggaaaatgaattaacatctcagaacctttcttagccatatgtaaaatgaggataattatacatatttgagaagatcacataagattacatagaaaagtatgtaaaacataggtgatgatatgtatttattagatgaaagaatggctaaaagagtcaataaatagacgaataagaccttcaatacattgtcaaccttgctagggaggtaggcccaacacacagaatgttaaaagccagtgtgtgtgaaaatgtgatatagacctgttgcgagagagagacatgaatctaggttgaaccagtcattgaagagctccagttgaagctcaactcagaaagatcagtgttactgaaaattagtattactgaaaataatattcccaaaattctatgcttatmtaaaatgtattgtataggccacaatttgtagcatataactcatatgtgctatactttgtagcctataaaatacatttacacgccttggaaccctctcaaaatctataggtaatcaggacttacagaacaatgttaagagataagattactc

SEQ ID NO: 187350 - DNA, 645 bp, Homo sapiens
cactcacttgctgcgatctgaggtttggctttacttcttttgcaaaaaaaaaaagaaaaaactagctgtgtgagatttttgtctcacctactatatgtacattaacacacaaaccacatgcatatattaatatagagataaaaataatgtttttatctctaaaacatgagcattttgagcatggtatatgaaacttgagcatggtatatgaaactgattattttgagcatgtcaccttggacaggtgtgtgtatgtacacaagstcacatagtaaaaaattcacatatacaggcatatagagtccacatatgagtacacacagccatgtgcaaacacagatgcaaatacctagagacacataaatagacccatatgtagggaaaacaatcataacatgctcaaacagaaagggaaacattttacatagataggcccagatatttagtcataaagactgcctgaatttctcaaacccaaattgttcaagtttgaaagtggaacaggaataatatgagggccagagtagggtgaattcacatattaaccaagtccggatgaatagttatcatcattgggacctcctgctcgtcgattttgccccatcataagatggtgatgggctgtctctactgcctcttcagcac

SEQ ID NO: 187351 - DNA, 371 bp, Homo sapiens
gtccagttgataatggaatattggatatcctcctgatgaggaagtgcccttgctgcacattactcaactcagaggataaactctgtgcctctgctgccatttrtcgttttttaaaacactatctgggtgaagagaacttctcatccaactgaactataaccacaagagcaaagaagttcttgccatagtagagcccatcaggtctgtaggtggcttaattgaggtaggtcaggacctctttgtggtaatcagaaaatgaggctgatggtcagccatcctagggacatacactcttctaccaagttctcctttcgcctttcccctcttccctgagttcacacagaaattaattccataaaactctgagcaac

SEQ ID NO: 187352 - DNA, 569 bp, Homo sapiens
gcccatcaggtctgtaggtggcttaattgaggtaggtcaggacctctttgtggtaatcagaaaatgaggctgatggtcagccatcctagggacatacactcttctaccaagttctcctttcgcctttcccctcttccctgagttcacacagaaattaattccataaaactctgagcaacatggatttgtatttttttcattctgcattagattctagttctcttaacccttctgttggtcttgcccatgaaacagagagagcaagaatttcatcctactataattattctgagtgtctcctccctctctcctcaccaacctacccagcactggccctggaggacgagaaacatacccatgacagggcaagacaaaagcattactttattattcacatattttttccacacaccttaaacctatgttcagtatttgattttcttgtgttgttagaggaaggcctaacgagcctaaaaaatagaagtacaarttttctttgattggggagagagccatgatggttaactagccacagccaggaggagcttctcccatgaagagaccagatc

SEQ ID NO: 187353 - DNA, 591 bp, Homo sapiens
atagccttttgagatggggctatttttcaaaggtgacttaacccctgttccccaccacctgacctccagtttgcgtaggaggctagaaaaaaaatctatctgccattcagtctttttctctgcctggaaaaataaagataaccgacttctccagcatcttcccatttttctcatttagatgtcttttgcttcagaaggttggctgctggcctttatagggaagaccatgggacttataattggaagaactagattctagtcccagatcagccacttacgggtttcaggcaagtcacttgatatggctgttatgagattgaaataaggcatcttaggagtgaagaaattgcccctctggttgtcattttccatccacagattgagttaatyttttgagctatggtctccttgacgttgccaatcttttcactgtcctgcatgttcctcttttcatggtccttcgaagtcttgattcttacttcctgctgaagatgatgctttaccagggaccagcatcttcaggtgaggcaggtcaggatcttcaggagagataattagacagattcaaaagagtcctgccaagcccttctg

SEQ ID NO: 187354 - DNA, 572 bp, Homo sapiens
tcagtaatttgaagctctgcaaatggattctgaaagactttagttcaaaatactgaatatgtgacattaattttctcattttttcttacaaccagaaagaatagtattattrcattcatgtcacaagttaaaactcaaaccaagccaaacaaaaacaaaataaaattttggatcagagtataaataagttgaacacatcacacatctagtaactggctgagtatggattttggctcaggtctgatttatttattccaaagtttctgctcttaatttttaagctatgctgtctttcacaagattgagcagtctgaaatattgcatgttcctgctcaaatgtgggagctaaaaaagttgatatcatgtaggtagagtgtagaatgataatcaccagagggtggaaaggcatgtgtgttaaggataggagaggctggttaatagctataaacacatagttagatagaaggaattagttctaatgtttgatagcagagtagggtaactagagttaacaacaatgcatatttttcaaagtagctaaaagagaggaatttgacatgttcccaacacat

SEQ ID NO: 187355 - DNA, 435 bp, Homo sapiens
catcacacatctagtaactggctgagtatggattttggctcaggtctgatttatttattccaaagtttctgctcttaatttttaagctatgctgtctttcacaagattgagcagtctgaaatattgcatgttcctgctcaaatgtgggagctaaaaaagttgatatcakgtaggtagagtgtagaatgataatcaccagagggtggaaaggcatgtgtgttaaggataggagaggctggttaatagctataaacacatagttagatagaaggaattagttctaatgtttgatagcagagtagggtaactagagttaacaacaatgcatatttttcaaagtagctaaaagagaggaatttgacatgttcccaacacatagaagtaataagcactcaaggtgatgaatatcctaagtacttcgacttgacgattata

SEQ ID NO: 187356 - DNA, 487 bp, Homo sapiens
agataggtttacccccgtctgtaaccactggcatgcaaattgaggtagtctagaaagtaatattttatctattttccagattttcatcagtctacaaagcaactttgaaaacttttcctccatggagaaaattccccaccaccacccccaaaacattttttctttgctttgtccacaggagtgtccatgaaaacttcctaaatgtgacctatcttggaaggaaggtcaagaaggtggagagacacaagcaatgcacagaatatcatgagcacacacacacacacagtcactcaaaggtaccagaaaaatatacatttttacactctyatacttacacacccggtatttataggcactatctcatacccacacatacacacaaactatcaaacactcccctactcacacaaaatactatcatgcaacaacttaggaagactcattggtattatgcaatatatttcaaatattctcttatttttaagct

SEQ ID NO: 187357 - DNA, 516 bp, Homo sapiens
agattctaaacaattttggggccaagcagcactgcaactgcgaaagaaaattctatggagggcttattactagacctcagaacctctgctgagagcatcctctttggagagtttgaggtctggagtatcccccagagcatcctgctgtggggtccaatcttagagttccagacatctcttgccttaggtgggcactggtgccacttcgcatgcattccctccagagcctgctatgagctttcctttggaacctgggtgtaatcctcaacgtttagcatctttataatttggtaaggccacgctttcccatgcttcccattccatgaactttaatgataggaactggaggctgggtgggtttcctttgcctttagccagttgaataggggaagggaagaatttagcataaaaaaaagaaggtttaagtcatcygaaacgtttgggtttgctccaagctgccctgcacatagggatcagggaccacgtgtggaaaagattttttaaaaagtcattcac

SEQ ID NO: 187358 - DNA, 259 bp, Homo sapiens
agatcttgtcggtagtgtagaagccaactccagcctctaaagaggtatctgagaaatgtcaggaactccccaaatctgatcaggtttgacactagcataaccctagtagagtatgattgtattagcatgtttaataccatagtccagtatttcccattgctccctgtggtaggtcaaatrataactctctccaaagaggttcacatcctaatccctgaaacctatcaacgtgttaccttacatggcaaaaaggactttg

SEQ ID NO: 187359 - DNA, 440 bp, Homo sapiens
gtagccgttgccggcttgaatgcctgggtttatatcccgatcattgtccctcccccatgccctcagacgatagatgattggctatttcttaacctcctgtttttgcctaattagcattttagtgagctctctttactacctgattggttggatgtgagctaagttacaagccccatgtttaaaggtggatacggtcaccttcccagctaggcttagggatacttagtcagcctaggaaatccagctagtcctgtctgtcagtcccccctctcaacaggaaaacccaagtgctgttggggaggttggccgatatccrctctaactgcttcctgctgaattggggcatagtaggggttatgcagttgagatttcctcgggagggatgcctttgatgtcattaacaccagagcatgggctccaggctggtccaggggtccgca

SEQ ID NO: 187360 - DNA, 440 bp, Homo sapiens
gtagccgttgccggcttgaatgcctgggtttatatcccgatcattgtccctcccccatgccctcagacgatagatgattggctatttcttaacctcctgtttttgcctaattagcattttagtgagctctctttactacctgattggttggatgtgagctaagttacaagccccatgtttaaaggtggatacggtcaccttcccagctaggcttagggatacttagtcagcctaggaaatccagctagtcctgtctgtcagtcccccctctcaacaggaaaacccaagtgctgttggggaggttggccgatatccactctaactgcttcctgctgaattggggcatagtaggggttatgcagttgagatttcctcgggagggatgcctttgatgtcattaacrccagagcatgggctccaggctggtccaggggtccgca

SEQ ID NO: 187361 - DNA, 390 bp, Homo sapiens
tttaaatagatgacaagttaacactgactgcatagacaaactcacaaacaagcaaagggaaaactaataaaaactctatactttaacttcatccctctgctttttaactttttgtcgtttctatttatattaatatcttattgtactgtccatgtcttgaaaagttactgtagttattattttttatcagtttcaccttttaggctttctactcaagatatgagrgatttccacaccaattacagtgttatattctgtgtttttcagtgtacatacaattaccagtgaattttgtaccttcatatgatttcttactgctcattaacatccttttctttcaggttaaagaactccctttagcatttctcgtaggacaggtctggtgttaat

SEQ ID NO: 187362 - DNA, 403 bp, Homo sapiens
ctggggcaaatattaaacccaggggcctctcaggaaattgtgttcttaggatgaagctgagggaagagtgtgactgtgaagtcctttgttaaaacctaaggaagattcaaaaggcagtgtttcacagtaccrttcagtcacactgcaattctgaagatttcacggcgtgactcactagaagtgaatcgctaactgggacaagattccagagccaaataactggatgagcaagaggacaccgagagggatatgtggaacaggtaatcctttccaggaactgctaagagagtagaggttgtggccatgaacatggctcaggttcgaatcccagttctgccgcttattggctacgtgatcttgggtaagacagaaggtttccttagcagtaaaatgggcattaaat

SEQ ID NO: 187363 - DNA, 400 bp, Homo sapiens
agggtgcagtgacccgagatcgtgctgctgcactccagcctaggcgaccaaaaaaaaaaaaaaaaatcagatatttaatcmggccatatttcatgaatagtcagtgtattaaaatgtttgttcttttatagtcatccatgaagtcaacacagctttgtaactagcaagaagtaggcctcagtggcgcagtgatgaagcaggcagatactgtgtgctgaacttggagactcaccagggaggagcagcaaacacagctaaacgtagaccccataagccatccccagtgtgggtcagtggtactgtgctaacggcactgaggttcccagatggcaaacagccctgagcaggtgagctgtgtgacttccccaaggaggagaaacagccagcatccctgatggcc

SEQ ID NO: 187364 - DNA, 515 bp, Homo sapiens
gctgggagggtactgtgcagtaatacygccagcaacattcgcatgaagcccctggggtcaggggcctgctgaggatgagctgtgtcccttcaaaaaagaaatgttgaagtcctaacccccaggacctcacaaagggacagtatttggagatagggtcttaaaaggggcaatcagttaaaatgaagtcattagagtggccctgcatccaacaggactgggtccttataccaaggggaagtgtggacacagagaccgatgtgcacagaggggtgatgattaaggccaccaggagtgcctcacctacaagccaggggcaaaagggagaggcccggggctaactctccctcacagcccgggtaggaaccacctctgccgacaccctgatctcagccttccagcctccagaattgtgagacaataaaagtcggctgtatgactcccccagtctgcagtatcttgttacagcagccctggcagacagacacctgcacatttaaaacatgacccatgctgag

SEQ ID NO: 187365 - DNA, 476 bp, Homo sapiens
attgtgaggaggaggttgtgcrcgcagaagggagctgtgtgaggctgtgtcctggttttggttataaacatgcaatttcccatattctgcacctgagatgtcccttctagaccaaggctttcagaatttactgtgaacaagcacctcaagattctattgcatccaaaatgttgacaagactggactcaggtttagtcgctgtgacaggatttctggactaatgagggaggggactatctactcaccaaggatgggcggaggcaaagaggaaaatgtgaatgagagattgaagccgcccaggaagtcagctacgcccctcttgctcctccctgggtgcccatctctgacctgcccccaggtcggttcttcacactgattccctcttctctgccttcttggtggtggtgggggtgcccttctgtctctcggtcaggtcagagtgatgtggcctctcctgcactcctgggcaggtttag

SEQ ID NO: 187366 - DNA, 567 bp, Homo sapiens
acaaaaaataagtaaggatataaatgacctagtataatcattgggtagatttgagaaatatgtaagtttatacaataacaacagagaatgcacacataaaatatgatcaaatttggtcacaaagaaaccagaggtaagttccatcaaaatagaaattaataaaataaataaaaagattcttcaaactggaaattgagaagaactgttattaaacatccaattcagatgaaaggmaagccacactgaaaatacagaaatcctagaaataatgacaatggaagcattatatattaaactccatggaatacatttaaagcagtgttcggaggaaagagcttagccttaaacacttatggcaaataaaacaaacaaataaaaataaatgaaataaatttgaaatttgaaaaaactaaagaacagcaaagtaaaccaagagaaagcactaggaagggaatgataaagaaaaatgcagcaatgaacaaggcagaaaacagaaaactagacctaagaaatacatcaaagtcttattttttgaaaaataaaacagaactagatgaatcacaagcc

SEQ ID NO: 187367 - DNA, 448 bp, Homo sapiens
acacaacttactttggaaacaagctggaagtcagccctctgctcccagctggtcttccccacccgcggagggcggagcatcagagccctcgccttcccaacagccagcatgcgctggtgccattagccaggcactgcatcttctaaagttcatctttttagaaagtattatttactttctaaatagtcacaaacctgcactgtaactatttactttctaaatagtttgtcacggcctgacaaacctgcactgtaactccgcagtggtgtccgggctcggccattcggctcggaggcgggcggaggcagaggtgctcttggctctggagagccaggctccccygccctgtggcctttgaatcccacgccccggggctgtgagggtctcgctctggctgttcccgccgcctgggtctcctggacactcccgaagcctccattaccacctg

SEQ ID NO: 187368 - DNA, 616 bp, Homo sapiens
tatgtacaatagcttcattattagcttaacatgttgatcatgtctttctgagggttaatattatttcttatagatactattatttgatacagttaattccatataattttaaagatgaatttgtacatctatgttaaacctttcattgggaattttattgaattctgaaattagtttgaaatgaattataagtttgatcatrtagagcctttctatatgccagattgaatagtatattggctcaggtatgctttctgtctcttcaataaaggttcatatttctctgtacagattttatacaacattgttagatttattttggaataagtaaatgtcataacttttgttataactgttgtcagtattattaataacattttaaataattttttctgtcttttaaattagttattctgagaaaacactattgatatttgtatgttagttttcttttttatgaagaatcttaggtcaacagtaatattaatattgacatttagtctatagcatatctgactttctttttataatcatactcttcagcaatgattaaagtttagccatttttttctgtttcctacttaatctttaaatgcctaaagaatttgtagtgatg

SEQ ID NO: 187369 - DNA, 592 bp, Homo sapiens
ctacatcactaatattttcatcttcagtttttaatctcatgttatcctcatccagcatatttttcctgagacatattcattttcatattctgaagtttgatttgggtcactttatttcttccatgtctctatctaaaattttcagcatatgaaatatattaatagtagtttcagttacccaggtcaactgctgtctaaaatattaaatggaaaattccagaatgcataaattttaaattgcacwccattctgagtagtgtgatgaaatctcatgctgtcctggtctgacctgccagggacgtgattcatccctttttccagtgtatccatgctgtctatgctacctacctattagctgcttagtagccatcttggttatcaggttgactgtcatggtatcacagtgcttctgttcaagtaacacttattgtacttaataatgtccccaaagtatgagaggacgagacaggcaatttggatatgccaaaggaaacatttaaagtgcttccttgaagtgaaaaggcagaagttcttaataaggaaagaaaaaaatgcatatgctgaggttactaagatctatggtaagactaaa

SEQ ID NO: 187370 - DNA, 632 bp, Homo sapiens
gtatttgtcaaattctaagaaaatcccttccactatagatattagatatcttacttttctttttttttattatactttaagttttagggtacttgtgcacarcatgcaggtttgttacacatatatacatgtgccatgttggtatgctgcacccattaactcgtcatttaacattaggtatatctcctaatgctatccctttaatgttgaaaaattgatatatattttatcttataattacagagaagattaaaatgcttaacatcataaaaaattaaaataaaatccaatagacttatttttggggggacaaattaagaacacaagatttcttatttctctaagactccattttgtgtttgtttttatttttaccataaggtgaatataatcacatgtagttcataagaatatgatgtgtgctaagttctccataaataccagctattattaaataaaggagtaaatgatatatccatataactattaaagaggcacaaacataattccaggtactccagagtatgttctttgagaatataaccagaagctgcattcagaaataaagctaaaaaacttgtttgtttaataagggaatgtctttttcttgttgtttgtttctctttctcttt

SEQ ID NO: 187371 - DNA, 480 bp, Homo sapiens
tttccttcatacatacactttgcaataagtctgaagcaaatgcagaccatttttctcctaggattcttcacagtttctgccattagtcataccaagcatatggaaatagaaatataaattttaatgtagcatgtatttccagaggatgtagggctatgataggagaacctcttttactgtctattcttaagtcattaaacaacatgactatcatggtgttcagtaaattcacttttccagtctgacctccctcctaaattgctcatctcacatattaacagggcagagcagttcctttttacctcaaattcttgaaataaattaagacaccatctctaagtatttcattttcacctcctattttcctatgagtacaacaaattggaraatttaaagacatttttaatactcttttctttcaaatatacattgtcatcatttctagatattattctttacacaaatgtgttgattcatcca

SEQ ID NO: 187372 - DNA, 553 bp, Homo sapiens
gaaacaaaaatcaagagcttctgacttctcagaaacaataaaatttaagtaacttgaattgggaagcatagccaaaaatggtcacaaccagccacaggttaatagagattaagacagtaatgtgaggtctttgctagctgttcactacatagaaaatatatagtcctggactaatgggattttagtcctagaagatcacatgacttatttgcattaatactcataaataattaagaaaagtaaagctaatcaaatatccaaactaccctctaatactttaggcaattctgttcctaatccatataattctagcctgtgtttttccctcttggtttctttccrctttaccaaaatcagatatgaactagctgacaccacattgtacacattaaaataatttcctttccttgacatgtatcagatgtagcttacaaaagtaataaattaaattaccacatatattgctcattttctatctttaatttgtacatttgtcaaggccaacttccacaaatgcattactcagaaattgaatttttctgttagaaataaa

SEQ ID NO: 187373 - DNA, 559 bp, Homo sapiens
cttccctctgaaatattgtttttctaatctaattactagcataatatgtatcactctcatttgtattcaaaaggaatattggattaagtatggaagtgtgcgttttctatattggctttctatccaccctgcctttacagctgagaagtttatgcttcataccttctactctcttgctcatgaacctgtggctcagtggcatgcaaagtaagatcacttgcaggatgaaagcagcatttatgattgctgggcaggtttcctgaggtccttcctagagcagaaaagtaatgaaagtttttagacatatattgagaaaaattgattaagtgaactaasataattttaaaatacatttcttctattaaccattcctaggaatcataaagaaatttatcaagattcttttggtaatttttaaacagtagttaattctatcataggctattcatagcagagctgttctttacattcgcttaaatgaaataaactggctttacattttttttttcaaatacaggcagcattttttcagagaaaattagagaaataaaaaagttat

SEQ ID NO: 187374 - DNA, 583 bp, Homo sapiens
aaattactcacccccttcaatggggaaagccacttccaccctactttatttctatatcattggtatgrtttcatttttataaacttttagaacagagagacctaaactgttgtgatacaggaactgatggacatggtggttaaaggtggggctcttcagtcacaggaacctgagctttagttcggctacaccacttgattgtctttgtgatcttcagtgggttgtttacatgtctaagcctcacactgtgtattgtcccaaatggggtcagtgaaacctatgtcatgcccttgctggtactatattcagtgcttaatgagtattattgtcattatttttcaaaaagtttatttcatggaatgcttattctcagatgcaacaatcataatcctatcctggaacaatataagagcaatagtatttaacaaggcaaaaccaaacagaacaaataattgtttgagtagcttgtattttctctgatttgttacaaaatacaaactacctaaagagtttttaaaatatattatgtggtaaataaatatttatttttgaaggcaagggtaacataaaagctaagatgatg

SEQ ID NO: 187375 - DNA, 428 bp, Homo sapiens
aataaaatggtaatatctcgtgatttcttaattattttgtctacgtattggggtcagatattttgaatgttctttaaatatattttaggtgatcctagtgttacacatttgaaaatgataatgtggcacaatttttcatcaaaatataaccacaatcttgatgcttcaaatacacacctttctaagatttgatgaaagatatggtggattcattggcascttcctaatacctatttgataagtgcatcctttgtcaggatgctgccaagatagtgctatttagtgacaggcttcaaatgtatacagccaatatagagcttctgaggttattaaagttcttctgtaacagagtaatggatggctttaatcctttttaggctggctataaacttgtaatactttgctgactgtgcaaaatagcctataat

SEQ ID NO: 187376 - DNA, 572 bp, Homo sapiens
agtttatatggcctgaattgtcattgagtaatggtttgagaaagagtactggtgaagaaataaaatttggtgatgaaggaggtagaatgccaagttagggactaaatacctaatgtaaatccatttatcacataggtgttggttataggactttsacccatattctaggatgtcctctcatcctctcaaggtaaaagtgaatacatttctattaaaagccataattaattgcataaactattcaactgggttgaaagtattcaggctctggtgaggctctgatgtacttttctctgccatgctgaaaaaaagaatttgaaatgctgtctgaaattggtcatttgaccccaggcagaaaataaattctaaaatgttattaatgctcagttgtcctcctctgggactaaagtgacttaactcatctatattttctctttttctttgtcagtgagtacaccttttccaaatcatctgatgagtcagagtcataagaggtttatggtgcagtgaaaaagtcagctgctcttagttataatcaatgttcaaagagctttaacctatgttttcaagat

SEQ ID NO: 187377 - DNA, 614 bp, Homo sapiens
ataatgagaataacctgaatcctgagggaaatctataaagtccaccaggagtgttgcaaagggaatgtgggtctcagaggatttcatggggtatgctacttacatccagaaatatcataagatttacaagtaatacattggtaaataatttgatcagaaattctgtggattccagggcaaaatcactgtcatttrcctctttgatttgcccttctttacacatatattccatttgatgggcaataaatagaagcacaaaacaataaaagataaaggactataggaagtccatttggtccaacgtataatccttctaacaattgtctggaatcttcttgcagccttttttttcattgtagggtatctgccaaatattattgacgtcagtaagtgttaaaggcagggttgtaagctgggttaaaaaatgggttattgccagagttgggggttcatgtttggcagctttgtcagacgtattgtctaccagagatacagtgtcagtctccttggcatgtgccaacaataaacaaaagcaacctcaattagaagatgaataggcgtaataggttaacaattacatggccattggcaataggggtaccagcagaggtcag

SEQ ID NO: 187378 - DNA, 614 bp, Homo sapiens
ataatgagaataacctgaatcctgagggaaatctataaagtccaccaggagtgttgcaaagggaatgtgggtctcagaggatttcatggggtatgctacttacatccagaaatatcataagatttacaagtaatacattggtaaataatttgatcagaaattctgtggattccagggcaaaatcactgtcatttacctctttgatttgcccttctttacacatatattccatttgatgggcaataaatagaagcacaaaacaataaaagataaaggactataggaagtccatttggtccaacgtataatccttctaacaattgtctggaatcttcttgcagccttttttttcattgtagggtatctgccaaatattattgacgtcagtaagtgttaaaggcagggttgtaagctgggttaaaaaatgggttattgccagagttgggggttcatgtttggcagctttgtcagacgtattgtctaccagagatacagtgtcagtctccttggcatgtgccaacaataaacaaaagcaacctcaattagaagatgaataggygtaataggttaacaattacatggccattggcaataggggtaccagcagaggtcag

SEQ ID NO: 187379 - DNA, 415 bp, Homo sapiens
aaaacagatgggtacgctgtacatggattgaattgaatgcaaagcagtgaaaatgaatgaaatacagttgcacaatccaccagggattaatctcaatatattatttwaaaaagtatttttattatgaagttaataaaatacatattatataattttattaacatgcagtccaaaacaaatatatgatagtagttatcttaagaaagaaagagaggtatacaattagaaagtaaaatccagaaagcattcaatgaacaggcaatattttattttaaatctgagtagcccattcataaatgtttgtttcacttttgaactgttaatatattatatgtattattcttataatgctttttttgtgtaaaacctgtaattcatgcctcagttgctatgttggtaatgtcttagatggaaa

SEQ ID NO: 187380 - DNA, 557 bp, Homo sapiens
tacacagccacactgcaactatcaccatgaatcatgaacactgctaccatcaccaacaaccagtaatcctaaattggagtaatgaaagggaataaatctagaaagatatctcatttccaaaactgtgtgaaagtgattagatgttttaaaataataggtttgttttaattaatatagctactacactgactctcataattagttgatattttcaagaacaagacaatataaaatatgatttttgtgttgctatgcaggagaatataatcaatttgcaagtagagaatgtaacagaattacatgcacaaagggctgcttttttttttttcctgttgcgtactcaraataaatgctatttgttaaggttaacaaagctcacacaaaagctgtttcaatccagggtttaacagtgtaaatttggaggcattaccttgcggatttaccttacatccctgggttgaatgtctttgtgactggctttgatcaaaactatactagaggcaaatcctcccctgcctaatgagtatcaggtcaatgtgaagcagggtattgctaaa

SEQ ID NO: 187381 - DNA, 586 bp, Homo sapiens
aatagcactattagttccagttttctattgctacataaaaagccacccttaattttacaacttaaagcaataatattaatttagttttctcgcaaacttgcaatttgggtagggttcagcaaggatggcttattcccctcccctcagccccaccccagtggtatcagctacaatagcttaagtgcaactaaaggatccattttcaagaagaccatttacatggctgacaccttaatactggctgctggctggaagctcatccaggtgctgtcagccaggggccttagtttacatctatgtagtcatcttcatagagatcctcaggcttctctcacaatgatgactgggttccaagagctacaattccaaaagacaggaaagtggagactgctagtyttttattacctgggctcagacactaggcatcacttctgtttcattctgttgatgaaacagtcacaaattcacccagattcaagaggagagagcacagactgccaccattttctatccactacaatattcaacgatagagtttggaggtgccacccatagtcatgtgtatcatgagacagtttgcctgttt

SEQ ID NO: 187382 - DNA, 435 bp, Homo sapiens
tacagagtttcttgcttctctaacaggattrtgacagtgaagatatccctcccttttgcccttgtggtggttaatactgtctactggattggattgaaggatgcaaagtactgatcctgggcatggctgtgaaggtgttgtcaaaggagattaacatttgagtcagtgggctgggaaaggcagatccactcttaatctggttgggcacaatctaatcagctgccagcacagctagaatataaagcaggtagaagaatgcaaaaagaccagactggcctagcctcccagcctacatctttttcccatgttagatgctttctgcccttgaacactggaattcaagttcttcagttttgggatttggactggctctccttgctcttcagcttgcagatagcctattgtgggaccttgtgaccatgtgagttagtactt

SEQ ID NO: 187383 - DNA, 508 bp, Homo sapiens
gggctcacgcctgcagtctcagcacttgggagcctgaggtgggaagatcacttgagcccaggaggttgaggctgcagtgagtggagatcactccacatcagcctgggtgacacagcaagaccctgtctcaaaaagaaaacaaaaaacgttttgaaataaagtctttaaaatgtgtcctttattttcgaaactgttttggctattaaagattctttttatttcatttttaaaatttatgatagacataytaattgtacatatttttgagttataatgtgtttttttacatgtacacattacacaacgatccaatctgggtaattaacatatgcatcaccttaaacatcatttccttgtaataagaacattaaagaacttgtcctagttattttgaaatgtacaatacactattgttaagtctagtcatcctactgtacaataggaaaactgaacttattcttcctaactgtaactttgtattgattgaccaatctctccccattcccac

SEQ ID NO: 187384 - DNA, 486 bp, Homo sapiens
tgagccagttcacatacccagaaccccttgaatgaaggggagtctgtgtccccttgagtaaggaccccactacactaccaacaatttatgctgttaatctttctcacattcttccccaaggacccaaggagacccccggccttttaccagggtaactttgcawtggggaaagggaaataatcagacatttcggggaccactgacctggctctgagctgacggtgattccagggaaccagaaatgtcactgttgtcctccagttaaagtaggggcttatggaggtcaggtaattaatagagttttagctcaggtccgacttacagtgggtccaagggtccccggattcatcctgtggtcatttccccagtgtcagaatgcataattggcagagatacttagcagatggcagaatccccacatcggctccctgagtgaagggtgaggactattatggtggggaaggccaaaaggaagtcagtagaact

SEQ ID NO: 187385 - DNA, 631 bp, Homo sapiens
atgtactcaagtcattacaaaatgtcagagttatactgggtgtcataggagcacctgtgtgtctaacctagcctcaggagatgctcctagagaagaggacagatgcttccagacctggagcatgattagaattctgacaggtcaaagtggtaggaacagcattttcttctgttgctgtttgctgtttcctactcatatcgcactgacattctcagctttgtgataggcaaacctctatctccttggtgctccctttgcccactcccctcaaatgtagctaatccctatacattcttcaagcagaaccatcatcaggaggtctcaaatgtsctttggacatgatagcgacccatcctttaaattattttaagataatgtagctaccaatagccttgactaggggtaagaaattgatttgttcaaacaattattctctttaattatatttccctcatgatattatgaaaatcaacttatatttaggaattctccaaaattcagtgaaatcaccgatgtaaggacagtgtctggtaaagcatcctcagagccgagcaaatcaaatctctcatattagatactcaataaatgtcaattttaaaataaataaacaaataagtaaatgaaaaagtga

SEQ ID NO: 187386 - DNA, 572 bp, Homo sapiens
atctgaattctggtgatcatactctatcttagctcctgagaggctctctaagccagtggtttgaaaatgttcttgtacttctaaactacttaccgctcctgttaagcagattgctagtccacatccccagagtttctaattcagtgagtttggagcacgacctcaaaatttcctttactaacaaatttccaattaaagggaatgctgttggtcaagagatcatactttaaagaaacaccacccccaaaaaaaattttttttaagttttttgattgagtttttctccccaaactgctatctggtctgcactcttcatgagttctactggacaatttggctaccacaaatatccttaataagtcatgttaaaaatctagagcagaataggcttgcagcaactttcctttcctagaatcttgacctgaaaaattttacctttctagagctaaagatgcctcyaaaagccttcaacccactgggaatttttttgttcatcccacaaaacaagtctacctctcagcaacttctgggaaaatttgtgaataatgcattctatggagaatgtaatagcc

SEQ ID NO: 187387 - DNA, 363 bp, Homo sapiens
cctctcttcctttctccctccctcccttcttccctccctcctttccttcctccctttctttcttttctttctggcagggkctccctctgttgcccaagctgagtgcagtggaatgatcatggttcactgtagcctcaacctcctgggctcaaatgatccttcctcttcagcctcctgaggtgctgggactacagggatgtgccaccaaacctggctaatttttttaattttttgtagagacagggtcttgctgtgttgcccaggctggtcttgaactcctggcctctgaccctcctccactgggcctggccaaattctttttcttattttcttttttttgttaacctggctgtttaagaattc

SEQ ID NO: 187388 - DNA, 363 bp, Homo sapiens
cctctcttcctttctccctccctcccttcttccctccctcctttccttcctccctttctttcttttctttctggcaggggctccctctgttgcccaagctgagtgcagtggaatgatcatggttcactgtagcctcaacctcctgggctcaaatgatccttcctcytcagcctcctgaggtgctgggactacagggatgtgccaccaaacctggctaatttttttaattttttgtagagacagggtcttgctgtgttgcccaggctggtcttgaactcctggcctctgaccctcctccactgggcctggccaaattctttttcttattttcttttttttgttaacctggctgtttaagaattc

SEQ ID NO: 187389 - DNA, 473 bp, Homo sapiens
gccccagctttgcagaggaaggaacccctgggtgactgtgggaccatcccacagtgaaacgagtctctggggggaggagcttgtggcacggggaagttctggctcttaccagcagaggaagccatcactcaggctctctcagcctcagtgtccttgtctgtaaaatgggtagagttccatagttcacagggtgaaatgagctaacccaggagagaatgctgtaaaaggtattatcaatggggacagtgagggtgggcctgggtgggaaagggaagagatggagtgagaagcctcaaagctcccctgggagggattagaaggggccaggaagccggggaggtgactcagtgctcaggcagstggaatgggagtagaaggttagctgataccccacccactaacccccgactccaagacagaggcatgtccggactggaagcaaggtggggagtgggattctctagccctcctag

SEQ ID NO: 187390 - DNA, 397 bp, Homo sapiens
ggcgtgtacacatctcgctctcgtacacacactgcagcacacgccacccaatgtcacccggccgggaagccagagggaaggagctgtctggaagggaatggccgaaggaacaaatggtcctcctttcccctactcccgccccgcgaacccttccctcccccgccaagctcccgccccgcccgctccctcggaagcccgggaggccgaggcgcctcctggcggggtgcrgggggagggcagtcgagccacccgcccccttggagccggggagacggccgctcctgggctagtgcgccccgagctcagcgcgctcagcgggatcgcaggcgggagcggtcggttaatgatttaatcgcccgcttggggcgggtgcgcgcggatcggccgtccctggccc

SEQ ID NO: 187391 - DNA, 604 bp, Homo sapiens
cccaccatggtcagtccagggtaggaaatggaatcttaacaactatcacacgagctttgaggggatccttctccagatgagccttcagttgcgacctcagccttggacatcatctgcatctggattcctgacccagagcaactgtaagtaatgtgtgtgtgattttgagccaccgcactatgtggcaatttgttgtgcagcaactgataactaatacaaaagataatacgtttagtttataatactaccctggattagattctagaacagaaaaatggcattactagaaaacctggtaaactctcgagaaagtctgtagttcagttaatagttttataccaccataaatttattagttttcataaatacactatgggyatataaatgagatgttaatattctagtaaactcttgggtatgtaaaactagctgtactatgtttggatctttatgtatatcaaaattattttaaaatgaaatctttgtttatttatttttaattaaaagagacaggcatacatatgttatcccagcttctggggaggctggcttgggaggattgcttgagcccaggagttccaggctgaagtgagccatgattgtg

SEQ ID NO: 187392 - DNA, 653 bp, Homo sapiens
acaagaaatagaaattatattttcatattataatttttttattaatataggcttagttttctaaagataattctgccttcaagcctggttgcaattctgtgataatttcttttcactccacgttctccatcaggaattttatggaaccttgtattctgttgaataccagaattatatcagcaatccccaagtcaccaaatgggcatcatcatgacagcaggtgggtggaatacaaaagaaaaaaatatatatatatgtatgtatgtgtgtctatatatatatgtatgtgtatatatatgtgtgtgtttgtgtgtatatatatgtacatatgtgtatatatgtacatatgtgtatatatrtgtatatatatgtatatatatgtgtgtgtatatgtgtgtgtgtgtgtgtgtgtatatatatatgtatatatatatatggtggttggtggttttggcagtttctacttatctggacctggacaaaaaaatcttttcacaccagatttttggcagctgagattccaaataggttttgcacaggcatggaaaacttgatagaggctaaacaacagtccaggtgtggtggctcatgcctgtaatgccagcatattgggaggtcaaagtgggtggattgcttgagtccaggagttcaag

SEQ ID NO: 187393 - DNA, 471 bp, Homo sapiens
ggtttcctggctggccatttgctctgttaaagggccgtatacacaaaacaactctcaaatgccaaaggatcggaaaattaaagaaggctgaaaatccatttagtcagtactggttaatttattgatggaacttacacacagaagcataaccttggatggctgcaggtaggtagctgttcacactgttactctccagacccagggttaatactccacagggaaagggtatacttgctttggcaaggcaattaaaarcaaccctccacaatggaaaaggaggctacatgcatcatagcctctaatttttgtggtaacacccaggttgacatgattttacactaaggacagtaaataattgagagatcagaaggcattcatggaactggggcaaatcagaagtaacatggtggactagcatccaagatgggtcattttgtctccacaggttctatgacctgctgttttttcgaa

SEQ ID NO: 187394 - DNA, 471 bp, Homo sapiens
ggtttcctggctggccatttgctctgttaaagggccgtatacacaaaacaactctcaaatgccaaaggatcggaaaattaaagaaggctgaaaatccatttagtcagtactggttaatttattgatggaacttacacacagaagcataaccttggatggctgcaggtaggtagctgttcacactgttactctccagacccagggttaatactccacagggaaagggtatacttgctttggcaaggcaattaaaagcaaccctccacaatggaaaaggaggctacatgcatcatagcctctaatttttgtggtaacacccaggttgacatgattttacactaaggacagtaaataattgagagatcagaaggcattcrtggaactggggcaaatcagaagtaacatggtggactagcatccaagatgggtcattttgtctccacaggttctatgacctgctgttttttcgaa

SEQ ID NO: 187395 - DNA, 374 bp, Homo sapiens
gtcactttttggtttacattttggaaaccacaatgarttctgtgcagagtttggccctttggcctgcagcaactctcctagcagggccctggtacagccaactggaagctttgtattgctctgactgattggatgatttgctgaggtctgggagcctccccctacagagatccctgatctcccaaactttttactggaggtctgaggtatgttctcttgtagaactccctctctgggagtttgctgcttctgaggaggcagagcgcagtcttccacttgggccagcatctccaagtaaggagctggctgggggtttttaaattggatttggtggctttgagtctagctttcttcttagccagttacaaattctt

SEQ ID NO: 187396 - DNA, 374 bp, Homo sapiens
gtcactttttggtttacattttggaaaccacaatgaattctgtgcagagtttsgccctttggcctgcagcaactctcctagcagggccctggtacagccaactggaagctttgtattgctctgactgattggatgatttgctgaggtctgggagcctccccctacagagatccctgatctcccaaactttttactggaggtctgaggtatgttctcttgtagaactccctctctgggagtttgctgcttctgaggaggcagagcgcagtcttccacttgggccagcatctccaagtaaggagctggctgggggtttttaaattggatttggtggctttgagtctagctttcttcttagccagttacaaattctt

SEQ ID NO: 187397 - DNA, 374 bp, Homo sapiens
gtcactttttggtttacattttggaaaccacaatgaattctgtgcagagtttggccctttggcctgcagcaactctcctagcagggccctggtacagccaactggaagctttgtattgctctgactgattggatgatttgctgaggtctgggagcctccccctacasagatccctgatctcccaaactttttactggaggtctgaggtatgttctcttgtagaactccctctctgggagtttgctgcttctgaggaggcagagcgcagtcttccacttgggccagcatctccaagtaaggagctggctgggggtttttaaattggatttggtggctttgagtctagctttcttcttagccagttacaaattctt

SEQ ID NO: 187398 - DNA, 374 bp, Homo sapiens
gtcactttttggtttacattttggaaaccacaatgaattctgtgcagagtttggccctttggcctgcagcaactctcctagcagggccctggtacagccaactggaagctttgtattgctctgactgattggatgatttgctgaggtctgggagcctccccctacagagatccctgatctcccaaactttttactggaggtctgaggtatgttctcttgtagaactccctctctgggagtttgctgcttctgaggaggcagagcgcagtcttscacttgggccagcatctccaagtaaggagctggctgggggtttttaaattggatttggtggctttgagtctagctttcttcttagccagttacaaattctt

SEQ ID NO: 187399 - DNA, 552 bp, Homo sapiens
atgtgtgtatttatgttttatcacttctatgatcacatgagatagaaagtgaaagcaaaataggtaatcaaggttttctaaaatttctcatatttggataaaactcttctaaatcactgtgcaactcaccttgtccatggattttttctacactagcatcatctctggtaattaggagctttgctgttgccatatttgtagtgagagaactataagagtttctgttagattatgtgtctcatctactaacgtccctctccaagttatgatgttaaagataccaccagaatgtgaaaatggaagttttttacatcaagttcacttgtgtgcacacaaagtcratcacattatgactgtcttctaaccaatagtcttttacaatattatgattcatctgtatttgcaagatgtaaaaaatatgccttttaaaataaatggaacacactatttttcctctgtgactgccgccttctcagtacaaaattttgtcggctcatcatatgtattctggtctcttattgtgaaaacatgcttaactatagtttcaaatta

SEQ ID NO: 187400 - DNA, 172 bp, Homo sapiens
ttggtctaaattaggcaggtcagatattctctttgctgttttaaggttacaaatatctatgactttttgtaagtgtccaacctgcctgcattagagccagcagcttctaggtaaagcctggggacrtgctgagttagccacgcccccgagctatgttggaaacagtcagaca

SEQ ID NO: 187401 - DNA, 397 bp, Homo sapiens
gctggtaaaatcactacattacgaaataattaaagtatagttttctacttataggagaacaatacatttgtcaccaaaaggagaagccaataaaggtttcttccttcattgattttccttaaaaaaatctccagtttcctttgcatcttaaaaatattttttctctgttcttcaccacatgaatgccccaggctatgyagtttgcatgaagtatagggttgctctttagacacagtgaaattaagttaagttgtaacccagtatactattttcctaaaaattacctttgcattttttctttttctcagtgttcacctcttgcttagctcctcagaaatgcaaatgtaaccttttccttccttcgtttccaccagtgaaacaacctgcaagtattgcc

SEQ ID NO: 187402 - DNA, 570 bp, Homo sapiens
ctctattttcaaccttctgaaacctcctgtgcaagatttgatgctgatgttgatgacatcacccaaaaacatcaacaggaggtttgcagacaaagctcatatacaggtaaatgaggacaatcacattatgactgccttcccgtcaacagtgttttaacgctttcaaatttaagatgcatctgtatttgatagatgtgaaaatgtgcactctacgatgaatggaatacactgttttctctgtgactgcttgtttctcactgttaaattatggtggctcattggctatattcttgtttgttattgaggaaatatgcttaaatcttaccayataaatttataaactgcatttatattctacctggaagcttcaccactgccctccattagggaagtccagtttgtccacttctcattaaagtgagtgtccagagaggtgttataaactgcatttataattttagacacattagagttattagtggagtgctagaattcttatgtcacatatggaaatatagttctatgaaccatggtttaagaaatccattgaagacaaagatgaaaattgta

SEQ ID NO: 187403 - DNA, 616 bp, Homo sapiens
atacattttcatcgctgaaataaattggatctttgtccccaccaaatctcatgtcaaattgtaatctgcagtgtttgccatgggatctggtgggaggtgattggctcctgagggtgattttcatgaatggttttagcaccactggtgttgttctcctgatagtgrgtgagttctcacaagatctggttgcttaaaagtgtgtagcactccagcccctctcttcatcctgctctggccgtgtgaagtgctggctccccctttgccttccaccatgattggaaatttcctgaggccttcccagaagcagaagtcactatgcttcctgtacagcctgcagaaccatgagccaattaagcctcttttctatataaattacccagtctcagtatttctttataccaatgggagaacagactaatacagtagccttgggttaaacaatggtttctaagctatgacacctaaagcaaatgaacataattttaaaaagacataaagaacttcatcagaaatcaagtattaaaattaaaaaacagacatattgaactcattacaaaaaagtattgtgtgactcaaagtacatggttaaaagtaaaaaggcaacaccaaagaatga

SEQ ID NO: 187404 - DNA, 616 bp, Homo sapiens
atacattttcatcgctgaaataaattggatctttgtccccaccaaatctcatgtcaaattgtaatctgcagtgtttgccatgggatctggtgggaggtgattggctcctgagggtgattttcatgaatggttttagcaccactggtgttgttctcctgatagtgggtgagttctcacaagatctggttgcttaaaagtgtgtagcactccagcccctctcttcatcctgctctggccgtgtgaagtgctggctccccctttgccttccaccatgattggaaatttcctgaggccttcccagaagcagaagtcactatgcttcctgtacagcctgcagaaccatgagccaattaagcctcttttctwtataaattacccagtctcagtatttctttataccaatgggagaacagactaatacagtagccttgggttaaacaatggtttctaagctatgacacctaaagcaaatgaacataattttaaaaagacataaagaacttcatcagaaatcaagtattaaaattaaaaaacagacatattgaactcattacaaaaaagtattgtgtgactcaaagtacatggttaaaagtaaaaaggcaacaccaaagaatga

SEQ ID NO: 187405 - DNA, 616 bp, Homo sapiens
atacattttcatcgctgaaataaattggatctttgtccccaccaaatctcatgtcaaattgtaatctgcagtgtttgccatgggatctggtgggaggtgattggctcctgagggtgattttcatgaatggttttagcaccactggtgttgttctcctgatagtgggtgagttctcacaagatctggttgcttaaaagtgtgtagcactccagcccctctcttcatcctgctctggccgtgtgaagtgctggctccccctttgccttccaccatgattggaaatttcctgaggccttcccagaagcagaagtcactatgcttcctgtacagcctgcagaaccatgagccaattaagcctcttttctatataaattacccagtctcagtatttctttataccaatgggagaacagactaatacagtagccttgggttaaacaatggtttctaagctatgacacctaaagcaaatgaacataattttaaaaagacataaagaacttcatcagaaatcaagtattaaaattaaaaarcagacatattgaactcattacaaaaaagtattgtgtgactcaaagtacatggttaaaagtaaaaaggcaacaccaaagaatga

SEQ ID NO: 187406 - DNA, 644 bp, Homo sapiens
gaatatcttagaataacaaaataatcttaactcttttgttctccctattagtgctgtcattcctttcacttatacatgagtacacatgcacatatacatgtatatttatatacatataacatatagacataagcatgcctaatcaaatagattggtgctactattattttccagaaaccattatctgtgagactaaattaagaatatgaaaaatraaagttttattccatagggcaaccattaaaatagtcaaaaaaaagttatataattgatatgctaagaatggagagaaaacagaattgcataaaattctcaattaaaaccacaaaacacagaaaataaatgaagtacaataaagggaagaaagaacaagggcaacaaatcaaaaagagtaacacatatggttgatattaatccaactccattggttgtcagtaatctaaaagcatcaatcaaagaactgagaatgtcagtgtagatcaataaagtcaacccaactaaatgatgttaagtaaaatctatgaaatataaagacatgtatacatttaaaggaaatagatgaaacaaaatagcctaggctaacacttatcaaataaaggaagagttgctgcatgaattacagagaagtcctcaagcaaggaaag

SEQ ID NO: 187407 - DNA, 644 bp, Homo sapiens
gaatatcttagaataacaaaataatcttaactcttttgttctccctattagtgctgtcattcctttcacttatacatgagtacacatgcacatatacatgtatatttatatacatataacatatagacataagcatgcctaatcaaatagattggtgctactattattttccagaaaccattatctgtgagactaaattaagaatatgaaaaatgaaagttttattccatagggcaaccattaaaatagtcaaaaaaaagttatataattgatatgctaagaatggagagaaaacagaattgcataaaattctcaattaaaaccacaaaacacagaaaataaatgaagtacaataaagggaagaaagaacaagggcaacaaatcaaaaagagtaacacatatggttgatattaatccaactccattggttgtcagtaatctaaaagcatcaatcaaagaactgagaatgtcagtgtagatcaataaagtcaacccaactaaatgatgttaagtaaaatctatgaaatataaagacatgtatacatttaaagkaaatagatgaaacaaaatagcctaggctaacacttatcaaataaaggaagagttgctgcatgaattacagagaagtcctcaagcaaggaaag

SEQ ID NO: 187408 - DNA, 644 bp, Homo sapiens
gaatatcttagaataacaaaataatcttaactcttttgttctccctattagtgctgtcattcctttcacttatacatgagtacacatgcacatatacatgtatatttatatacatataacatatagacataagcatgcctaatcaaatagattggtgctactattattttccagaaaccattatctgtgagactaaattaagaatatgaaaaatgaaagttttattccatagggcaaccattaaaatagtcaaaaaaaagttatataattgatatgctaagaatggagagaaaacagaattgcataaaattctcaattaaaaccacaaaacacagaaaataaatgaagtacaataaagggaagaaagaacaagggcaacaaatcaaaaagagtaacacatatggttgatattaatccaactccattggttgtcagtaatctaaaagcatcaatcaaagaactgagaatgtcagtgtagatcaataaagtcaacccaactaaatgatgttaagtaaaatctatgaaatataaagacatgtatacatttaaaggaaatagatgaaacaaaatagcctaggctaacacttatcaaataaaggaagagtygctgcatgaattacagagaagtcctcaagcaaggaaag

SEQ ID NO: 187409 - DNA, 602 bp, Homo sapiens
tttctctgtgactgccccctctcagtataaaattttgtcggctcatcatatgtattctggtctattattgcgaaaacatgcttatctatagtttcaaattagttgaacaacttatttacctgctacctcaggattagagagagagttattattgggctactagaattcctattttaaatgttgctatgaattgttttaattttatataacctgggtattcattttgtacatagttttgacattctcataccagaaatagggtttagaaatccgtgacagtttccagtttgtggcctcctccacattcctcaaggtggtcattgaacatagacccttataaaacctgctcaaggtgactactccatataagacagatgaataccacctttatctcmcctcactgtcccctgtgggaactgcacagatattcggcagtaaccacctctcagtcaaactctgactctgggaaatcatggttgcttcaccttaacccagcaatttgaactcctcatgagaaacctgcttgggtaacactccaaaacccaatgtgatgtttacttttaggagtcaactaactgtattaaggaacacctagaacactg

SEQ ID NO: 187410 - DNA, 430 bp, Homo sapiens
gaattctgactgccattctttgtgctaaatttcttcctgaggggctagagggaggcaaatccattagccaaagagctaacatttttttctgccaacccccaaattttaaaacaactcttcttttctttaaccaattacaaatcagaaaacccttgaatctatgtatgggctgtaagcmcctgcttcaaaatatcacgacttttcaggacaaaaccaatgtgtaacctccactactgatttataattttgccagtaacttctgctttcctgaaatttacccctgctttaaaaaaacccttacctgcaagccactggggaaggcggaacttaagcattagctgactcatccgccttgcttcacaatgtccagataaacacctccttttctcccactgcaaatgtcagtgtagatgtctagtcttactgcact

SEQ ID NO: 187411 - DNA, 429 bp, Homo sapiens
aaatttcttcctgaggggctagagggaggcaaatccattagccaaagagctaacatttttttctgccaacccccaaattttaaaacaactcttcttttctttaaccaattacaaatcagaaaacccttgaatctatgtatgggctgtaagcccctgcttcaaaatatcacgacttttcaggacaaaaccaatgtgtaacctccastactgatttataattttgccagtaacttctgctttcctgaaatttacccctgctttaaaaaaacccttacctgcaagccactggggaaggcggaacttaagcattagctgactcatccgccttgcttcacaatgtccagataaacacctccttttctcccactgcaaatgtcagtgtagatgtctagtcttactgcactgggtgagcagacctgagttgaattc

SEQ ID NO: 187412 - DNA, 631 bp, Homo sapiens
ctcctaaagtgctgggattacaggtgtaagccaccacgcccaacctgagatatttctttatctttggggagccaccactccagtgcaaactttcaaataatgccttgccatttttagtttccctccctaggattcctggaaccatagttcataaaattatctcacagcrtgtgttttatttttacttctgtttgctttaagtcctctctggatggtggctataacctatagccttgcccactacgactcagggtttggtactggctgtgcctttcatgggatgctttcttatcctggtcgatggcctaaagcccaactgtccagcttacatccaggtatccttctcacagagtacttgtttatactgtaagacaccctgtggctcctgtctgacctgtgtctagtttattctaccaaggaaaccgctctctaggagagtgctaagtgggagaaaagtgatgtccatgtgtgttcgtaaagtgaaatacagaggtggcaactcagcaaaatgtgtataatgacatgcgtaatgtattactaaccaatcccagtaagaagagggcagcattccttgaagtgctgatggacagagaagagctctccaggacatacactcataagcagcaggggt

SEQ ID NO: 187413 - DNA, 617 bp, Homo sapiens
ggagaggaggattactccacctcatcgtggaggactgctcttcagcttttattgaaaattttctacatcctctactaattattcctaaatgtacatataaattagccactcaacaagaatatttaaaattgccttccaggctggtcatggtggttcagcctgtaatctgcacactttgggaggctgaggcgggcggatcacttgaggccgggagttcgagaccagcctggccaatatggcaaaattccgacttcactaaaagtacaaaaattggccaggcatggtggcacatgcctgtaatcccagctactcaggaagctgaggcaggagaattgcttgcacccaggaggcagaggttgcagtgagcsgatatcgtgtcactgcattccagcctgggtgacagggtaagacagcctaaaaagtaaataaataaaaataaataaaataaaattgccttccaattatatttctggactttagcctctcaaactgttcaagaagaacaaatagaattccttcaaagaaaaactaacttctctgaggtctttcccatagactgatcaggaaaggtgacttctttaatgaaagtataatgtcatacagtgtagcccaagaaa

SEQ ID NO: 187414 - DNA, 482 bp, Homo sapiens
caggagttttatggaggtgccctctcaggatcaacacccgtgaggaagcaagggccacgtgattcggcagctgaagatgttgaactacaatgtggttgtagtagcagcttctgatgatcccacagggagtattgaagctagggttatcctttagagatatcctaaattgtgggaaagggcttggtgaccttgcattgaccagtcactggatacaagctgtcccccaaagaaaacagaaacttaggcagtttttgttgaccaagggcaatttctggagagagacacagctgtaatctgtgttgagagaaagaatctgtgttgagagaaggaatccctgagtcctgaagsgtaatctggaggtatatgacagcatcttccaccttgattctaaatttactatctgtacagcttggataaaaccctcatttagagtcagattatttttattccttccttccttcattatgagtatttgataaatc

SEQ ID NO: 187415 - DNA, 446 bp, Homo sapiens
caatgcatctactcttgactttttggtaaaataaaccaaagaaaacttactgattagaccaatcgtgaatcattgttataaatgtaaattattcacaggaaaatcattaccaacgtttctcccatcaaaaagcaggacataaaaartgtagcagagacaggggtgaatctaagcagatgtttagtgcacagagtttattttttgatctataccagcagaataaagctagcaaatgatcttagtatctcagtgacttaacacaacaaaggttatttgttactgatgctccatgtctaatgtgagttagcaaagattttctgtacatcataacctgtcaaagacccaagttggtggaggtatcctgttgattaacagtacttcagcttacattttgttgcaaagtaaataatatggccacactatcattaaattgggcagggaaatga

SEQ ID NO: 187416 - DNA, 595 bp, Homo sapiens
ccaggtatccagtaacaggtagtgagattgaatcagtaataaagtctcccaacaaagaaaagtcccaaactggatggctcccctactaaattctaccaaatgtataaagaactaacactaattttcttcaaactatttaaacaaattaaagggaagggaattctccctaactcattctatgaggccagcattatccttattccgaaaacagacaaggatgcaacaacaaaaaaacaaattacagacccaaatctctgatgaacatagacccaaaaatcctctaacaaaataccagcaaactgaatccaacagcatataaaacaataatacaacatggtcaaatgagatttatacaagggatacacggatggttcaacacatagaaatcaacaaatgtgatatatcatatcaatagaatgaacaactaaaccacaggaccatcttaatagatgtagaagaagcatttgataaaatttaacatcccttaygataaaaactctcagcaaactgagcataaaagaaacataccttaacataataaatgccacatacgacaaacccacagctaacatcatactgaatgtgaaaaagtcga

SEQ ID NO: 187417 - DNA, 414 bp, Homo sapiens
ctacatgtctcagtataaaatgttcgaaggaagtagctcatatttataaatgagttggtttgcctccccaagtctcctcatggtaagtaccatcaaaaacctcacaaatcatccatactacccastatcgtctttgtgacacaaaggaagccctgctccattcaaacattctctacatcctccataagccccatgggtttccaatctttatttttttcataaagtaaatgacttcccaggtaatagaggcagatagatagatacatacacattttattgtttgtgctgacaggttataaggagtagagagaagagtggagatggaaaggcggtgtggagaacatcagccttgttggattacacatatgaaaatgagggagagagaaatggggaacagggaaaataaaggaattc

SEQ ID NO: 187418 - DNA, 555 bp, Homo sapiens
tcaggagactgagatcacacaaagcacagatcttagaatttaatagcttttctcaagaatgaaatcagattctttctgaaaaatatctaaaagacatgccttattacataaggagagcatgcttcatgtgaagatgtggatatttttagagcatgtgttttgaattttatatttgtggtcctatttacctggatgagtcacatttaaaacgttcccaaatttcttgcctttaaaccctaagcttcttgtggctttgaggaacatttgctcagattactcacaacacaaatcttcctgtcattaaactactacactttgtactgagtggcatataatacatagaaattgtcagacaagctggattattcgtccccaaaggagcagttcttagtaaatgaattacaccaagaaattgctggggcctacaacattccttttttggtttstttttgggtttttgtttttgtttgtatcctctctaaaaggtggcttcaggctatgttagcaggagagtggagagaaaccaagtgaggcctagaggtctttgggtacagg

SEQ ID NO: 187419 - DNA, 498 bp, Homo sapiens
tccaaacatctaaagctcttaatgtttatgctaaatcgactctgcctatgcttcataaatgggaaaacaaagtctgaatgacagcatatctctttgtagcacagtttactgaatattttaagcctattgttgagatctactgctgagagaaaaaaagatttcacattgttgtggtgatctggaaccaaacccacaatatttttgaagtatgcccatgtactccttatcttctatctagttttgaaccaattggtkcaaaattgaaccaatcaggcagctggtgtccaacatatcagcttttttgatggtatagattaggttggtgaatgtgatttaggtgcaggaagaattaacttcctattctgcacccagaatcagacagacccacctgtcatagagccagctgggcaaccaccagccttctcatatggagcctcttattgcaaagcttacagcacagaattagaacagaatgcttgctttctgtgagcagtcgac

SEQ ID NO: 187420 - DNA, 585 bp, Homo sapiens
ggtagaggaattaccataaaaggctcagaattagcctacagaactgaggagaggctggatctccctggaagacttgacttcacacgacctgaacaaaatcccacttatgtatgccaggaataaagtgggggtggagggttggtaataattaagtaggcaaccaagtgtgtctttaataacgagtatggatraaaattcccagacagtgaagtgtctgtctcttacccttcccgtaccctttgtttctagggagaatgcctgattccttcaacttgtattcctgttccatattcttttcagctgcctttggccccttaactgtctcgactcctgcttacttaatgtctaatctattctaggccaattcatgcccttcccacccattcttcaccatcaacctcattcattcaggcaattacttacccacttgtctttctcttttcctgttaaatgaatacttgctatatggcagacactgaactaagccctggaaaaacaatgatgcataaggcacagtccctacctctaatagccaaaggttgattttaaatacttagtgcactccaatatatatacagaaatttg

SEQ ID NO: 187421 - DNA, 585 bp, Homo sapiens
ggtagaggaattaccataaaaggctcagaattagcctacagaactgaggagaggctggatctccctggaagacttgacttcacacgacctgaacaaaatcccacttatgtatgccaggaataaagtgggggtggagggttggtaataattaagtaggcaaccaagtgtgtctttaataacgagtatggatgaaaattcccagacagtgaagtgtctgtctcttacccttcccgtaccctttgtttctagggagaatgcctgattccttcaacttgtattcctgttccatattcttttcagctgcctttggccccttaactgtctcgactcctgcttacttaatgtctaatctattctaggccaattcatgcccttcccacccattcttcaccatcaacctcattcattcaggcaattacttacccacttgtctttctcttttcctgttaaaygaatacttgctatatggcagacactgaactaagccctggaaaaacaatgatgcataaggcacagtccctacctctaatagccaaaggttgattttaaatacttagtgcactccaatatatatacagaaatttg

SEQ ID NO: 187422 - DNA, 533 bp, Homo sapiens
ttagttttggaatataagctgcaggtgagaaagctttgtttctctttctcaggcagtgcctgacatagagtaggagcttaataaatattgaatgaaggggcagatgtagaatcgttagaatttggaaaaaggctggaatatttggtcctaagatgtactttgaatgatttaaatctgactgagaaaaccagtttgaggttggcagagtagaagaaggagggtattttaggccgagaatttggtaagacagagatgggattgtcagctgtatggtgaagrtggaggaatactagtctttcaggaacagagcaaatgtaatagagcagctgaaaataggcttggcgttggggattaaggtcagatatggcagtctggaatttacagagggatgtgatgaagcaggcattactagctttgaagtaacaggctgcggctggatttgaggaaaattgatctggcagtagaggtcaatatgagactagaaggggaaaagccaggggcaagaagatgagctaagaagcaattacagcatt

SEQ ID NO: 187423 - DNA, 566 bp, Homo sapiens
gcctcagagcctgcattatctcaagctactgacctaattgctaatgctttactctggtctatttcctgcmtgacctcagaatgtgtcagtgtaaattccatagtaagacagtagttgcacattttggagtgtggattctgctttgaaacacaaataagtgtgatgaacgtgaccctggcactctgtagccctcagtttcctcaacgctaaattgatcactacagttccttctagtgtaaacagtcccacgaagaatcgtgctgaatggatgactacataatggcctgctcctagagttcttaaatcaatccttaaaactggctgcaaaatgacttcactcctttaacagtgtgggacttgtctctgttctccagaatgctcaccagatggtgaagaagtatctctctacctaccaacatcgtcatattgcttcttgccactcgctactcaaaaactgtgaaaaacctgtgggagcaagtatcagctgaaaagggtggctttctccttaggcaaaagctacagggcaaaacgggggccccaaacttctatcacgtcaaagacatgaa

SEQ ID NO: 187424 - DNA, 566 bp, Homo sapiens
gcctcagagcctgcattatctcaagctactgacctaattgctaatgctttactctggtctatttcctgcatgacctcagaatgtgtcagtgtaaattccatagtaagacagtagttgcacattttggagtgtggattctgctttgaaacacaaataagtgtgatgaacgtgaccctggcactctgtagccctcagtttcctcaacgctaaattgatcactacagttccttctagtgtaaacagtcccacgaagaatcgtgctgaatggatgactacataatggcctgctcctagagttcttaaatcaatccttaaaactggctgcaaaatgacttcactcctttaacagtgtgggacttgtctctgttctccagaatgctcaccagatggtgaagaagtatctctctacctaccaacatcgtcatattgcttcttgccactcgctactcaaaaaytgtgaaaaacctgtgggagcaagtatcagctgaaaagggtggctttctccttaggcaaaagctacagggcaaaacgggggccccaaacttctatcacgtcaaagacatgaa

SEQ ID NO: 187425 - DNA, 566 bp, Homo sapiens
gcctcagagcctgcattatctcaagctactgacctaattgctaatgctttactctggtctatttcctgcatgacctcagaatgtgtcagtgtaaattccatagtaagacagtagttgcacattttggagtgtggattctgctttgaaacacaaataagtgtgatgaacgtgaccctggcactctgtagccctcagtttcctcaacgctaaattgatcactacagttccttctagtgtaaacagtcccacgaagaatcgtgctgaatggatgactacataatggcctgctcctagagttcttaaatcaatccttaaaactggctgcaaaatgacttcactcctttaacagtgtgggacttgtctctgttctccagaatgctcaccagatggtgaagaagtatctctctacctaccaacatcgtcatattgcttcttgccactcgctactcaaaaactgtgaaaaacctgtgggagcaagtatcagctgaaaagggtggctttctccttaggcaaaagctrcagggcaaaacgggggccccaaacttctatcacgtcaaagacatgaa

SEQ ID NO: 187426 - DNA, 435 bp, Homo sapiens
tttgaggtggttcttgaaatatgagcacaatgatggttttaccaggctgcaaaggtgacaaagtgcattccaggctgataaaagagggcatgcaaaatatggcaggtacaaaaatgtgtatttaaggaagaatgagaagtttctggaagttgctgaagatacagaaaataaagtggggggyggggggggcgggtggttggagatgaggaggagatggtaggcttgattcaaattatggaaatgtatttataatgcaccaacttgtaaagacactgttgttccctacccagcagccactagaatttgttcaggtgtcaggcggttggtgcttcaagggagatcaggcccctcccaggaccaggatgaaccatgattacttcccagccaatttcatagcatttctcttgccaatgaatggcttagatataagcatat

SEQ ID NO: 187427 - DNA, 373 bp, Homo sapiens
cttgagcacctttgttctggaaaaaataaaattaaaaaattattctgaccaaatgaaaatgawataggtcagaaacttgaatctacataaagaatgtaagagtgtcagataaaggaataaaggatggtacaataaatctttaatttttcttattcttaatggatctaaaagaaaactgcttaaggaaataaaggtaacaatatattgggtgattatagcagagcaatcagggaaatgaatgagagcaatatcagaagtaacaggatgaaagtactggaaataatatgtaataaggtaaatacactaaacttgaagtgatacaatgttatttgaaggtggactttggctaaagtgtgtattataaacacttaag

SEQ ID NO: 187428 - DNA, 373 bp, Homo sapiens
cttgagcacctttgttctggaaaaaataaaattaaaaaattattctgaccaaatgaaaatgatataggtcagaaacttgaatctacataaagaatgtaagagtgtcagataaaggaataaaggatggtacaataaatctttaatttttcttattcttaatggatctaaaagaaaactgcttaaggaaataaaggtaacaatatattgggtgattatagcagagcaatcagggaaatgaatgagarcaatatcagaagtaacaggatgaaagtactggaaataatatgtaataaggtaaatacactaaacttgaagtgatacaatgttatttgaaggtggactttggctaaagtgtgtattataaacacttaag

SEQ ID NO: 187429 - DNA, 477 bp, Homo sapiens
aaactttggatccagcatttatcagaccaggctgcattgacaggaagatcgaggtcctcctgcctgatgaaaagaatgagaagcacatcattcagattcacactagcaggatgagggtggccgatgatgtaaccctgcrtgacttgatcatggctaaagatgacctctctggtgatgacatcaaagcaatctgtacaaaagctggtctgaagtccttaagagaacttagaataaaagtaacaaatgaagacttcaaaaaatcgaaagaaaatgttctttataagaaacaggaaggggatctatttctagtgaaccacagctgccatcaggaaaatagttgggagatttcccgtcccctgagagggatgagtttgagggagtttcccaggggaatccctgttcccattgatttttcttagcaaaacatcctgtgtgtcttttggagtatgatgtgtaattgcccattgggagcctttg

SEQ ID NO: 187430 - DNA, 450 bp, Homo sapiens
ggatcatgcatgtttttggtgttactgaaaagtgacacagccattgtagaaattgatttggcattttcttataaagttaaatgtacacatatcatattacccagcaatctcactactagggctctatcttagagaaatgaaaagtgattttaaataaaaacctgcacaagagtgtttatcaaatttctatttataatttccctaagctgaaacaaccaaaatgccctttagcaaatgaattaatgaaaaaattctggtacatctaggaaataggatactactcagagaatgaaaatgaacgaatttatggttcacacaataacttggatgaatttcaggtgcattawgttaagtgaataaaaccagtcttcaaaggttccatgctatgtgactcaatatgcgtgacattttctaagagactgaactataaagatggagatcagatcattt

SEQ ID NO: 187431 - DNA, 431 bp, Homo sapiens
caaaggctgcaaagttaagaaaaagtaacaggaaactctccctaagttccaggcttgatagaactctcaygttagaatgaattagaagtcaactcatactcacccatgtaatgggcttgcataatttatgaatgacataaattgacacactaaagaactccattgaactcaagcaggagaaaagagagacaaaagagggaaagagagagagaaagagaggaagaaagagacagggaagaagaaggaaaggaagggaaaaaaaggaagaatattttacctagacacatcacagagaaactgccagataataaagacaaatagatgtagaaatgaaaacagtaaataaaaaataattttcatgaacattaacaaagtacagcaatatataaaaacaatactacatggttattgggcttactttcagaagtaca

SEQ ID NO: 187432 - DNA, 455 bp, Homo sapiens
caaaggctgcaaagttaagaaaaagtaacaggaaactctccctaagttccaggcttgatagaactctcatgttagaatgaattagaagtcaactcatactcacccatgtaatgggcttgcataatttatgaatgacataaattgacacactaaagaactccattgaactcaagcaggagaaaagagagacaaaagagggaaagagagagagaaagagaggaagaaagagacagggaagaagaaggaaaggaagggaaaaaaaggaagaatattttaccyagacacatcacagagaaactgccagataataaagacaaatagatgtagaaatgaaaacagtaaataaaaaataattttcatgaacattaacaaagtacagcaatatataaaaacaatactacatggttattgggcttactttcagaagtacaaatggtatacatcgttaacagata

SEQ ID NO: 187433 - DNA, 455 bp, Homo sapiens
caaaggctgcaaagttaagaaaaagtaacaggaaactctccctaagttccaggcttgatagaactctcatgttagaatgaattagaagtcaactcatactcacccatgtaatgggcttgcataatttatgaatgacataaattgacacactaaagaactccattgaactcaagcaggagaaaagagagacaaaagagggaaagagagagagaaagagaggaagaaagagacagggaagaagaaggaaaggaagggaaaaaaaggaagaatattttacctagacacatcacagagaaactgccagataataaagacaaatagatgtagaaatgaaracagtaaataaaaaataattttcatgaacattaacaaagtacagcaatatataaaaacaatactacatggttattgggcttactttcagaagtacaaatggtatacatcgttaacagata

SEQ ID NO: 187434 - DNA, 596 bp, Homo sapiens
gtttcactaatacctggatcatcttatagatacaattttgacaaaagcaatagttgttaagtacagcatcagacttaaaaaatcacgatataggaagtcagcttaaaaatctatcaggatataatgcttaaaatttttgctaacttgcttctctcactcaaacaggttataatgttcaaggctaaagtgtgatctattgctgagttagtaatgacagtaaagtttgccaacacaatcactgcactacattatctaagtcattgctctgtaaagtgctttgggataccttgagtatgaagggctatatatcaaagatattatattttactctatatggtacttgggttttggcaatgcatattcaacaagctgaataaaaagacctctagttgtactttattagtatttgtatgcattcaccacaggtaagtgtcggctcaacttgaactaaaggaaagaaattatgtttgagagagagaggaaggatcttcatcctgaaggtgtaaacttcaactaaatatgtattcctctascatccctgaccttagaattagcctacctctcccttgtcacttagaaaccaaaatgagtttcct

SEQ ID NO: 187435 - DNA, 584 bp, Homo sapiens
acttgccttgcctcagatgggggtttggctgtggactttagagttaatgctaaaatgagttaagactttgtgggactgttgggaaggcatgatttgtttcgaaatgtgaggacatgagatttgaaagggtccaggatggaatgatatgttttggctgtgtccccactcaaatcttaccttgaattgtaactcccacaattctcatgtgtaatgggaagaacycagtgggaggtaattgaatcatggactgggtctttatcgtgctgttctcttgatagtgaataagtctcatgagatctgatggttttaaaaatgggagtttccctgcacaagttctctttcttgctgccaccatggaagaagtgcctttagccttcctctatgatggtgaggcctccccatccaggttaaacggtaagtccattaaaactctttcttttgtaaattgcccagtcttagatatgtctttatcagcaatgtgaaaatggactaatacaatgaccaacttggctttattccaggatgcaagactagttcaatattcaaaaatcaatcaatgaaattcaccatataatcagtttgaa

SEQ ID NO: 187436 - DNA, 584 bp, Homo sapiens
acttgccttgcctcagatgggggtttggctgtggactttagagttaatgctaaaatgagttaagactttgtgggactgttgggaaggcatgatttgtttcgaaatgtgaggacatgagatttgaaagggtccaggatggaatgatatgttttggctgtgtccccactcaaatcttaccttgaattgtaactcccacaattctcatgtgtaatgggaagaacccagtgggaggtaattgaatcatggrctgggtctttatcgtgctgttctcttgatagtgaataagtctcatgagatctgatggttttaaaaatgggagtttccctgcacaagttctctttcttgctgccaccatggaagaagtgcctttagccttcctctatgatggtgaggcctccccatccaggttaaacggtaagtccattaaaactctttcttttgtaaattgcccagtcttagatatgtctttatcagcaatgtgaaaatggactaatacaatgaccaacttggctttattccaggatgcaagactagttcaatattcaaaaatcaatcaatgaaattcaccatataatcagtttgaa

SEQ ID NO: 187437 - DNA, 574 bp, Homo sapiens
tgaagctttatattaaaccagaaggaaatacagcgaaacatgtaaccgatatcagatgggactggacaatgagagaaacagtcaaaaaactcgagagtttggccgggcatggtggctcacgcctgtaatcccagcactttgagaggctgagctgggcggatcacctgaggtcgggagttcgagaccagcctgaccaacatgcagaaagcccgtctctactaaaaatacaaaattagctgggcgtggtggcgaatgcctgtaatcccagctactcaggaggctgaggcaggagaattgcttgaacccgggaggtggaggttgcggtgagccgagatcgcaccattgcactccagcctgggcaacaagagcgaaactccatctcaaaataaacaaactccagagtttaaagttttaaaattgtactagaaaaaaaatgataaaaactgaaaggcaagtgacaaagtgagaaaaatttttgcaacaaacgtaacraaggattgtttttcttaagatagtaaaaatgtcttgcaaatcagtaagaaaagcaagaaaattccctgatttcccctccaca

SEQ ID NO: 187438 - DNA, 517 bp, Homo sapiens
aactttttaagaaaatgatacgtcacaggtgctgcgtacttctcatttcatcacctcaggaagtacaccatcaggttatcaatcttaggctgtgactgatcactgagttcaggcattgccagcccaatcctcctgataaagtcccctgataaggtttggctcccggtccccacccaaatctcatctcgaaatatacttccatgtgtcaagggagagaggtgattggatcatgggggtagtttcccccamgctgttctcatgatagtgagttttcacaagacgtgatggttttacaaggggctccttccccttcacttctctttctcctgccgccatgtaagatgtgcctgcttccccttctgccatgattgttaagtttcctgaggcctccccagtcatgcaaaactgtgagtcaattaaacctccttcctttataaattacgaggtctcgagtagtatctttatagcagtgtaaaaatggactaatacatcctccaattttcacccaatgattccg

SEQ ID NO: 187439 - DNA, 301 bp, Homo sapiens
tggaacaatttaagcaacaaaataaataatgttgtgtggtcttataacgcaaagaataaattaaatatccttgagtctacagtgatataaatgattgaataaataaatggagagaagagataaaacttccttacagaattccaaataatatatgtaaatacttycctcttcccgggggtgaagctaacttcccctccccttgatatgggctagacttaaacaataactttataatggagaaatctggcagatttcccttccctcaaccaagtgatcaaggttcatgtcacaggaatacctc

SEQ ID NO: 187440 - DNA, 501 bp, Homo sapiens
ttccttctgcctctgctctctgccctctaggaggctggcccctgccctggaggtttggtcattggaaggccccagtagatcagagagcaggagagagcagttgagtatttattctgtgagctccctccctttcaagccatggctttgcagaggctgttccccttaaccaagggccacaggtgctgtggagcagccctcttctatagctccaagttccccaggkttcccagttagggatggtaatggcctcccactgtcaatacccgcagagtgctgcttcggcctcccctgctggcccctctgatctccactttgtgaagtggctctacattcaggctgtcttgagtcaccctctctgaggatgccatctattcttccaggaccctaatggacacaagtaagtcattttctttttcgccttttagaatgagttgcagacagtatttccatcttaattcagccgccccaattccctgattaatcttgtgggccaccttaaat

SEQ ID NO: 187441 - DNA, 614 bp, Homo sapiens
aggatttttgatccagtggggaggccagtgggtgcttgttctctaggggtttatgtacattgataaatttgggtttatcggtagcagtgtcgaaatctgtgtttctctgtatatactgtgcttayaaaatgtcagctttacaagttacttcaaatcctaaaagttgcccacaacagcctcatgagatgtacagacagaggttactgacattgttttacagggggagaaatgtcacagaggcggaagagcacgcagggccaggcctgagctcccttaggtttgcagcctgcctgggaagaagggagtgaaagggacgaatgtctgcgaaccctgtgtgtgggtttggcactcagtctgggacagtgcgggtgtgcccaggtcaggccacctactcccaggtccctgtttctctgcccactttcatcagcttcctggggaatgttctcacggggagtgttctcagaggatgtctctggcctggttggggagtctggggagtaccccaagtcctcgggacctggaatggtgaggtgcatgtagcctgggggtagtcacgccttgcttggtgcttttggagggcggagtctggaagaggaaaatgctgagggctggag

SEQ ID NO: 187442 - DNA, 595 bp, Homo sapiens
aagctttgagtagtgtctgraaaatagaaaatactttgtaattgtttcctagtggcagaggacctaaaattcagattgtgtttgctaagaaggttcaagtgtcatggttaagaacaacaactctggagctagacagtgttgattcaaattccccacttccttccttatgagctgtgtgatcttagggaagttacttaacctctcttaatcccagtttccccttgtataaaatgaacctaaatataatacctactttaaagagttgttatgagggatttactcagttattacattatcacattatgacaatgcccataatgtataattacaatgctcataacatataataaatattaagtaaatgttacctgttttcactatatagtactatcattagtactgtcattatgaacaattcataatccttcagctctcacccaaattcatcttttctaggggcagccgcagctgaccagatcaactcttctatctgctccctctttctatcgtgcttgtaattttctgtctatgatattttataaatgtctctctcatgaagctccatgaaggcaggcagctggatctggtctatgct

SEQ ID NO: 187443 - DNA, 595 bp, Homo sapiens
aagctttgagtagtgtctgaaaaatagaaaatactttgtaattgtttcctagtggcagaggacctaaaattcagattgtgtttgctaagaaggttcaagtgtcatggttaagaacaacaactctggagctagacagtgttgattcaaattccccacttccttccttakgagctgtgtgatcttagggaagttacttaacctctcttaatcccagtttccccttgtataaaatgaacctaaatataatacctactttaaagagttgttatgagggatttactcagttattacattatcacattatgacaatgcccataatgtataattacaatgctcataacatataataaatattaagtaaatgttacctgttttcactatatagtactatcattagtactgtcattatgaacaattcataatccttcagctctcacccaaattcatcttttctaggggcagccgcagctgaccagatcaactcttctatctgctccctctttctatcgtgcttgtaattttctgtctatgatattttataaatgtctctctcatgaagctccatgaaggcaggcagctggatctggtctatgct

SEQ ID NO: 187444 - DNA, 595 bp, Homo sapiens
aagctttgagtagtgtctgaaaaatagaaaatactttgtaattgtttcctagtggcagaggacctaaaattcagattgtgtttgctaagaaggttcaagtgtcatggttaagaacaacaactctggagctagacagtgttgattcaaattccccacttccttccttatgagctgtgtgatcttagggaagttacttaacctctcttaatcccagtttccccttktataaaatgaacctaaatataatacctactttaaagagttgttatgagggatttactcagttattacattatcacattatgacaatgcccataatgtataattacaatgctcataacatataataaatattaagtaaatgttacctgttttcactatatagtactatcattagtactgtcattatgaacaattcataatccttcagctctcacccaaattcatcttttctaggggcagccgcagctgaccagatcaactcttctatctgctccctctttctatcgtgcttgtaattttctgtctatgatattttataaatgtctctctcatgaagctccatgaaggcaggcagctggatctggtctatgct

SEQ ID NO: 187445 - DNA, 569 bp, Homo sapiens
cttaggctccaatttattttaatagaatttctattatgcactaagtccttgttccaraaaacaaaatgtaagttaaaatacaaaagaagattgatggaggggggaggaaattggccatatctaatgggaaaggaataaatatagagagaacagctgaatcttactgacctccaaagatatctatctccactggagacaccacaccccaaataaatggggtatgatcccctatcctctaagaatgtacttttctgagattttcttttatttgcctccttttcaatgtggtaaaattcggcttatgctgtaaatttttcattctgctcccagacacagatattgtaagcagccatccatgcagttgcccaagtgatccttgcttccactctgtccccactgctaacaactccattgccaataaggtttagttctgcgatttttaaatttttcatttttcctctatcattctttcctagcccatgctctgtgcatccctcttagcactgttcttgttttcagtcttgctccctcaaattcattcccaaatacaaatttgcttataccactct

SEQ ID NO: 187446 - DNA, 433 bp, Homo sapiens
tctcatcattcctcttgtctgtaactctgcattgaggcaggtgattcccatatctgccactccagttctacttctcctctgagttatttatggaatgtcttccctgctctgggatatctccacttggacatctcatgagcaccccaatttcaacttctaacaaaasaaacatatcttctacctcatgaattaaacacacataaaataagatcaacataatataaacgcaggattctgtcctactgtagtcgccattggctgtcaccaaattctaatagttactgagatgcaagaatattgaaggcacgtttcactccccaccttcccagctctacttttttggttcctaactgagcgggcccctcctgtccatcacagcattcctggattaagctgcctaaaacacagctgcaatcacaccattctcctactt

SEQ ID NO: 187447 - DNA, 429 bp, Homo sapiens
ggagaaggagaacagagctctttagytgttttgaaaatgtctatttgctttttttttttttttttttttttgagacagagtctcactctgttgctcaggctggagttacagtggcgagatctcggctcacagcaacctccgcctcccgggttcaaacgattctcctgtctcagcctcccaagtagctgggattacaagcacctgccaccacgcctggctaatttttgtatttttagtagagatggggtttcgccatgttggtcaggctggtctcaaacccctgacctcaggtgatctgcctgcctcgacctcccaaaatgatgggaattacaggtgtgagccactgtgcccagccaaaatgtcttgattcttactctgccactgttgcttctggtccccagcccctgacatgaccccctcaaaagctta

SEQ ID NO: 187448 - DNA, 429 bp, Homo sapiens
ggagaaggagaacagagctctttagctgttttgaaaatgtctatttgctttttttttttttttttttttttgagacagagtctcactctgttgctcaggctggagttacagtggcgagatctcggctcacagcaacctccgcctcccgggttcaaacgattctcctgtctcagcctcccaagtagctgggattacaagcacctgccaccacgcctggctaatttttgtatttttagtagagatggggtttcgccatgttggtcaggctggtctcaaacccctgacctcaggtgatctgcctgcctygacctcccaaaatgatgggaattacaggtgtgagccactgtgcccagccaaaatgtcttgattcttactctgccactgttgcttctggtccccagcccctgacatgaccccctcaaaagctta

SEQ ID NO: 187449 - DNA, 429 bp, Homo sapiens
ggagaaggagaacagagctctttagctgttttgaaaatgtctatttgctttttttttttttttttttttttgagacagagtctcactctgttgctcaggctggagttacagtggcgagatctcggctcacagcaacctccgcctcccgggttcaaacgattctcctgtctcagcctcccaagtagctgggattacaagcacctgccaccacgcctggctaatttttgtatttttagtagagatggggtttcgccatgttggtcaggctggtctcaaacccctgacctcaggtgatctgcctgcctcgrcctcccaaaatgatgggaattacaggtgtgagccactgtgcccagccaaaatgtcttgattcttactctgccactgttgcttctggtccccagcccctgacatgaccccctcaaaagctta

SEQ ID NO: 187450 - DNA, 447 bp, Homo sapiens
aatgcatttcctgatctagctaatttgaaactctatgaagaagacagcccctcaatttgaacagccttaggttttgataatttatcatactgtagatcttactcttttgtaacatcaggtagaaacaaatctttttcaatttccccagcwctagcaacaagcatttaaaccccagaggtctccaaaatagatataaaatgtattccacacagccagaaaggcatcaggattttcagaaatttttcttaaggctctttgaacatctgaaagtcctctaccatcatatctctgttagacatgtgagtccatttgctgggtttcaattaacattttaggtcacattttctatttcatctttctcctctgttaaacaattgatctccctacttagcatttcctattaaaacgtgaattgcgatattttgattactttttaatatttctctt

SEQ ID NO: 187451 - DNA, 460 bp, Homo sapiens
aatgcatttcctgatctagctaatttgaaactctatgaagaagacagcccctcaatttgaacagccttaggttttgataatttatcatactgtagatcttactcttttgtaacatcaggtagaaacaaatctttttcaatttccccagctctagcaacaagcatttaaaccccagaggtctccaaaatagatayaaaatgtattccacacagccagaaaggcatcaggattttcagaaatttttcttaaggctctttgaacatctgaaagtcctctaccatcatatctctgttagacatgtgagtccatttgctgggtttcaattaacattttaggtcacattttctatttcatctttctcctctgttaaacaattgatctccctacttagcatttcctattaaaacgtgaattgcgatattttgattactttttaatatttctcttttttaaaaatttt

SEQ ID NO: 187452 - DNA, 597 bp, Homo sapiens
aattagaaacaattttaacttggacctatagctaatgaaaaaaattgtggtgttggttgttctgtattagatataactaaaacacactattttaattaagtggttcaagttatcttcctttattgggcagggaagctgcagaataatattgcttcagactcaaatttgtgaaaattgagtacaaaaataatcaggctgtgaaataagaatcataatagtgcagagcttttaagactgtaattaagtataaaataattattgcaaattacttagcatagtacttagtataaaacatgtactttataaatttagctatttttattattagttattattgatttacctattagtgaaatgaggataatatctatctctcagtggtttcagtaggattagtgatatatatmatacgcttctcctgcatctatttaaattattacatggttttttcacctttaatctgttaatatggtgtattacattaatagatttgcaaattttagcccttctttcatggtataaattcagtttaggttatgttccattattctttaatataccggtagattcaatttgattatattttgtttagagtct

SEQ ID NO: 187453 - DNA, 572 bp, Homo sapiens
taataaatggatcaatgtaagaaattgtatattgtacactgaaaaaatggtaagatttttttaaaatacatattatttcttgagggttatagaggagattctagacaagaactaactagtcccatagcctgccactcataagtaccttaaaattgaatgtattaacaacgaagtgttttaagagcaaaaggtacacggtatattttatgccaaaatcttagaaaatgagactttgtttygggttcaaaagtgtattttctcattctttcaggaacttttttatctttctagaacaaaaaatgatctgatcctcttggtattacaaacgggactatcacagtcaaggtggaataaaacattacaaaaacatcatagtagaaagaatggccagtgttttgaatatctggattcaatttaagtgataagttaaatagtaaattataaattttatttaaataacaaattaaatggggagaaaggattaaccaaattaataggcaatgactaacataaacataggtaaggcaatgcagaaaaagcctcaagctaaaagtgtatccatgagttttaca

SEQ ID NO: 187454 - DNA, 572 bp, Homo sapiens
taataaatggatcaatgtaagaaattgtatattgtacactgaaaaaatggtaagatttttttaaaatacatattatttcttgagggttatagaggagattctagacaagaactaactagtcccatagcctgccactcataagtaccttaaaattgaatgtattaacaacgaagtgttttaagagcaaaaggtacacggtatattttatgccaaaatcttagaaaatgagactttgttttgggttcaaaagtgtattttctcaytctttcaggaacttttttatctttctagaacaaaaaatgatctgatcctcttggtattacaaacgggactatcacagtcaaggtggaataaaacattacaaaaacatcatagtagaaagaatggccagtgttttgaatatctggattcaatttaagtgataagttaaatagtaaattataaattttatttaaataacaaattaaatggggagaaaggattaaccaaattaataggcaatgactaacataaacataggtaaggcaatgcagaaaaagcctcaagctaaaagtgtatccatgagttttaca

SEQ ID NO: 187455 - DNA, 572 bp, Homo sapiens
taataaatggatcaatgtaagaaattgtatattgtacactgaaaaaatggtaagatttttttaaaatacatattatttcttgagggttatagaggagattctagacaagaactaactagtcccatagcctgccactcataagtaccttaaaattgaatgtattaacaacgaagtgttttaagagcaaaaggtacacggtatattttatgccaaaatcttagaaaatgagactttgttttgggttcaaaagtgtattttctcattctttcaggaacttttttatctttctagaacaaaaaatgatctgatcctcttggtattacaaacgggactatcacagtcaaggtggaataaaacattacaaaaacatcatagtagaaagaatggccagtgttttgaatatctggattcaatttaartgataagttaaatagtaaattataaattttatttaaataacaaattaaatggggagaaaggattaaccaaattaataggcaatgactaacataaacataggtaaggcaatgcagaaaaagcctcaagctaaaagtgtatccatgagttttaca

SEQ ID NO: 187456 - DNA, 577 bp, Homo sapiens
taataaatggatcaatgtaagaaattgtatattgtacactgaaaaaatggtaagatttttttaaaatacatattatttcttgagggttatagaggagattctagacaagaactaactagtcccatagcctgccactcataagtaccttaaaattgaatgtattaacaacgaagtgttttaagagcaaaaggtacacggtatattttatgccaaaatcttagaaaatgagactttgttttgggttcaaaagtgtattttctcattctttcaggaacttttttatctttctagaacaaaaaatgatctgatcctcttggtattacaaacgggactatcacagtcaaggtggaataaaacattacaaaaacatcatagtagaaagaatggccagtgttttgaatatctggattcaatttaagtgataagttaaatagtaaattataaattttatttaaataacaaattaaatggggagaaaggattaaccaaattaataggcaatgactaacmtaaacataggtaaggcaatgcagaaaaagcctcaagctaaaagtgtatccatgagttttacaagctg

SEQ ID NO: 187457 - DNA, 544 bp, Homo sapiens
gaaagaaaaaaaaacatactggttagcaaaaataccattcccagaaaaattattctataaaaatgaaggaragataaaatctttccttgagaaaaaaaatgagagaatttatcaccattagacctgccatataagaaatactaatgagtattcttaattaaaatgaaaacacatatatacaaccaatgaagactaaatctgaaaattataaagaactgatgaatggaattaaagaagaaacagataaatgaaaagacatcctttgaccttggatgggaagaatttatattgtgaaaatgcacatattttccaaagaattctacagattcagtgcaatccctatcaaaatctcagtggcattctttacagaaatagaaaagcattttaaaattcatatgaatctaccaaagaccccaaagctatcctgagcaagaacaaagctggaggcatcacacttcctgatttcaaaatatactacaaagctatagtaattaagacagtatattactgacataaaacagacatatataccaatggaacagaa

SEQ ID NO: 187458 - DNA, 544 bp, Homo sapiens
gaaagaaaaaaaaacatactggttagcaaaaataccattcccagaaaaattattctataaaaatgaaggaaagataaaatctttccttgagaaaaaaaatgagagaatttatcaccattagacctgccatataagaaatactaatgagtattcttaattaaaatgaaaacacatatatacaaccaatgaagactaaatctgaaaattataaagaactgatgaatggaattaaagaagaaacagataaatgaaaagacatcctttgaccttggatgggaagaatttatattgtgaaaatgcacatattttccaaagarttctacagattcagtgcaatccctatcaaaatctcagtggcattctttacagaaatagaaaagcattttaaaattcatatgaatctaccaaagaccccaaagctatcctgagcaagaacaaagctggaggcatcacacttcctgatttcaaaatatactacaaagctatagtaattaagacagtatattactgacataaaacagacatatataccaatggaacagaa

SEQ ID NO: 187459 - DNA, 527 bp, Homo sapiens
ccatttacatagtagggggagtgaattaggatgcggatatcttgtacattttaaccaatttgtaagattgtatctaaagtcaacattggatttcagttttcagtccaaagcctcattggccatgttcacttttcgtggaaaactaagatactgtaagttctgtggcaaaccttggtaacaggaatgaactttgatactgtactagttttaatttctaagcatttggatattcccctccctacttatataatactcaggatggatcctggcaatttaattaaaataagtatttattgcacacctactgcttgtcagtcttctgttcaaaagcttcccactgcacttagaatacaatctacccgctaccccaccttgcttctccaacctcatctttcacatggttgtgtcacaggcatcaaagtacagagtggtttcccactaagacttttaacatgggctgcaccctctgtatcrtgttcttccctcattctttatttgactagtcatccctgtaaattctacttaag

SEQ ID NO: 187460 - DNA, 624 bp, Homo sapiens
tgaattcttctgctcataggtaccaaatgcaattgtaatctgctctgccagagagacacataaaagttatctgcagaaaagagaaagatttgagagaaagggtataaatgcttttagtaaacaatttaacaattacaagaatatttttaaacataccaaatgcggaggttcatttatcccaagtggttcctgaaaaacatattaaaacattttcaaaattgtaatcacataatcttagttgtctttttgaaagttttgaaaataccctttgaaaaaaatttttttttcttttcttttttgagacagagtattcctctgttatccaggctggggtacagtggcacagtctcagctcactgcacccttgatcttcagggctcaagcgatcctcccaactcagcctcccaagtagctgggactacagtcatgtgccaccatgcccagttaattttgcttaattttgtaaaracgaggtctcactgtgttgctcaggctggtgtcgaactactaggctttagggatgttttaccttggcctcccaaagtgctaggattgcacccctgtgccactgcacccagcttgaaaaatttttttcatggtttgacctatttatgagactctttg

SEQ ID NO: 187461 - DNA, 509 bp, Homo sapiens
aaacactcttgcagaaaataagtttctataatcaactgtactgatcctagaaytgagagtaacagcaaatccttcaaataatctaaccaataataaaatgtagctcggtctttcctacaacaaactaaatatcaatatattaaaaagaaaactgttataattttttctcagtgactttgtgaaatctcttttctacacttggccccatcattgaccaaaaatagcgttatgattcagcaggggattgaaaggaaggaacaactgacaatgttgttttgacaatgctgaacttcatctgatcctgtgtgttcctggaaagtatcaaaggtctggaaatccccgccacattttgtattctgagaaatgaccactccactctcacatattccaagatcagacccacctctatccttccccagtgaatgtgactcgcttgcatacctgactctttgaagcccttgacctccttccttttctttgagatgtttatcattaataaatgccctttc

SEQ ID NO: 187462 - DNA, 495 bp, Homo sapiens
cttttctagaaccctctgtgattcagaacggaggatcaaaaccaatgttattggtttaaaaagcagaaaatttttgtctcttcacctggtgaaaaagtaattcaaatcattttgatttactttatggtgaaataaaaggaattacactgaaagtaatacaccatttaatttatttctcttaattcaatcccagcaatcaaaataggtatcggaatatttcatatttcctgccaagggcttttctttaaattgaatcttgttcagaaaatactcaaaacaaaagcatgcacactgccratctgcaaaatgaacactgatcataggaggttttcctacttaacaaaaatttatttaatacccacttgacctggtttacttggttcgaccaaagatattaaggattactatgggataaatacatttcattcagttttttcactcaatacaatatctggaagcatctccagttgtttataaattgagagtccacatccc

SEQ ID NO: 187463 - DNA, 568 bp, Homo sapiens
tttttctttgatcaaagcaaaatggagtacctttaaactttcttctacaaaattactaatcagatgtgtttttcattcatggaactctacaccaacgccccaagcatcatcctaagccttttttttttttttttttaatcattttattgcccttttccacccagtatgattactcctaaatatagaaggctttggtttcagcccccacaaaacacttaaacttccttaggcatgatattcaatctttttcatcttaaaaggtcttcttgtaatcactgttaagcaatcaagccattaccaaaccaaggctactgaaaaacttaaagagaagacaatagaaacccattcaccatgttttgagatagatatttaggcctattattagtcatgtaatttttccagatatatatctctgagaagagcctgatgaaaaccctgggttttagttcactttcctaattctaggccacctaatttgttattatttttcccagatgcttacrtagagctgtcttagtatgattaaattaaatttccctatattaaattacctgatgattttagaatt

SEQ ID NO: 187464 - DNA, 480 bp, Homo sapiens
ttagggtgattattaagtacctgaacagattataagttctttttgggaaaaattaaaaatgtttgtattcagtttagatgagtatagaagacagattgttttaaaaatcacacaagagtatataaaacctgtcacctagaaatctgacaactaatggaaaattttaaaaagaaataaatcccttagaatcttcaatagtgagttatcttcaatacagcattcatcaaaagtttgctaaacacagccttttgaaaagaaggagcccaagggaaaaattaaatggctgttrctaatttagttttggtgtggttaagttctagccctgtattttaagatcaccagaactgcactcttgctagaccagtttaactttggaaaaccgtagaaatgctgtgtgacattataatttactgtcatgtcttctaatgtaataagcatttcataatcaacacttatcaaaggtttctagtgtgccaggca

SEQ ID NO: 187465 - DNA, 480 bp, Homo sapiens
ttagggtgattattaagtacctgaacagattataagttctttttgggaaaaattaaaaatgtttgtattcagtttagatgagtatagaagacagattgttttaaaaatcacacaagagtatataaaacctgtcacctagaaatctgacaactaatggaaaattttaaaaagaaataaatcccttagaatcttcaatagtgagttatcttcaatacagcattcatcaaaagtttgctaaacacagccttttgaaaagaaggagcccaagggaaaaattaaatggctgttactaatttagttttggtgtggttaagttctagccctgtattttaagatcaccagaactgcactcttgctagaccagtttaactttggaaaaccgkagaaatgctgtgtgacattataatttactgtcatgtcttctaatgtaataagcatttcataatcaacacttatcaaaggtttctagtgtgccaggca

SEQ ID NO: 187466 - DNA, 381 bp, Homo sapiens
ggtacaaaatatctgcgtagtagttgtagaacctattatataaactttgggaaaatttggytggggaaacacagttgagaacggtcgtaaggaagatacataagagaagtagtgaagaaaagtaaaaaaagataaagaaatagtctcagaagaaaaaaagagacatatttctaaacctgcttcatctcaaggcttctgaaatcttaaattatgattcaataagtgtgaaaaatgctctgcaaaacaaaaaattaaactcaccatgatttcatctgatgctgatcacctaatacagtgatcacctaatacagcgattctctggcctcagcctcccgaggagctctcaaattgtgattctcagaccagcagcatcacctagga

SEQ ID NO: 187467 - DNA, 489 bp, Homo sapiens
  misc_feature (1)...(489): n = A,T,C or G
tgaagtccaggagcttgtcatctaaatcaggttcaggtgaagatgagatgccttggtgtggttcatttgggtgcagctccttaaatatcactccttttgattagagctctgttaaagagacaatctgcacccccccccccgcccacacacacacccaacgcacagtgataagaggcataagatgatccctataggaaaatcctactcgaaagggaggaagaggcaagcacactgcaataatctagaaaaattctgaaatgcagtttggtatatgcttccagttccttatcaagattcagtcctactgtctgggagttctctgtgaatttcaaattccaaaacacatctggcttaagggtgcagyaaaggattgtgaagctgcactcagagactataagaaaaagatgtgataaacactcccattgcctatcaatgactgagctcttcagaggatgctgtcgttgcttctgcttccaagcnnnnnnnnnn

SEQ ID NO: 187468 - DNA, 529 bp, Homo sapiens
acagataaagagtcactggatcgtttatctaagtaaacctatgcatggcatggcattatatttcatttaatctaaaaatgtatttatctgatggctgaataggaacagctccagtctacagctcccagcatgagtgacgcagaagacaggtgatttctgcatttccaactgaggtaccagaaccatctcactggggcttgtcagacagtcagtgcaggacagtgggcgcagcccacggakcatgagccgaggtagggcggggcatcgcctcacctgggaaatgcaaggggtaagggaattccctttcctagccaagagaagctgtgacagacggcacctgcaaaatcaggtgactcccaccctaatactatgcttttccaatggtcttagcaaatggcacaccaggcgatgatatcccgcgccttgctcagaggttcccacacccacagagcctcactcattgctagcacagcagtctgagatggaactgcaaggtggcagcgaggctgggggaggggttcctgacatt

SEQ ID NO: 187469 - DNA, 468 bp, Homo sapiens
ctaacagaaatttccgaatgtcagtggaccagtacctgatgtatttctccattttgcgtttctgaatgtggttatcccgcctgtgatctgccactgtgtattttctgtgtatgwtagtggagaggtggtaggcttatgctttatcattttagttcatgatgcactggacccaaaggagccacatttagacatatgaaaaaattacatcacctgatgttttgtaatgttctaaatattcctcacttgctcactctagattgactcgcctcccttctccactctgaggaggtgccataaaatcacagagattctctgcttgggcctgcagtttacccagcattcctttgaaatctaggtggggacagccatcctcccacagcttttcagggcacactgaccagccctatcagagccacttccgggacagctgaggagcactgagactgaggcaggcaacagagcctgaga

SEQ ID NO: 187470 - DNA, 468 bp, Homo sapiens
ctaacagaaatttccgaatgtcagtggaccagtacctgatgtatttctccattttgcgtttctgaatgtggttatcccgcctgtgatctgccactgtgtattttctgtgtatgatagtggagaggtggtaggcttatgctttatcattttagttcatgatgcactggacccaaaggagccacatttagacatatgaaaaaattacatcacctgatgttttgtaatgttctaaatattcctcacttgctcactmtagattgactcgcctcccttctccactctgaggaggtgccataaaatcacagagattctctgcttgggcctgcagtttacccagcattcctttgaaatctaggtggggacagccatcctcccacagcttttcagggcacactgaccagccctatcagagccacttccgggacagctgaggagcactgagactgaggcaggcaacagagcctgaga

SEQ ID NO: 187471 - DNA, 259 bp, Homo sapiens
gccaggtggaggtcgttggggggggtgttaagtgaaaatgctataaactgcatgatgtttacaggcagttgcagttttcctgaccagcctgttgccactggaccctctcccctatatgttagcatctgataaagccgcatgtctcgtttactagctctgggtctcttctttggyctcttgagcctggtggcttccctattgaggttaggggtttgatacaatatcacccttcaggttaggatatgaatgagaattcaga

SEQ ID NO: 187472 - DNA, 567 bp, Homo sapiens
acctcttcctagctacagagttgggtccatggtgtggagattgttattatgcatactccctttttttacctgggcacatagctagactatattttcccaattcccttgcatttagcattggccatgtgactaaggttggaccaatggacagtgagcaaaattaatgtatacaaattctaggctgaggcctgaagacaacagaaatgsttcgttggtgctctattttctttcccagaagctggagcatgaatttgctttcctccaggttcaaccacacagacactaggggctgataggaaaacaaagtagaagaaatctagatttccgaatgactccatggagcagagcccttactattatggaatataacctcaggttataatatgtgagagaagtatgcctctattttcttgaagccattgaattactatttttaaaagtttctttgctatggaagcatagccttattctggaaaatatagtacatgcactgttataatcccacttctgctggccatgatgaatgttccaggaactggacctaacccagatcaaagtcattctttg

SEQ ID NO: 187473 - DNA, 432 bp, Homo sapiens
gtaaaatgtgggcacagagacaggagtccgatgagacatggtctacaagttgtatattcactcatcttctgaaaggttccccacatccacatagaaggggcctccactttcttttccaggaagattcacccagaatgttaacatgctgtccttagtcatcatggcattgacataactgcagtggctaatccatagtttctgctaatcagactaaaatatttcrgcttccaacactttctctctctcaaccaggaaatttacaactgaaaatgaattccattccttaccatcttgacttcttcttttcatcttactgtaaccccatgtgtctcaaactcaagatgcctcaaaatcacctgaagggctcttgttcaccacagttggcagggtcttaccaccaaaggttctgattcataggtctggatggcacct

SEQ ID NO: 187474 - DNA, 588 bp, Homo sapiens
gactaaaatatttcggcttccaacactttctctctctcaaccaggaaatttacaactgaaaatgaattccattccttaccatcttgacttcttcttttcatcttactgtaaccccatgtgtctcaaactcaagatgcctcaaaatcacctgaagggctcttgttsaccacagttggcagggtcttaccaccaaaggttctgattcataggtctggatggcacctgagatctttccatttctcgcaagtttctgggtgtattaggccactctgatgttgtataaagaaatacctgaggctgggtaatttacaaagaaaagaggtttaattggctcgtggttctgcagggtgtatagaaagcatggtgccagcatctgtgtctggtgagggtctcaggaagcttatagtcatgatggaaggcagaggaggagcaggtgagtcacaggtgacagtgggagcaagagagagcagggaggtgacatgcagttttaaacaaccaaatctcgggtgaacttgcagccagaactcacttatcacgaaggggatggtgctaagccattcatgagcgctctacccccatgacccaaac

SEQ ID NO: 187475 - DNA, 593 bp, Homo sapiens
aagcttatagtcatgatggaaggcagaggaggagcaggtgagtcacaggtgacagtgggagcaagagagagcagggaggtgacatgcagttttaaacaaccaaatctcgggtgaacttgcagccagaactcacttatcacgaaggggatggtgctaagccattcatgagcrctctacccccatgacccaaacacttcacactaagtcccaccccaatactggggattacatttccacatgagatttttaggggacaaatatccaaacggtatcaccagatgatgctgaggctcatggaccagagtccatactttgagaaccactgctgtcaacagattggtaatgcttttccacagtagacctgacttttcaacttcaaatgtcctctaaatgtatccgttattataactagttaagggagaatctgaggaagaaaacaattcctgagcttttattttgctttcattgccccagtggttataacctggtctatttaaccattccctgtagtcttctagcaatgaccagtttgaggagaacgtggtctttgaaatgagtcttgaaggataaataggagttcagcaaaacaacaa

SEQ ID NO: 187476 - DNA, 593 bp, Homo sapiens
aagcttatagtcatgatggaaggcagaggaggagcaggtgagtcacaggtgacagtgggagcaagagagagcagggaggtgacatgcagttttaaacaaccaaatctcgggtgaacttgcagccagaactcacttatcacgaaggggatggtgctaagccattcatgagcgctctacccccatgacccaaacacttcacactaagtcccaccccaatactggggwttacatttccacatgagatttttaggggacaaatatccaaacggtatcaccagatgatgctgaggctcatggaccagagtccatactttgagaaccactgctgtcaacagattggtaatgcttttccacagtagacctgacttttcaacttcaaatgtcctctaaatgtatccgttattataactagttaagggagaatctgaggaagaaaacaattcctgagcttttattttgctttcattgccccagtggttataacctggtctatttaaccattccctgtagtcttctagcaatgaccagtttgaggagaacgtggtctttgaaatgagtcttgaaggataaataggagttcagcaaaacaacaa

SEQ ID NO: 187477 - DNA, 631 bp, Homo sapiens
gagcaaatttttaaggtccttgttgtatattatgaaaaactcatggagaacagttttatttaatatgcatagtaggacaccacttttcaaacattttcactgaagtttccagatgatgggaaagactaaacatatgcttccaaagaagatggagagacagtgatccttaagcctgccgcaaaatttttttgaagtctcaacttttataaaaattaatgagaatatgcattctgttccttaggaatttgtgtctattttgatttttaaaaatttcaagtgaatcacaaagcaaataaattgcaagctgttctctaaaattttctattaaaactgaccctctagaaagatgtrccacatttaacgatggttccaagtccctcttggcccactactgtgtaccccagtgtgtggcaatggaaactgtggtttttgaaccttggagcaacttaatcaaatagatgtttataaatattaatttgtgtataagatggacttcagagtacagactttacaaatgggttcctctcctccagctttgtagggctggaaagtcaatacatgtgcatgcatgcatatgtgtgtatttgcttaaattgtcagtttagtgattctatctcatttactcctcact

SEQ ID NO: 187478 - DNA, 615 bp, Homo sapiens
gaatgaactgtcaagtgaagagtcaacaactgagtccaattttcatgcttctttgcatgtctggcaatttttaattagattcctgacactgattttgagcttattgggtactggatatttttrtatatccataaatattcttgagctgtgttctcaaacaaagggacatagttactttgaaagagtttgatcctttcaggttttccctttaagatgtgttatgtgggatgagactgtgttaagtgtacagctaattatccactactatttaaggcaagacccttccaaatgcactgtgaatgaggttttcccatttggttgatggaagaggcactattcttggctctgtgcaagcactgggtactgttccctctaatgcatttggatggcttcttctccagctggtttcctcatgtgaatgtgctgatcagaaccttggtgaatacttgaggtagactctctgcagatctccagaactctccctctgtacaactatgtcttctccaggacactgttctgtgaaatctagctttcttggtctcctcagactctcaactcctcttcaactcagagggtttgcttggttctgcctgggtgggggcctctctaatgagc

SEQ ID NO: 187479 - DNA, 543 bp, Homo sapiens
aaagcttgcttttgttttgcctgtaccttggggatccacactctttctaaggcccgtttttacagaaagagggatgtgcttctgttctcactctagaactcagatctacacacgtagactttgaattgtttctccagtagtggccatgggctatatccatattattattgtttaaatgtgtcacccgcagttcatgtgttggaaacctaatccccaacttaacagtattgagaggcaggacacwtaagaggtgattaagtcatgagggctctgctctcatgaatggatgaatgctgttatcttgggaatgggttaatcatcataggaatgggttcctgataaaataatgagtttgacccccatctgtcttgctctctctcatgctctttcaccatgtgaagccttccatcatgttatgactcagcaagaaggcccttgccagatgcaggtgctttgaccttgaacttctcagcctccagaactgtgagaaataaattacttttctttataaattactcagtctgtggtattctattatggcaa

SEQ ID NO: 187480 - DNA, 606 bp, Homo sapiens
tgtaacaatattgtgtgacaaatgctacaatcagattcccccaaaaatggctttcctgagagtgtctgctcatcagtgatttcacagaatattaacaaattctcctaagggaaataaaggaggagggtagttcatcagttcagtttaatttaataaactgtataacccactttaaacagatttctttgctgcaaggtttttggagatttcatctgccgacatrcaactgtgaatattcaagaggatggcataatatccatgcagcatttcataaactccctaggtcaaggaaggcttttttaaacgggttccttgagagacctatttcatttattcaatgaacatttattgaacaactactatatgcacacattgcaagcacccaggattcagtggtatacaggacacacacagtccttgtcctcatgggtcttaacagtctagtagaaaaaacacacattaaactcctacttgaaagttgatgaatataatgaaagggaaaatatagcttccataagaacaattaagagaatactgcttagtaaggtgtactttggaaaaggctgatgtaattgttttcataaataaattttatctttaagtggt

SEQ ID NO: 187481 - DNA, 548 bp, Homo sapiens
aaagggtcaaactctgctagaaaaataatagtctcagcatgagtttaattaaacttgcagctgacatgcattgtgcctctcgggcaacttgtagcactttggaaagcaagaaaataaaactattaaaagactgtttttcaacaagaaagaggacatcagggacgttaaaatagtgttcctgaggaaggkgctacacttctgaaacccaaacaaaatgatcttgacactcatctgagtatagtttgttggtaactcaggtgataaaaaatccaaacctgtgagcagagagtcctagcctgtggtccaggctccttgaagacctggaaaggtagaaataggagatctaacctgttttaaatgttgcggggtgggggctgggggagaagctaatgactaacattgtgggcaagaagtactcaaggttaacaaaggttaatcctttgcttttggctgaaatgttatcagttcaatatgattttcactacaccttcatgattaggagatatgatgtatctggttaattttttttaatagaagtaatttaatgc

SEQ ID NO: 187482 - DNA, 550 bp, Homo sapiens
agggtttgtttctctcttgttggtttcagtatttttttaaatttcatcttcaaaagtgtatcaragtataatgttcaaagttcaaacgttttctaaagtatgttgtgttttagtgtggatttgtttagattttttctgtttgagatttgctcagcttcttgaatatttaggtttataacttttgccatatatgggaagtccagtcattatttctttttctttcttttttatttatttatgtatgtatttatttattttgagacaggatctcactctgtcgcccaggctggagtgcagtggtgaaatctcagctcactgcaacctctgactcctggaatcaagggatctgcccacctcagcctcctgagatgggcaaccaccatacctggctaatttttttgaattttttgtagacatggggtttcaatatgttgctcaggctggtctcaaactcctgggctcaagcaatctgcctgcctggccacccaaactgctgggattacaggcatgaaccaccgggaccagcctcagtaattatttccttgaattc

SEQ ID NO: 187483 - DNA, 470 bp, Homo sapiens
gagaatgcctccaacaaggagaaaatagcaactccttccattttgttctcttgtattgtgggtaggaacctacctcctcaacttgtaacatttccagacttatcctttcaatatataacatgtaaagatacagttcatttcttctgtcacccagggtggagtgcaatggggtaatcatggctcactgtaaccttccagggctcaagcgatcctcccacctcagcctcctgggtagttgggatcacaggctcatgccaccatgcccaactagtttttctattttttgtagagatggggttttgccrtgttgcccaggctggtctcaaactcctgggctgaagctctctgtccacgttggcctcccaaagtgctgtgattataggcgtgagccagtgtgtgtggcccaaggtttattttttaatagaagaacatcacagaccagagaaaaagaatattgtctgtctcctgta

SEQ ID NO: 187484 - DNA, 542 bp, Homo sapiens
accacccctggcagtctttataaaggcctgtagaataaggttccaactataggcttgtattgtaaggggagggcagcagaagaggccttgggtctatgcaaggtaagaagttggrattgacactaatacataaagctagggtcctcaaaactatacctgcagtgctatgaactgagtatttgtgtccacctcaaattcacagactgaatctttaatccccagtgtgatagtgtttggagggtgggcctctaggaagtaattgagtcatgagggtgaaaccctcatgaatgggattagtgtgcccatattacaaaagactagagagttgatgtctctctctaccatgtcaggacacagcaaaaaggcttctgtctgcaaaccacaaaaagggctttcaccaagaaccaaatcagttggcaccttgatttttgaactgctcagcctccagaactgtgagaaataaattcctgttgtttaagccatcctgtctgtggtacttttgttacaacagcccaaactgactaagacacacagtgactaag

SEQ ID NO: 187485 - DNA, 542 bp, Homo sapiens
accacccctggcagtctttataaaggcctgtagaataaggttccaactataggcttgtattgtaaggggagggcagcagaagaggccttgggtctatgcaaggtaagaagttgggattgacactaatacataaagctagggtcctcaaaactatacctgcagtgctatgaactgagtatttgtgtccacctcaaattcacagactgaatctttaatccccagtgtgatagtgtttggarggtgggcctctaggaagtaattgagtcatgagggtgaaaccctcatgaatgggattagtgtgcccatattacaaaagactagagagttgatgtctctctctaccatgtcaggacacagcaaaaaggcttctgtctgcaaaccacaaaaagggctttcaccaagaaccaaatcagttggcaccttgatttttgaactgctcagcctccagaactgtgagaaataaattcctgttgtttaagccatcctgtctgtggtacttttgttacaacagcccaaactgactaagacacacagtgactaag

SEQ ID NO: 187486 - DNA, 542 bp, Homo sapiens
accacccctggcagtctttataaaggcctgtagaataaggttccaactataggcttgtattgtaaggggagggcagcagaagaggccttgggtctatgcaaggtaagaagttgggattgacactaatacataaagctagggtcctcaaaactatacctgcagtgctatgaactgagtatttgtgtccacctcaaattcacagactgaatctttaatccccagtgtgatagtgtttggagggtgggcctctaggaagtaattgagtcatgagggtgaaacccycatgaatgggattagtgtgcccatattacaaaagactagagagttgatgtctctctctaccatgtcaggacacagcaaaaaggcttctgtctgcaaaccacaaaaagggctttcaccaagaaccaaatcagttggcaccttgatttttgaactgctcagcctccagaactgtgagaaataaattcctgttgtttaagccatcctgtctgtggtacttttgttacaacagcccaaactgactaagacacacagtgactaag

SEQ ID NO: 187487 - DNA, 504 bp, Homo sapiens
tgctctacaccacaagccccactctgatttaagaaatgatttctagatcttactggtggccaatgactagctttttgtgacaggtagaaaaagtacatgaaagttgctattatatattacgtgctttcatgaaaatttagagtatttttactagtcgattatgagaactctagtttccattgatgtctaaaagttttgctttccytaaatggctggtttaaaaaattattttggttattctagtagttgtcagggtaatcgtttttaaaagtggatttttggcctattgttagaggcaaatgtttaaattatttaaaagttttaggtctgctgtctaggagccagggcttggagtcagacaccttagaaatgtacctgatgctctctctgttctactgcggtgaactggcgtggaaaccactgtggtgactgagcatcccatatgcttgaaattctaagcaacatccaatgcataagtgatagtttgttaggattttgtaagaa

SEQ ID NO: 187488 - DNA, 466 bp, Homo sapiens
tttaatctcactcatgaggggggagtcttcatggtctaatcacctcttgcaggtcccatctcttaatactatcacattggccattaagtttcaatacctgaattttggatgggacacattcaaactatagcagtgcccattggcatttctggattgccagcctctttaactccaaatctcagaaaatgaggcacaaagagagcccacggaactcataaccatataagttatggtacatttctaaatgtacatttctgcttctgggctctactctattgcagttatctatttgtctattgctgtgccaatatcatagtgtctttttacattagcttcataatayagcaacaattgatagtgcaaatcctcctttttcaagaataccttgactgtatttggccctttgcatttctgaataacttttaaatcagctcatcaaagtcaacaaaaaatgtgttggaatttt

SEQ ID NO: 187489 - DNA, 624 bp, Homo sapiens
gtcccttgagactctcattcagagccacttgtatctgttttcataacactaacactgtagttttttctttatttcttcaaattcttaacaacatgacttactatattttatgaataaatttttagacttgtttgtaacaacattcaactcttgggatataaactaaatctattttccttacattttttactgattccctcagtaaaaatagaattgatgaggatgtttgaggggcaattatacttttttgtgtacaatgtaaaggattggagaaaatgcctcataaaatgaaagactttgcaatgattcaatcagctggaaggtgtgaccctgtctgagtggtgaaaatgatcacctaagtatggtattagttacattcccaataagtgataagttagtgtttggcacttgggacacagagatgaaccagctagacrtggggccttaccctcatagagcttatgctgtaagggggctgttagcagttacaactgtgatggatattacaaataagaaaataaggttactgacactaggagtaagagaggataagtattttaagaatagggaataatatattcaaataccctgaaacaagagagaactgaaagaaggctagaaatc

SEQ ID NO: 187490 - DNA, 590 bp, Homo sapiens
taaaccagaaattttttaatgaactgctacaggcttagtgtgagctggtatgaaatgtgaaggtgagcaggctctgtcagggaagattggggaagtatttagagaaagttttccctatggtgctggctaggggacaggaaaagcaatcattgctcagactctgctcacacccatgttgtgaaatctctcctaaggaaaagaaagccatgatctgcagggagaacggtatcaaacccattgtctgaggacaytggtgggtatccagtgaagctggtgaaagagaacaggcaggaaaaaaaaaacctaaatgttaaaaaacagtcatattccttgaggaaggaacacttatgaagggtgcagcccccaaatcccaaattcacagtacctgtctaagactgaggcttaattggaatatcagaaaacctgtcactcttcccccattacattaacaagcctttggtaaaaatcacagtggaatgtgactgagtgagttttgcaaggcattttctttctagggagcagcacaaaggaaaacccaaaaccaagttcaaaacaaggtaccactagaggaatttgaaatcactagtgtc

SEQ ID NO: 187491 - DNA, 325 bp, Homo sapiens
tagttattcccaaagatggtggcaaaattcttaggatctcatagttattttatttagtaattgtatttattttcattatacctttctaagaytttttctacaaactcaaacatgaagtacatcctttgtttaattttgtagctccatttttgcctttgaaaaataggatagccataggtatgttcttcttggagcttacttattttctaggtaatttcaaattggtctgtttataaatgttaaaagatcctttcaaattcttcttcagcaagttgcctccactaaaaaagtgtctttggacatgtttattttataaaacaactgc

SEQ ID NO: 187492 - DNA, 325 bp, Homo sapiens
tagttattcccaaagatggtggcaaaattcttaggatctcatagttattttatttagtaattgtatttattttcattatacctttctaagattttttctacaaaytcaaacatgaagtacatcctttgtttaattttgtagctccatttttgcctttgaaaaataggatagccataggtatgttcttcttggagcttacttattttctaggtaatttcaaattggtctgtttataaatgttaaaagatcctttcaaattcttcttcagcaagttgcctccactaaaaaagtgtctttggacatgtttattttataaaacaactgc

SEQ ID NO: 187493 - DNA, 325 bp, Homo sapiens
tagttattcccaaagatggtggcaaaattcttaggatctcatagttattttatttagtaattgtatttattttcattatacctttctaagattttttctacaaactcaaacatgaartacatcctttgtttaattttgtagctccatttttgcctttgaaaaataggatagccataggtatgttcttcttggagcttacttattttctaggtaatttcaaattggtctgtttataaatgttaaaagatcctttcaaattcttcttcagcaagttgcctccactaaaaaagtgtctttggacatgtttattttataaaacaactgc

SEQ ID NO: 187494 - DNA, 294 bp, Homo sapiens
gaactcaaggaagcaagcaattcrccttatgaggaaagagttacctgtggataaaggagaaactgaaaaatttacaagtcaagactttttgagcaaaagcaaaaatatgactattagtcaccaattcagtagagtgaaaaaaaaagttgaagagatatcttggaagtaaaccatgttgtggaagagcatgtagggttttgataatcatgggatgattctgaattaattttaaatgcgataggaatatatgagataatttcaccagagaataacatgattgtgtttgcatttcaa

SEQ ID NO: 187495 - DNA, 545 bp, Homo sapiens
ggctccttttaagctctcaaactgaccttattttttttttacagattcaatgcattaagtcaatttattayttatgatgaatttatttatgtatttattttcgctatcacaagtagaaaaagcctataagttgctatgccaaaaacctgcctctagatggcaaacaaaccccgcaatacacaaaagagagccaaattcttagaaaccctgggaaaggaagagggctactgtcccattaacaacttggagcccttaaggcaagaatgaggtggaacatctggaacatctgggaggagacacaagggtgcggagtagtggggaacctgctctgtgctctgagactgaaagcccagccttgcctctcaccgctgccttgactgtgtccccatctgctgtgaagtgaatggtgtcttctaaattcgtgctgagccctaattgctgaaaagtgttaagacatgcaatggggggattatgtgcatcttcccgacaccaacatgatgctcaggaaggagacttcttgttttctcttaggattcttttactaa

SEQ ID NO: 187496 - DNA, 545 bp, Homo sapiens
ggctccttttaagctctcaaactgaccttattttttttttacagattcaatgcattaagtcaatttattatttatgatgaatttatttatgtatttattttcgctatcacaagtagaaaaagcctataagttgctatgccaaaaacctgcctctagatggcaaacaaaccccgcaatacacaaaagagagccaaattcttagaaaccctgggaaaggaagagggctactgtcccattaacaacttggagcccttaagscaagaatgaggtggaacatctggaacatctgggaggagacacaagggtgcggagtagtggggaacctgctctgtgctctgagactgaaagcccagccttgcctctcaccgctgccttgactgtgtccccatctgctgtgaagtgaatggtgtcttctaaattcgtgctgagccctaattgctgaaaagtgttaagacatgcaatggggggattatgtgcatcttcccgacaccaacatgatgctcaggaaggagacttcttgttttctcttaggattcttttactaa

SEQ ID NO: 187497 - DNA, 610 bp, Homo sapiens
gcaataaaataatcagttttttctttctacctattaaagatgttaccttagttaattacagtggtttccttcagaatgataagtggtctttcaaaatgatgtaaagagatctaaatccgtgtgctccagaagttgaatgaagctctgtctagcacrggtgccagtgactctcccagagtgctccatgcagctggacccacagagtccctctgtgctgtcataccacccactgccttctgtgaatgagatattctgattagaatcctggtggatgctatttgagccagtgcccccacaactcctatgaaagccgaggaccacaggcccctgaagacaatcacaggtctctagactcacagctcatgaccgtcctctgcagacacagcttctcctcggatggctgagggttgtcattggctgtgtccttccttgtgcatgacaacaggagacatagaaggtctgtaagcagccctgcaagccaggttctgagcaagccctcctgtgtggggccctcttacctggacataggtgtgtaaaccaaaaatgaaactctaagctccctaaccaactgaatgaactcctcctctcagccaagcacacaccaaaatca

SEQ ID NO: 187498 - DNA, 519 bp, Homo sapiens
tctgtctagcacgggtgccagtgactctcccagagtgctccatgcagctggacccacagagtccctctgtgctgtcataccacccactgccttctgtgaatgagatattctgattagaatcctggtggatgctatttgagccagtgcccccacaactcctaygaaagccgaggaccacaggcccctgaagacaatcacaggtctctagactcacagctcatgaccgtcctctgcagacacagcttctcctcggatggctgagggttgtcattggctgtgtccttccttgtgcatgacaacaggagacatagaaggtctgtaagcagccctgcaagccaggttctgagcaagccctcctgtgtggggccctcttacctggacataggtgtgtaaaccaaaaatgaaactctaagctccctaaccaactgaatgaactcctcctctcagccaagcacacaccaaaatcaacctgaaatacaatgcagcccatgatcggaacggatgattggatatgcctta

SEQ ID NO: 187499 - DNA, 610 bp, Homo sapiens
gcaataaaataatcagttttttctttctacctattaaagatgttaccttagttaattacagtggtttccttcagaatgataagtggtctttcaaaatgatgtaaagagatctaaatccgtgtgctccagaagttgaatgaagctctgtctagcacgggtgccagtgactctcccagagtgctccatgcagctggacccacagagtccctctgtgctgtcataccacccactgccttctgtgaatgagatattctgattagaatcctggtggatgctatttgagccagtgcccccacaactcctatgaaagccgaggaccacaggcccctgaagacaatcacaggtctctagactcacagctcatgaccgtcctctgcagacacagcttctcctcggatggctgagggttgtcattggctgtgtccttccttgtgcatgacaacmggagacatagaaggtctgtaagcagccctgcaagccaggttctgagcaagccctcctgtgtggggccctcttacctggacataggtgtgtaaaccaaaaatgaaactctaagctccctaaccaactgaatgaactcctcctctcagccaagcacacaccaaaatca

SEQ ID NO: 187500 - DNA, 546 bp, Homo sapiens
cttatgtctccctaaaacgtgtaaaaccaacctgtagcccgacgacctttgacacacgttctcaagacctcctgaggctgtttcactgatatttctttaactttgaccaartaaatttctaaactgattgagacttttctcagatacttatttgtttataggtatcactggatacacttaaggaattgaagagatttatgacattgagaaaaggaggaagccagggtgtgtggacattgagagagagagagagagagagagagagagagagagagagagattgtgatgtatgtacaggactaacactgagacctggttatgtaatggtgtagtactgagtatcatccccaaatagtgaggtttcattccatgaagactatgcatgtatctcatttgggaaaacagcttttgcaggtgtaaattaaggagcttgaaacagggagatggtcttagattaatcaactgggacttaaatgcaaactcaagtgtcctaaaaaaaacaagaggtagagagagatttagcatagactgaagtggagaaggcag

SEQ ID NO: 187501 - DNA, 546 bp, Homo sapiens
cttatgtctccctaaaacgtgtaaaaccaacctgtagcccgacgacctttgacacacgttctcaagacctcctgaggctgtttcactgatatttctttaactttgaccaaataaatttctaaactgattgagacttttctcagatacttatttgtttataggtatcactggatacacttaaggaattgaagagatttatgacattgagaaaaggaggaagccagggtgtgtggacatwgagagagagagagagagagagagagagagagagagagagagattgtgatgtatgtacaggactaacactgagacctggttatgtaatggtgtagtactgagtatcatccccaaatagtgaggtttcattccatgaagactatgcatgtatctcatttgggaaaacagcttttgcaggtgtaaattaaggagcttgaaacagggagatggtcttagattaatcaactgggacttaaatgcaaactcaagtgtcctaaaaaaaacaagaggtagagagagatttagcatagactgaagtggagaaggcag

SEQ ID NO: 187502 - DNA, 611 bp, Homo sapiens
gtgctgtgagagatgacctccaggctctcagataccaagattgtacaagacctaacccagagaattactcaagacactttctacgtaagaagaattgtggtactagctctcctcatagaaaaatgttttctgtctcttgttgaaattgacagcaaacacaaaaacacagaactayttgggagaacagaggacagtgatacactagggaagtaaaacacaccccttccccttgcattggtttcctgttgctgctgtaacaaattaccacaactttactactccacataacacaagtgtattatcttacatttctggaggtcagaagtctcaatgaagtaaaatcaaggagtaatagggctctattcattctaggcttcaagagagagaatccaatgtcgagcattccatctttctgatgttcccacattcctagcagcatggccccttcctccatcactccagtttccctgtccgttgtcccaggtcctctctggctgttaccttcctccctccctattgtaaggacccttgtgattatgatggtctcacccagataattcaggatactctcctgacctcaaaattctcaaccacgtctgccaagttatttt

SEQ ID NO: 187503 - DNA, 611 bp, Homo sapiens
gtgctgtgagagatgacctccaggctctcagataccaagattgtacaagacctaacccagagaattactcaagacactttctacgtaagaagaattgtggtactagctctcctcatagaaaaatgttttctgtctcttgttgaaattgacagcaaacacaaaaacacagaactatttgggagaacagaggacagtgatacactagggaagtaaaacacaccccttccccttgcattggtttcctgttgctgctgtaacaaattaccacaactttactrctccacataacacaagtgtattatcttacatttctggaggtcagaagtctcaatgaagtaaaatcaaggagtaatagggctctattcattctaggcttcaagagagagaatccaatgtcgagcattccatctttctgatgttcccacattcctagcagcatggccccttcctccatcactccagtttccctgtccgttgtcccaggtcctctctggctgttaccttcctccctccctattgtaaggacccttgtgattatgatggtctcacccagataattcaggatactctcctgacctcaaaattctcaaccacgtctgccaagttatttt

SEQ ID NO: 187504 - DNA, 611 bp, Homo sapiens
gtgctgtgagagatgacctccaggctctcagataccaagattgtacaagacctaacccagagaattactcaagacactttctacgtaagaagaattgtggtactagctctcctcatagaaaaatgttttctgtctcttgttgaaattgacagcaaacacaaaaacacagaactatttgggagaacagaggacagtgatacactagggaagtaaaacacaccccttccccttgcattggtttcctgttgctgctgtaacaaattaccacaactttactactccacatmacacaagtgtattatcttacatttctggaggtcagaagtctcaatgaagtaaaatcaaggagtaatagggctctattcattctaggcttcaagagagagaatccaatgtcgagcattccatctttctgatgttcccacattcctagcagcatggccccttcctccatcactccagtttccctgtccgttgtcccaggtcctctctggctgttaccttcctccctccctattgtaaggacccttgtgattatgatggtctcacccagataattcaggatactctcctgacctcaaaattctcaaccacgtctgccaagttatttt

SEQ ID NO: 187505 - DNA, 611 bp, Homo sapiens
gtgctgtgagagatgacctccaggctctcagataccaagattgtacaagacctaacccagagaattactcaagacactttctacgtaagaagaattgtggtactagctctcctcatagaaaaatgttttctgtctcttgttgaaattgacagcaaacacaaaaacacagaactatttgggagaacagaggacagtgatacactagggaagtaaaacacaccccttccccttgcattggtttcctgttgctgctgtaacaaattaccacaactttactactccacataacacaagtgtattatcttacatttctggaggtcagaagtctcaatgaagtaaaatcaaggagtaatagggctctattcattctaggcttcaagagagagaatccaatgtcgagcattccatctttctgatgttcccacattcctagcagcatggccccttcctccatcactccagtttccctgtccrttgtcccaggtcctctctggctgttaccttcctccctccctattgtaaggacccttgtgattatgatggtctcacccagataattcaggatactctcctgacctcaaaattctcaaccacgtctgccaagttatttt

SEQ ID NO: 187506 - DNA, 624 bp, Homo sapiens
ttccatctttctgatgttcccacattcctagcagcatggccccttcctccatcactccagtttccctgtccgttgtcccaggtcctctctggctgttaccttcctccctccctattgtaaggacccttgtgattatgatrgtctcacccagataattcaggatactctcctgacctcaaaattctcaaccacgtctgccaagttatttttgacttgttcataagtaatgatcatagattccagatattaggacaatgatgtctttagtgggtgtattattcattccacaaacaactctcatcatccacacaatggccttcccctaaggtagaataaaaatatcacaaggcagatttatgaggcgatcgacctagaaaaaacctgagactcgaggactgtctgatgtgtggatgtcaaatcctgggagattctgagcctctgctctatgtggactctatgttgtgtagccatttgtggaaggcttctgtgattttgtgacctagagaaaatgaatctctgctaaaatcaaatctaagaaagattggcaaagggaatttaaagatttcctaaatttttggaatttccctaggcattaaaacatgagaagtggcaataattcaaacc

SEQ ID NO: 187507 - DNA, 576 bp, Homo sapiens
ctgacctcaaaattctcaaccacgtctgccaagttatttttgacttgttcataagtaatgatcatagattccagatattaggacaatgatgtctttagtgggtgtattattcattccacaaacaactctcatcatccacacaatggccttcccctaaggtagaataaaaatatcacaaggcagatttatgaggcgatcgacctagaaaaaacctgagactckaggactgtctgatgtgtggatgtcaaatcctgggagattctgagcctctgctctatgtggactctatgttgtgtagccatttgtggaaggcttctgtgattttgtgacctagagaaaatgaatctctgctaaaatcaaatctaagaaagattggcaaagggaatttaaagatttcctaaatttttggaatttccctaggcattaaaacatgagaagtggcaataattcaaaccaacgatgccctccaagaatgaggatttttccaatgcattaggttgggtcccctcagtgagaaggatgccaaagattcgcatgcaggcagtatatttacaaagtgcgggaaacaagcaagtg

SEQ ID NO: 187508 - DNA, 514 bp, Homo sapiens
ctctgctctatgtggactctatgttgtgtagccatttgtggaaggcttctgtgattttgtgacctagagaaaatgaatctctgctaaaatcaaatctaagaaagattggcaaagggaatttaaagatttcctaaatttttggaatttccctaggcattaaaacatgagaagtggcaataattcaaaccaacgatgccctccaagaatgaggatttttccaatgcattaggttgggtcccctcagtgagaaggatgccaaagattcgcatgcaggcagtatatttacaaagtgcgggaaacaagcaagtgagcaagggaggggaggagggaaagggaaagtgaaaagtgcctcagaaggagccacctctgaggatgacgagagctcaagcccacatagaaacacaggaaaaatgyctctgttattccacctgagaggtgagggagctgggggatgtgtacacctcccttgtcatcactgattgacaaccgtcctaggggatgctaattccaggcc

SEQ ID NO: 187509 - DNA, 569 bp, Homo sapiens
agagtcagctgaagtataatgtctagaatccccaaggcatagtaacaatgactgctaaaattatgcacaaagaaaaagtgcatttgaatccagagatgtatctctctgaatctggatatatggatcctggcagcctgttyggtagccatttcccagaaatccagtcctctggaaaagcaggaggaggtttgtgcataggctgcactaccttggtctggccatgggtagtcgtgcatgagaactactccctggagtatttctcagtccactgacactgatgtaattggctccacttcccctgctgttgagccaggccgacacgccctgggcaaaggcatctgtgtgaagtattgaggtgcaaatcagtgcttaagatatgtttggatgcaaaacactttttcatctacatgggcagtgtcttggcagaagatggagattctctctaaatgcatgtgagacagggtggctggcatctgggtcaggatgatgccctggtgcatggcaagaacatgccttgtgcagcagctgccctcgctaaggagagaggctcactgacctggcttttcccc

SEQ ID NO: 187510 - DNA, 569 bp, Homo sapiens
agagtcagctgaagtataatgtctagaatccccaaggcatagtaacaatgactgctaaaattatgcacaaagaaaaagtgcatttgaatccagagatgtatctctctgaatctggatatatggatcctggcagcctgttcggtagccatttcccagaaatccagtcctctggaaaagcaggaggaggtttgtgcataggctgcactaccttggtctggccatgsgtagtcgtgcatgagaactactccctggagtatttctcagtccactgacactgatgtaattggctccacttcccctgctgttgagccaggccgacacgccctgggcaaaggcatctgtgtgaagtattgaggtgcaaatcagtgcttaagatatgtttggatgcaaaacactttttcatctacatgggcagtgtcttggcagaagatggagattctctctaaatgcatgtgagacagggtggctggcatctgggtcaggatgatgccctggtgcatggcaagaacatgccttgtgcagcagctgccctcgctaaggagagaggctcactgacctggcttttcccc

SEQ ID NO: 187511 - DNA, 569 bp, Homo sapiens
agagtcagctgaagtataatgtctagaatccccaaggcatagtaacaatgactgctaaaattatgcacaaagaaaaagtgcatttgaatccagagatgtatctctctgaatctggatatatggatcctggcagcctgttcggtagccatttcccagaaatccagtcctctggaaaagcaggaggaggtttgtgcataggctgcactaccttggtctggccatgggtagtcgtgcatgagaactactccctggagtatttctcagtccactgacactgatgtaattggctccacttcccctgctgttgagccaggccgacacgccctgggcaaaggcatctgtgtgaagtattgaggtkcaaatcagtgcttaagatatgtttggatgcaaaacactttttcatctacatgggcagtgtcttggcagaagatggagattctctctaaatgcatgtgagacagggtggctggcatctgggtcaggatgatgccctggtgcatggcaagaacatgccttgtgcagcagctgccctcgctaaggagagaggctcactgacctggcttttcccc

SEQ ID NO: 187512 - DNA, 569 bp, Homo sapiens
agagtcagctgaagtataatgtctagaatccccaaggcatagtaacaatgactgctaaaattatgcacaaagaaaaagtgcatttgaatccagagatgtatctctctgaatctggatatatggatcctggcagcctgttcggtagccatttcccagaaatccagtcctctggaaaagcaggaggaggtttgtgcataggctgcactaccttggtctggccatgggtagtcgtgcatgagaactactccctggagtatttctcagtccactgacactgatgtaattggctccacttcccctgctgttgagccaggccgacacgccctgggcaaaggcatctgtgtgaagtattgaggtgcaaatcagtgcttaagatatgtttggatgcaaaacactttttcatctacatgggcagtgtcttggcagargatggagattctctctaaatgcatgtgagacagggtggctggcatctgggtcaggatgatgccctggtgcatggcaagaacatgccttgtgcagcagctgccctcgctaaggagagaggctcactgacctggcttttcccc

SEQ ID NO: 187513 - DNA, 488 bp, Homo sapiens
tgattttaatccaggctcctatagtcagcgagtgaaacagagattttagttgaaataatgagacctggtrttactagtcagctctccatgctggagaaccataagaaattataccaaaggcaggaaaggggatagaatatggggatcatcacgccaagaataaggtgcagcccatttagcccctgggtcttaaagagacccatagctcaggataatggcagatctatgcgtgacacagttatcatctttgtgcatcttcagagaattgtttttccttttactcctagggacaatgtcttaagtttgttagtaaattctattgaatttattaaagatgcttctgataaattctttttatattcatttcaaacaagaagcaatttcacactgacattgttattatagcactaaatacttttacactcatcaaattcctttgagactaactgaaatttctgacagccccacattctacaactttattgtaa

SEQ ID NO: 187514 - DNA, 292 bp, Homo sapiens
gggaaaactcctaagctcctgatctatgctgcacccagtctgcaaagtgggattccctctcggttcagtgacagtggatctggggcagattacactctcaccatcmgcagcctgcagcctgaagattttgcaacttattactgtcaacagagtgacagtacccctcccacagcgttacaagtcataacataatccccaaggaagcagatgtgtgaggctgggctgccccaatgctccttctggtgcctctatctgctgagggaagttctcaaactcagtcaggtttggaaag

SEQ ID NO: 187515 - DNA, 292 bp, Homo sapiens
gggaaaactcctaagctcctgatctatgctgcacccagtctgcaaagtgggattccctctcggttcagtgacagtggatctggggcagattacactctcaccatccgcagcctgcagcctgaagattttgcaacttattactgtcaacagagtgacagtacccctcccacagygttacaagtcataacataatccccaaggaagcagatgtgtgaggctgggctgccccaatgctccttctggtgcctctatctgctgagggaagttctcaaactcagtcaggtttggaaag

SEQ ID NO: 187516 - DNA, 292 bp, Homo sapiens
gggaaaactcctaagctcctgatctatgctgcacccagtctgcaaagtgggattccctctcggttcagtgacagtggatctggggcagattacactctcaccatccgcagcctgcagcctgaagattttgcaacttattactgtcaacagagtgacagtacccctcccacagcgttacaagtcataacataawccccaaggaagcagatgtgtgaggctgggctgccccaatgctccttctggtgcctctatctgctgagggaagttctcaaactcagtcaggtttggaaag

SEQ ID NO: 187517 - DNA, 464 bp, Homo sapiens
tgaaaccccatctttacaaaaattagctagtatggtgtcatgcacttgcagtccctgctactcaggagactgaggtgggagaatcgcttgagcacagtatgtgaaggcttcmgtgagctctgatcacatgaatgcaccccatcttgggtgacaaagtgaaaccctctctgaaaaataaaataaaataaaaaggctaccaccatactcacagataagtgtgtcaggtatatttgcagctatccttcctatattctatttggtaaaaaaaaaaaaaaaaaaaaaaaaaaaaaaaaaaaatgcaaagaactcttctcattctagatttttgtattacttagacatttgaagtttatagcagaagagctataatcatgtttggtatgtgtactctatagaccagatagtgcaaacagatatcaatgctttttaaaagtatataaggttattagaaatattttaaacta

SEQ ID NO: 187518 - DNA, 464 bp, Homo sapiens
tgaaaccccatctttacaaaaattagctagtatggtgtcatgcacttgcagtccctgctactcaggagactgaggtgggagaatcgcttgagcacagtatgtgaaggcttcagtgagctctgatcacatgaatgcaccccatcttgggtgacaaagtgaaaccctctctgaaaaataaaataaaataaaaaggctaccmccatactcacagataagtgtgtcaggtatatttgcagctatccttcctatattctatttggtaaaaaaaaaaaaaaaaaaaaaaaaaaaaaaaaaaaatgcaaagaactcttctcattctagatttttgtattacttagacatttgaagtttatagcagaagagctataatcatgtttggtatgtgtactctatagaccagatagtgcaaacagatatcaatgctttttaaaagtatataaggttattagaaatattttaaacta

SEQ ID NO: 187519 - DNA, 464 bp, Homo sapiens
tgaaaccccatctttacaaaaattagctagtatggtgtcatgcacttgcagtccctgctactcaggagactgaggtgggagaatcgcttgagcacagtatgtgaaggcttcagtgagctctgatcacatgaatgcaccccatcttgggtgacaaagtgaaaccctctctgaaaaataaaataaaataaaaaggctaccaccatactcacagataagtgtgtcaggtatatttgcagctatccttcctatattctatttggtaaaaaaaaaaaaaaaaaaaaaaaaaaaaaaaaaaaatgcaaagaactcttctcattctagatttttgtattamttagacatttgaagtttatagcagaagagctataatcatgtttggtatgtgtactctatagaccagatagtgcaaacagatatcaatgctttttaaaagtatataaggttattagaaatattttaaacta

SEQ ID NO: 187520 - DNA, 464 bp, Homo sapiens
tgaaaccccatctttacaaaaattagctagtatggtgtcatgcacttgcagtccctgctactcaggagactgaggtgggagaatcgcttgagcacagtatgtgaaggcttcagtgagctctgatcacatgaatgcaccccatcttgggtgacaaagtgaaaccctctctgaaaaataaaataaaataaaaaggctaccaccatactcacagataagtgtgtcaggtatatttgcagctatccttcctatattctatttggtaaaaaaaaaaaaaaaaaaaaaaaaaaaaaaaaaaaatgcaaagaactcttctcattctagatttttgtattacttagacatttgaagtttatagcagaagagctataatcatgtttggtatgtgtactctatagaccagatagtgcaaacakatatcaatgctttttaaaagtatataaggttattagaaatattttaaacta

SEQ ID NO: 187521 - DNA, 207 bp, Homo sapiens
tagttgtacttatattcacattttaaaagttggacacagttaagtctcagtgatttttttacacaacggaggcaagctgtgcagttwtaactagtattatattatgctcttggcctgattacagaagggaaaggggagatcataccagacaatggcagaatgaagcaacaaggagtagagttacagaacatgatgctgtaacttgga

SEQ ID NO: 187522 - DNA, 207 bp, Homo sapiens
tagttgtacttatattcacattttaaaagttggacacagttaagtctcagtgatttttttacacaacggaggcaagctgtgcagttttaactagtattatattatgctcttggcctgattacagaagggaaaggggmgatcataccagacaatggcagaatgaagcaacaaggagtagagttacagaacatgatgctgtaacttgga

SEQ ID NO: 187523 - DNA, 425 bp, Homo sapiens
aattgctgtacatggtgacacaaatccatgttgttaatctaagtggaaggggctgaagcacacaacgtaattcaaagagtttacttgagccacgatgaggacagctgcctggaagaaacagacccaagtatccttggatatgaactccctttggagctttgcaacaagcagtttcttaaaggcaaaaaagggtccagaagtgggatgatscaaagaggtttgtcacaaattctcattggcttatggaaataacatttattagtgactggctatacactgttacactattattgggtgtggattatagtgtctggtgtggcgttattggttaatttatagctactgtggcaacagcaagcagcctagatgaacacacagctcaaagaggagcaggacagaactgccgtctcatttgaatatctctc

SEQ ID NO: 187524 - DNA, 525 bp, Homo sapiens
aagaaacagacccaagtatccttggatatgaactccctttggagctttgcaacaagcagtttcttaaaggcaaaaaagggtccagaagtgggatgatccaaagaggtttgtcacaaattctcattggcttatggaaataacatttattagtgactggctatacactgttacactattattgggtgtggattatagtgtctggtgtggcgttattggttaatttatagctacwgtggcaacagcaagcagcctagatgaacacacagctcaaagaggagcaggacagaactgccgtctcatttgaatatctctctgggcctgattatttaaaaggacttgcatttctcacatgaaagttattttcttttctccatgtccataaatgagaataaatagacgtaaaatagatcttttcgaggatgaagtaaatggaatgaaaaacaaaacccaagctgaccagaaatcatagagggaagaaaaggttataaatatatggatttttcaaagtgattttaagctattagg

SEQ ID NO: 187525 - DNA, 315 bp, Homo sapiens
cagcctagatgaacacacagctcaaagaggagcaggacagaactgccgtctcatttgaatatctctctgggcctgattatttaaaaggacttgcatttctcacatgaaagttattttcttttctcmatgtccataaatgagaataaatagacgtaaaatagatcttttcgaggatgaagtaaatggaatgaaaaacaaaacccaagctgaccagaaatcatagagggaagaaaaggttataaatatatggatttttcaaagtgattttaagctattaggaatcagttaaatgttgggggattttgtctgagaatg

SEQ ID NO: 187526 - DNA, 385 bp, Homo sapiens
tcttttcgaggatgaagtaaatggaatgawaaacaaaacccaagctgaccagaaatcatagagggaagaaaaggttataaatatatggatttttcaaagtgattttaagctattaggaatcagttaaatgttgggggattttgtctgagaatgggctaaaggagaatgtcccttttgccttctgaagtttccctgaaaatcactaataggaggcagatacatagtagaaaaggcatacaggtttctgcaatgtgtgtacactggagcccttagaacgaagacccagacacacgatgcgtgcagaagcttatctaccacatgaagtttacagaaagaatggggtcttggatcacagggaaaaaaaaaaaaaggttatgtgagaaaa

SEQ ID NO: 187527 - DNA, 385 bp, Homo sapiens
tcttttcgaggatgaagtaaatggaatgaaaaacaaaacccaagctgrccagaaatcatagagggaagaaaaggttataaatatatggatttttcaaagtgattttaagctattaggaatcagttaaatgttgggggattttgtctgagaatgggctaaaggagaatgtcccttttgccttctgaagtttccctgaaaatcactaataggaggcagatacatagtagaaaaggcatacaggtttctgcaatgtgtgtacactggagcccttagaacgaagacccagacacacgatgcgtgcagaagcttatctaccacatgaagtttacagaaagaatggggtcttggatcacagggaaaaaaaaaaaaaggttatgtgagaaaa

SEQ ID NO: 187528 - DNA, 385 bp, Homo sapiens
tcttttcgaggatgaagtaaatggaatgaaaaacaaaacccaagctgaccagaaatcatagagggaagaaaaggttataaatatatggatttttcaaagtgatkttaagctattaggaatcagttaaatgttgggggattttgtctgagaatgggctaaaggagaatgtcccttttgccttctgaagtttccctgaaaatcactaataggaggcagatacatagtagaaaaggcatacaggtttctgcaatgtgtgtacactggagcccttagaacgaagacccagacacacgatgcgtgcagaagcttatctaccacatgaagtttacagaaagaatggggtcttggatcacagggaaaaaaaaaaaaaggttatgtgagaaaa

SEQ ID NO: 187529 - DNA, 385 bp, Homo sapiens
tcttttcgaggatgaagtaaatggaatgaaaaacaaaacccaagctgaccagaaatcatagagggaagaaaaggttataaatatatggatttttcaaagtgattttaagctattaggaatcagttaaatgttgggggattttgtctgagaatgggctaaaggagaatgtcccttttgccttctgaagtttccctgaaaatcactaataggaggcagatamatagtagaaaaggcatacaggtttctgcaatgtgtgtacactggagcccttagaacgaagacccagacacacgatgcgtgcagaagcttatctaccacatgaagtttacagaaagaatggggtcttggatcacagggaaaaaaaaaaaaaggttatgtgagaaaa

SEQ ID NO: 187530 - DNA, 606 bp, Homo sapiens
tttgcagctatgttagcatttccagcccttctcaatagccattttgaaatatatcaaggaaatatatttaggggtaaaatatattagtttccttcatacagytataaaacatacaggaataatttttgtcaatgtctactacaaatccaatatagcagtaattataaaacccaccagatatcgaagaaaaaatatgtagagtacatcaattaccaatgttgatactaaaatgccaaataaaataaaaataatatccaacaatatttgaaagagtaagacaagaaattggcaaaaaataaaacaaatatccaccttggagatgaaagtgtgtttccaaatttggtaatccaataatattaataatcatgttgattagcacaaattaaaaataaataggggattctcagtacatgctaaaatatatttattaaaaggcaatattcatgactttaaagattttaaatgctctaaagagtctgatattctatatgcaaatatgtgtatgtccactacaagaagagaggcctgattttcatgtgttactacatagagatagagaagtggatagattaatttgcatatgcatagagaaagcataaaatagaa

SEQ ID NO: 187531 - DNA, 600 bp, Homo sapiens
aactgttctaagactcaaattaawccgtactgggtttgaaaagagaaagtccaggaattacccaatattttagatatcagataaaagagaatgccaggtatgcgatgataatcagcaatggttgttcacacaatacatcaaatcagtatttgaattagcttttgaattacaaggacaaatggatcaagtctagactctttagtagataaatcttattaggctgagatgtgttttcccctgtttttccacaaggagattacaaatttgcaaacctcagctgctctcattttatgctctcaccaagccaaaagctgaagttcatcaatcagtgtgtctaagtgttcactggttatataccattttgtagtttcagctatctttccaacttcctaaatcatcaccttcatttgatcttgttttttttccactatcacttctttattgaccatataaagaatataagtaagttcttattttgctattgttcatttcggtctaatttcatcaaaatatcacaatcttttaatttcattttaatttcaaagattaaatgaaacctacatagaaatgagtgtaagatttgcatttgcattattttgg

SEQ ID NO: 187532 - DNA, 476 bp, Homo sapiens
agatctagggcacaagcagggcaggctagggcagggcaatggcaagaccmggccatggcagggccagcccaggatagaacagggcacaggcagggcagggccagggccacggctggggcaggacaaggaccaggactggggtccaggccagggccagggtatggccagggcagaggtagggccagagccagggtctgggcaggaccaaggcaggtctattgcagggccagggttcagaccagggccagagcagggctgggacagggccagggccagaaccaggaaagggcaatgtcaggacaagggccgtggcaggaccagcaatggggctggggccaggacagggacagggacagggtcagggctagggccagaatagcatgccagggtagagccaggccaaattagggccaggacagggtcaggaccagggctgggccagggtatggccttaagtagcgaagggccagggccag

SEQ ID NO: 187533 - DNA, 475 bp, Homo sapiens
agggcacaagcagggcaggctagggcagggcaatggcaagacccggccatggcagggccagcccaggatagaacagggcacaggcagggcagggccagggccacggctggggcaggacaaggaccaggactggggtccaggccagggcmagggtatggccagggcagaggtagggccagagccagggtctgggcaggaccaaggcaggtctattgcagggccagggttcagaccagggccagagcagggctgggacagggccagggccagaaccaggaaagggcaatgtcaggacaagggccgtggcaggaccagcaatggggctggggccaggacagggacagggacagggtcagggctagggccagaatagcatgccagggtagagccaggccaaattagggccaggacagggtcaggaccagggctgggccagggtatggccttaagtagcgaagggccagggccagggtcc

SEQ ID NO: 187534 - DNA, 517 bp, Homo sapiens
atgtgcatatgaacacacatatgcatatgcacrcacacatgcaaggctgcaagtctcatgcacacacacacatgcacacacatgcacatgcatgctcacatgcacaggcactcaggcacctagagccttctcatcctgcactttgagtcccccctccccttgcccatccttgcccatccttcaaggcctcagtcaaaagccatcttttacaaattgtctctggttgactttcctttttttcccctcttagaagaagcgatgctgtcctcagtcatcaagcgttcactaggcgcttggtgtgtgccaggccccgatgtgggtcttgggcatgttccagttctcacgtcctcagggctccttggtgagtcgagggtgaggaggacacagaggcacaggaggccatggggcaggtctgggtgcactcaggctccagagctcagccctccctgctgagtcagggcgagcaggatagacacctgctcctggaactcagtgggtgaggtggacacgcatgcag

SEQ ID NO: 187535 - DNA, 601 bp, Homo sapiens
catacagggtgtattccttcacattgagctggctgtgtgcagcattgtgtgcagttgtttcatattgtagccgggaacagtgactcatcttcattgctctttagcattccattgtttaattgaatcccagttttcttttccactgttgattgtgtttagatttttttcagtttggggttactatgaaggatgctataaagagcattcttgtacatagctcttgtagcacagtgaacacatttctgttgggtgtagagatgtacgtatatgtgtgtgtgtgtgtgtgtgtgtgtgtgtgtgtrtatatatatacaccccaaggggtaaaattgttggatgtacatacctttgacttcagtaaatcatgccaaactgctttccaaagtggttgttcatctttttttccttttgtttttcagtggatccttatagtttgggattcttccataatggtacatatagatgtgtcacattttttcaaacagttgcatagttttcacagcatggacataacatgatttatttaacctgtcttctgttgttggacttcgttatatttatactcaaacaatgccacaatgaataactttcttcataagtt

SEQ ID NO: 187536 - DNA, 601 bp, Homo sapiens
catacagggtgtattccttcacattgagctggctgtgtgcagcattgtgtgcagttgtttcatattgtagccgggaacagtgactcatcttcattgctctttagcattccattgtttaattgaatcccagttttcttttccactgttgattgtgtttagatttttttcagtttggggttactatgaaggatgctataaagagcattcttgtacatagctcttgtagcacagtgaacacatttctgttgggtgtagagatgtacgtatatgtgtgtgtgtgtgtgtgtgtgtgtgtgtgtgtatatatatatacaccccaaggggtaaaattgttggatgtacatacctttgacttcagtaaatcatgccaaactgctttccaaagtggttgttcatctttttttccttttgtttttsagtggatccttatagtttgggattcttccataatggtacatatagatgtgtcacattttttcaaacagttgcatagttttcacagcatggacataacatgatttatttaacctgtcttctgttgttggacttcgttatatttatactcaaacaatgccacaatgaataactttcttcataagtt

SEQ ID NO: 187537 - DNA, 616 bp, Homo sapiens
ttcacagcatggacataacatgatttatttaacctgtcttctgttgttggacttcgttatatttatactcaaacaatgccacaatgaataacyttcttcataagttaattaaatactcgatgaaaaatacagggtttttttcggtttataaaagtaatacttgctcactgaggaaaaaaaatctgtaaattacagaaaaacacaaaggaaatatatcctatgatccaaccagaaagaaaactacttttcctatgttgtgcgtagctctctagttttttctttctttatatcaattggattttttttttttttttttttttttgagacagggtctcactgtgtcacccaggccggagtgcagtggcatgatcacagctcactgaagcctcgacttcccaggcttaagtgatcctcctacctcactcagcctcccgagtagttgggaccacaggcatgtgccaccacatctggctatttttagtattttttgtagagatggggtttcgccatgctgctcaggcaggtctcaaactcctggcctcaagccatctgcttgtgttggcctcccaaagtgctggattacaggcgtgcaccaccacccccggcctaattgaat

SEQ ID NO: 187538 - DNA, 548 bp, Homo sapiens
cagcgtgattatagttatttaatactcatatttatcaaaatattatatgttaaaaccaataaccatctgaacttatttgaatatagtttttcctattctgttcttagaaatttcagtcattaacaatctttacacttagaaagtgttttaattttactttgatgacaggaatagtgtttttctcaatgaaatatataatagcagcttataagtgataacygttttcattctgtttttaagagaaaatactttggtcttttttaccatgatagtttagtgtgtgatgtcataaaaatgggctgtagccatttaaattcttgttcaagtgcagaaactaagagacttcagtttctattaagccatgtcaactcctattaggagacctttagtggttccagttccagggccttcttgaagaaattgtgatacttgtgtaagtatatctagagttttctttccagcattggctaagtcacatagctgagaaatatgatacatggagaaggttgctgactggatgaacttttctacattgaatactttaaatc

SEQ ID NO: 187539 - DNA, 613 bp, Homo sapiens
agaaaattcttgggaaaacttcagcagagtcctcctccaccatgacaatgcttctggttattcctgtcatcaagggcaattttgggagaattttgatgggaaatcattacagtcctgatttggctcctcctaacttctttttgtttcataatcttaatctgtaaaggatactcttttcagttaatgtgtaaaagactgcattgatatggttaaattctcaggaccttcagttccttarggatgggctaaatggctgtagcatgacttatagaagaagtgtcttgaacttgatggagcttatgttgagacataaagtttatattttcaattcattttttccaagttttgaagtccaagggtacatgtggaatggctagatggagttcattaatatatgcattactttgcatacttattttttgtggtgagatttcttaaaatctactcttcacaatttttaaaatgctataaattgttattaactataattactaagctgtacaatagatctcttgaacttactcttcttacttaaatgaaattttgtaccctttgaccaacatctcccaacccccaaattccacctgctgcccagcccctggtagccactatt

SEQ ID NO: 187540 - DNA, 423 bp, Homo sapiens
taaacctatattcttcataaatacccaatctcaggtagttctttatagcagtgtgagaagggactaatacacctagtctacttggtgaagaagatacctctaagttcctatctctggtcactggcttggctagttgggtgtggtaagctaatgcctaggcagtaatctatactgtgtcattcctgttacatattttttgcaataatagccttatagrttcacacctctttttatctactctctttgggtaatactgtgccacactgtctctgagattggccgtgggatttgctttggccaatgtgatgcaagcagaatttgggaattgccttctcttattgttcttggaaccctctgcctgccatctgaagatgcccagactggcctggtggataatgagagacacaagaaccagctgcctac

SEQ ID NO: 187541 - DNA, 447 bp, Homo sapiens
atgtcatcccttgcccccatcttctgcatgaagccttccacaaatgtctttccattatgtttttaatttatgtaaacttttttccgatttataatattctgcaagaccatactactatcaacttctctgatctctagtgtcattctcccagacccacccyactagaccccaactacaatggacgtctttcagttctttaaacacttaacttcatgtctttgccctttgcacttgatgttcattgatatcacctggatatgcatccccacctaagtatgttgaattgaaatccccaatgtcggaattggggtttgttgggaggtaattgaatcatcggggtggatgtctcatgaatgctttagatcatccccttggtgttctttttgtaatagtgaagatgctgaaaccatgcctcctacaaagcctacagagctgtgagtcaattaa

SEQ ID NO: 187542 - DNA, 470 bp, Homo sapiens
tgccaacagatagctggctgatcaccccttaggaatggtaccatattgaagatttattgttggtctctgctgctggctgactgatatggtttggctgtgtccccacccaaattgcatcttaaattcccatgtgttgtgcgacagacccagtgggaggtaactgaatcctatgggcagatctttcccatgctgttttcatgatagtgaataagtctcacgagatctgatggttttaaaaaggggagttttcctacacaagctctcttctcttttctgtcaccatgtgagatgtgcctttcaccttccaccaggattgtgaggcctccccagccatgtggaactgtaagtccaataaacctctttcttctgtcaattgcccagtcttgggtatgtctttattagcagtgtgraaattgactaatacagtagattggtaccagtagagtgggacactgctgaaaagataccca

SEQ ID NO: 187543 - DNA, 613 bp, Homo sapiens
aaattaggcccttatttcatatcatatacacaaatcaacccaaaatgttttaaagattaaaacatagaccagaaactattaaactaccagaagaaaacatagtgggaaagctttatgacattagtttggacaatgattttttggatacaaccccaaaagcacaggcaacaaaagcaaaaatagactaataagaatgtatcaaactaaaaatktctgcatactaaaataagcaatcaacagaatgcaaaggcaatttatggaatgggataaaatatttgcaagtcatacatcttataaggcaggggtccccaagccctggagactggtatgggtctgtgtcctgtaaggaaccaggctgcacagcaggaggtgaacagtgggtgagccctacctcctgtcagatcagcagtggcattagattctcataagagtgcaaatcctattgtgaactgcacaagcaagggatctaggttgtgcattccttatgagaatctaatgtctgatgatctgaggtaaaacagtttcatcccaaaaccatgctcctgtaccccagttcatggaaaaactgtcttccacgaaatgagtaggccaaaaatatggggactgctgctat

SEQ ID NO: 187544 - DNA, 613 bp, Homo sapiens
aaattaggcccttatttcatatcatatacacaaatcaacccaaaatgttttaaagattaaaacatagaccagaaactattaaactaccagaagaaaacatagtgggaaagctttatgacattagtttggacaatgattttttggatacaaccccaaaagcacaggcaacaaaagcaaaaatagactaataagaatgtatcaaactaaaaatttctgcatactaaaataagcaatcaacagaatgcaaagrcaatttatggaatgggataaaatatttgcaagtcatacatcttataaggcaggggtccccaagccctggagactggtatgggtctgtgtcctgtaaggaaccaggctgcacagcaggaggtgaacagtgggtgagccctacctcctgtcagatcagcagtggcattagattctcataagagtgcaaatcctattgtgaactgcacaagcaagggatctaggttgtgcattccttatgagaatctaatgtctgatgatctgaggtaaaacagtttcatcccaaaaccatgctcctgtaccccagttcatggaaaaactgtcttccacgaaatgagtaggccaaaaatatggggactgctgctat

SEQ ID NO: 187545 - DNA, 613 bp, Homo sapiens
aaattaggcccttatttcatatcatatacacaaatcaacccaaaatgttttaaagattaaaacatagaccagaaactattaaactaccagaagaaaacatagtgggaaagctttatgacattagtttggacaatgattttttggatacaaccccaaaagcacaggcaacaaaagcaaaaatagactaataagaatgtatcaaactaaaaatttctgcatactaaaataagcaatcaacagaatgcaaaggcaatttatggaatgggataaaatatttgcaagtcatacatcttataaggcaggggtccccaagccctggagactggtatgggtctgtgtcctgtaaggaaccaggctgcacagcaggaggtgaacagtgggtgagccctacctcctgtcagatcagcagtggcattagattctcataagagtgcaaatcctattgtgaactgcacaagcaagggatctaggttgtgcattccttatgagaatctaatgtctgatgatctgaggtaaaacagtttcatcccaaaaccatgcycctgtaccccagttcatggaaaaactgtcttccacgaaatgagtaggccaaaaatatggggactgctgctat

SEQ ID NO: 187546 - DNA, 432 bp, Homo sapiens
aacaaataataacttattaacaacctgggatgaaatatgtatgtatgtacgtgtatatatatatgtgtgtacatccatgtgtgtatgtacatatgtgcttgtgtataaaaattcattaggtatggtaaacaacatactgtactggatagagttgaagagcaaaccactgagtcaaaaacctaaacacagaattttttttcaaaacaccrcatgaaatattaataaaaaagaggtagaaaggaagaaagaaaagctaagagacatggaaactcgatccaaaagttccagtactcacctaatagaagaatcataaagacagaatagttaaaatagaggagagagaatatttaaagagtccagcaaataaaatctcatataaacaaacaaacaaaacaacccttagactgtcatacacctttagaatagaaaaag

SEQ ID NO: 187547 - DNA, 603 bp, Homo sapiens
aatggaacacaaagtgttattgttacatagtaacagctcttgctcacatcgacaatttattccattctaattctaatctcttcttcacwggggagacaaaagtctgcacatttctcccttgcacagccctgcaacttgctactgggagaatggtttccttgtttccctgagactcacatttgcactttcttggcaaacctgctgagaggtatcagagtcactggacacaccccagaacattgatatgtttggaatttaatcagaagccccacaaaaatgggactatttaccttactcctggaaacacccatttgaaaaatatttaaaagctatcaaaatacaaattattaggactctgcccttcacaacgagctttttaggatttatgtattttgatatgtgcctcattcttcccaagaaacgaggtcaggcatttccctgattctgacattttagtgcagtgactagtaaaaagatggatagggtccaaccctgtttttccatacttctttaccttgttctttggtgtctgttttcttgcaggaggggcctggaaaagcctctcccagcaatctcaggtggcatggtcttactgcctggaat

SEQ ID NO: 187548 - DNA, 480 bp, Homo sapiens
acaatctggaatcaaatcctgtygttgtaggtaaaattttattggaggacagccacactcattcatttacatattgttcctcgctgctgttgcactacagttgcggaattgagtagttgctcatgaagctgaaaatatttactatgtcaccctttacaaaacagtttgcagattcctgatctaaaagatagttgtattttcttgtttgttgttttgttttatttttggctgcccagtgtctgagtacacttcccttgggtattcttaagcattttgagaaaagtttaaaagcagacaaggccactcactttcctggccttccttgcatctacggctcaaccattctgaagctctcaccatagttgtggacctgacgactagtgacacaaagaagcagggacagaagataatctgttttggtccctgtagtacctggggctacagcaaaccaatttccaggctgtggcaccatctgcacca

SEQ ID NO: 187549 - DNA, 463 bp, Homo sapiens
ttctataacatagcttcccatagagtcaaaaatgtacctgtgaagaaatattttccactcagttaatagattaggagaattggcattcattgcacataacattgtacaataagtaggttatgggatccaaactaacaactgtctaactttaagtctagcattagccttcctcaagcagttttcttggtaacttaccratataacaggttctttcttactttgcactttatggttattctctaccatttcaagaaggtgttcttttctccccagccaggcaataagctcctaaagacctcaactcatgtttcatcttctttgatagagagaagtgtgtgaccttgggatcagagtacaggctttgcagttggccaggcaaggttttagttcttggatggctaaactgttctgagcctcagtgtcctcatttataaaatggaattaacattaactatatgatgaa

SEQ ID NO: 187550 - DNA, 479 bp, Homo sapiens
caatctggaatcaaatcctgttgttgtaggtaaaattttattggaggacagccacactcattcatttacatattgttcctcgctgctgttgcactacagttgcggaattgagtagttgctcatgaagctgaaaatatttactatgtcaccctttacaaaacagtttgcakattcctgatctaaaagatagttgtattttcttgtttgttgttttgttttatttttggctgcccagtgtctgagtacacttcccttgggtattcttaagcattttgagaaaagtttaaaagcagacaaggccactcactttcctggccttccttgcatctacggctcaaccattctgaagctctcaccatagttgtggacctgacgactagtgacacaaagaagcagggacagaagataatctgttttggtccctgtagtacctggggctacagcaaaccaatttccaggctgtggcaccatctgcacca

SEQ ID NO: 187551 - DNA, 613 bp, Homo sapiens
ggggtttgggaatcgggccctggaggagaagcagagtttcaaagggctgagaatagcatagtttcactgtaaaccaatgtctacagcttattggggtgggggctactgagacgaaagacaccaactcgtttctagagggctaagaactgcactttaagaaagggcgrggaggtgaagggacccgagcaagaactttcagctgtgcgtgttagaggtgatgggagttactataacgcgtgtgctgctcccttctgccaggagcccactgcttttgcacacaagctgcattttgcgcattgactcaggtcccagttgctcttcatatctccgtgaatgattggagtgcaaagatactgttctgagcgcttcccgttttctgaaagccatgtctctcaggcatgcctcgcttagttggcgatggggttggttgactgttttcgtttttttcttcttctcttttcttcttcttcttcttttttttttcttttccttttctccccctcccaacgccactgacaagaaagcactaaagatgcaggttgtgcgatcaccctataacataaggaaaagaacaggagaggttaatttgaacgtgtaggctagtggtagaggg

SEQ ID NO: 187552 - DNA, 466 bp, Homo sapiens
tgtctgttgttcccttctttgtgttcatacgcactcaatgtttagctcccacttataagtaataacatgtggtatttggttttccrttcttacattagttcacttaggataatggcccccagccccatccatgttgctgcaaagtatgtgatcttattttttatggctgcatagtattccacggttaaactttacctcttggtgggaagatctgcaaggtcatgttaaaaaaaggcttgggcccagaaggggaatatagtgcccatggtgactatttttaccaacaaccacctgaaggatatagaaagccactgtctgctcaaaagggattcctagtgagtcctgttcagtccctctaccccttcacaaattacagggaaagggcttttcttttgctcccattatagttcttctgggcatctagggctctacacatcttctcttgagcttataagtgtactgggtt

SEQ ID NO: 187553 - DNA, 466 bp, Homo sapiens
tgtctgttgttcccttctttgtgttcatacgcactcaatgtttagctcccacttataagtaataacatgtggtatttggttttccattcttacattagttcacttaggataatggcccccagccccatccatgttgctgcaaagkatgtgatcttattttttatggctgcatagtattccacggttaaactttacctcttggtgggaagatctgcaaggtcatgttaaaaaaaggcttgggcccagaaggggaatatagtgcccatggtgactatttttaccaacaaccacctgaaggatatagaaagccactgtctgctcaaaagggattcctagtgagtcctgttcagtccctctaccccttcacaaattacagggaaagggcttttcttttgctcccattatagttcttctgggcatctagggctctacacatcttctcttgagcttataagtgtactgggtt

SEQ ID NO: 187554 - DNA, 449 bp, Homo sapiens
ctgtttgccagagaaagcttcagatctatctatatctctctgtcattacctcctcactattctctctctccctagtggggkcccctctgtgggtttccctagccacagccctcaggggtgtgttgtctgcagttggagccataaataatggctgcaccgtgagcctgtttgaggttacttattatatttactacacccagaggttttaattatttgtgtttgacataatggtagtaataataatcaaagttgatatttgtggagtgctcactgtatgtatgcctggcaggaaaggcagtgtggttaaaaaactaatgactgaaattagaaaaaaaatgggcctcgctctctagctacttgcggccaagcaccttcatctctgattttatttttttatgtctcccttaaccttttcaaaggattgttgggatggtcacagaaaagaattc

SEQ ID NO: 187555 - DNA, 430 bp, Homo sapiens
  misc_feature (1)...(430): n = A,T,C or G
ccactttttttcaagtaacttaaccatgtcccaaaacaaagctcaaaaatatttaggaacacanaaatatctagcatccancaaggtaaagttcaaaatgtctgacatcctaccaaaaattgccaagcatgcaaagaaatgggaaaatattagccataatgagataaaaaaattaattgattaaaagtcacccagaaatgtcacagattataattaacaaacatgacaataaaatakttattataattgtattccataaattcaaaaagctgagggaagaatgcacatgttgaatagatacatggaagcgactgttaaaaaccaatcttaggcttctagagataaaaacttcaagtgaaaaaagcactggataggattaatggcagataagacagtgaaatttctgaattttaaacaagaatagaaactc

SEQ ID NO: 187556 - DNA, 585 bp, Homo sapiens
tcagtaccacactgtcttgattactgtaagtatacagtaagccttagtattgagtggagtggttcttgccactttactcttcttctccaagattattttaggttctcttagaattcagatttcatggtcaatggttccttcttctcagcaactgaaaaatactttgccactaacttttgaccttcatagttccaaatgagaaatccactgtcattccaattggtgtttccctgtagggaatgtgtcatttcaatatttttttcttttatctttagtttttaaaagtttaattatgttgtctcttggtatggaattttgggggtttattctctttgggattcatgcagcttcttggatcagtacattgtggggttgttttttctttgccaaatttcagacagtttcagcaattatttcttaaaataatctttcacctccctccctttcatctctccttctgggactgtattagttcgttttcatgctgctgataaggacatacccacaacyggatattttttttttttgtttagttttaatcgacttacagttccaagtggctgaggaggcatcacaattatgatg

SEQ ID NO: 187557 - DNA, 422 bp, Homo sapiens
atagatgaaagatagatgatagatagataactaaatgttgactaatactctctggttratagaattatatgtgatggctattttcttcttttcatttatgtatatcacagatatatttctatggtaataaacgtaaatctgcatcaccatttaaaattctgcacaatatactattatatgagcttgcaaatattaatctatttatctatttatatatttattgagacaaggtctctagctctgccacccagcctggaattcagtagcaccatagtggcttgctgtagcctcaacatcctaggcttaagtgatcctcccacctcagcttcctgagtagctgggaccacaggtatgcaccagcaccttcagctaatttttgtagagacagggtctcgccatctttcccaggctagtctcaaact

SEQ ID NO: 187558 - DNA, 534 bp, Homo sapiens
acaaaccacctgcctatcgggaccatatttgactcactcagagtgttctggttggtatgccaggattctctaaagaaaatgtgaactaaattgagatttcatctccaaagagaaccagatttctgctttctcttaatcagccatraggtctgtcaatactgggtcccatttcctcaaggcagtgatcaactgaagcagaggagtgagtgcctgccttagaaggcatgtgccctcccgtttgcccaatcctcacccgccccaaggtctccccaacactgagcattgcttgccttttgtcatcacccttgcattactgtttcttatggtggagagatatttatttggacccaagtctctaccagaagtgacgaaataaaagacagacccagaaggctgaatatgtcagaataaaagggagaaggcatatttctctgtggaagaaaataatattcctctgtgtttaagagactgggttctcacacctgatgtatttcattcttctatattcccacctagctctgcaggcatttattg

SEQ ID NO: 187559 - DNA, 371 bp, Homo sapiens
aagaattaatgtcatgttaattctgaagcttcacatactctgtgcaaactcctcttacactagtcagagaaacatggtgataaaaaggtataatcgcatgacatgcaaagtgctgatgtgaaatgaaaaggacagaaatacaattgggatattaattcaagaggggaaaaaatagcactgtttgaataggcttagaaggatggtttagttcttcctgaaaataagtaggatgttattgcaccttatcttgacctccacctcaactctccccactcaagtacaatcaaatgtttagttcctgtgtgcacacaygcacgggcacacacacacacatgcacacacacaaaagcacacatatacacatcaaaaag

SEQ ID NO: 187560 - DNA, 576 bp, Homo sapiens
ataactgaaagggttggcatttctagacttgagtgtatggtggtctgtcttctctgagcaggcatttaaacctttgtttcaaaagggaactgattaggcaactgtgaatttctggagattaacctgtgaacagggacccttgtttatataactcacctaatgtgcattcaattgtgttataaagaatttgaacatgcaaatatttttgaaaacaataacaacaagaaaaactcctccagcttacacttagacttggcacctccacccttccctgaggcaagatgtgagaaaaaaaatataattatcatccactgagccatagactcaggccacagttttttaccctggtattaatcaatgcacatttagccctagccaatgtacrcaaacccagggttcacagcttctccctcttctccactccacccactggctcagacacacactggagctcaaaagagctttcaggtagagccctggtcctgttacctcactctgtggcaaaagcagggaaagtgtttggaatggcaggctttccaaaactgggggaatccaaatccagacagacacccagaa

SEQ ID NO: 187561 - DNA, 495 bp, Homo sapiens
tcatcagcctttggaaactatgggcacggtgtttgggtgtatgcggattttcctgggtacaagattakaggtttcattagattctcaaagggttctatgaccctccaaaagtctaaaaatcacggtcttaggatctagaggctttgaagactttggcctactggccgacctagttggtaaggtcaattaaacagaagtactgttaatacaatggcattcataacatgtatagtcataaaatatatgtttgaataaataagcaaacctaaagacacgcctttcctttatcaaattaacagagcattaaaaaaaattctttccttcctccctcctttccttctttttcatttcttttgaaacagaaatgaaagagggaaatcaaactgagtaggaatgtaaattgttacaatctttctggaaaacgttttggcaatgtgtatcattatcattgtcaccgaggctggagtgccgtggtgcgatctcagctcactgcag

SEQ ID NO: 187562 - DNA, 455 bp, Homo sapiens
gggagggtcagttgagcccatgagattgaggctgcagtaagccattgcaccakcctgggtgacagagtgagaccctgtctcaaaacaaaacacttaggagtagcagtagcattagtaaaacatggtcatattcttattttgaaacgtttttgaaatagtttttttttagcctcactattatattttagtaccagacaatagtatgaatactttcaatggtgttatttctccaaagcctctataaagaattccctttcttctgttttctggcttaaaaatgtgtctagctgggcacagtgatacatgcctttaaccccagctactctggaggctggggtgggatgatttgagcccagaagattgcaactagcctgggcaacattgcaagaccccattttatttttaaaaaaatttttgtctcatgtcataatgcaacatattgatccaaattttgt

SEQ ID NO: 187563 - DNA, 528 bp, Homo sapiens
agatctggctcaatgtcacagaactcgtatgtgggagattcaggtttcagactcaattcttgggatacagtccatgctgttaaacattacactagacagcctctaccgaacaatgactttttattacttgactgtttaaattcacctctcctctccttctcaaaatgagtaccaatttgtcctatgcrtaatttattctcgagccttaacgcttgttttctgcccttgtttgattccttttctcagtttgcaatttcactgttaggtttctgcattgtactcacaacatttttgagtactgcctgttataaactagtcattttgcttccacatattcattcctaaagagaagaccatttcttaagaaaaaatagaataaaggaggaacagattctcagatgtaatcatcatggtgtgcaatgaatatctgagcacttgcagggccattgcactttcaaatattccttttcttgtctgcataacaaggactcagccacactctcctaaagacagctggctatagtagtc

SEQ ID NO: 187564 - DNA, 448 bp, Homo sapiens
atcaatggcagaagttatcagagggagtggccttcagattgctggccaatagagggaaagaggagacaaggagaagtcacagatagcaactgcctctggcacatagcaaaacaatttatcttgaaatcaatgtatcaactagctgcataaattacataaattatgttctggttgtccacatcatcttcaaaacaataatcacaaagataataataataataagagctaggacttaatcrtccagcagtgtcctaaaagtattcattcatttaatcttcataacaaccccataaatactgctattatccgcatgtgaggaaactgaggcacagagaggttaagtaacttgtccacgttaggccactagaatgtggcagagctcaaatactaaagatgcatcctgttgacaacatcatgtaggtacctgtggtcagcaaggtaatggccc

SEQ ID NO: 187565 - DNA, 402 bp, Homo sapiens
aaaatagtcctgcctcaagctcttttcacttcttatcacttcagcaagagcatgtgaaggaaaggtgtctatcagccaacagctgctaattttcagagaaatgaatggatgtgtggctgcttccatttaatcagtcaccatctatctcagcagtattaatgcttccatttgaccagccacctctatctacacatacttcttttttatctaagagtctactggactttttcaaattcatctgaacatgtgatattttcacrgggctcaacattgaacaaaatcctctttaatcctaacctttcaccactttattttatttctcaacatttccctttcatagaaacacattggaagctaatccccaagactttgagagaagtcacccaagaaagtctgactttg

SEQ ID NO: 187566 - DNA, 295 bp, Homo sapiens
gccatgcatagaaaactcccaggtgaggacattctctgggatgctatagcccagaaggtaaaggaattctgtcactcaacacaggtctcctactttgcctgcaagaaggagacaagatgttgcatttggcctgttttgaaggaaggtaagtgtgcmcgtgtgtgtatgtacatatgtaaacacctgtgtggtcatgtgtagtaggctggtgaaggggaagaaaattgccaaaactgttcagtgctaacacataaagaaaacctttgtcaaaatgtctcacaggaagcccacacca

SEQ ID NO: 187567 - DNA, 295 bp, Homo sapiens
gccatgcatagaaaactcccaggtgaggacattctctgggatgctatagcccagaaggtaaaggaattctgtcactcaacacaggtctcctactttgcctgcaagaaggagacaagatgttgcatttggcctgttttgaaggaaggtaagtgtgcccgtgtgtgtatgtacatatgtaaacacctgtgtggtcatgtgtagtaggctggtgaaggggaagaaaattgccaaaactgttcagtgctaacacataaagaaaacctttgtcaaaatrtctcacaggaagcccacacca

SEQ ID NO: 187568 - DNA, 426 bp, Homo sapiens
ttctgttctgtctttatatttcttatttttatactttttaagggaaagggaaagtttaagaaattttatttgttagaatctagcattttatactttctctactaaaagtaacaagtcaattatcttctccaaagaaattatgaccaccagttgataaaggggatcagatgttcactcagtgaatttttagtgattacagacaggcactgtttgcatcaaattcaacaaytggcttttaaatatggcatttcctgtaatcactcttgaaaacagggtaacaagatagcatgcattctgtattaaatggtttctctgcaaaccagggtgttctctgccctgccttgccccaggtttgaacagttctgaacagccacccttcctttctccccaccattgttcacattctatgcatgaataagaaatgct

SEQ ID NO: 187569 - DNA, 580 bp, Homo sapiens
tgaatgactactttagcatctttcaaatatggcttccctaaccaatatcagccaagtcacgtgattcaccatgaacttcaagaagtcacttakcttaggttttgatagaagatatttggccatgatctcaattatggataagttcaaaattagagcattattaaaactgcaccagaaacaaacaatttcttcttatctgccttgttttagaaatgctcttggctcatgggggttccttttatagagtttccaaaacattagagagattaccactgctccttagcagaactggccataaaaaaagggcaaccaacttactttattaaaacaattaaaccattaaaatacaactgatgtcatttgtctgtgatatgttaacatgccatgcttaacatatccacagctgaaaaattaaaacagcaaccatttggttttggaaagatgggataagctactcatcttgcttgtcaaaatccatgtgtgtttggcttaaataccatttctatcaaacacacataaaatccaattagaaatacagcaggtacattatatgtgtatatatatataaaatatatataaa

SEQ ID NO: 187570 - DNA, 618 bp, Homo sapiens
ataagatgtagcaacacacttaatgatgtattctattgcaaagtgcttaacttgaacccatcaggcctttatgtaaagttcaacttgcaagaatatacaggacaaagaaacaggataaatgacataaggaggtaatagacaaatccagaagctgaggcattctgaggaacacctgtccgtgtctcttcaacaaagaattttgctggattaggctgggcacagtggctcaagcctgtaatcccagcactttgggaggccraggtaggcagatcacctgaggtcaggagttcgaaaccagcctggccaacatggtgaaaccccgtctctactaaaaatacaaaacaattagccgggcatggtggtccgtacctgtaatcccagctacttgggaggatgaggcagaactgcttgaacctgggaggtggaggttgcagtgagctgagattgcaccactgcactccagcctgggcaacagagcaagattccatctcaaaataaataaacaaacaaataaataaaagaacttgcctggattaaaaaatacttaagggacatatcatccagacataatgtgtaatcctaaatcagatcttgcctagacacatcagctgtggaaca

SEQ ID NO: 187571 - DNA, 451 bp, Homo sapiens
aaaacaattcctggatgcctttctaactaaaaccagcaggactaagtgctcaagattttataatatttcgatttagaggtttctagagttattcctgagacgtgccatagcagtaaatgaattggtgaattgagtagaaggtagttgtgacatctacacccaaattcttactctggtggcttgaataaaactggagaagctcaaggtagggcccagatagaggcccaggaaagcaaataaatgaaagacggtggggacacaggaaggatcccaaagacggcagctcagggtcctccacggaagacttgctcaggtttcctacttacacatgactctgagygccagggcagaacagggagtggaccacactgctgtcacatgcccgaaggttttcctacagcatcagactctgccacgaagcaaagcattttccacaaacttctctccatag

SEQ ID NO: 187572 - DNA, 476 bp, Homo sapiens
ctgaagttctagagccacagaaagaggtaagagaaagtacgatagaggatagagtggctcaagaggaaaaggaaaacacagtgtgactgtgggacaaaagcaaatctctgttacccttggtcttgagcactccttaagaggcgttcagagagaggaaaacccaagaaggcctaggatgctgctactctggcaggtgggggtgtgcaggcctgactattaggtarttgatataattatgatctcagctatgctaactggccagagaagcctggacatccatgttagtcttgcaagtcctccttttaaaagaaaacaagaagtgtattagtcagttctcatgctgttagaaaagactgcccaagactgggtaatgtataaaggatagaggtttaattgactcacagtttcacatggcagagaacttaacttacaatcagtggaaggggaagcaaacaccttcttcttcacataatggc

SEQ ID NO: 187573 - DNA, 571 bp, Homo sapiens
ttcatagacatatatgagaggatctttattatgggaattggaccacaygattatagaggctgagaaagcccacaatatgacatctgcaagctggagaaccagaaaagccagtggcataattcagtctgagcccaaaggcctgagaaccagaggagccaatgctgtaactcccagtcagaagctgaaggcctgagaagggattagggggtgggggtgctggtataagtcccagagtcccaaagtcagagaaccaggagctctgatatcttaggagaggagaagatggatgtaccagctcaaagacagaaagcaagaatttacccttcatctgtttttttgttctatccaggccctcaagggactggatgatgcccactgacattggtgagggcagatcttctttccccggtctactgactccaatgttaatctcttctggaaacagcttcacagacacagccagaagtgatgtttgcccagctatctggggatgccttaacccaaaatcagtcttcacagcaggaaattaggcagctgacttgtactctaaggctcagagcaggatttcctc

SEQ ID NO: 187574 - DNA, 594 bp, Homo sapiens
aatgccaagtgcaaaaccagtgttggaggagagacctggtgggaggtgtttggatgagtgcaaaaccactcagccaccatgataatgaaatattatggaagggaccagccagaagcttggcaggaatgaagaattctagatacacctgcatatatgtgtgattgtggaagtgaccaacactgtctcagatcccacagcctatagtcaatcagcaatttctacataaacaggcccctggtgttaagtgcctagagattgagagaggcatagaactgatgatgttttcattagttaatgagtttggttatcatcatgtaatctggccccttctacttctctgtcctgtcctctccccaagtccmttgtacttcaatcacttggaccttcctttgattcctcaaacacgtgtagctcattcctacctcagctcttgctcttccttctgcagggagaatgctacccctatgtctttgtgtggctagctttttggggttgttcaggtattaactcaaatggcacctgtttggtgaagaagtgcaagaagttagtgccttcttgcactacttcctgactaccaatccaaattagcaaacc

SEQ ID NO: 187575 - DNA, 594 bp, Homo sapiens
aatgccaagtgcaaaaccagtgttggaggagagacctggtgggaggtgtttggatgagtgcaaaaccactcagccaccatgataatgaaatattatggaagggaccagccagaagcttggcaggaatgaagaattctagatacacctgcatatatgtgtgattgtggaagtgaccaacactgtctcagatcccacagcctatagtcaatcagcaatttctacataaacaggcccctggtgttaagtgcctagagattgagagaggcatagaactgatgatgttttcattagttaatgagtttggttatcatcatgtaatctggccccttctacttctctgtcctgtcctctccccaagtccattgtacttcaatcacttggaccttcctttgattcctcaaacacgtgtagctcattcctacctcagctcttgctcttccttctgcmgggagaatgctacccctatgtctttgtgtggctagctttttggggttgttcaggtattaactcaaatggcacctgtttggtgaagaagtgcaagaagttagtgccttcttgcactacttcctgactaccaatccaaattagcaaacc

SEQ ID NO: 187576 - DNA, 606 bp, Homo sapiens
gttcccaaagctccttcatgtgaggctgtatgaaaaaaagcttatagtcaccactgctgtgaatgtggtctttttaaaagctcatctctatcttatagttatgacagagtaactgctaccagagttgtcctaccactgaaarcaataagaaagttggacaaatttatgaaacagctatttccaaatcctagacaacaagaagtgcagaactatgatcaacaagagtcatgaaacaaacaagcaagccctacagtttccctggctttctgccaagagtcacttttccagacagtggtgcaggggaaggaacacaagcataacactgcagtcttgccaagttaagcaagcagagatcagggttaagggaggctaaatcagctggaatttatggggcagagcactggaacagagagaactatgcagagaacgagcctagaatctgcataggggtctccttgaatctattgctgaaaactaagctctgaatgcttaggttaaaactccacaaagctatgcaaagaagtactgagaatctgtatgctgaacagttcctagagcttacacaggctatgagatagtagagatccagccagagggaagagatct

SEQ ID NO: 187577 - DNA, 563 bp, Homo sapiens
cctcagcccctcatttatgagatggattttccctcacagggctgttatgaaaatgaaacaacataacrtatgtaaatactatcctggtgccaggcactaaaaaagcacatgattaatggggaaagagaaagagagagagaacacagtctcttccctgcacacttactggggaattcgtttgctctccctcccttcccgccattcaggggattggagccctggggagcatctgaaacccaggatcagccctagtcatatgtcttcatgtcctgacacgtgctggggtccagtctccaccccgtactggtggctgtcctgtttatagccagcagactggagtggctgagcagtcagactccagctggagttccctgggagacctaatgtccccagcacattccagacctgctcccttgggaggcggtgccaagacagcatcttccttgccgcctgatttccatgaggaacaatggctaaggaaggaaggtcctgggatggagagtgagttggaggggtagaatgggatgcgggaaggggagagagcccttggtgtctgcaactgc

SEQ ID NO: 187578 - DNA, 602 bp, Homo sapiens
aagcttaatgtgctcaagaagtagaaagaagctaaagggtggaaagtgatggacaagggagagggtggcacaaaattagttagataagctaggcaaggccatgtcacgggccttggagatgcagttttgatcttaaaggggtcataggaagtatggttggagaacaggagacagaatttaagcattgcaatagttaatgttatgcagattttttgactagctaaggcaatgcccaaatcattagtaaaacattatttctggggtgtctctgagggtgtgtctggaagagattagtatttgaatctgtaaactgaataaataagatccactctcaycaatgtgggttggcattatccaatccattgcgggcctgaatagaacaaaaggcagaggaagggtgaattttcttctgtttgagctgggacatcatcttctcctgccctcagacattggaactcctggttcttgggccaggacttccaccataggctccccacccatctcctattggttccatttctttgacatcccctgattaatacaaatatggatctcctctggttccctctgggctcttcagcaagtcactcaccagtctaaaa

SEQ ID NO: 187579 - DNA, 602 bp, Homo sapiens
aagcttaatgtgctcaagaagtagaaagaagctaaagggtggaaagtgatggacaagggagagggtggcacaaaattagttagataagctaggcaaggccatgtcacgggccttggagatgcagttttgatcttaaaggggtcataggaagtatggttggagaacaggagacagaatttaagcattgcaatagttaatgttatgcagattttttgactagctaaggcaatgcccaaatcattagtaaaacattatttctggggtgtctctgagggtgtgtctggaagagattagtatttgaatctgtaaactgaataaataagatccactctcaccaatgtgggttggcattatccaatccattgcgggcctgaatagaacaaaaggcagaggaagggtgaattttcttctgtttgagctgggacatcatcttctcctgccctcagacattggractcctggttcttgggccaggacttccaccataggctccccacccatctcctattggttccatttctttgacatcccctgattaatacaaatatggatctcctctggttccctctgggctcttcagcaagtcactcaccagtctaaaa

SEQ ID NO: 187580 - DNA, 584 bp, Homo sapiens
tgttggtagtaaaagaattgagttactatgatgtgtctgcttcaaccttgcaaacctctgctgaaccaagacaactcaagagcgttttggctgaatgcattttargtcctatggcctactgcttggtgtctagaagcagtcagttttccaaatctgcaagaccctaaactcatcttgatttctagattctttttatcctttatttctgcttgcaaaccagccaattgtttcctgatcacatttctttcttataacacttgttcactgcagaaaggagcattcagcatattttatggccttagttatgccctccaaaattcatatgttgaagccctaacctccaatgtactgtatgtagagatagggactttaaggaagtaactaaagttgcaggaggtcacaagggtggggccctaatcaaataggactggtgtccttatcagaagaggaagatgcctaggagtgtgcatgcacagagaaaaggaggtgtgagaccacagtgagcaggtggccatctgcaagccaaggagaaaggcctcaccagagccaatcctgctggcatgttgctcttagacttttgggct

SEQ ID NO: 187581 - DNA, 379 bp, Homo sapiens
ttatgataaaccatggctttgtgaattcagttcaatgactctaggctttagccatgcagtattaacaaatgggatattaacaatattaacaaatgggataaaaaccaagacttkacaaatgtgttagtttcctatttctgttttaacaaatcacacaaacttactggctcaaaacaaaataaaagcattaatttatagttctgtagatcagaagtgtcattgggctaaaatcaaggtgtcagcagggctgcattctttctggaggctgtaggggagaatttcattgtcttgtttagcctctagagaatgcctgtattccttggcttgtggccctttcttccactttcattttcaaaatcagcagcataacgtggacaaa

SEQ ID NO: 187582 - DNA, 604 bp, Homo sapiens
tgcctactatataagtgagagcactgtagaccttccagctagctcattgccccagtcatcagcacagaagccgaaatgtctagtcaacacacagaaccatgagagataatacrtgtttgttgttattttaagctcctgaatattgggagtagtgtgttatacaacaaagaatacttaaaataacactgtagcctgttttgtaagtgagctaactattagaaattaaagaattctgcttagagtaatataggttcttctatcacatattcaggattaaattgatgacataggtcaaaatatgtaaagtccttagcacagggaatgggcacatagcaagttcgctgagatattagttactttttcccagacaatctttttgctgcagagattaccacctaccactccaataaaaaggagatgattcctttctgttaggtatatatttaatttcatacgtaacacaatatagtatattgtctaataattttacttggtggtctgtgatttaaagttatgaagccttaactgaacaatacttatttgctccaaaaaatcatttctctgaaaatataacatcataactaaattttataatataaagtag

SEQ ID NO: 187583 - DNA, 489 bp, Homo sapiens
tcttctatcacatattcaggattaaattgatgacataggtcaaaatatgtaaagtccttagcacagggaatgggcacatagcaagttcgctgagatattagttactttttcccagacaatctttttgctgcagagattaccacctaccactccaataaaaaggagatgattcctttctgttaggtatatatttaatttcatacgtaacacaatatagtatattgtctaataattttacttggtggtctgtgatttaaagttatgaagccttaactgaacaatacttatttgctccaaaaaatcatttctctgaaaatataacatcataactaaattttataatataaagtagagccttgcatttcatattgtttaattrctctgtcacataagaatcttagaatttttcttagtttgttcaattgctgtaaatgacttctgaaagtaatataattataacttgtaatggtaaatgcattcatagaattc

SEQ ID NO: 187584 - DNA, 501 bp, Homo sapiens
gaattcaacatcaccatccttaacatattakaaactaaggtgtttatgtttgcttaccttttgtgcattttccccatcttcaactgcaaaatctagtctgggctgcctggggctgatcaggtcttttagtgttaaacaatttacctccatctgtaatgcacaattacactagaaaatgattttgcaattaggtattttttcctcaaacaaaaatatctacatatgtgttacttgtttgtcaatatgaaattcccccttctctaagcacatcctgggcatttccaggagttgtagccaccctcaactttctaaaactcacgcgaacaaactcaaacacctaaagtgtgcttagtaatactgaaaatctgggaagaaaaaaatctacaaaaatagtaactccttatgaaaagctagatggcaaaataaagttaccaagtcggaagggtgttgggcaaatctgtcagaaaagtacagggtctcccaggtcagttaattttggcg

SEQ ID NO: 187585 - DNA, 503 bp, Homo sapiens
ttgaattcaacatcaccatccttaacatattagaaactaaggtgtttatgtttgcttaccttttgtgcattttccccatcttcaactgcaaaatctagtctgggctgcctggggctgatcaggtcttttagtgttaaacaatttacctccatctgtaatgcacaattacactagaaaatgattttgcaattaggtattttttcctcaaacaaaaatatctacatatgtgttacttgtttgtcaatatgaaattcccccttctctaagcacatcctgggcatttccaggagttgtagccaccctcaactttctaaaactcacgcgaacaaactcaaacacctaawgtgtgcttagtaatactgaaaatctgggaagaaaaaaatctacaaaaatagtaactccttatgaaaagctagatggcaaaataaagttaccaagtcggaagggtgttgggcaaatctgtcagaaaagtacagggtctcccaggtcagttaattttggcg

SEQ ID NO: 187586 - DNA, 457 bp, Homo sapiens
aaactaaggtgtttatgtttgcttaccttttgtgcattttccccatcttcaactgcaaaatctagtctgggctgcctggggctgatcaggtcttttagtgttaaacaatttacctccatctgtaatgcacaattacactagaaaatgattttgcaattaggtattttttcctcaaacaaaaatatctacatatgtgttacttgtttgtcaatatgaaattcccccttctctaagcacatcctgggcatttccaggagttgtagccaccctcaactttctaaaactcacgcgaacaaactcaaacacctaaagtgtgcttagtaatactraaaatctgggaagaaaaaaatctacaaaaatagtaactccttatgaaaagctagatggcaaaataaagttaccaagtcggaagggtgttgggcaaatctgtcagaaaagtacagggtctcccaggtca

SEQ ID NO: 187587 - DNA, 576 bp, Homo sapiens
ttgaggtggaagggagcctccttctggtcaatcacatagaagcgaattttgtttttcactgaaagttctactttgcctactttattgctggacttgcaaccagcttctcttactaaaaaaaaaaaattctgcagtaatcatgtaagaacaaaggggggaaaaaatcactctaaactacgacagcagaaatatgcccagacatatacatactycaaagcaaaggaagttctgtactgtttcaattactaatcatttaacacaacaaattccaaagaaaacacaacctacatattgaatatattctttagttatgggaagatttaggacaaactctgtaagctaaataacttgaaagtgaactttttgtatgaccttttctttaaaatatttattattttaatgtagtctacatgtagactcctaatatttatttataataaatgtactataggagcataaatcctgatttatttattttaatttacaaatacatcaatctgattaatggagtcatttttctgtcctatcacattaaattacatccatagccaaacccctaaagtaaattataggctt

SEQ ID NO: 187588 - DNA, 354 bp, Homo sapiens
ttcagtatgagtgaaaactactacttgcttctaatcaatagaatatgacaaaagtgatgggatccatttctgtgattaggttacatagaatcttatgttccatcttgctagcagactcttatcattgactctgtctcttgctagctttgatgtagtgaaattgcatatggagagatccatatggcaagaaactaaaagtgacctcaggcaaataacctgatagaaaccaaaactcacagtccaacatcccacaaagaaccaatcttgccaayaatcatgcgagcttagaagtggatccttcctcagttaagccccaaatgagactccagccctggttgacactttgactgtagt

SEQ ID NO: 187589 - DNA, 580 bp, Homo sapiens
cttgggttcttctgtctagccaaattataatcttttggaagacataagtgaaattatttcttccatatccaccacagcatcaaatgaaactgtaagtcacccagaaagtactcaacaactattcattgaatgataacatttttaacatttattttaggttcaggggtatatgtgagggtttgttatataggtgaattatgtgtcatgggagtatggtgtacagattacttcattagcacataataagcataatgctcaacaggtagttttttaatcctcttctttctcccacccttcaccctcaagtaggccttggtgtctgttgtcctcttccttgtgtccatgtgttctcattgtttaggtcccacttaaaagtgagaacacgcagtatttggttttctgttcctgcattagtccacttagaatcatagcctccagcyccatccacattactgtgaaaaacataatcttgtttttttttatggctgcattataccatggtgtatacgtagcacattttctttatccagtccaccgttaatgggcatttaggttgattctgtatgtttgctattgtgaa

SEQ ID NO: 187590 - DNA, 579 bp, Homo sapiens
atgactttactacacaaaaaaaatgcatgcttttttatcctcactcagtaatgtgctcaaagagggtgagcaattagagacagagaggcagcaataagtagtaataaggggagtgagcttttattcattcaagatgttaaagaaaagattgactagtttttaagactatgttgacttggaaaatttttttcaatgatgcaggaatctatttaaagtagtggagtacatctgagaattttctattgtaactgtaccaagaagtgattgcacaaaacaagttccacttttgtatataagaagagatatcttttactgagatatcttgagaagacgctttatgttctgcatgtctaagcagtgcaggtattaggtggcgtgattcatgagtataacattatcttgaatatgccttcactgttctgtattccactkatgccttccctagaagagacaatagaatgcccaataaagcttgaatcaatagagtaaagcaaattagcactggcaaaatgcctgcttgtcattgtttcagaagtagatttaaagctttaggatatttactgtgtctacattttgata

SEQ ID NO: 187591 - DNA, 536 bp, Homo sapiens
agatatgtctttatcagcagcatgaaagcagactaatacacatatcaccccggttaaaatggcttttatcaaaaagacaagcaataacaaatgctgacaaggatgtggagaaaggggaacccttgtatatggttggtaggaatgtcaattagtacaaccagtatggagaacagtttggaggtttctcaaaaaamtaaaaacagaactacgatacgatccagtaattccactgcttagtatacaccccaaagaaagaaaatcggtatattgaagagatatctgcactcccacgtttattgcagcactgttcacaatagtcaagatttagaagcaacctaagtgttcatcaacaaatgaatggacaaagaaaatgtcaattgtgtttctaactgtaactaccctggacattttgttattcacagaaaattgttgtcttgttttaattctcttcaaaagatggtttataataagctatggaactataacaggtactctaaaatacaggcttctgataactttggagattgtaatattag

SEQ ID NO: 187592 - DNA, 458 bp, Homo sapiens
ctgtctgtatgatttttgactaatctaggtacctcatataaattgaataatacaatattcatctttttgtgactggcttatttcacttagcataatgtctcccagatctatgcatgttatagcatgtgtcagaatttgctgcctttttaaggctaataatattccattgtatgtagtatatgccattattttttatccattcatctgtcactagacacttttattgcttccacctttcggctattgtgaacaatgctgttataaatatgggtgtataaaaatccattcaagtccctgctttyaatacacagaagtaggatgcctggatcatatcgtaattgcatttttaattttttgaggaactgccatattattttccatagcagcttcaccattttacattcccactacaaatgcacaagggttccaatttttccatatccttgtcaatacttgtt

SEQ ID NO: 187593 - DNA, 531 bp, Homo sapiens
attctctggattatcaggcagagactcttgttctcttcccttactttctcccatacatacagagtaactctgtgtgtgtttgttctgagatagctaaagctggggktggagtgacacaagcacccctgtgtcaccaccactatgactgcattgggtcagacgtgaagccaccacagtgctgggtctcactcaaggcctgttgtaaggccctggctactgcctatgtttgctcaagcccaagggctctacaatcagcagataacaaagctagttaggcctgtgtccttctgtcagagcagtgatgtcccccagtctccgtgtggttccagaagtgctgtgcaggaatcaaggactagagtcaaaaaccttagaaatgtacctggtgtcctgttggattgcagctaagctggcactccctccacacaacaaatccttcctgcttttctcttccttgtccaaagacagaggagcctgacctcatagtcaccaccaccccaagccacatggagtaccgctagactcccatcaata

SEQ ID NO: 187594 - DNA, 521 bp, Homo sapiens
tcagtagttcctggaatttctcacattgggttctgttccctacgtgaagaaagagaggtttgccattcacagccatcttctctaggtygatgctgggctccttgttgctcagcagaaaaatgctacagccatcagggctggatagaaatgtcagtcagtctctctctttctctctctcccctttctgccttccttcctttctctctccttcgcatcttccttcctattcttccaatctttctgaatggttaatctttctgccattgagtgtgggcagttattcaggccacactttctgacactcactgcccacaactgcccacactcaatggctcctggattgataaattagtctcagtagattgtattcttattgtaagatgttgcctctgctgcatgtcacagacaccaaaactaacagtagattacacacaacagacttttctttctttctcatagaaaaacctggaatgatatggtatttggtctttattaagttgtcaggggcccagactccttct

SEQ ID NO: 187595 - DNA, 402 bp, Homo sapiens
tattttagacattactcctccacaactacaagataatatgtttgtattgtcttcagacccyacagttgtgttatttgttacaatagcaacaggcaaactcacatgctaagtgaggtattaaggcaagtggctcaaggctgaatgtagggaactggctgagacagcctgctgaagacagaggctcactcttgctgaattattaattaattagctcactcaaatctatttattcagtaccttactaggtgccagacattattctaggtactaaggatgtacagtaaataaaagggacaaaaatccttgtccccaggaagctttattctagcagaggaaacagacaataaataagtaaaatctattgtacattgactagtgataagtgctaaggagaagaatcaa

SEQ ID NO: 187596 - DNA, 402 bp, Homo sapiens
tattttagacattactcctccacaactacaagataatatgtttgtattgtcttcagaccccacagttgtgttatttgttacaatagcaacaggcaaactcacatgctaagtgaggtattaaggcaagtggctcaaggctgaatgtagggaactggctgagacagcctgctgaagacagrggctcactcttgctgaattattaattaattagctcactcaaatctatttattcagtaccttactaggtgccagacattattctaggtactaaggatgtacagtaaataaaagggacaaaaatccttgtccccaggaagctttattctagcagaggaaacagacaataaataagtaaaatctattgtacattgactagtgataagtgctaaggagaagaatcaa

SEQ ID NO: 187597 - DNA, 446 bp, Homo sapiens
aactcacactgctcatcctagttccagaagactgtttcctgcaaatgcgcagaatttgtagtaaatgggcawgttttgattagcaaaaaagtcatctaattgttagcaaaggtagacattacaagaaatttttaagaataaaatgaaaaacctatccaatctaaccattttcacagtaagctctttggtatgtttccttcctagctgtcctttagtgcatgcgttggcaaacattttctgtagagggccagatagaaatattctctgccttacaaccatctgctctctgttgtaaagattcaactttgccattaataatgcatggccatgttccaataaaacttgattttgaacactaaaatttcaattttgtgtaattttcaggtgtcatgaaatatcattcttttttgattcccccctccatcatttaaaaagatagaagatga

SEQ ID NO: 187598 - DNA, 466 bp, Homo sapiens
agcattaattgatcaacggaatgaacttactagttacttgagaattaataccagcaagagttattaagaaatagcaaaaatcattttgtgatactagctaatgttgactgagtgwtttctacatgtctggaaccagctaagtccttgatacatgagacagcgcagagcatagtgacgagtggggctctcagattactcggttcacaatcccagctctgccacttagcagctgtatggtcttaggtaagttactttacctctctgagcctccgtttattttatttattttatattttgagatgagatctcactccgctacccaggctggagggcaatggcacaaacatagctcactgtggcctgggcaacagagcaaaatcccatctcaaaataaaatccaatatcttgactggaaccttctgagaaaccctcagccagagccacccagttaagccactccagaatt

SEQ ID NO: 187599 - DNA, 466 bp, Homo sapiens
agcattaattgatcaacggaatgaacttactagttacttgagaattaataccagcaagagttattaagaaatagcaaaaatcattttgtgatactagctaatgttgactgagtgatttctacatgtctggaaccagctaagtccttgatacatgagacagcgcagagcatagtgacgagtggggctctcagattactcggttcacaatcccagctctgccacttagcagctgtatggtcttaggtaagttactttacctctctgagcctccgtttattttatttattttatattttgagatgagatctcactccgctacccaggctggagggcaatggcacaawcatagctcactgtggcctgggcaacagagcaaaatcccatctcaaaataaaatccaatatcttgactggaaccttctgagaaaccctcagccagagccacccagttaagccactccagaatt

SEQ ID NO: 187600 - DNA, 466 bp, Homo sapiens
agcattaattgatcaacggaatgaacttactagttacttgagaattaataccagcaagagttattaagaaatagcaaaaatcattttgtgatactagctaatgttgactgagtgatttctacatgtctggaaccagctaagtccttgatacatgagacagcgcagagcatagtgacgagtggggctctcagattactcggttcacaatcccagctctgccacttagcagctgtatggtcttaggtaagttactttacctctctgagcctccgtttattttatttattttatattttgagatgagatctcactccgctacccaggctggagggcaatggcacaaacatagctcaytgtggcctgggcaacagagcaaaatcccatctcaaaataaaatccaatatcttgactggaaccttctgagaaaccctcagccagagccacccagttaagccactccagaatt

SEQ ID NO: 187601 - DNA, 530 bp, Homo sapiens
gaccttacataacacgcccaagttcacacagctggtaagagacagagctgggatttaaacccaggtctatacacgcctttcccctatacagatcagagagggaaactaaagatgggaagggagtgagcccaggaaagagacaaagcatcccaatgccaggtagtcagaaaagactccgaaaatgcagggagagatccaccatgtggcctggtgatgttacgccattgccgggacgaagccttaatctttaagctgccatatcmcaggcagccccagttctcccctctgccccctaacccaccgcttcctgtgcagtgtcctgcacgtgagtccaccctctctcttccctctctcatatctcataagaagagacagtgtattctaaatgctgtgatttatggggaacagccacttcccgtgaccatccatctctcttcacagggacacatatgttggggagcatctatccccatcattttctgccaggaaccaatgggccggggaattcaagaaatgcccctaaattacaa

SEQ ID NO: 187602 - DNA, 542 bp, Homo sapiens
tcgaaagccttttatcattcagttccagcaaccacattcaaacctcctcactctgttctcccagcacagtgaacagtttgcctccaccttccccttttgccacttctctcttttttcttttcttttcttttttcttttaaatcatgatcaggaagttttcacagggacttccaatgcttaaaagaccagagactaaacttacatcagcatcagttaggatgccttcagatacaattaacagaaaagccagctcaccttgcattaaaccttggagatgtttaatttggacatcttcagacatctatagacaggcggttgctttccaggtttggggcagccactccactggacatcaaggtaagccctccccattcatctactcccccaagctcaacgcattcacttcccttcctgttcatcaactcacgccttcaaaatggtagccayagctccaagcatcatgagctcagtcagaggtagaaagtctaggagagaggcgaggcctttttctaggatcactttgtccttcgatcaataaaaaa

SEQ ID NO: 187603 - DNA, 445 bp, Homo sapiens
ttatttccacagtaggaaaaagacaagcttggggttatttccggattcctagtggtgttcaaactcacaaggacacccagtaaagactggcttgataaaattctaacagggatcatttattgaaagggcgtattaactgtaattaaggacatgaaatttggagtctgccatcctgtaaataccaggttgaccacttactaactgtgtaaccttggaaaagtgaccacactgctctgcctcagtttccacatctgtaaaacggggacaataataacctcatggacttgttaggaagattaaatgagttgataaatgtgaagtgcttagagcagtgcctggcacacagtcagcaaatatgagtttattaatatctattkaacaggtattgggcatagattattgtgtgttcgatccatacaacagtctttcatgacaatgttgccat

SEQ ID NO: 187604 - DNA, 248 bp, Homo sapiens
cctaatcattctcattgcagcctgcatcagtctgcatggtccttagattccagaagagcctgtatgtcatggcatctatatctttgtcttccttcccctctagcttgtgaatccccctctccttaaggggaayggggatcacatcttacccacagttgggtctccaaggtctagcatagaacctgatacattgtgagcacccaggatgttgaatgagtgaatggatgaatgaacgaatggaacaacag

SEQ ID NO: 187605 - DNA, 451 bp, Homo sapiens
agtgtgtgcttggggaacagcacacaggytttgaaaaagaatgaagagggagacaagatcctattttgtaggcccttgaatgcaactactaaaggtatttgagaaggaaaataggataatgtaaactgtttagataacctgcataaataatagtctagtcacaggtggtaaagtagtctacagatgatgctaataagagctaatttcctggatcacctgctgtgttcagttctgattgtttaaaaatccttccagcaatcctttgagttaggtgctattatcatttccattttacaggtaagaaaactgaggcatgaagaaaagtaactcacttagagtcacacgtacagtaattggtcacgaatatccgaatgggttaaatccctttctgaatgaaattgaaaaaatattctttctttgtctcacaatgttttagctaagttttctttat

SEQ ID NO: 187606 - DNA, 604 bp, Homo sapiens
catctccaccagctctatttacccagctgtgtatctcaggatctgtctctgacatttttaatactctctcatttctctgtcctccagggattcatttgaagaagcccacagggacgggtgacactgaggaaacaaaacccaggccccccggcctccgactgagccgtgcagagcatgctgggagatcacctccacctgaggagcacaaaagaccccaggagtggaggaagctggcctgaggccaactggatgtagcagacttgctgagcccaaggagggaggtctggtgatggagsctcgagtacatatccttccaatcctaaggtaaacagcgcttggggctttggctacagggaggttgtggcccattgaagtgggtggtacaaggcgggtacaaggcaggccttctgatttttttttttaaactgtcttatgaattatactgtacctacagaaaaaacacaacaggaaacttaaatgaatggctcaaagaaattgcaaacgtttgcccagatcaagacctaagatgttattagctccttagaagtctcgctcctgccctctctaaattgttatccttcatccatacctttccccaaaagtg

SEQ ID NO: 187607 - DNA, 604 bp, Homo sapiens
catctccaccagctctatttacccagctgtgtatctcaggatctgtctctgacatttttaatactctctcatttctctgtcctccagggattcatttgaagaagcccacagggacgggtgacactgaggaaacaaaacccaggccccccggcctccgactgagccgtgcagagcatgctgggagatcacctccacctgaggagcacaaaagaccccaggagtggaggaagctggcctgaggccaactggatgtagcagacttgctgagcccaaggagggaggtctggtgatggagcctcgagtacatatccttccaatcctaaggtaaacagcgcttggggctttggctacagggaggktgtggcccattgaagtgggtggtacaaggcgggtacaaggcaggccttctgatttttttttttaaactgtcttatgaattatactgtacctacagaaaaaacacaacaggaaacttaaatgaatggctcaaagaaattgcaaacgtttgcccagatcaagacctaagatgttattagctccttagaagtctcgctcctgccctctctaaattgttatccttcatccatacctttccccaaaagtg

SEQ ID NO: 187608 - DNA, 604 bp, Homo sapiens
catctccaccagctctatttacccagctgtgtatctcaggatctgtctctgacatttttaatactctctcatttctctgtcctccagggattcatttgaagaagcccacagggacgggtgacactgaggaaacaaaacccaggccccccggcctccgactgagccgtgcagagcatgctgggagatcacctccacctgaggagcacaaaagaccccaggagtggaggaagctggcctgaggccaactggatgtagcagacttgctgagcccaaggagggaggtctggtgatggagcctcgagtacatatccttccaatcctaaggtaaacagcgcttggggctttggctacagggaggttgtggcccattgaagtgggtggtacaaggcgggtacaaggcaggccttctgatttttttttttaaactgtcttatgaattatactgtacctacagaaaaaacacaacaggaaacttaaatgaatggctcaawgaaattgcaaacgtttgcccagatcaagacctaagatgttattagctccttagaagtctcgctcctgccctctctaaattgttatccttcatccatacctttccccaaaagtg

SEQ ID NO: 187609 - DNA, 608 bp, Homo sapiens
ggaaggcaagcggtgtacttgccaatcccctaccaagctggtatctcctggttttcttctttcctgctcagctgcttcagccagaggaaggccgttgccacaggcgtctgtcccctaggtcatcaccagggagctccctagtatcactaggtgtttgtccctgcagtgtcctgtgtccctgtttagatcccgccagggggtgatctggctccttctggactgcccttgaaaattccagtcacactgacacaacaaatatttactgagcatcactctctagcaaggctctgggctgggcaaaccctcaacctycaggagcttaatatctcagtggcatctccatgtggtagaagatgagagataagaaaaacaaaaacataaacaaaaaatcttaaccactggcctgttcctaaagaggtctaatggtaagctggagccagcactcatgggcttgcaagaatcagctgaaaaactttcaagaatttcgtgacttagttgtgaagccatcggtaggttaagattggtcatggtgagaatatctgcatggagaaaatcagcaaagactagaatcaagctccctcacaccatcaagtttaccagcacaccac

SEQ ID NO: 187610 - DNA, 608 bp, Homo sapiens
ggaaggcaagcggtgtacttgccaatcccctaccaagctggtatctcctggttttcttctttcctgctcagctgcttcagccagaggaaggccgttgccacaggcgtctgtcccctaggtcatcaccagggagctccctagtatcactaggtgtttgtccctgcagtgtcctgtgtccctgtttagatcccgccagggggtgatctggctccttctggactgcccttgaaaattccagtcacactgacacaacaaatatttactgagcatcactctctagcaaggctctgggctgggcaaaccctcaacctccaggagcttaatatctcagtggcatctccatgtggtagaagatgagagatragaaaaacaaaaacataaacaaaaaatcttaaccactggcctgttcctaaagaggtctaatggtaagctggagccagcactcatgggcttgcaagaatcagctgaaaaactttcaagaatttcgtgacttagttgtgaagccatcggtaggttaagattggtcatggtgagaatatctgcatggagaaaatcagcaaagactagaatcaagctccctcacaccatcaagtttaccagcacaccac

SEQ ID NO: 187611 - DNA, 547 bp, Homo sapiens
gctcatgtgaatgttggccttttgatctcatcttctctatggggttgttttcacctcccttgggcaggacatttcaggatttgcctagctactgagcccaattaacatactgtgtaaagatttcattagcacgtggagaatgcctgggtgcaaagtaaatcaccatgtcattttgctgatgctaattatttcatctacaaacaatcaagagtgtgactattgcttgatcagagaaaagttgttcatctccctgggggagccaagtcagagccaaaatgacatgaatttatttggaatatatgaagttccctaccatcacattgtcgatttaacagggatagattatttgcaagatgtgtttgtgtgtgtgtgtgtgtgtgtgtgtgtgtgtgtgtgtggtgtgtgtgtgtgatctatacaggaaagtgagcttgatccttgccctgaaggaggtaagattctgtttagaaaggagggacatgaatgcatttttccttcatttmtgcattcacacaatttttttctcttcttacgcatagctcatttg

SEQ ID NO: 187612 - DNA, 479 bp, Homo sapiens
aagtcacatgacacaacctaggccaattaggctcttttccacccacaaaaccagtctcctgtattcagttactactgtttgaaatcactggagtgctttcagttttcttattttgttttaaatcctttcttctcttttyttttcttccttttttgtttttttagagacagggtctgactgtgttgccagggtggtctccacctcctgtactcaagcaatcttcttacctcggcctcccaaagtgctgggattaaaggtgtgaggcaccatgcctggccttggtttcagtttccttgacaggccctgagtgatactatcacataatatataccatttataatatgcttattacatgccaggcattgagataagtattttacctggattatttcatttaatcctcatatccatcctatgacagaagcatcgtgcttgcttgcactgaacagatggagaaaatgagaaaaagtataacccaa

SEQ ID NO: 187613 - DNA, 585 bp, Homo sapiens
ttggaaggctgaggtgggtgaatcatgtaagcctaggagtttgagatcagcctgtgcaacatagtgagaccctgtctctacaaaaaaatcaaaataaaaaagggtgcatctttgttcagagttgtcttataatagaaaatatgatgtacaggctgggcacagtggctcatgcctgtaatcctagcactttgggagactgatatgggtggatcacttgagctcaggagtttgagaccagcctgggcaacatggtgaaaccctgtctctactgaaaaaaaaaaaaaaattagccaggcrtggtggtgtgcctgtagtaacagctaatcaggggtctgaggcaggagatcgcttgagcccgtgagaagccaagtagcagtgagctgagattgtgccactggccactgcactccagtctgggtgacaatgtgagaccctgtcacaaaaaaaaaaaaaagaaaatattatgtacagaaaaaagagataataatattataaacatctatttatacatacatatctaggttgaatttaatcatttaaagatatacttgcttcagatatttcttctatttgcaaacagttgaa

SEQ ID NO: 187614 - DNA, 585 bp, Homo sapiens
ttggaaggctgaggtgggtgaatcatgtaagcctaggagtttgagatcagcctgtgcaacatagtgagaccctgtctctacaaaaaaatcaaaataaaaaagggtgcatctttgttcagagttgtcttataatagaaaatatgatgtacaggctgggcacagtggctcatgcctgtaatcctagcactttgggagactgatatgggtggatcacttgagctcaggagtttgagaccagcctgggcaacatggtgaaaccctgtctctactgaaaaaaaaaaaaaaattagccaggcatggtggtgtgcctgtagtaacagctaatcaggggtctgaggcaggagatcgcttgagcccgtgagaagccaagtagcagtgagctgagattgtgccactggccactgcactccagtctgggtgacaatgtgagaccctgtcacaaaaaaaaaaaaaagaaaatattatgtacagaaaaaagagataataatattrtaaacatctatttatacatacatatctaggttgaatttaatcatttaaagatatacttgcttcagatatttcttctatttgcaaacagttgaa

SEQ ID NO: 187615 - DNA, 596 bp, Homo sapiens
aacagttgtaaccaactggtaatgataagtcaagtgcttgcttgagttctgtgagccactcttgcaagttacgaaacctgaagggaggaggttatggccacccctagctttgtagcaaggttgaacagaagtgtaggtaccctgggtactcaatacttgagactggcatctgaagtgagggtggtcttgtggaactgagcccttaaattgggggaaactgatgctagctccaggtagtgtcagaattgacctgaattgtaggatatccagttgatgtccagagagttggcacactggttggtgtgaggaagatccattcacatttttggtgtcagaaatgtgagtaaaaagttcgtgaagccctctcagaacatatgagagttgcgtgcttaatttctttatgagcacttggtagtggtagagattagaatttttgttaaatttattatgcttttaatttgatttgtacttcctgataattctggaagttgagcattggtttgcrtatctattgattatttaagtttctttctctgtttattaccagctaataccctttgctctttgtacattctgcatagtctccttgctggttg

SEQ ID NO: 187616 - DNA, 579 bp, Homo sapiens
tatgcatgtagtaggaactatgtgccctgactcccttgtccaactggcatgcccactccccagctgatgtgagttttgatagccaatggccaacatctgcacctttcttccaagcattactcttggtcaataggarctgcctcaccgagggatgcctaggaggctgtgatggcacacacctcctccacaaggcagtgtgcaaccagtgactcactagttcaatgtccctaggtgggtcagcttggtggggccatttgcactccagagctcctgctgagatcagacagaggctaaactcagctttgcttggcttcttcctctgtatggttctgctctctacaccaacttataagcccctcgtacaacttgtttcttgggtcttcaataaatcaccttcacaagaacacccatctcagatcctgttactggagaacccagcttcaacaatgtattagtttacttatttaaaatctgccctccttaactacgtggtggcacacgcctgtagttccagctactcaggaggcttaggcgggagacttgccctgagctcaggagtttgaggctgcagtgagctat

SEQ ID NO: 187617 - DNA, 625 bp, Homo sapiens
gtctgctttttgtaattttcttctgttttcctttcttccttgccccaatctctcaccttcctattgttctcctgccttttccacttgccttccttttctccctgcttccattcttcacttctccaaaatgtatgtattaagagccacaatgaccagcaaagagctaagcagtgggaatgcgtcagggaacaagatgtgttctgtgtttttgaasagttttctgtcttttatttttattattattttccgagacagggtcttgctctgttgcccaggctggcatgcagtggcgtgatcttggctcactgccacctccgcctcccaggttcaagcaattcgcctgcctcagcctcccaagtagctgggattacaggtgcccaccaccacgcccagctaatttttgtatttttattagagatggggtttcaccatgttggataggctgatctcgaactcctggccttgtgatccacccgtctcagtctcccaaagtgctgggaatacagacatgagccactgcacctggccaagacaaaaacagtcacagcgttccttggtgggctcaaagcagcttgctgtcttgaactctcaggcgtcactcattctagtttcctgtgtgcctcta

SEQ ID NO: 187618 - DNA, 625 bp, Homo sapiens
gtctgctttttgtaattttcttctgttttcctttcttccttgccccaatctctcaccttcctattgttctcctgccttttccacttgccttccttttctccctgcttccattcttcacttctccaaaatgtatgtattaagagccacaatgaccagcaaagagctaagcagtgggaatgcgtcagggaacaagatgtgttctgtgtttttgaagagttttctgtcttttatttttattattattttccgagacagggtcttgctctgttgcccaggctggcatgcagtggcgtgatcttggctcactgccacctccgcctcccaggttcaagcaattcgcctgcctcagcctcccaagtagctgggattacaggtgcccaccaccacgcccagmtaatttttgtatttttattagagatggggtttcaccatgttggataggctgatctcgaactcctggccttgtgatccacccgtctcagtctcccaaagtgctgggaatacagacatgagccactgcacctggccaagacaaaaacagtcacagcgttccttggtgggctcaaagcagcttgctgtcttgaactctcaggcgtcactcattctagtttcctgtgtgcctcta

SEQ ID NO: 187619 - DNA, 625 bp, Homo sapiens
gtctgctttttgtaattttcttctgttttcctttcttccttgccccaatctctcaccttcctattgttctcctgccttttccacttgccttccttttctccctgcttccattcttcacttctccaaaatgtatgtattaagagccacaatgaccagcaaagagctaagcagtgggaatgcgtcagggaacaagatgtgttctgtgtttttgaagagttttctgtcttttatttttattattattttccgagacagggtcttgctctgttgcccaggctggcatgcagtggcgtgatcttggctcactgccacctccgcctcccaggttcaagcaattcgcctgcctcagcctcccaagtagctgggattacaggtgcccaccaccacgcccagctaatttttgtatttttattagagatggggtttcaccatgttggataggctgatctcgaactcctggccttgtgatccacccgtctyagtctcccaaagtgctgggaatacagacatgagccactgcacctggccaagacaaaaacagtcacagcgttccttggtgggctcaaagcagcttgctgtcttgaactctcaggcgtcactcattctagtttcctgtgtgcctcta

SEQ ID NO: 187620 - DNA, 614 bp, Homo sapiens
aatggaagctggaagccagttgtccttcctgggatcagagctactccacattttccagcaccttctgcaggtaaaatggagccatgtgaccgagtctggccaattatccattaaacctcacatgaagttctcctggcttgtctctctctttttcatttcctaggaggatgccgagtatgtggtagagtactccaagtctttgcagattacaaagtcaccagttrtaccaacactgggtatttgaatcaccatgtagaaatgcaccttctgaacatccagtaggtctatgatataagaaacagatagacccttactgtgttaagccactgaaatttggggctgtttgttacatcagctagtataatttattcttgctaattcaccagagtagacctatgagaaacttgagtgcaaatctacagtcaatgcatgttaaaactaagtgaatcattttttttctggggctatttcaaaaccatttttctaggataattggctcccaacttgtacaatataaagagaggtttatgttgggaaaactctgtccttgtggggtaactgctgtcataggcagatttagcaaggatttcttgataggaaactaccagggtgcc

SEQ ID NO: 187621 - DNA, 394 bp, Homo sapiens
ttgctatgttgcccaggctggtcctggatgcaagcaatcctcctgccttggcctcccaaagtgctgcaattacaggcgtgagccaccaggcctggcctgttttacttttacaggtttttttaaaattccatatgaatattaaaattagcttatccatttctggaaaaaaagaagttggaattttgatagagaatrcattgaatctgtatatcaatttgtaaagtattggcatcttaataattttaagtcttccaatacatgaacataaatgtctttccatttatttaggctttatatttctttcagcaatattttgtagtttttagtatatgagacatatgagtcttacacctctaaagttaagttgattcctaagtattttattattttttat

SEQ ID NO: 187622 - DNA, 598 bp, Homo sapiens
attattcttcgtgttggacctcatttatttttattcatttatttattttttcaacgtttattttaggttcaagggagtacattccttgttgctgaggtttggtacacaatgatcctgtcacccaggtagtgagcatagtacttgataggccatttttcagcccttgccctcctcccaytctccctcttcagtagcccctggtgtctattgtgctcctctttatgtccatgtctactcaatgtttagcttccacttgtaagtgagaatatgtggtatttggttttctgcttctgcattaatttgcttaggataatggcctctagttgcatctgtgatgctgcaaaagacatgattctattccatttttatggctgtgtagaatttcatggtgtatacgtaacacattttctttatccagttcactgttgatgagcacctaggtttattccatgtgtttgctgttgtgaatagtgctgtggtgaacatacaagtgcatatgtctttttggtagaatgatttcttttcctttgggtgtgtatctactaatgggattgctggattgaatggtaattctgcgaaaagataaaacttgaaaata

SEQ ID NO: 187623 - DNA, 522 bp, Homo sapiens
ggaagctgcagtgacctatgattatgccaatgcacaccaacctgggtgacacagtgggaccccatttctaaactaaataaagaaaaataaagaaataaaaaataaaaaaattatttgcacatttattttatccactggttcacttacgrttttgggtcacattccataaaagtggagactgagagaagaattaaaaagtccttttttaattgagggagggactgctcttaggagaaacctgagagggagagaagaacaccagataggggagaggcaagagctgagcaaggatgtgccaggtaaggtctaaatttggcctgatcagtgtgggatgctggagcatgtgtcccaacacaggcatccttgcattgtggcagcaaagtgccagccctttctaaaagttgtcacataatagcaaacaaatggaatcaacctaggtgctcatcaatggtggattggataaagaaaatgtgacacatatacaccatggaatactatgcagccataaaaaggaatgaaata

SEQ ID NO: 187624 - DNA, 520 bp, Homo sapiens
gtagcagcaaattacctgatatgcttgtcagtagcaggtacagaagatgcctcatccgtacgaccttgacacttaccaytcctactaaagatgtctttctggtagtatgcctctagaaatgggagcagctgagccagagtccagggcagactggaattgctgggcagttaccatccatgggagcatccctcagccaccgatgaatgggagttggtgcataccccagcttccctacttcttgggtaggccaactctgaaacatgttttcccatatggacactgactcctgcttgtctacagtggaaacctcctcatctatgccccaaggattggccttttcattcactttcctctactggtgtctcctgagatcacctctcaaatcaaatactacactcacaccttcatcttcaagatcttctggatatgtatcctttttaaagtagaagttcatatttctattatttagataataacacatgagttaattatgtacaaacataaataggaagttaaaaag

SEQ ID NO: 187625 - DNA, 534 bp, Homo sapiens
ttgaggaccccatggcatgaggataaagggatggcttctcaactaaaaagcagttcccagagacttaggaaggagtagatagaggctcagaataaaaattaagaagattaaaaatacagaaatgtgaaatatttttcttagtaagcctttagatcaaaattcagatggatagcctttagttcaggtataaataaactattggccttttcaatttgagtaatctcagagaaggaggtcagtgttgtacaagaagataaaattatatgcaaggaaataaaatattyctttttattttaagggattccttaagaaaataaaatacactttaaaatctttttttttttgagatggtatctggctctgccgcctaggctggagttcagtggtgtgatgttggctcaatgcaacctccgcctcttggattcaaaggatcctcccacttcagcctcctgagtagctgggattacaggagtgcaccaccatgcccggctaattttttgtgtttttagtggcaatggggtttccccatgttgg

SEQ ID NO: 187626 - DNA, 663 bp, Homo sapiens
cctaatttttgcatttttagttttggtttcgccatgtgggccaggctggtctcgaactcctgggctcaagaaaccttccctccttggccttccaaagtcctgggattgcaggagtgagccaccacacccagctaagattgttctgtgtatgttttttaacatgtgtctcaagaaagttgcaccaaatgagaaaccaacaaamaactgaaaacgaaaataataacactaaatgaaaacaaccgtcaaaagaagagatctaattgcaaataccagaacccatgtctcatacagaagatccagcgtcttgtcataatcacatcgtgcataatatcagagtcttccttctctgtctcgtgaggtgagtgatcccacgtgcattctaatgcatgttttatttctccattgattttaattaaaaggatattgtcaaggttgctaggcataaatattgactgcttttgacactacagttgtcccagagggtcaggcttgctttttcaagcttcttgaatctctttcagttccttggagtctctttttggtatgttggaaatttcaaaaaaaatggaactattagggcatgcctgataggttttttttttttttttttttttttttaatgcaggttgaaaaagaaaagaaaggcctggtaatttggaataa

SEQ ID NO: 187627 - DNA, 663 bp, Homo sapiens
cctaatttttgcatttttagttttggtttcgccatgtgggccaggctggtctcgaactcctgggctcaagaaaccttccctccttggccttccaaagtcctgggattgcaggagtgagccaccacacccagctaagattgttctgtgtatgttttttaacatgtgtctcaagaaagttgcaccaaatgagaaaccaacaaaaaactraaaacgaaaataataacactaaatgaaaacaaccgtcaaaagaagagatctaattgcaaataccagaacccatgtctcatacagaagatccagcgtcttgtcataatcacatcgtgcataatatcagagtcttccttctctgtctcgtgaggtgagtgatcccacgtgcattctaatgcatgttttatttctccattgattttaattaaaaggatattgtcaaggttgctaggcataaatattgactgcttttgacactacagttgtcccagagggtcaggcttgctttttcaagcttcttgaatctctttcagttccttggagtctctttttggtatgttggaaatttcaaaaaaaatggaactattagggcatgcctgataggttttttttttttttttttttttttttaatgcaggttgaaaaagaaaagaaaggcctggtaatttggaataa

SEQ ID NO: 187628 - DNA, 404 bp, Homo sapiens
aatatgtgctatggggaacaccttgaaggggtaaccaatgtgcctggggaccagtaagtatgaagcaagraggtttaatacattgcagaaaattcctagagctctagggtctttagcatggatgcatcatggggcagggggtttgtgtggtgtgggaggtggacagatgggagctggtgctgccttgcatggtgggaaggaattttaaatttttgtcctgtcagtgatggacagtcactgaggaggtctagggagagggcaacttggtaaatttttgctttttacttccacaggaagttggaagatgacttgcagagggaaatactagaagtcaagaggacatttatgacactcttacaatgatccatgtgagacaggatgtcagagcagtggctggagaagaa

SEQ ID NO: 187629 - DNA, 341 bp, Homo sapiens
taggggtctcactatgttacccaggctggtctcaaactcctgagttcaagtcatcctcctgtctaggcctctcaaagtgcygagattacaggcacaagctaccatgcctggtctcctctgcccttttaacatgcatattactttttttttcttttaaagtacttccttttgtaaaaattttaactgacaaataataattatatatatttatggggtacaatgtgacattttgatataagtatacattgtggaatgactgaatcaagctaattaacatatcctctagcttgtcttttgttgtgatgagaacatttaaatctactcttctagcaattttgaaa

SEQ ID NO: 187630 - DNA, 341 bp, Homo sapiens
taggggtctcactatgttacccaggctggtctcaaactcctgagttcaagtcatcctcctgtctaggcctctcaaagtgccgagattacaggcacaagctaccatgcctggtctcctctgcccttttaacatgcatattactttttttttcttttaaagtacttcctttygtaaaaattttaactgacaaataataattatatatatttatggggtacaatgtgacattttgatataagtatacattgtggaatgactgaatcaagctaattaacatatcctctagcttgtcttttgttgtgatgagaacatttaaatctactcttctagcaattttgaaa

SEQ ID NO: 187631 - DNA, 473 bp, Homo sapiens
gaattctggtacaaggctgtgagaagaagagcacctaaccacccctcagtggacataggcatagatgagaaataaacttttgttgtcttaaatcactgagatctcagggttctttgatactgcagcaaaacttaacctaattgaactcgtgatctgccctcctcggcctaattgaaatttagggtatggattcagtgttgcctttcttcagagcccttagccactgcctaatatatcataataatcattaattaccatccactgcacagataaggtcaaatgtaagaagacacacagaagtgctttgtaatctataaacattttacaaacattttggaaaagcaagtgattctatcaaacttaatgatattgatcttgtcccctcaataaggctgtaaggtctttagaagaagagattctgtycttgaggaatttgagagcttagatatttctaggatatacctaccatgtta

SEQ ID NO: 187632 - DNA, 496 bp, Homo sapiens
gcttagtgaaccacacatgaagcatgtaacatagtgcctggcatggagtgaatactcagtaagatgttcactattcatttgtgcatgctcatacatcaggacagaaggaattatgtttcaaaatgatgatacacagagctcaagattcaaaagaactccgacaattaacactgacagtggggcccagagaggaagaagaatttagtttaaccttagcagatgagcagcattttaatacaacagcagataaatgacgtttaagaataatggacaggatgggtgcrgtggctcacacctgtaatcccagcactctgggaggccgaggcgggtggatcacgaggtcagaagatcgagaccatcctggctaacacagtgaaaccccgtctctactaaaaatacaaaaaaaggaaaaaaattatccgggaattgtggcaggcacctgtagtcccaactacttggtagactgaggcaggagaatggtgtgaacccgggaggg

SEQ ID NO: 187633 - DNA, 573 bp, Homo sapiens
aactcctgccttgggagaacacccttgtctgttgcatatataattctccacaatcactccctagctgctttctaaacttccacatttccactttccaccattaatcttcccattcctattgtcaattctccagtcagtagccagagtggtcttttggttttggtttttgttttattcatttattatttatttatttagagrcagggtcttgctgtgtcacccaggctggagtgcggtggcaggatcatagctcactgcagcatcgacctcctatgctcaagtgatcctcccaccttggcccccaaagtagcaaggactacaggtgcatgccactgcacccagctaagtttttaattttttgaagagacaaggtcttgctttgttgcctaggctggtctcgaactcctggctttgaccaatcctcccgtctcagcctcccaaatgctggtattacaggtgtaggccaccgtgtctgaccttgtttttgtttttgaagctcaatcagatgatgttactcacagctctgcttgcaaattctccaacgtcttttcatctaatgcaaactcctcatgg

SEQ ID NO: 187634 - DNA, 573 bp, Homo sapiens
aactcctgccttgggagaacacccttgtctgttgcatatataattctccacaatcactccctagctgctttctaaacttccacatttccactttccaccattaatcttcccattcctattgtcaattctccagtcagtagccagagtggtcttttggttttggtttttgttttattcatttattatttatttatttagaggcagggtcttgctgtgtcacccaggctggagtgcggtggcaggatcatagctcactgcagcatcgacctcctatgctcaagtgatcctcccaccttggcccccaaagtagcaaggactacaggtgcatgccactgcacccagctaagtttttaattttttgaagagacaaggtcttgctttgttgcctaggctggtctcgaactcctggctttgaccaatcctccygtctcagcctcccaaatgctggtattacaggtgtaggccaccgtgtctgaccttgtttttgtttttgaagctcaatcagatgatgttactcacagctctgcttgcaaattctccaacgtcttttcatctaatgcaaactcctcatgg

SEQ ID NO: 187635 - DNA, 582 bp, Homo sapiens
aacttggtgttcacggtccctagtgtaggccattctgctctctgcccttggctggcatccttccattccctccctcagtttccttctgcaggtccctttctaatgaatgtcaaagggtgggtgccctaggacgtggagcccccaaatgaccaagaatccaatgagcttggtgagattatggaattaaggagattcacttaggggtggtctggctgccttttgtctttgcagagggatcatgggatgatttgkgagccagtttcatgggagtttcagatgctcctaacctctgaacatgaacatttgatgcctggcaagatcacagggcttgactgcatggggctgctgcctcttgtgcagaggtggtggcaccaggagttgcttcaggctgtagcatagctttctgcagggagactttaaaatcagtcagcctgagacctgattttctttgtccttgcctctcctgctctcccctaacaacaattttttctttcttttgtctttttctcccatcttaccatgtgtccttactttttttccccttttttcttgtcctctatgttttttggcctctgtctatgc

SEQ ID NO: 187636 - DNA, 582 bp, Homo sapiens
aacttggtgttcacggtccctagtgtaggccattctgctctctgcccttggctggcatccttccattccctccctcagtttccttctgcaggtccctttctaatgaatgtcaaagggtgggtgccctaggacgtggagcccccaaatgaccaagaatccaatgagcttggtgagattatggaattaaggagattcacttaggggtggtctggctgccttttgtctttgcagagggatcatgggatgatttgggagccagtttcatgggagtttcagatgctcctaacctctgaacatgaacatttgatgcctggcaagatcacagggcttgactgcatggggctgctgcctcttgtgcagrggtggtggcaccaggagttgcttcaggctgtagcatagctttctgcagggagactttaaaatcagtcagcctgagacctgattttctttgtccttgcctctcctgctctcccctaacaacaattttttctttcttttgtctttttctcccatcttaccatgtgtccttactttttttccccttttttcttgtcctctatgttttttggcctctgtctatgc

SEQ ID NO: 187637 - DNA, 582 bp, Homo sapiens
aacttggtgttcacggtccctagtgtaggccattctgctctctgcccttggctggcatccttccattccctccctcagtttccttctgcaggtccctttctaatgaatgtcaaagggtgggtgccctaggacgtggagcccccaaatgaccaagaatccaatgagcttggtgagattatggaattaaggagattcacttaggggtggtctggctgccttttgtctttgcagagggatcatgggatgatttgggagccagtttcatgggagtttcagatgctcctaacctctgaacatgaacatttgatgcctggcaagatcacagggcttgactgcatggggctgctgcctcttgtgcagaggtggtggcaccaggagttgcttcaggctgtagcatagctttctgcagggagactttaaaatcagtcagcctgagacctgattttctttgtccttgcctctcctgctctcccctaacaayaattttttctttcttttgtctttttctcccatcttaccatgtgtccttactttttttccccttttttcttgtcctctatgttttttggcctctgtctatgc

SEQ ID NO: 187638 - DNA, 449 bp, Homo sapiens
tgaataacacaagagaagcatacaccatttttatggtggtagacctgaaggaaacatgtactttgtaagaaaaccagaccacagaaacagctgtggcatatgaatagaagtctttctgaatatttgatgaagtgccagaggttgcctgttgcatacagttatttagaaatacttggctattgcatacggttacttagaaatgttgcctttgggggggaaraaaagaaatgttgcctttgttaatacagacataataataacaactttgaactaccacactgtacagtctgagtagatataagaaaataatggaatataaatctaggaaagcagattgcatcttaattttaaagtactttgaatactgatacgctttcagtctctttcctctctctgcatcaagactttaggagctatttttggtatctcctttattttgatcatcataa

SEQ ID NO: 187639 - DNA, 606 bp, Homo sapiens
cccacaaagacaaaagtaagtcccggcagctcaaaactccagagggaaacaattaaggtgctgcctctatctaatttgtcagctaacgacacccctgtagtttaccacaatgttgggaagaaaggtagtggtgatagccctctgtatccgtgtgttctgcattcaagaactcaaccaacttcagatcaaagatacgtgggaggaaaaaaacaaaacaaatgctaacaatataacaatacaaaataatacaaattttaaaaacaatacagtataacaaccacttacatagcattaacatcatattaggtattataagtaatctaaagatgatttaaattatacaggaagatgtgcatgggttatatgcaaattctacacaattttatatgagggacttgagcatctgtggattttagtatctgtgggggttctggaataaatcccccacggataccgaggcactaatatacaaggatcagattcaaataaagacaacgcaatatgtctacttaaaatatgggagctttatcttactatattgctcaaggtagaaaagtttgagcaacctaactcttagragtttcaacagatctcttcctgaaaatt

SEQ ID NO: 187640 - DNA, 596 bp, Homo sapiens
ctctatactgttagaagtagagcccttaatatttttgagtctaatcatattaagcagccaactccagaaaccccaaaaccaacaaaagaactccattcttaatattctgttcctctggaaccactcctggtaccaaaatctgtattagtgagrgttctctagagggatagaatagaggtttattaagtattaactcacactatcacaaggtaccacaataggctgtctgcaagctgaggaacaaggagagccagtctgagtcccaaaactgaagaatctggagtccgatgttcgagagcaggagggatccagcatgggagaaagatgtaggctggaagactaggccagtctcaccttttcatgttgttctaactgctttatatttgctggcagctgattagatggtgcccacccagattaagagtggatttgccttccccagcccagacgtaaatattaatctcctttggcaacaccctcacagagagactcaggattaatactttgcatccttcaacccaatcaagttgacactcagtattaaccatcataagtttcaatagacatttctcaaaagaagaaatacaaatggcaaa

SEQ ID NO: 187641 - DNA, 546 bp, Homo sapiens
ttccaggaattgaggaaatgattagtaggttattttacagactcactggttccattgtccaatggattttggccaaaatgcttatctcttgacttccataagtgtcctctctgatggctaggccacagagaatttccagtttttctggattatttcagctttaaattaacatcccattaaagaataatgagtgtttcactcttccttaggttcaatcaatttggtgattccttgcaggtcttttagcagaaggataaacagaaaattacaggatatacctatggcaataggatctggcttcccctttgtgccaaacattgcaggtctctaaattggctcagatcttasaattggatgagaggctctaattctctattgtggagtaaaactgtagcctctccaccagactgaattttttgcttatcagggaggattacactgagtaactttctaatgttaaactaatgttcattcttgggttatgctcaagtaggttgtgaaatgttatacttctcatatattgctaacatatgttattttcatcta

SEQ ID NO: 187642 - DNA, 585 bp, Homo sapiens
tgtctgcacccaaatatcatcttgagttgtgatccttagtgttggagaagggtcctggtgggaggtgactggatcattggggtgggatttctatatgctggtcttgtgatagtgagtgagttctcaggagatctaatggtttaaaaagcatgtggcacttccccctcactctctttctctccagctcctcaatgggaagatgtaccttgcttccttttcaccgtccaccaagattctaagtttcctgaggctttctagtcatgcgtycagttaagcctgcagaactgtgagtcaattaaaccccttttcttcataaattacccagtctcaggtagttctttataccagagtgaaaatagattaacaccaaaaattggtaccagaggagggggcactgctataaagatacctgaaaatgtggaagtgactttggaattagttaatgggcagagcttggaacagtttggaaggctcagaagaagacaggaaggggtggaaaaatttggaaattcctagagacttgttgactggttttgaccaaattactgatagtgatataaacaatgaagtccaggctgaggtgat

SEQ ID NO: 187643 - DNA, 585 bp, Homo sapiens
tgtctgcacccaaatatcatcttgagttgtgatccttagtgttggagaagggtcctggtgggaggtgactggatcattggggtgggatttctatatgctggtcttgtgatagtgagtgagttctcaggagatctaatggtttaaaaagcatgtggcacttccccctcactctctttctctccagctcctcaatgggaagatgtaccttgcttccttttcaccgtccaccaagattctaagtttcctgaggctttctagtcatgcgttcagttaagcctgcagaactgtgagtcaattaaaccccttttcttcataaattacccagtctcargtagttctttataccagagtgaaaatagattaacaccaaaaattggtaccagaggagggggcactgctataaagatacctgaaaatgtggaagtgactttggaattagttaatgggcagagcttggaacagtttggaaggctcagaagaagacaggaaggggtggaaaaatttggaaattcctagagacttgttgactggttttgaccaaattactgatagtgatataaacaatgaagtccaggctgaggtgat

SEQ ID NO: 187644 - DNA, 585 bp, Homo sapiens
tgtctgcacccaaatatcatcttgagttgtgatccttagtgttggagaagggtcctggtgggaggtgactggatcattggggtgggatttctatatgctggtcttgtgatagtgagtgagttctcaggagatctaatggtttaaaaagcatgtggcacttccccctcactctctttctctccagctcctcaatgggaagatgtaccttgcttccttttcaccgtccaccaagattctaagtttcctgaggctttctagtcatgcgttcagttaagcctgcagaactgtgagtcaattaaaccccttttcttcataaattacccagtctcaggtagttctttataccagagtgaaaayagattaacaccaaaaattggtaccagaggagggggcactgctataaagatacctgaaaatgtggaagtgactttggaattagttaatgggcagagcttggaacagtttggaaggctcagaagaagacaggaaggggtggaaaaatttggaaattcctagagacttgttgactggttttgaccaaattactgatagtgatataaacaatgaagtccaggctgaggtgat

SEQ ID NO: 187645 - DNA, 559 bp, Homo sapiens
aatgacagtaatgggatctctttattattaatttgtctaggtgttgtcctctatcagcttcagatcaaagaaagacaaaagttaaatcttcatggaaggatgctctgggaatgttttactagctccaacaaatggcaactgttgccatacaagagctatagatcatctgtttatgaatttgatttggcagggggctggggtaagtgtgtgtgagacagggactggggatagtaaccaggcaactatttatattcccataattattacctagatttccttgtgcccaaagactaactctagaaatattgatagtggcaacmttcttaagtcagtctctgcaaagaactctagtgacttccagatcctcttgcaatattagagattcagggtaaaaaatgttgggcactaaactctaatgtcctcataccttttttttttttttaatcaatgggtatttgcaaagagggagcaataggtggaatttagagcctatttggtgatttctcattaggagtaagggcagagttcaacagctttttattttcattcctataatcaa

SEQ ID NO: 187646 - DNA, 378 bp, Homo sapiens
ctgttttaaaccattaagtgtgttataacaatacagcagcaatagaaaactcatgccatattcgaagtaaggtattaaatgctaagtaaggtctaagtgttaattttaagaggtttgcacatgagaagtgtgagtgggtaagcaaaacaaagactgtaatgaaaawtagtacacaaaattatttattaatatttgctccacaacttaaagaaatgaaattagagataaccacctacgttcaacctcttcacttcactgaggacattcaatgaatactaaagcccacagattcaattgtctttttgtgaaataaagtatgtggcttatacaacatgtagaggagttgttgtcagagtgggtagaaggtttgctttgggc

SEQ ID NO: 187647 - DNA, 378 bp, Homo sapiens
ctgttttaaaccattaagtgtgttataacaatacagcagcaatagaaaactcatgccatattcgaagtaaggtattaaatgctaagtaaggtctaagtgttaattttaagaggtttgcacatgagaagtgtgagtgggtaagcaaaacaaagactgtaatgaaaattagtwcacaaaattatttattaatatttgctccacaacttaaagaaatgaaattagagataaccacctacgttcaacctcttcacttcactgaggacattcaatgaatactaaagcccacagattcaattgtctttttgtgaaataaagtatgtggcttatacaacatgtagaggagttgttgtcagagtgggtagaaggtttgctttgggc

SEQ ID NO: 187648 - DNA, 444 bp, Homo sapiens
ctttttttttttttttcctttttttaaaaattaacgatgaactacctcagctcattttctcatcctacagtctactgggtatatttaatycagtctgaacttgaggaaaatatcatgagtaaggtaaatctcctagacagctgttttataaaggaagttttgtattttcatggcgtagttaccaatattcttttcaaatgagatttttggaaatgatttttctgcaaacttggaatgaaaatacctggatcagactttgaattcagaaggcaagttttcacctcaggtgttaagcatttgaatcaggacctgtctgtggagtagctgtgtaatatcaaatgcttttggagaacactcttgaatatttgcatttgcagaccagttctgcaaaaggggtattcttcactcattctatcacaacttttcctgaagaaaatgccattg

SEQ ID NO: 187649 - DNA, 628 bp, Homo sapiens
tctgggtcagctcacaatagttctagtttaagccagtgccctctgtgaataggamcaccattccactttcagaagtgtcatggtttgagtgataaattacattaaccatcctagatgttaaggaaattgttagatatttaataaaattgttgtccttaattactatttaattcaattagcaagttttactaaacatctactgaaggcacatacaaaatgttacaggagtatataacatgattctatcccataagaagtttgcaacctttgcgtttttaatccaatgtaacaaatttgacagtactctcgtaaagaaaagcactgtttcccagcaaattataacagtcatatgacacaagcttatatctttatgaccttgcatactttatctgaccttgctaagcctatttctgtgttcataaagtgaagacaaatggaggattcttaacagaattgtggtgaagattcaatgaaataaagtctgcaaagtgcttagcagaatacctgtcatatggtcaagctcaaaagatattggccaaaaaagcacagacaaatgaatagatggatggatgaattaacaattaacatattccacaaaattaatatttttgttgaaatgaatgagaga

SEQ ID NO: 187650 - DNA, 628 bp, Homo sapiens
tctgggtcagctcacaatagttctagtttaagccagtgccctctgtgaataggaacaccattccactttcagaagtgtcatggtttgagtgataaattacattaaccatcctagatgttaaggaaattgttagatatttaataaaattgttgtccttaattactatttaattcaattagcaagttttactaaacatctactgaaggcacatacaaaatgttacaggagtatataacatgattctatcccataagaagtttgcaacctttgygtttttaatccaatgtaacaaatttgacagtactctcgtaaagaaaagcactgtttcccagcaaattataacagtcatatgacacaagcttatatctttatgaccttgcatactttatctgaccttgctaagcctatttctgtgttcataaagtgaagacaaatggaggattcttaacagaattgtggtgaagattcaatgaaataaagtctgcaaagtgcttagcagaatacctgtcatatggtcaagctcaaaagatattggccaaaaaagcacagacaaatgaatagatggatggatgaattaacaattaacatattccacaaaattaatatttttgttgaaatgaatgagaga

SEQ ID NO: 187651 - DNA, 628 bp, Homo sapiens
tctgggtcagctcacaatagttctagtttaagccagtgccctctgtgaataggaacaccattccactttcagaagtgtcatggtttgagtgataaattacattaaccatcctagatgttaaggaaattgttagatatttaataaaattgttgtccttaattactatttaattcaattagcaagttttactaaacatctactgaaggcacatacaaaatgttacaggagtatataacatgattctatcccataagaagtttgcaacctttgcgtttttaatccaatgtaacaaatttgacagtactctcgtaaagaaaagcactgtttcccagcaaattataacagtcatatgacacaagyttatatctttatgaccttgcatactttatctgaccttgctaagcctatttctgtgttcataaagtgaagacaaatggaggattcttaacagaattgtggtgaagattcaatgaaataaagtctgcaaagtgcttagcagaatacctgtcatatggtcaagctcaaaagatattggccaaaaaagcacagacaaatgaatagatggatggatgaattaacaattaacatattccacaaaattaatatttttgttgaaatgaatgagaga

SEQ ID NO: 187652 - DNA, 478 bp, Homo sapiens
gaattcctaaatctgattaaatctattaycaacccaattggtgtctgcagcccaaattcaaggtaatagaattaataattggtctacctttacattcatgaccgctagtttcaaattacccctcaagtctacccaaaagtactcctcttcaaaatcattattttacatttcttcatctctctccaaatgcccaagacctccttagcttgctccttgaatcactggaagaaaaataaaagcaaccaaataattgtcaaatctctcaaatgacttggatctacaaccattctctctgacttacctccaattacaacagttctctagtccttctttaaagagcaactcctttacttttgtcctggattccacccttatctgtctttataagaactattttattcagttatcacctctaatttgttgcattattaatttatttctctttaatggttcatgcccttcagtatacaaaattgct

SEQ ID NO: 187653 - DNA, 485 bp, Homo sapiens
  misc_feature (1)...(485): n = A,T,C or G
ctattaccaacccaattggtgtctgcagcccaaattcaaggtaatagaattaataattggtctacctttacattcatgaccgctagtttcaaattacccctcaagtctacccaaaagtactcctcttcaaaatcattattttacatttcttcatctctctccaaatgcccaagrcctccttagcttgctccttgaatcactggaagaaaaataaaagcaaccaaataattgtcaaatctctcaaatgacttggatctacaaccattctctctgacttacctccaattacaacagttctctagtccttctttaaagagcaactcctttacttttgtcctggattccacccttatctgtctttataagaactattttattcagttatcacctctaatttgttgcattattaatttatttctctttaatggttcatgcccttcagtatacaaaattgctcctgtaacttcctaacgaagagannnnnn

SEQ ID NO: 187654 - DNA, 485 bp, Homo sapiens
  misc_feature (1)...(485): n = A,T,C or G
ctattaccaacccaattggtgtctgcagcccaaattcaaggtaatagaattaataattggtctacctttacattcatgaccgctagtttcaaattacccctcaagtctacccaaaagtactcctcttcaaaatcattattttacatttcttcatctctctccaaatgcccaagacctccttagcttgctccttgaatcactggaagaaaaataaaagcaaccaaataattgtcaaatctctcaaatgacttggatctacaaccattctctctgacttacctccaattacaacagttctctagtccttctttaaagagcaactcctttacttttgtcctggattccacccttatctgtctttataagaactattttattcagttatcacctctaatttgttgcattattaatttatttctctttaatggttcatgcccttcagtatacaaaawtgctcctgtaacttcctaacgaagagannnnnn

SEQ ID NO: 187655 - DNA, 544 bp, Homo sapiens
tcgaagatcgaggagccatcactttgaaataaaataaatattgaacttatactgatacttattcagtcatcagttttcaacatttctatttaacttaaacaaactccccagtaccatatgtgcacatcacctgtcctatcttctgcaaacagttgtatcaatttgggggaggtaaaatgcattaaaactcttgttaatctgaccaaagaagtaacatatgagttattctacttctttcttttgaatcattccagagtcttccccygtcctgctcccatctggtatgactgttctctcagtgtctgctctacagctgacctccttgctcttccttcatcttcaccctggaaattcttttcccttctcttttgcattaaagcaaatgcttttgtttctgggttgtatcattgtatcctcttggtttattctttgtatttttttctttaagttttggggcatcatttctaggatgcagggcagataaaatatctctatcacaagtcagaaaatatccttcttgtatcttacaataggttgacaaatt

SEQ ID NO: 187656 - DNA, 602 bp, Homo sapiens
tgcttccttccacacatttactgatcccacactgattttgtagttgttggcagtttgtccttacctgctagtatttgggrgtttataaggatacttagctttgaggttgttgctatctgtaggtttttggttttgatatcctacttgctctgttttatgatgagattaaagaacaatgtcactactgctaccatctttcaggaatcttcttcctgtagtttgtacttttaaatttaaaataattattgctcaaggtctagttcagaatttgaaaaactggggctgtccttctaatgaaaacatagtaaaatactcaggattttcaaactgtgacctttgaaaccacagatttatgcatacatgttgcatgtctgtgtgtatatgtggacttctgtttttctttctttaccccacttcaaacagagggggctcactgtagatattgtacttcaatgaaatatttttgtgtgaagaaagggttacatggttaaaagtgtcggaacataactgtccaggggtcatcctttaaaaaccatacctaagaatagactttcataatacagatttgcagagacaatttgggccaagaacttgagctccaa

SEQ ID NO: 187657 - DNA, 445 bp, Homo sapiens
ttgttaatgctactactcaaagaagaaagttgaatgtgtttcccagaattttcagtaagagcagtgatttatgtgtgtaaacccaactacccattcatttactccagccttggttagagaacatgcagttgtcatggaataacatgaattggcttgtttttaacctgagttcgtgcattcatataaagcttggccatgggtcaagttctttcttasattttgaattgcctatttgacatctctagttgaacatccagtagtcatctcaaacttaacaaatccagaaccaaattattgattaccccattctacatcagccagaccagctcctctagtcttccccatatcaatgaatgtcaggtctttttttccagttgctaaaactaaaaaccttacattcattcttgactcctttcacacagctagccagacccagtcccactgg

SEQ ID NO: 187658 - DNA, 530 bp, Homo sapiens
tttcttttttgagacagggtcttgctctgttgtccaggctggagtgtaagggcatgatcacagctcactgcagccttgatctgggctcaatcatcccacctcagcctcttgaatagctgggaccgcaggcacatgccaccagaccccaytaatttttaaatgttttgtagaaacagggtctcactatgttgcctaggctggtctcaaactcctggcctcaagcaagcctcctcccttggtctcccaaagtgctgagatcacaggcatgaaccactgcacctggcctgagtaaatttaaactgtgggtcagtatctcttaatggtgctttagtgccaatttcataagtcttagggtatctagcataataattacattcaatgtcctatgcccacagaatcactatcagtgttacgacaatatccaagttttcaaaacaccaattctatttcttaagtttcaaaaacaatggccacaaacactcagagacaggtatgaatcctactgtttggtagatagaaaggcaacccaa

SEQ ID NO: 187659 - DNA, 596 bp, Homo sapiens
agtcaatcactcttgggttttttgtacattgtgagtacttgtttagttaacacttactggaaattaaaattaaacctgatagcataattgtgatatataaatcacaaacactttggaattctctggtatttgtatttgggatgagttttttgcagccttgtttatttaccatgtagtaaacaagaaatgcttcttaaattttttttaacctaaacatgtgaaaaatggtccacggatgcatttggcaaccaagaggttattgtgttgtttgaccctcagaaagagatgtttgycactcttggtatctttcccttgaggaatcatctcttgcaatcaagaagagactcagctcttgaaaagggccagggagaaatcagatagcatctcattccatgccgtaagaacaaggactcattcaattgctcaacagcttgctcaaaacatttaagttgccatcttagtttatccaggagaaaggatacccagacaagccaccatcctttctttctacttgtgtttcaagcatgttctacaatccctataatgtggcgggttaagccaggaatgcatcctttacttcctggtcagacataatg

SEQ ID NO: 187660 - DNA, 206 bp, Homo sapiens
tatcccagtctccatgggccatagaaatgtggctacaatctcatcacatacacaaaccaaacaaacatccgcagcattgctgtttgcagcagagattgctgattctctcccactacgcattctcctgttcytctattgtaatagaagccctgatcttctgttgggcacaaggcaaactcttcaatcctacttgttagctacaggtg

SEQ ID NO: 187661 - DNA, 606 bp, Homo sapiens
tgtggaagaggacaacccaagggcatgggtgcaaagarttgtggacaccctgtggctgttcctgcctcagtctatccagatactgcacaacaggaaacaacagataatatcatcaagtagagagttgcctcttctacaagtagtagcaaccacccagctctacgttctgagtgtggccagattttgaattgtaaagaaaagccagaaatcgagagttgtatgcaaattctcccatttaaaatattgtcagttaacacaaaatttaaaaatccatgtggccaaaccgaagtacttctgtggtctgaatatgacttaggagccctgagactgtgacatctttaatgggagtgagacaccatggagtatggtgtattggttctcaaccatttgaacttttcaaatagtaaaagagatcagagaggacttttagttttagtttttgccaactaatgatttttttaaaagcagctatcatctataatcttacaatttttgtaaaagttaaatactcgaaaccaggaatgacataaactcagaataaatgtacagttcttaagttatgatggaatcttacccaacatattccttgtttcttcaattgcaaga

SEQ ID NO: 187662 - DNA, 606 bp, Homo sapiens
tgtggaagaggacaacccaagggcatgggtgcaaagaattgtggacaccctgtggctgttcctgcctcagtctatccagatactgcacaacaggaaacaacagataatatcatcaagtagagagttgcctcttctacaagtagtagcaaccacccagctctacgttctgagtgtggccagattttgaattgtaaagaaaagccagaaatcsagagttgtatgcaaattctcccatttaaaatattgtcagttaacacaaaatttaaaaatccatgtggccaaaccgaagtacttctgtggtctgaatatgacttaggagccctgagactgtgacatctttaatgggagtgagacaccatggagtatggtgtattggttctcaaccatttgaacttttcaaatagtaaaagagatcagagaggacttttagttttagtttttgccaactaatgatttttttaaaagcagctatcatctataatcttacaatttttgtaaaagttaaatactcgaaaccaggaatgacataaactcagaataaatgtacagttcttaagttatgatggaatcttacccaacatattccttgtttcttcaattgcaaga

SEQ ID NO: 187663 - DNA, 415 bp, Homo sapiens
tttggcttttgccttatttcagcctcctcatccttaagaccaactcctagccatcctttcttctaccatctttgttctaccaccatctcctcttggaagctgtctcagtttctccacctgccacttcctgaagcgtgagttgggtattcctcttctaaacgcctctctcctaacaagtggtttgttcttggaaaactccagtacagatttaattttcttaagagcaagtgcactgtcttacacaacatggtatctcaaaaccatcctatggaagatgttttytgaaagaacgactaaatgcataattcaataaacacttttcaaatccagataaaaatcaatgcaaactgtccttgtggcagacaagggacagtttacaatgattcactcaatatgattattgagttactcattc

SEQ ID NO: 187664 - DNA, 644 bp, Homo sapiens
  misc_feature (1)...(644): n = A,T,C or G
ccttgggatcaaggcatttggtcaccttagaggtggatgtgtgggcagcccctgcccagtggaggttgggtgccaggggatggagggcagagggtcactgtgattgcgctgggctttcaggacccttaatccctgctacagcaggaaacactcctgggaacacaaaggcatctctctcctggagccccagcagccacccaggctgggaarcttcacctctcaaacaggacagcagcagcccagtggccaggctcagctgacagattcactcatacaaaacttatcactcggtcatttaaccccttagcctccaaagcagaaatccacaaatcccctgcacttattgacctgtctcttttcttagcaactttatgctctaaagctgctgaatgcagaagacagaaattgaagcagatctccaaatgaccatcaagagttgtgcaatcacaccatgtcccatgtccacataaggcccccaccctcaactccaaattgcctcaaactgtcagaagttctctacctccacctctaaaggcctgaaaaagaaagtcccttatgggctctaactctttccattattcaaacacaaacgatgtttaaataagcattgttattgtatattcggatttnnnnnnnnnnnnnnn

SEQ ID NO: 187665 - DNA, 644 bp, Homo sapiens
  misc_feature (1)...(644): n = A,T,C or G
ccttgggatcaaggcatttggtcaccttagaggtggatgtgtgggcagcccctgcccagtggaggttgggtgccaggggatggagggcagagggtcactgtgattgcgctgggctttcaggacccttaatccctgctacagcaggaaacactcctgggaacacaaaggcatctctctcctggagccccagcagccacccaggctgggaagcttcacctctcaaacaggacagcagcagcccagtggccaggctcagctgacagrttcactcatacaaaacttatcactcggtcatttaaccccttagcctccaaagcagaaatccacaaatcccctgcacttattgacctgtctcttttcttagcaactttatgctctaaagctgctgaatgcagaagacagaaattgaagcagatctccaaatgaccatcaagagttgtgcaatcacaccatgtcccatgtccacataaggcccccaccctcaactccaaattgcctcaaactgtcagaagttctctacctccacctctaaaggcctgaaaaagaaagtcccttatgggctctaactctttccattattcaaacacaaacgatgtttaaataagcattgttattgtatattcggatttnnnnnnnnnnnnnnn

SEQ ID NO: 187666 - DNA, 644 bp, Homo sapiens
  misc_feature (1)...(644): n = A,T,C or G
ccttgggatcaaggcatttggtcaccttagaggtggatgtgtgggcagcccctgcccagtggaggttgggtgccaggggatggagggcagagggtcactgtgattgcgctgggctttcaggacccttaatccctgctacagcaggaaacactcctgggaacacaaaggcatctctctcctggagccccagcagccacccaggctgggaagcttcacctctcaaacaggacagcagcagcccagtggccaggctcagctgacagattcactcatacaaaacttatcactcggtcatttaaccccttagcctccaaagcagaaatccacaaatcccctgcacttattgacctgtctcttttcttagcaactttatgctctaaagctgctgaatgcagaagacagaaattgaagcagatctccaaatgaccatcaagagttgtgcaawcacaccatgtcccatgtccacataaggcccccaccctcaactccaaattgcctcaaactgtcagaagttctctacctccacctctaaaggcctgaaaaagaaagtcccttatgggctctaactctttccattattcaaacacaaacgatgtttaaataagcattgttattgtatattcggatttnnnnnnnnnnnnnnn

SEQ ID NO: 187667 - DNA, 556 bp, Homo sapiens
tgtttgcctcagttgttactagaaccagagtcccagaatttatggcacaatcaggagggctggaatgttgatttggaattttaggccttatcaaaaattctgtgttaactggactgattgcacatcagcctatatagtagctgataggacatcagaaatagccaggacaaatctgccatcagtagactttgcctgatcataaccacggttgatcaataagtgacagtggaaaactcactttctcagcttacatcttcarccactccgaatccttctaccctctatctagaccggtggagtaaggaccttaaaggaagtagagtgggctctacctcaactcatccacccaattgcttgtagagagaaagaggaagcaagaaaatgaatgagagaaaaatggcacaccaattgtgcctcttaatcagtgtcttggtctgtcaccaagattctatcctaagcatagcatccctgtggtttggggactcattcgagtcttcttcattgcagctcaggagtcagacaaacacagggtcaaatgctggctctgtcacttatt

SEQ ID NO: 187668 - DNA, 561 bp, Homo sapiens
aagtggtgtaacccacttttacccacaaaactcaagcacttggctccacacagctgcaaggaaagctaggcaagtggtctggctttgggtccaggaggtagaggaaacaggtttttggtgaacatataccattcttggccactgttcaacactttagtcaccaaatatctatttcacatgttctcccacatcaacaacaaactttccccttccccaagagagataacccaaagtcccacccaatcacttcaaaggacagcaccttgaaggggtactaactcctttctgtctatcatatccagatgcagctccttgtgatccagtcacctttgaactaaatatcacatacacacamacacacacacacacacacacacacacacacacacactatacagtgggaaacagaataaccacaatgaatactcccattcacagataggaaggatggcgaatactcagcagtcactgggatataagcaatgacagaatcttggtgggcaagtattagaaaaacttctactctgacgctaggagagctttcttgattagaccctggtt

SEQ ID NO: 187669 - DNA, 536 bp, Homo sapiens
acggttaatcagatgcttctctcactgcctcaggcagccccataagaagaatttggagaatgactgagctgtggcaggtgagggaatgaacctaaagctccctgacrtgactatgtggagggccagcaggcatttgaatgtgtaagttctaagctttgtttttttaaacagtcattgctttatagccacacttagcacagaggaatgcaatccaatggctggaggaaatccaatggacccgccaaccccaggtgagggcagaggttgagactagcacgggcttttctggaaaatggccactctgggtgcaggtccaaattggagactggactggggctgtgcatgcatcttcttagccacctgcttcccctggtaacagggacttcctttcttcacttccgtcactgaagcaggaagaggtgaggcagtgacctcaccatgtgtgtacatgatgattgaggtgagacatcaggaactccacacacctcctcctggggtccagtgtgactgggttctctggttctctgtctcccgat

SEQ ID NO: 187670 - DNA, 232 bp, Homo sapiens
cttgctttttttttccaccctatattgaagctgtcatcccaccctttttaaaatatagggttttatcttttagaatgctatgtgggcaactagtacagtgagctctctctgtctgygctactcaatagtcaccagcccatgtggctatttaaatttatattaaaatgaaataaaatataaaattcagtttctttgtcacattaaccacatttcaagtgctcagtaacccttg

SEQ ID NO: 187671 - DNA, 567 bp, Homo sapiens
caagagtattaccccattttttagtgtgtttgtttttatcagccatctcttgctttcacttcctttctattcatctgtgatctcacacatctcttactctgtcactgttgacttcatggtctctctggccacaaaggagatctgcagtctgaattactggaaacagttgcagaaccatgtggatttatgccactatcaagtcagcatttctagcattagctcccattactatttcccttagtgagttttacctctcctttcagtaatcaaccattgccatttcccactatctactacccccttcacttattttcgtgtgtgacactttctaaaaaatgtagaaattgcattatactttatctaaagcagatatgggaggccaagacacaggtcctatgtttgcctgtttcasctcatcataggggttattttctaaccatcagattaaacctgcatttttaaggttaaaatacaaagtaaagtgcacaggtcgttcctacagtacatagagtaatctttcttcactcccaagataaccattttaaaatcctctatgttggagtattt

SEQ ID NO: 187672 - DNA, 465 bp, Homo sapiens
cacatccgagggcagggttaagtcactacataaagggaagaaggatttgggagaggggaagtctttgaagctacatacagaatgatgagaccccctcgtgtcccctgatgccccctagaatgttagcagcctggcttgtaycctccaggcaggagattggagcattcttctggggggttcccaatcatttggactggtccccccatttgatcaccatacacagagatccaacaaccagggccagatacagacacacgcacagacacagacccaaacacccttcaatcggcttctagttccttgaacataaaaatgaacattcaacaaggaatcagcaaacatttgaggaagcctccaatgtgaaagatagaacaaaatagcataaaagaaattcaagggcttcaatataatccataggttcaggaaaagaaaaagaaaaaagaggctgcgcacagtggctcatgc

SEQ ID NO: 187673 - DNA, 469 bp, Homo sapiens
aaagcatgacaatttttacgtaaagcattatcatactgtgtatgaccttcagaaatctagcaacaatcaactcatttgagtttaaaacagcctgtccaaaatgccttttatttacaaggaaattattctttgtacaatggtaagaaaatctattttcaatgatattgtttctggttaacagttctaaaatggactgacgttagaagagttctttcagaactcactgttggcaatatatgcctttttactgaaattctactactctcaaaggtgacatttacagaatttttaactcttcaaagttgatcataaacacggtctctctttgattctatcagacttctttttyactttatggagtgctcagaaacttacgtcagaagtaattttaagctttagtaaccaaatttatcccagcatggtttaaaatgaaaacaaaaataagttgttttgcagatgtcatgaaagc

SEQ ID NO: 187674 - DNA, 535 bp, Homo sapiens
tatcgtttttatccagggatattcattttttcaccattggtttcaatgagctcccaaatatccattcacagaatggaaaaaaacagtgtttccaaactgctaaatcaaaagaaagtttaactgtgaggtgaatgcacacatcacaaagcagtttctcataaagtttttttctaggttttatcctaagatattttccttttcactataggcttctatgtgctcccaaataacccttcacagattctacaaaaacggtgtttccaaactcctgaatgtaaagaaatatttaactctacgaaatgaaaccacacatcataaagcagtttctcaaaatgcttgtttcttatttttatctaaagatattttatttttcaccataggcctcaatgcactccgaaatatccctttgcagacaatagaaaaacagtgtttccaaactcctgaatccctttgcagattctacaaaaacagtgtttccaaactgctaaatgaaaagaaggattaagtctgcsagatgaatgcacagatcacaatg

SEQ ID NO: 187675 - DNA, 498 bp, Homo sapiens
tgaattcccatatcacaacgttctttctcagatagcttcctcttgttgtttatcctgggatatttgcttttttgccattagattcagtgatctcccaaatgtccattcccagaatggacaaacactgtgtttctaagctgctgaatcaaaaggaaggcttatctctgtgagacaaatgcacacaccacaaagcagtttctcagaaagcttctttcttgtttttatctgaaattattttctttttttcaccatagacctcaatgtgctcccaaatatccctttgcagattccccaaaaacactgtttccaaactgctgaaggtaaagaaaaatttcactgtgtgagatgaatgytcacatcacaaagcagtttctcagatatcttccttctagtttttgtcctggcatattcgctttttcaccattggcctcaatgagctcccaaatgtccattcacagattgcacaaaaatggtgtttccaaactgctgaatcaaaag

SEQ ID NO: 187676 - DNA, 544 bp, Homo sapiens
atctctgcaagatgaatgcagaaattacatagcagtttctcagatagcttccaccaagtttttatcctgggatattcactttttcaccattagcatcaatgaggtctcaaatgtccattcactaaatacacaaaaacactctttctaaactactgtatccaaacaaagttttaactctgtgagatgaatgcacacattacaaagcagtttctcagaaagtttctttsaagtttttatctgaagatctttcctttgtcaccataggcctcaatgctctacgaaatatccctttgtggatttgattaaaaaagtgttttcaaactactactgaatccaaataaaggtttaactctgtgagatgaatgcacacgtcacaaagcagtttctcagaagtttctttctcttttgtatctgtagatgtttcatttttcaagataggcctaaatgctatccaactattcctttgaagattttttaaaaacagagtttccaaactgctgaatgaaaagaaaggtttatctctgtgagatgaatgcacacatca

SEQ ID NO: 187677 - DNA, 554 bp, Homo sapiens
tttagcactgtggatgaatgcaaacacaaaaaaacagtttctcagaaaggttctttctagtttttatctcaagatgtttatttttttaccatgagtctcaatgggctcccaaatatcccttygcaatttctacaaaaacagtgtttccaaactgctgaatgaaaagaaagctttaactctgtgagatgaatgcacacatcagaaagctctttctcagataacttccttctagtttttttcctgggatattcgctttttcaccattggcctcaatgaactcctaaatgtctgttggcaataagaacaaaaagagagtttccaaactgctgaatccaaataaaggtttaactctgtgtgagacgaatgcacacatcacaaagcagtttctccttcaagttattttctaaagatgtttccttttacaccagaggtctcaaatcactcccaaatatccctttgtagattctacaaaaagaggtttccaaactgctgaattaaaagaaagttttcattctgtgagatgaatgcacacatcacatagcagtttctcagat

SEQ ID NO: 187678 - DNA, 557 bp, Homo sapiens
gaattccattccattccattccaatccattccattacattscataccacccagattgattccattccattccattataatccattccattccattccattccagttgattctaatgcctttcaccccattccattccactgcattccattccattccattccactcagtttgtttccattccattccattccactcgggttgattcctttccattccattccattccatttcattccattccattccgtgcctttccattccattccattccattccattccactcgggttcattccattccattcgttttcattccattccattctattccattcatttccattcaattccattccactccactcgggttgattccattccattccattcctttccattaaattccattccattccattacattccagttcattccattactttcccttccattctgttcccttccattccattccattccattccatgccgttgcattggaatcgggttgattccaatacattccattacattccattcctttccattccattac

SEQ ID NO: 187679 - DNA, 557 bp, Homo sapiens
gaattccattccattccattccaatccattccattacattccataccacccagattgattccattccattccattataatccattccattccattccattccagttgattctaatgcctttcaccccattccattccactgcattccattccattccattccactcagtttgtttccattccattccattccactcgggttgattcctttccattccattccattccatttcattccattccattccgtgcctttccattccattccattccattccattccactcgggttcattccattccattcgttttcattccattccattctattccattcatttccattcaattccattccactccactcrggttgattccattccattccattcctttccattaaattccattccattccattacattccagttcattccattactttcccttccattctgttcccttccattccattccattccattccatgccgttgcattggaatcgggttgattccaatacattccattacattccattcctttccattccattac

SEQ ID NO: 187680 - DNA, 538 bp, Homo sapiens
cattccataccacccagattgattccattccattccattataatccattccattccattccattccagttgattctaatgcctttcaccccattccattccactgcattccattccattccattccactcagtttgtttccattccattccattccactcgggttgattcctttccattccattccattccatttcattccattccattccgtgcctttccattccattccattccattccattccactcgggttcattccattccattcgttttcattccattccattctattccattcatttccattcaattccattccactccactcgggttgattccattccattccrttcctttccattaaattccattccattccattacattccagttcattccattactttcccttccattctgttcccttccattccattccattccattccatgccgttgcattggaatcgggttgattccaatacattccattacattccattcctttccattccattacattccactcggtttgtt

SEQ ID NO: 187681 - DNA, 405 bp, Homo sapiens
aaactgctttgtgatgcgtgcattcaactcacagagtttaacctttcttttgatagagcagtttggaaacactctgtttgtaaagtctgcaagtggatattttgtcrtcattgaggccttcattggaaatgggatttcttcatataaaactagacagaaaaattctcagtaactactttgtgttgagtgtattcaactcagagagttgaaccttcatttagatagagcagatttgaaacactcttttagtaggatttacaagtggagatttaaagcactttgaggccaatggtagaaaaggaaatatcttcgtataaaaaccagtcagaatcattctcagaaacttatttgtgttgtgtgtattcaactcaaagagttgaaccttcctttagatagagctgattt

SEQ ID NO: 187682 - DNA, 548 bp, Homo sapiens
tttgccccaactaactggattgcattctttacctaaaataagcaaatgctcaccaccatggtaggtatgtataggaaggaacatatgctcatttaccatagatgaccccccacccttccagaatatagcaaaaccaattctaggcctcagagataacaaatgtaaagtttctaatcctgcctgacttggtcagcaacagctcagtattatgaataattaataatgatacaaataacagtaacagccatctttcactgattgttgaccatgtgccaatcactgygctgagcatcttatcctagaggcccacttgggagtattaaatgtggaaatgtatcagtctcagaagaggtttagatttgtttcttactctatgtcacccagttgttaagtcacagagttaggatttaatccaaatcttcctgactccaatctccagtgatctttcagttaactccaaattaactaaagctgtcatgtgttgaggctttatatcagttagaatgtaggtgcttggttttaataaagaccaagggagagtggtttag

SEQ ID NO: 187683 - DNA, 562 bp, Homo sapiens
ggaagtgaagctggtatgcacgaccatggccagggcaaagatgtagggttggccaccagcaacaccagcagcgtctgctatagtaatcaacacagaacccatgagccaccatagctctgtgctagtccgttgctgccatgtgrgaatgcagccagtgttgctagagcttctgaatttttaaaagaaaccaaggatccagattgttttgtggaatttcctgattcgtaattgctgttgattgattcaaatattttaaaaacagtctagggaataaccaagcatgtctataggcagaatgtagcctatgggccattagtttgcacccactactctagtttaacatccttattttatagataaggagaccaaggccctagaggacagcgacttgactcaggggatgctgcaaattaccacttgtctgggatctgcaaccaattcccttaactcccaggccagagctcttcctaaccccactgtgctgcccacactgcccactctctcctctccacacccatcctcaaagggcaggagccttatccctgccctccactgcactcag

SEQ ID NO: 187684 - DNA, 567 bp, Homo sapiens
acctacaccgagtgtagtcatccccaaaccacccctcccagacccaggcgacctccaatgtacatgatgtttctgtagatttgcctattctgggcatttcatataaatgggatcacaaaatatgtggtcttttgtgtctggcctctttcagttaatgtttgygaggctcatccacattatagatctaccaacacttcattcctttttattgctgaatattccatggaacagatataccacattttatttatccattcatcagtaatggatatttgggttgtttccaagatgaataatcttataggttaatctttgcacacatcttagttggttcctttgaatatattcctagacatgaaaatgctaggtgaaagatgatacacataatttctaaacttttggatattagacactttcaattaaagctttatttctcacttgagcacactgcttcctttctcatttgaagggtcactgctcttcatcctatcaactacaaaacttttctaatctcttccttgtgatgcctggagatatttgcaatttttaatcttctaaagcaacatc

SEQ ID NO: 187685 - DNA, 567 bp, Homo sapiens
acctacaccgagtgtagtcatccccaaaccacccctcccagacccaggcgacctccaatgtacatgatgtttctgtagatttgcctattctgggcatttcatataaatgggatcacaaaatatgtggtcttttgtgtctggcctctttcagttaatgtttgtgaggctcatccacattatagatctaccaacacttcattcctttttattgctgaatattccatggaacagatataccacattttatttatccattcatcagtaatggatatttgggttgtttccaagatgaataatcttayaggttaatctttgcacacatcttagttggttcctttgaatatattcctagacatgaaaatgctaggtgaaagatgatacacataatttctaaacttttggatattagacactttcaattaaagctttatttctcacttgagcacactgcttcctttctcatttgaagggtcactgctcttcatcctatcaactacaaaacttttctaatctcttccttgtgatgcctggagatatttgcaatttttaatcttctaaagcaacatc

SEQ ID NO: 187686 - DNA, 604 bp, Homo sapiens
gtttttagtgtattcagagttgtgcaaccatcaccacaatctaagtttggaacatttttgtcattcctaaaagaaacctacaccgagtgtagtcatccccaaaccacccctcccagacccaggcgacctccaatgtacatgatgtttctgtagatttgcctattctgggcatttcatataaatgggatcacaaaatatgtggtcttttgtgtctggcctctttcagttaatgtttgtgaggctcatccacattatagatctaccaacacttcattcctttttattgctgaatattccatggaacagatataccacattttatttatccattcatcagtaatggatatttgggttgtttccaagatgaataatcttataggttaatctttgcacacatcttagttggttcctttgaatatattcctagacatgaaaatgctaggtgaaagatgatacacataatttctaaacttttgratattagacactttcaattaaagctttatttctcacttgagcacactgcttcctttctcatttgaagggtcactgctcttcatcctatcaactacaaaacttttctaatctcttccttgtgatgcct

SEQ ID NO: 187687 - DNA, 615 bp, Homo sapiens
gcctcttcttcagaaaacacttttccagctcacaacatccttgagcctccttactgccttcagctcaagtgtggaacctcaaatgtctctgttacctatctggctycattcctgctgcacatggtataagaaacccctgctggcctagtgcagtcgttttcatacttaagtgtccatgaacatcacccggagtgtttgcaaaaacagcttgctaggctgcaccacagagtttctgattctgtagagagtaaaactcaagaatctgcatttctaacaagtccccaagagatgctgctgctgctgctgctggtttagacgtcatactttgagaaccacaggaatctgagctctgggctactccttttttaagcgaacttagaataattaaaaagtgacccctagcaaataggagacttttggggtgataaagatattctttatcttgactggtgcagagattacaatgtgtatgcctttgtcaatttcatcaaattatatacttaaagtaggtatactttactgtatatgaataatgctttaataaaaatgatcttaaattttttaaaataaagaaacaatgtattcttatacattggacatagctgatcaatcatc

SEQ ID NO: 187688 - DNA, 597 bp, Homo sapiens
atccgacaggctgggtttgaatcccacctctgccccttgaacttagttgaattattcatctgtaaaatrggcataattaatggcacctcactcttaggttgagtgagtaaggattaagtgagtaaatatatgtaaatattattacagcagctagtgttactttcagtaacacaagaagaaagagatgctaaagggactgtgatgatttcaactatgaaatggacatacaatatattttattgttgtttgactacgttgaaatatatatttaaattgagggccatcattttatctaaaatttactagtaattcactaaacagatttccctaattaaaaccactcaaaccagtatgcagtgattttatggcacaagaatagactatgagtatatggtttgcagcctggacaaaaacctttttgggtctgacctgaataagtaggttagtttatatttcaaatatttttatttatactatttcctctgttttactcagtaaacattaagttaatcttccgtatcatctaattaaccattatttgtaatgaagacaaattaaatttgtaaaataggagtagaaaaatggttacagatggtg

SEQ ID NO: 187689 - DNA, 585 bp, Homo sapiens
agagagctgtaagcttatctcctttgccattgggaacaggttttccattctctgttctaaatcaagttagcatcctccaccaacaaagctactagttttcatggttaattctgtctgataaaactactgtactgagcaacttagggtgtggtgtgggggtggctataggcaagaaaaccatagactcctacagttcttacctgaaattgtgcagtctttcacgaatatatgattctccatttgttttttctatttggttgatttctagagccccaaaatgattgtttttgacaattttgtccaacttyatagttgttttttggaaaaaggatttaattgacctccttattcttttataccatctccatttttgtatgcatcttgtctgttgattgcaggttcctcaaaacagaattgtcagagcaagtccttggacactaacaactttttctattgcagattcttacttgaaaacattttattgtctcttgttggttcccaagaaattggttgcgtaaccctatgagagttgcatcttgtccacctcttttactctatccttccttgctttccctgcacaaataa

SEQ ID NO: 187690 - DNA, 549 bp, Homo sapiens
ccttctaaataattaaagctctatcaaggagagcattgtacagattagggcattaaatactaatcggcttcttcattacagtctcctacacacacaaaactggaaggaggggaggtcccaacgcatattaaattctccattccccttataattctcytattgacaaatgtggttgcagacaggatcattttgaaggagtttgttagaagacattgctggtctatccttttgggaaacccaattgttttttttgttgttgttgtttgtttgtttttaaatggaataatgggtggcaaaaaagcttcctttacactgaagattagctccaggcaggaacaaatgaaacactccagagaatgaaatataagcaagagaaaaatcactttccaacagttatatcagaaggggaaatagactagtgctcattttaaagaacttcagacccagcattctttttatgagcctggtgtgagtgcttagccagcaggggaaaaggagaatatgatatattataatgaccatttaaattctgctttgcaaaataacctg

SEQ ID NO: 187691 - DNA, 549 bp, Homo sapiens
ccttctaaataattaaagctctatcaaggagagcattgtacagattagggcattaaatactaatcggcttcttcattacagtctcctacacacacaaaactggaaggaggggaggtcccaacgcatattaaattctccattccccttataattctcttattgacaaatgtggttgcagacaggatcattttgaaggagtttgttagaagacattgctggtctatccttttgggaaacccaattgttttttttgttgttgttgtttgtttgtttttaaatggaataatgggtggcaaaaaagcttcctttacrctgaagattagctccaggcaggaacaaatgaaacactccagagaatgaaatataagcaagagaaaaatcactttccaacagttatatcagaaggggaaatagactagtgctcattttaaagaacttcagacccagcattctttttatgagcctggtgtgagtgcttagccagcaggggaaaaggagaatatgatatattataatgaccatttaaattctgctttgcaaaataacctg

SEQ ID NO: 187692 - DNA, 549 bp, Homo sapiens
ccttctaaataattaaagctctatcaaggagagcattgtacagattagggcattaaatactaatcggcttcttcattacagtctcctacacacacaaaactggaaggaggggaggtcccaacgcatattaaattctccattccccttataattctcttattgacaaatgtggttgcagacaggatcattttgaaggagtttgttagaagacattgctggtctatccttttgggaaacccaattgttttttttgttgttgttgtttgtttgtttttaaatggaataatgggtggcaaaaaagcttcctttacactgaagattagctccaggcaggaacaaatgaaacactccagagaatgaaatataagcaagagaaaaatcactttccaacagttayatcagaaggggaaatagactagtgctcattttaaagaacttcagacccagcattctttttatgagcctggtgtgagtgcttagccagcaggggaaaaggagaatatgatatattataatgaccatttaaattctgctttgcaaaataacctg

SEQ ID NO: 187693 - DNA, 247 bp, Homo sapiens
gcattcggcagctcttttagcctttttaggacttgattttcacatctatcaaacaaggtcacagtaatcgtaatggaagaagtcccttcaggcarcccccaaacaagactcccataattggccttctcctgccacttatattgggtaaattattggatcacggggtgatgtagtgatgagcaaggagtgaggggctgtatttccacctaccggtgaacccttgaggattgtaacctctgctataacc

SEQ ID NO: 187694 - DNA, 516 bp, Homo sapiens
gttcttctttttttctcagatattctagctgattcccaccttggaatctctgcacttgttccctttgtctgaaatttcctgctttaaaatcttctcatggctcacttgtctttattgagagctcagctcaaatgccccctcttctgagagaccttcccttaccacttgtcttagtcctgtttgttctgctatagcagagtacctaagactgggtaatttataaagaagagtaatttatttggctcacatttgtggaggccgggaagtccaaaatcaagtgaccacatcctgtgagggtcttcttgctgtgtcatcccatggtgaaggccagagagagagaaaagawgatacaacctcaagctcttttataatccgcatgaatccatttatgaggctggaaccctcacaacctaaacactacccattaggccccacctcccaacactatttgcattgggcattaagtttccaaaatatgcttttggaggggatacatgcaagccatagcaccaccca

SEQ ID NO: 187695 - DNA, 542 bp, Homo sapiens
gccattcgtccacgttctatctccctggattgcctattctggacatttcatatatgtgggatcataagattgtggtttttctgactggctcataataatgtgtttgaggttcaaccctgttgtagctctatcagtattttattacttttcattrctgaatagtattctattgtgtggataaatcacattttatttacccattcatcagttgatgaatattaggcttgttctcattttttggctcttgtgaaaaatgcttctgtgaacatctgtgtgcatatcttgggatggacatatttttatttctctccagtggatacctaggaatagaattctgggctatatggcaacactatgtttattttttgaggaactgctagacttttccaaagtggctgcaccattttacatatacaccagcagtgtgtgaaggttcttgtttctttccacctctttgccaacatttattatctgtcttttttattatagccattctagtgggtataaagtagcaactcactctggttttgatttgcatttcc

SEQ ID NO: 187696 - DNA, 510 bp, Homo sapiens
gaggggggttgaggacagctgggagctggcctgcaggtgcaccttggtgccagcagcctgggtgccatggatggtcacgggaggcagaaagcctcctgggcagaaggtgggggggcccagagaagccccaccttcaggctggggcagacctgaagcctgggaactgagctgtcagccctgcctactggagggagaaytcatggtgctttttcctgggcctgcccatggctgcccatggacgagttagcacatacttcccctcctctgaggcccataaaagcctcaggttcagccagagcagggcagaggtcagagaggatggagagatgatgagaggaccagctgcagagaggagttatcctctctgctgataactggagatgactggacaaccagcagcagagaggagctatcctctctgctaagagcttcagggacctgcagagagtcaggaacaccagctgtagaaagtagcaaccctctccagggactcctctctgctgagagctg

SEQ ID NO: 187697 - DNA, 411 bp, Homo sapiens
ctccctcgtagctgggactataggcacacagcaccatgcctggctaatttttgtactttttgtagagatggggttttgctatgttgcccargctgctctcgaactcccagactaaagctatccgcccaccttggcttcccaaagtgctaggattgtaggggtgaaccaccacacccagctcttcatgatggagttgtggttgcctctctaagaccactttgtactgtctatctgctaccctactatgctccagctccacaagtcttctgtatctccaacacatcaagtttgcattaatgcttacatccattagtggccccactgggacactggagtgtacttctaccactctgtgtatggctggctcctccttgctagtcagatcccagcctaaatgccatcattttagag

SEQ ID NO: 187698 - DNA, 404 bp, Homo sapiens
tgttgatgacatcattcattttaattctcagcatagcagttgtcaccatgtgatcatttattctggcttatttatrtagttttgtctctccttgtctgtcttattttctgttatagtcacatcttctagagtagtgcctaacacttagtaggcatttaataaatatgttaaatcagcagttgaaatcagtcttttaaatgtatagcaagtaaaacctgttaatgaactgaactctactacattctgtacttgagagaagaaagtaaatattctttttttctaacagagtgaaagtgatttttaaaatgagtctttagcacaaaaagaggagcaatttgaagtagaattttaagctttttctttcccagaaaagaattacgtattaaaaaaaattggctaatttg

SEQ ID NO: 187699 - DNA, 635 bp, Homo sapiens
agatgtgctacctatatactggattcaatggcttagtaagaaaatataaatttaaaagatattattattactatcaattatatattgaatttattatattttggatatattaggttaaataaattattaaaattattttcacctttttcctttttttaaatgttactacttagaaaacacaaacataatatatatgtgatttgtgtatctatttctactggacaattctactttaagagttagttagggtaggtaacataaaagctccagtgtcagtgaccactacaaggaatctcagtcaccaaagcacgattactgcaaattatataccatgcagcatttctggtttactcagaatgagtgaccagtgtatcccagcagaacattttttattayataatgaatctctagacactctcatacattctccgaatggagatttgtgtaagcatatacttacacaaaaagaaaagcaatgattcttctccagttctctgtaccatatattcccatgaaggaagtgtaaatgttatacccactgtaatgttacaagcattctaagtttttcctgtttcacaggtagacctggcatctattctggtgagggtgaaaattctgaagcagagaaagtcatt

SEQ ID NO: 187700 - DNA, 635 bp, Homo sapiens
agatgtgctacctatatactggattcaatggcttagtaagaaaatataaatttaaaagatattattattactatcaattatatattgaatttattatattttggatatattaggttaaataaattattaaaattattttcacctttttcctttttttaaatgttactacttagaaaacacaaacataatatatatgtgatttgtgtatctatttctactggacaattctactttaagagttagttagggtaggtaacataaaagctccagtgtcagtgaccactacaaggaatctcagtcaccaaagcacgattactgcaaattatataccatgcagcatttctggtttactcagaatgagtgaccagtgtatcccagcagaacattttttattacataatgaatctctagacaytctcatacattctccgaatggagatttgtgtaagcatatacttacacaaaaagaaaagcaatgattcttctccagttctctgtaccatatattcccatgaaggaagtgtaaatgttatacccactgtaatgttacaagcattctaagtttttcctgtttcacaggtagacctggcatctattctggtgagggtgaaaattctgaagcagagaaagtcatt

SEQ ID NO: 187701 - DNA, 635 bp, Homo sapiens
agatgtgctacctatatactggattcaatggcttagtaagaaaatataaatttaaaagatattattattactatcaattatatattgaatttattatattttggatatattaggttaaataaattattaaaattattttcacctttttcctttttttaaatgttactacttagaaaacacaaacataatatatatgtgatttgtgtatctatttctactggacaattctactttaagagttagttagggtaggtaacataaaagctccagtgtcagtgaccactacaaggaatctcagtcaccaaagcacgattactgcaaattatataccatgcagcatttctggtttactcagaatgagtgaccagtgtatcccagcagaacattttttattacataatgaatctctagacactctcatacattctccgaatggagatttgtgtaagyatatacttacacaaaaagaaaagcaatgattcttctccagttctctgtaccatatattcccatgaaggaagtgtaaatgttatacccactgtaatgttacaagcattctaagtttttcctgtttcacaggtagacctggcatctattctggtgagggtgaaaattctgaagcagagaaagtcatt

SEQ ID NO: 187702 - DNA, 426 bp, Homo sapiens
atgaggagcaccacttttgaaactaatgctgacagctgataacaagagcaaagttattgtaactggtagtggacgtttgaattgttgaaatgtgccatgttcatattttacttccaatattttcccttgacataatggattctgaaatgaaatgtatagaggactatttttaaactaagatttcattttaaagaatatcacacataagggatttaattaaaggataatgaaggagcaaaataaagaatcaggaatcttaggttttggagagatactcaagatatgaaatctattttgaagctarcactggagataaaagtcaggagctctcccatgtttttctgtgatattaaggaaattaagtcagaatcccatctctacagtagactgtttcacttaaccattttactgactccacttcaccct

SEQ ID NO: 187703 - DNA, 413 bp, Homo sapiens
gactcatgggaaaattgcaaaactaatctgatttccttcagagcttaacaaatagaagaccatttttaaggctgaagtttgagatataaagtaaggcttattatttttatccataaaatatagtaaatattagaacaaattagaatgctrtagtttaaatggttttcatagatttctaagaccatttatacatcctatttcacatgagatgccccatttggagctgcccaaagggtattgtggaaataagacaaagtacagctgttctagatggctagatgagtgataaacacagaatcaacttgagctggtatcttcttcccatttgcaaataagaagagagagatgggtaataccatttgaagagaagtgtctattagtctattagtgtacaggaacctgagaacccttcg

SEQ ID NO: 187704 - DNA, 555 bp, Homo sapiens
gcatgacaaccaccccacccctaccccagcagttctagtttcacccacatttggggttttcttctcttggagactgcactaaggtctaatgtaggctgagaatggccgactctgattagcaagaagggattaagtggtttgaagatgtgacgacttacatacaccacagcattaacgcttttcaccttgtccacaccaacgagctattaatggtaaactctcaggaccatcacaacatcgtcttgtataatcaagacccagtgttcctcaaatgaaattgtagcaaactagatagttctttcaaatgacaaaataataatcttcagagattttaatataagaattccaagatagccctttggcctaatggaatcagcacggtatcttacgataatgatgccgaatgtaatccttctatgagatgattcactggagtgsttaacgaagtacgctttgtcagagagatgctcatcatcgtggattatcagaattcgtatcatccaatgtgatgtggcaaaattttcagcctctgccttcttcaaggaatgcaataat

SEQ ID NO: 187705 - DNA, 592 bp, Homo sapiens
tgacacttccctcttatgcctctgtacagtcaaaatgtctgtagcagtcaccaacacttttgtaattacaccatgtacttataaggtgaccatactgtcttctagtctcaatgtccctgagggcaggagatcataactgtctcatttggtgcaaaactcccagcacagcacagtgcctgtcacacagcaatgccttctcaatattgttggatgaatgaatttgcttgtttcttaataatttggattaataggagcacggatcagagttttaaagtagtaatatatcaaatatctaaaacagaggttcctttaaactaaaatttggacaacagaaaaccatatattgattgtcccataaggagatgtcgcaccttccttctagctgcttgaatttgcatgctactaggctggtatgataaacagactgatttaaaaatcaaataacagactctaagaagttataagaatccctggattagtacrggatgataactaaaggatctgctatattaaatcatgacaataaaagtaaaatccccccatcttttcctggattacatttagagctcaaatcagagagccttaaatgaat

SEQ ID NO: 187706 - DNA, 656 bp, Homo sapiens
acgtgttgttttcaccttcgttttaccgaagagaaattgaagcacagagggttaagtcacaagctcaattacatagtaaataatgaaggggcttgggtttgaactgagcccatctggctctagaaagtatgctctttgtggctatattatgccaactttgtaaaacacaaataatactatttttttgatagttcactaataaaaatactctcctctaacctcaaatagccaaataaatctacagcaaaaagaacatactgaaagcatcatactacctaactttaaaatatactacaaagttatagtaatcaaaatagcatgatactggcataaaaacagacacrtagaccaatggggcatcatagatcccagaaatgaatccaggcatttgcagccaactgacttttgacagaagtgccaaaaatatataatgaggaacagatagtctcttcaatgaatagcactgggggtaactgcatatccatatgcaaaagaaggaaattagatccttatctcacaccatatagaaaatcaactcaaaatagaataaagacttaaatgtaagatgcaaaactgcaaacctacaagaagaaaacacacaggaaaagctccatcacattgatctgggcaatccttcttcagatatgaccagaagc

SEQ ID NO: 187707 - DNA, 568 bp, Homo sapiens
taactgaatttagttcctgaaaacatcagtaccttttataatttcacctataatataatcagtcaacattgattaataatataattgctatactaaggtttggatagaaaataaaaatttatcatcaaatatatttcacttgttcaatgattaaaatctataattataggtaacattttcatagcaaattttgtatgaagaattaatctggtgtgctagcatttccygctgttaactgtagtaactacttgtaaatgacatttaaaatcaacttatgcattcattcattcaaccaggccatgccaggtaagtaccaggtaggtaaaactactaaactcggtgggaaatataagtgaaagagaagttatagttactatccgaaagaaatttaaaacttaactaaggaaattaaatgtaggggcatctcattctaacagtagcaactaaatctgttaatgaatagcattttattttcaattaaattactttcaaactacactctcttctgctgcttattaggatgaaatatagcaggttatatatttcacactttgtaacacttggactt

SEQ ID NO: 187708 - DNA, 596 bp, Homo sapiens
atatggcaacatgtgaaatcttcacaggactcttgtttttctactatctgctggataactaaggagatcaccagactgctgggacgcctgccagatagtaagcaggtatgtttatgagtttaagattcttattttctttcaatgctttcacatgctgtgggcgcagaggcaaaaaaaaaaaaaaaaaaaaaagtgaaagggaaaagaaaaggggagtggataagtgactgtatatgatcattacaaaygtctttgaggtttcttaaaatgtggattttataaggtccagattaaattattttctctcaaggtagaaaaatcaccagtcatatggtttcaagatttttaaaaaatgctaggtttttcatttttttgtacacataaacaggtgtataatttcttcaatcctgttgactagacatacattactcagaggatcataagcttcgtcagcaaacacggtgagtgtatacctgttcatggtgactgggctagccatttcagtgaaataaatgtgagggtctgtttatattttactttgattacttaaaaaaactacgataggcaaagaatacttagagtaataacaaaacctc

SEQ ID NO: 187709 - DNA, 472 bp, Homo sapiens
tatgttcatcattagagtctgatctctaagagatttcaatattgaaattctggcattaaatttcaccttactctgaaaacggcactcctgtgtttttgatagaaaatccatattcacagcactctcatcgcaccaaaatctttatctgaaaaggaaataggctagattcatgcttagaagagtggtacctgctaaatagccaatttcttcatttgagataaataaaccccacacttggcgcttgagtatttcaagccattgaaacaatttggaaaactctacytgcctagtccaaggtttggtttttttaatgaatttgcaaagaaaattctattctcaccatgctgcctcaactttgtctgaaaatgaggtagatgaggaaggaacagtaagtgactccctgcaacaagcccaggaaggactcttctcagcaggtgtgtgtgtgtgatggggaatggcatgttgccccctc

SEQ ID NO: 187710 - DNA, 543 bp, Homo sapiens
tgcaattgctagttttagacaggaggaagtgtgtcctgggggatgacggctcttgcccaaggccctaaagctctttgatagcagcaatgtggccataactacttacttccagtccatggttctgtccattagcaccattttgtcaacttctccagtagacattaatggaaaaaaacctactcctcacctcaaagagtaaaataaattaaaacattaataaagtgtctcacatgccttaaaaattagctataaaaatatcacttcatggtataatgattgcattgtttctgttttgaatgctttgacaaactgtacttggacatttactataatttaaattataccctactttacatgartaacacataaaatttttttttaaagaaaacatagataagtcacagagaatgctgaatgtatctacattggagttttggacacatatgtgctccaaatcatttactatcctaaaatggatacctcaaagaaaagtaaaaatgtaaaatatatttgcaaaacaaagattttttttctgacatctta

SEQ ID NO: 187711 - DNA, 462 bp, Homo sapiens
acaagtgtaatgcgccactaaataattactatgcttggggtgatagcatgttttaatctgtgatggcagtttgtcttgaatcctaaccgtccccttcttaaaaacatgctcataataagcagatgctattgtcctttggctttctagaaagtcaacaagccaaattccttggtcgttccaraaaacttttgtcatgatctttgctctcagctggtccacttttgctttgactggatctcttccccatcttggcagccattacttttattgtgctttgtcctcaggatcatactgataaggccacgtttcatctcctgttacaattcttcaaagaaatgcttcgggatcgtaacatcatctgtttaacatttccattgaaagttctgctcttgtctgcagttgatctgggtgcaagaatttttgctcccgttgagtggaaagtttgctcaactttaatttttc

SEQ ID NO: 187712 - DNA, 383 bp, Homo sapiens
atgtatggtttgcaaatattttctctcaactcgtgggcggtctctccattcttttgttttctttgctgtgcagatttttttttttttttgcatttttagataattggataaagttttagaaatatagggcccaatatttcacattatattattacatacatacacataaatatgtatacacatatgtatygcattatagatggcagttaaaattttcaagtattttaaatactgtcatcaaaataatacatgcacatgatttgaaaaattaaacaatacagagcagcagtaccttactacatccataagccctatggcatttctcaaacacaagcatttacatttcttataatgatttcttctccatacttctaaatcaggaa

SEQ ID NO: 187713 - DNA, 621 bp, Homo sapiens
cacagatctcatgagttttataaaggatactcaaggttttttaacagcttgaaacattgtgccacttgataaaaatcttaaaaagcagagaatttttattttacttttgttggtcccatgatactgttttgaaaatcaacagcaatcaatttattttatgagtcagggtaggcctataatacaaaccagtaatttgagtaatttttgcaagtcaaccaaaattatgaaaataaatttcttcttaaccaaaagatacatttgytccaatcatctgtgtattttaaactgaacctatgaagtagaaagttctaaaaagcaaccctgaaaatttgatggtgcatttgttgttgctatataataatctacccccaaattaagtagcttaaaacaatcattttatttacttcatatttctatgtgtcattaatttagctgggctcagttgtgcaattcttttgctggtcttggcttctctcaagcaactgaggccaattaatgggtctgctggtagatagaagatgtgtttagctgggtcagctgctcctgtggtctctgaccatctggcagacgaacttgagctctccacatagagtctcatggttctaaaatgcagtgagaagt

SEQ ID NO: 187714 - DNA, 605 bp, Homo sapiens
tggctttttttggtctgaatttttaagccatattggcactcatattatctgataaatctaattttctcatctgaatgaattttctggtagacttttatatttctcctatcagtacacacattatcttatcatgattattttacacctaccattatttccaaggtgctgaatgtcatcaagaaatataagtgataggacagattggagttcttcaatagctttacactcattgtacaaaaggaattttgtatgcaatgtttgttctttgattaagaaaggaccactgcactcttattttgatatattatatgtgatatgtgcaatgtttacccactagttgtttcagcctagggagaatttttatgaccaactaacaaactctrtaacagtattcataatgtgaatgctgatataccattatttatacttcagttctatagcaaaaattggttccatgataaataaactctcattatccaatcattagtctattgtagccacagtgacaagtcatgccacaggcaatacaatatcactaatgaaatgaattaatttatctttttcaaagggacattggggaattgtaaatgtatgttttatagtat

SEQ ID NO: 187715 - DNA, 580 bp, Homo sapiens
gctaacattggggaccatgagtagaaggtattccaggacagttacatgatgctgaggacctcaaagggctgtcaagtgtacaatgatgtcgcagatacacttttcatcccccatgtctctaggaagcacaaggcagtttgctacctctggtgtagttatccaggggtcaaaatgtggagaactgggattaggaatagtcatcagcaggcttcaggaaacaagaagcaacttggtcttgacttcacaattgtcacagctgagttggatatgcaggccctgactgttaacttatatatacctcaggagtatcagaaaagctgctggactttgccaaatcagcatctctaacacaggccagatgtgtgaaggacaggtaagggaatttcctggagctctacgaggaaaatacagcctaagaccatcctggagcttgcagagggggaaatgtgcttcttcactgcaggatacattttttcattcatttagaaaggcataycagaggtatttttaaaaattttatcaatttataaatgtaagctttataaggagcatttatttaaacaaattgtttaagcattgc

SEQ ID NO: 187716 - DNA, 581 bp, Homo sapiens
tggaaacacaaactgaataaacactggttctttaccaatatccgtttccccttttttccttacctggatttgtctgggacaactacgtgcccagttaaaatttctcacttccccagattcttttacagttaaggctgtgtgacgtagtttacccaataatttgtatgcaaaaccttaccaggtgaggccctgggcaagctattattttcctataaaaagggacaaactcagatcacacacacctttkccccttctttattctttctgcttagaatgcagaaaaatgcatggaggtaaagcatccatcttatgactataaggaaaaaagctacatggtaaggatgatgaacaagagagagaaaattaggtctctgatagaattgtggggctgctgaactagccctcacatgcctccccttaaaagaaaaacaaatccttatttggttaagccattttagtagggttcctgttacaggtgaaggtaatagagtctggcacacaggcttgttagagcattgtctctgcagataaaggttcgtggcactctactgtggcagtcacttttacattttcttcatatc

SEQ ID NO: 187717 - DNA, 532 bp, Homo sapiens
ctcgggaaactttattaaaactacatacttttaaaaaatcaataaaatagtcatgaaaagaaagtgaacaataaaagtaaaaaatataaataaataaatgtgaaagatctggaagtcctttaggtatttttccaaaggcatacaaaattttttcagacttgacacgctgaaattacatttgtcacttattctcatatctggattggatatatacaatccctatctttatggcatttgctactaaggataaggtaaatacttatactaccagacttgctctaygcccctacttagattaggttttgaactaatattcttaacaaatactacactattctttctttttctaatttttggctggtaagatgaaaatgcagtaatataaagtaagccatatacagcaatatccacgctaattcatgttcttctccaattctacattcaactggttatacctattcatccttcaacactcaattcgggcctcaagtgctctgaaaagttgtccgtgactcatccagtctgttttagg

SEQ ID NO: 187718 - DNA, 521 bp, Homo sapiens
tactgcccaagggattgataactaatttaccagtatgtagcaggtacatttctgattctgtgataagagattaaagaccagcagtccataaaaataaaatgaattcaagtccatttggaacttaagagtactcgggaaactttattaaaactacatacttttaaaaaatcaataaaatagtcatgaaaagaaagtgaacaataaaagtaaaaaatataaataaataaatgtgaaagatctggaagtcctttaggtatttttccaaaggcatacaaaattttttcagacttgacacgctgaaattacatttgtcacttattctcatatctggattggatatatacaatccctatctttatggcatttgctactaaggataaggtaaatacttatactaccagacttgctctatgcccctacttagattaggttttgaactaatattcttaacaaatactayactattctttctttttctaatttttggctggtaagatgaaaatgcagtaatataaagtaag

SEQ ID NO: 187719 - DNA, 565 bp, Homo sapiens
ctttctttctttctttttttgtttttgtttttgtctctttttaaagacagggttctgactatgttgctgaggctggagtgcagtggctgttcacagatgcaatcccactacgaatcagtgcaggagttttcacctgcaccatttccaacctgagccggttcacccctccttgggcaacccggtggtcccctgctctcaggtggtcaccatattgatgtcaaacttagtgcggacacccaattggaatagcacactacatcctagaactcctgggctcaagcaatcctccctcctcagccaactgaattgctggggctgcacttgctggctacctttttcctttttgaaggctctcttgcttctccctttagtcgtaaatgtgggtgctattggacaattyactctacttcttcagtatttaagacctggaaccactttgaagcccaaagtcttgtaagttgttatgtaaataaatatcataaaaagcaactaacctattagaaaagaatacagaacattttaaatacagttgtcctttgtctgagacttaagtgacaattgctgc

SEQ ID NO: 187720 - DNA, 515 bp, Homo sapiens
tataaatagctaaaattaaacagagcaagactggcgatgctaatgcataagcaaagaactgacttcctgcatttcatcgagaattccygatagcaaactgcagtatgtttattatacattaattcaacacagcattcaaaatgaatttatgccctggctgaagggtgctatattgaaactaaatattatttattatcttaatattagtaaccatactaaaaaaaatcatgttaacaattcagtgttcaaaaagctaagaataccatagctctacttaccaaccaactgctcttgccttaatttatgcaagtgtagcctatagctaaaagctttgtatatttgtttccccatggtattagtgctcaaaaataggtcactctttcaagggcaccttataaacacagaactataatttatttggcaaattaaagctcatataaaatgtgcacactgaggtacagattaacatatttaatttcaatattacctgcaaacctattttttcccatacactg

SEQ ID NO: 187721 - DNA, 481 bp, Homo sapiens
gaattcagtgtagctagtgaaatacagaaagatgactactgaaataaggtcaattccagtagaaaggaaggtacagaggatactgcaatggagctgtgaatgaaaatgatggatgctgatgttttgaaaagtttagctggagatatggtggggtggggagagaagctagaccatgattcggggcagatatgtggctaagggagatatggaatcgagggagaatttttttcaatgaygggagtagcttgaagatgtttatatgctgaaaaggagacagtaggagagagagagagagagagagagacagagaggctggcttaagatgtatgtgagagaggttcacctgattaaatgatgctcctagaggaagaagatgggtcttaaacaaaggaaaactcacctttttctctgagactggaagaaaagtgtcaatgtgtgtggccatagatacacgtgtaggttgtggtgggtacaatgagat

SEQ ID NO: 187722 - DNA, 606 bp, Homo sapiens
ctagcaatattttataactttggtttataactccacccattgttttcaacataattcaagaaaatcatacatttaaaataattatagcttatttgaggggcacacaatgtacaagaatgtaattttgttacatcaaaaactgaaagaggtgygacagagctataaagaagcagagtttttgtatgttagtgaagttaagctggtagaaattcaaattagagtattataaatttagggagttgattgtaatcctcatggtaactacaaagaacataaagctatagattatacacaaaaggaaataggaaaagaatttaaacatttcactatatgaaacaactaaacacaaagtaatgcaggaaattggagataaaaaagctataaaacatatagaaaacaaattacaaaataacagaagtaagtctcttatcagtaattactttaaatataaatggattaaattcttcaatcaaaagacagagacaggcagagtgaattttaaaaaatggatacaactgtctacaataaatccattttagatccaaaaccacaaagtaattgacagcgaaagaatgaaagcatattctatgtaaatagtaaccaaaa

SEQ ID NO: 187723 - DNA, 569 bp, Homo sapiens
gtgccagcatctagtgagggtcttcttattgactcatcccatactgggaggtggaagggcagagagcaaaaaagagagaaaggtggctgaattaatttctttgtaaggaactcactccagtgataatgaacccactctcataataatgacattartccattcatgaagacagagccctcatggcctaatcacctcttaaagatctcacttcttaatactgttaaaatggcaattaaattttaacatgagtttgggaggggacaaacattaacaccataatgggcctatagtgccaaggccttgagggcacaatgatttcaaaggaaagactgaaggcatttggggggacttcagtgcaagctgcctcaggctgccacttggctctactctccaaattcttgtgccatgctggagcttttcatttcctccaggtttggccccagtaggcttaggtgcagcactggccttggttgctgcctctccagagggcacaggtgataaatcatggcagtgtcagttcaggtccacctctgctgctctcagagtgtggaagccatggggtgtgtctg

SEQ ID NO: 187724 - DNA, 522 bp, Homo sapiens
atctagtgagggtcttcttattgactcatcccatactgggaggtggaagggcagagagcaaaaaagagagaaaggtggctgaattaatttctttgtaaggaactcactccagtgataatgaacccactctcataataatgacattaatccattcatgaagacagagccctcatggcctaatcacctcttaaagatctcacttcttaatactgttaaaatggcaattaaattttaacatgagtttgggaggggacaaacattaacaccataatgggcctatagtgccaaggccttgagggcacaatgatttcaaaggaaagactgaaggcatttggggggacttcagtgcaagctgcctcargctgccacttggctctactctccaaattcttgtgccatgctggagcttttcatttcctccaggtttggccccagtaggcttaggtgcagcactggccttggttgctgcctctccagagggcacaggtgataaatcatggcagtgtcagttcaggtccacct

SEQ ID NO: 187725 - DNA, 465 bp, Homo sapiens
catctgctgctggtgaaaatgtaaattaataaatttgtggaggataatttacaatatatrctgtaagttttacatccaaaaactctatgcttacaaatttatcttaagaaaatgatcagatttgggcataaagatttattgacaaagatagtagaatttttataataataataaaattaaaatgttctatacatccaaaataatggagtggttaattaaattatagcatacccaaagaatggaatattatgcagctagtaaaaattgtcattcagtgaaattaaaaagatgtaccatcaattttttaaattcaaaatgcatattaataaaaaagagtggaaaacacataaaaatactaagtaatctgttgcttcttggtagaattacaagtgatatgtattttcagtattttgtaattgctcttttcaatattttctaaattttctacaaggaaaaaatgtttac

SEQ ID NO: 187726 - DNA, 462 bp, Homo sapiens
aaaaaagcccagacagtgaagactacataaatacctaactcttcaatgcgcagacaccaacaaacatctactaacatcaacaccatccaggacaacatgacctcaccaaataaattaaataagccaccagagaccaatccgggagaaacagacgtatctgtactttcagagagaattcaaaatagctttatttaggaaactgaaagaaattgaagacaacacagagaagaaattcagacttatatcagataagtttaacaaaaaaaatgaaataattaaaaagaataaagcagaaattctggaactgggaaatgtaattaacatactaaagagtacatcagagtttcytaaaagcagaattgatcaagcagaagaaagatttagtgagcttgaagacagggtatctgaaaatacacagtcagagtaaacaaaagaaaaaaccattaaaaacaaggaagcaca

SEQ ID NO: 187727 - DNA, 546 bp, Homo sapiens
tgaccaacacttataaattgaaccatttgaaatatccatattttcttggccaaaattggtagactatcagcaatttagtatggttcaacctaatgaaggtagagttcaagaaccatcttagttaaattggtacctgggacaaactaatctcacatactgatcagtttttgctggtatccattctggtagtgtgcttaacaagttaagcaatacagaaagggtaggacatgttttggtgaaaaatggtagtcaattttccatgtttagtgaaaaaagaagaccattatttaatgatgagtagggagaaagtgggaacctaatggtgaagccaactaacagatccttgtaccgacaaatattgtcacttttgactatcgtgctgaatattccacattaggtaacttaacggaagaactttaaagaaaaactttcyaaggcctagcttatagttctctgggttaaaaaggattttaaaatctgatttgatttatgagttacattcacttgaatgtctagaggatggcagaaatattgttatgtgaattc

SEQ ID NO: 187728 - DNA, 508 bp, Homo sapiens
ggcaaactgtatttattacaaagatggatgcaatactatcttcatatccaaagttattctataggtatgtcactcctccrttaagaattggcttgtatgtctccttcccttgaaagtgagtgggaagcgatttgtgactaccctaaccaataagtttggcaaaagtgttgctctgtgacttctaaggatgggatataaaaatgtcatgcacttcctccatgggatgttcctttttggaacccagacatcatgctgggaggaagtccaagaaacctgtggagagacccacaaagagtagagctgaggatcatgggcacagtcctggcatagcttcagccaatagtaccattttgcaagcatgtgagaatcattgtgaaagtggatcttccagccttagctgagctgttgcaactgatgccatatggatcagcaaagagctgtccccagctgaagtcctgacccaattaaagatgcatgagcaaaatcaatgcttaatattattttaagc

SEQ ID NO: 187729 - DNA, 377 bp, Homo sapiens
gagctgggctctcaaaatggcacattgggctgctgcttaggactcaggaaactgtgggaccagtgcaggctccttccctgaggcagtgcggtcatgtagtctccagacagctctctatgtcttgtctgtttcagggccctcaagggtctaggtgctstcctgtggctaggattgcagaggtctatggtgggaatgtagatcactaggggtctctcacttaccctttcccaatattgcagtctctctgggatcttagctgatcctggccaagcaggctgcctcattttcctttcttccttgcttaaggtatttcctggcacctttctattcaactccagtgttctctcttggctgatctatttgaactgtaattatct

SEQ ID NO: 187730 - DNA, 421 bp, Homo sapiens
ttttactttgtgaaaattaatcaagttgcacaaatacacgatgccagcacttttcagtaggtgttttatactttttaaaaatttacttggaaaacttttgtcttaaaaggtttactattattgtggtaagcagartaatagtagcccaaagatatctacatcctatttgttagaacctacgaatactttaccttatactgcaaaaaggattttgtagatgtgattaattaaggattttgaccataaggagattatcctaaattatccacagaggcccaatataattacaagggtcttactgagcaaaacaaggcaggagagtcagagtcagagaaggagacaagatgatggaaaaagagagaaaaagaaagagatctcaagatgctatgttgctgggtttgaagatagaggaaggggactt

SEQ ID NO: 187731 - DNA, 621 bp, Homo sapiens
aaagctttaaattttgtgcccagaacagcaagcaacctttggatatttcratattagctgaaatggaaaagatcactggctcccctgagatcattacagtaacttttgcaagaaagtggaataagggaagaagcaacatccctactgctgattcgtcttccaaccagactcaataggaagaatcactggcccaatgactggggaatagtctgcttaatgttattttcactcaatgtttgcctttgatttcctcttccatgagtatttaattgcctattttatattttcattatacaatccaagtttaaacaaacaatctattttctatcactggaagtaataacaatgaattgcccccaagagtttttttctttaaaaggtcatttcagttttataaaaactcagaaaaaaaaaaaaaggctgcaataaacactctacatagtgccctctaacgcccccaaacatgtttttaaaatactgatccatgttactattttatgacaaagttttttttgaaagagtgtgggactgtaggaagaatcggtatttttcaaggatgccagaaattcagagattgggtatggtctttttttttttttttttagagtagccttttttaat

SEQ ID NO: 187732 - DNA, 482 bp, Homo sapiens
ggtaactcttaagtagaatttttccagagaatcagcacaatataggtactgcattcaaaggcacttgttattaaaaataaacaattgaaaataatttgcaatgaaagttcaaaactacttggcagaatgaacgtgagtattctttaaaaagctaaggcttctcaaaggctgaagcttggcttgctgttatgcattttataaaactatgacataattttttaaagtttcccaagcaagcactgtacagttcagttttaaaaagtatattttttcgcttggaatgtttcagaattccatctacagaaattttactctaagcatagataaggaaaaaatgaarccattttggcaatcaagaagaactttagagatttctagactaaccacaaatgaaataatgccctctgacctcaaagtctcagtgaggggataaatatgagtactaggttttaaaaagtttagtgagtggatggtaatctctg

SEQ ID NO: 187733 - DNA, 564 bp, Homo sapiens
tcttggaaaattaataaaggaattgaagtttccttgaagaaaagagaaaaagaaaatggattttcagaaggatggaaggaaggaaggaaggaaggaaggaaggaaggaaggaaggagaaggggaggggaggggaggggagactgggttcagtggctcatgcctgtaaggctgaggcgggtggatcacctgaggtcagaagtttgagaccagcctgactaacatggtgaaamcccgtctctactaaaaatacaaaattagccaagcgtggtggtgcatgcctgtaatcccagctactcaggaggctgaggcaggagaattacttgaaccagggaggcggaggctgcagtgaaccaagatcatgccactgcactccagcctgggcaacaagagtgaaactccatctcaaaaaaaaaaaaagggagaaagaaaaaattcaagaaaacttcttaccactgaagagcttgagtttccagaaatgaaaagacccatggagtaccaagcacaatggataaaaataaatagacctacatctctataaaagaagatcaatatgaaatttcaga

SEQ ID NO: 187734 - DNA, 581 bp, Homo sapiens
atctctctgtccaagatgcctccctactccagaatttgacaaacttgtgtaagaaactattatgtaactagggtgctattttctcaataaaaataactatcatttacttgtaccagacaatgttgtaagtatgttatgtataataacttcaacaggtaaattactattataccctcattccgtaaatgaggaaaccaaagcaaagacatgttcaaaatgtgtctggatgttcccagctaataagtggcagagctgagaatcaaatccaggtggtctgttttgagtctgctcttatatctgtgcttaatgctctttgaaatagtgttcatctagagtttgggcacagtttatcaaatagtgtcagttcttccatcgactcttaactagctttgcaaataaaattaaagccattgcctctgccttttccagctgtagagcactaggaaagtagatgctggatcatcaaccattgcacccatgaaatactttcccatacctatttytttcctagctttcttaacgccaaaccctgacatttcccccatgtgtatgtatggccctaccctaaatgattgagtaat

SEQ ID NO: 187735 - DNA, 519 bp, Homo sapiens
tttgagctggactttgacagggggtagagtgttaagaagtggagatagagaagaaggccactggagcaaaagcaccaaagtgggacagtacaggtgtggccagatgacagcctggtttgctggggcaggggagaggcagtgaggagtaytgggccagagcgatgagaacctggcatgccagaaagggagcttatactgtatcttttgggcagtgggaatcagtgagaatttttgagtaaggaaatagtaaaatcataagtcttagtaagattaatttagcaacactataaagataaatcagagatataagggattgttggatctattatactatgatgaggccttccttgatcagcctatttaaaatttccactctcccacatggtcccgagctctcttattctgctatatgtgcatattctccttccattgcacttataggcttctaacatgcgggatactcatttgtattgtgttttgttgatgtctctctccctgattctaatttaaccatgagaa

SEQ ID NO: 187736 - DNA, 504 bp, Homo sapiens
aaaactttgtgggggagaaatatttgagctggactttgacagggggtagagtgttaagaagtggagatagagaagaaggccactggagcaaaagcaccaaagtgggacagtacaggtgtggccagatgacagcctggtttgctggggcaggggagaggcagtgaggagtactgggccagagcgatgagaacctggcatgccagaaagggagcttatactktatcttttgggcagtgggaatcagtgagaatttttgagtaaggaaatagtaaaatcataagtcttagtaagattaatttagcaacactataaagataaatcagagatataagggattgttggatctattatactatgatgaggccttccttgatcagcctatttaaaatttccactctcccacatggtcccgagctctcttattctgctatatgtgcatattctccttccattgcacttataggcttctaacatgcgggatactcatttgtattgtgttttgtt

SEQ ID NO: 187737 - DNA, 504 bp, Homo sapiens
aaaactttgtgggggagaaatatttgagctggactttgacagggggtagagtgttaagaagtggagatagagaagaaggccactggagcaaaagcaccaaagtgggacagtacaggtgtggccagatgacagcctggtttgctggggcaggggagaggcagtgaggagtactgggccagagcgatgagaacctggcatgccagaaagggagcttatactgtatcttttgggcagtgggaatcagtgagaatttttgagtaaggaaatagtaaaatcataagtcttagtaagattaatttagcaacactataaagataaatcagagatataagggattgttggatctattatactatgatgaggccttccttgrtcagcctatttaaaatttccactctcccacatggtcccgagctctcttattctgctatatgtgcatattctccttccattgcacttataggcttctaacatgcgggatactcatttgtattgtgttttgtt

SEQ ID NO: 187738 - DNA, 519 bp, Homo sapiens
tttgagctggactttgacagggggtagagtgttaagaagtggagatagagaagaaggccactggagcaaaagcaccaaagtgggacagtacaggtgtggccagatgacagcctggtttgctggggcaggggagaggcagtgaggagtactgggccagagcgatgagaacctggcatgccagaaagggagcttatactgtatcttttgggcagtgggaatcagtgagaatttttgagtaaggaaatagtaaaatcataagtcttagtaagattaatttagcaacactataaagataaatcagagatataagggattgttggatctattatactatgatgaggccttccttgatcagcctatttaaaatttccactctcccacatggtcccgagctctyttattctgctatatgtgcatattctccttccattgcacttataggcttctaacatgcgggatactcatttgtattgtgttttgttgatgtctctctccctgattctaatttaaccatgagaa

SEQ ID NO: 187739 - DNA, 519 bp, Homo sapiens
tttgagctggactttgacagggggtagagtgttaagaagtggagatagagaagaaggccactggagcaaaagcaccaaagtgggacagtacaggtgtggccagatgacagcctggtttgctggggcaggggagaggcagtgaggagtactgggccagagcgatgagaacctggcatgccagaaagggagcttatactgtatcttttgggcagtgggaatcagtgagaatttttgagtaaggaaatagtaaaatcataagtcttagtaagattaatttagcaacactataaagataaatcagagatataagggattgttggatctattatactatgatgaggccttccttgatcagcctatttaaaatttccactctcccacatggtcccgagctctcttattctgctatatgtgcatattctccttccattgcacttataggcttctaacatgcgggawactcatttgtattgtgttttgttgatgtctctctccctgattctaatttaaccatgagaa

SEQ ID NO: 187740 - DNA, 578 bp, Homo sapiens
tcttacataatctcaaatatagtatttgtgccataatcactattcacatatttgccccacccctcagacgataagattctygatggcagggagtatgcctgtttgctttgcatcctctctgctggacgtactacttgtccttctagtaggtacccaataaaagtttgctgtagtgatgaatgcatgcatgcaaaatgtttctagtgctgcctgggttaatgagatattttgttcgccttatggtttcatatcccttctctttaaaacaaacttttcacacctagtaaactttcttcgtgaggcttttggttttaggatgctccctaatacaagtgttcttttctccaccttctgcctcaattgcaaaaccatcataaactcccctttattacatgggctgaacttgaacacttgaattccagagttgcccggaaaacccctgtaaagtgattctgctattttttgtttcatggctgttagatttagcttcactgtagattgcctgtaaactttacagggtttaatttttaagccagcactctgacttctcacttgcttttctcttgtgttataagaaa

SEQ ID NO: 187741 - DNA, 578 bp, Homo sapiens
tcttacataatctcaaatatagtatttgtgccataatcactattcacatatttgccccacccctcagacgataagattctcgatggcagggagtatgcctgtttgctttgcatcctctctgctggacgtactacttgtccttctagtaggtacccaataaaagtttgctgtagtgatgaatgcatgcatgcaaaatgtttctagtgctgcctgggttaatgagatattttgttcgccttatggtttcatatcccttctctttaaaacaaayttttcacacctagtaaactttcttcgtgaggcttttggttttaggatgctccctaatacaagtgttcttttctccaccttctgcctcaattgcaaaaccatcataaactcccctttattacatgggctgaacttgaacacttgaattccagagttgcccggaaaacccctgtaaagtgattctgctattttttgtttcatggctgttagatttagcttcactgtagattgcctgtaaactttacagggtttaatttttaagccagcactctgacttctcacttgcttttctcttgtgttataagaaa

SEQ ID NO: 187742 - DNA, 395 bp, Homo sapiens
tttggaggaaaaccaacctggaaacaagctttgttttgccatttaasaagatcagttaaactggtcaaagtgcttaacctttctaaccctcagttttcttatctgtaaaatgggaatctttcttacggaacttttatggggattaagtgagacattaggtataaaacaccaaacacaatgagtacacaatagttgctcaataactattagctccctctccatatttctttttcttttttctttttttttccgttcctatctgaaaaaacaaaccccagacaaaccatcctaaccctttccctgaggttttccttttctgtcactagcatactgacctgcagggataggactcttctttagggctccggccctaaaataatccttttctttcagct

SEQ ID NO: 187743 - DNA, 395 bp, Homo sapiens
tttggaggaaaaccaacctggaaacaagctttgttttgccatttaacaagatcagttaaactggtcaaagtgcttaacctttctaaccctcagttttcttatctgtaaaatgggaatctttcttacggaacttttatggggattaagtgagacattaggtataaaacaccaaacacaatgagtacacaatagttgctcaataactattagctccctctccatatttctttttcttttttctttttttttccgttcctatctgaaaaaacaaaccccagacaaaccatcctaaccctttccctgaggttttccttttctgtcactagcatactgacctgcagggataggactcttctttagggctcyggccctaaaataatccttttctttcagct

SEQ ID NO: 187744 - DNA, 614 bp, Homo sapiens
ttttaatttcttttcctttctcagtttatgctttttaatttgtttccttgtccctcactcttctcccctggtatgcacgcacccaggcccatgataatgaatggacttatactaattataaggttgtgattccatcaaagggcttggatgctgctgctgtttcctggatgcaatgctccaggggtttgtaactcatyagtgtcatgatggaaatttggcctggcaatcacgatctaattgttctggatgctgtacacatgttactctagagaaaaacaacttcagaatcgcttgctctcttttcgttatcactgttgatgtgtctcctaggtctgagattactatctacaggtaagtttgaaaaatgtcttaacagcctagaatgaaagtaacttacatgcaggatgttcttgagaaggaagtactttgtgccaaggaattatctttcattaaccctaattgactatttcacaagatttctgggaactgaatcagttaccacaacaagaaagtacagacgtgaagagtttaggacttggaaactatgcaactgtacctataggcagggacgtgggtatcatcatttaatgagcgtcttagttatataaccacta

SEQ ID NO: 187745 - DNA, 482 bp, Homo sapiens
tcgcttgctctcttttcgttatcactgttgatgtgtctcctaggtctgagattactatctacaggtaagtttgaaaaatgtcttaacagcctagaatgaaagtaacttacatgcaggatgttcttgagaaggaagtactttgtgccaaggaattatctttcattaaccctaattgactatttcacaagatttctgggaactgaatcagttaccacaacaagaaagtacagacgtgaagagtttaggacttggaaactatgcaactgtacctataggcagggacgtgggtatcatcatttaatgagcgtcttagttatataaccactacttcatccttacaacaacaaccctgcagctargtagtattagcgttgttttataagtgagagaaatgaagcccagaaagattaaatggcttgctgaagaccacacatctaggtggtgggattcaggctcagatctgggcgactccaaagccattg

SEQ ID NO: 187746 - DNA, 570 bp, Homo sapiens
ttctcttctttaagaaaaaggcaatatctgggggaagaagggaatgaatgaattctatcccttttttgccttttgcatgtatggttgatttttttttcatcaaatgtgtgagggctaatgccacccaaattaagtaagcaagaaacttggggaggcttagaagtactcagtaagtgggggtcatatatatatttttaacttattcaagcagcctcatggaggtacagtgttgacaggctttcrttaagcattctgtcagttggtcatgactactactcccaaggcaattccaaaacataacattctggataaataattaaataaagataaatgcctactgggccttggagccactccaatgcagcacacattgaagaacaacaacagattctcaaactccagagaggcttgaagttctgaaaggttaactaaatccctgaagcgtagagcaaagctttgctagtcatggtctagaaaagcattcccccatggcgtgagctcaccaaacactgtcggctaaactaacagcctccttgccaccacactcgcaggccaagggttcactgaaga

SEQ ID NO: 187747 - DNA, 567 bp, Homo sapiens
gggcttcttactgaaacataaatcactaatatgttttcagcggcaaagtactctckttttccattgtattcacagatttagtggcatttcaaatagataaacacaagcaacatctatcaacactacaaaaagggcgccttaatcaaagctccgggtcccgggtctcagcatctccatttaccttgagataaatccattggtgtgaccaccactgcaccgggtgacaaatcaccccagccggccgagcagcgcaagggcttattggccttcctttaagtggtcttacccttcaatgaaaaggatggggcttgtcaagcaggaccagattaaagttagacaaaaagaaatgatctgttattagaaaactccgattgagaatcacaaaacaggaaagaaatatgaataaaaatttccagggggaagaccatctgatcccaacagaaattaactcccattatgagcacaaggtaatagatggcctgcagttggaactaatgaggattttagattaaggaggtgtggggctcggctgggggtgttagcagctgctctgggtattcaagtgaa

SEQ ID NO: 187748 - DNA, 567 bp, Homo sapiens
gggcttcttactgaaacataaatcactaatatgttttcagcggcaaagtactctctttttccattgtattcacagatttagtggcatttcaaatagataaacacaagcaacatctatcaacactacaaaaagggcgccttaatcaaagctccgggtcccgggtctcagcatctccatttaccttgagataaatccattggtgtgaccaccactgcaccgggtgacaaatcaccccagccggccgagcagcgcaagggcttattgkccttcctttaagtggtcttacccttcaatgaaaaggatggggcttgtcaagcaggaccagattaaagttagacaaaaagaaatgatctgttattagaaaactccgattgagaatcacaaaacaggaaagaaatatgaataaaaatttccagggggaagaccatctgatcccaacagaaattaactcccattatgagcacaaggtaatagatggcctgcagttggaactaatgaggattttagattaaggaggtgtggggctcggctgggggtgttagcagctgctctgggtattcaagtgaa

SEQ ID NO: 187749 - DNA, 587 bp, Homo sapiens
gtgttagttagcaggcactgtcctggtattcaggaggggaggccaggtgagatgcaaccccatgagaaggaggccagagttgacgacttgacttagttcttcttgtgctcttactcacttggtcttcaccataaccctgtgtggtcattrgtgtaggtattactattctcatttttcatggagaacttaagtcctagagagattattgacttttccaaggccatacagctggtatgtggccgggttggaattcacatcctgttttcttactccagatctggtctcctcccatgacaacctggctgcttttaaaaggcacattaacttggtatttaaaataggcaacctgggtttaaatccaagcagtactctggcagtggtattaaatccaactgatcctcagatttcccattcataaaaatatggataacagattgatgtgaagattagatgaacaaaaggaaaacacagttcaatattactttagtcacatctactagatcctgagctttccgcagataattattaatgcaaaaggatttgttaagcacccactatgtgccaggcaccagaagcacaaagataac

SEQ ID NO: 187750 - DNA, 587 bp, Homo sapiens
gtgttagttagcaggcactgtcctggtattcaggaggggaggccaggtgagatgcaaccccatgagaaggaggccagagttgacgacttgacttagttcttcttgtgctcttactcacttggtcttcaccataaccctgtgtggtcattggtgtaggtattactattctcatttttcatggagaacttaagtcctagagagattattgacttttccaaggccatacagctggtatgtggccgggttggaattcacatcctgttttcttactccagatctggtctcctcccatgacaacctggctgcttytaaaaggcacattaacttggtatttaaaataggcaacctgggtttaaatccaagcagtactctggcagtggtattaaatccaactgatcctcagatttcccattcataaaaatatggataacagattgatgtgaagattagatgaacaaaaggaaaacacagttcaatattactttagtcacatctactagatcctgagctttccgcagataattattaatgcaaaaggatttgttaagcacccactatgtgccaggcaccagaagcacaaagataac

SEQ ID NO: 187751 - DNA, 649 bp, Homo sapiens
tttggagtcggaagacctatatcttcgatatcgtttctgctgcttactagcttagtaagtttgaacaaatttctgagcctcagctttcctatctgttatgtgaggataatcatactgacctttcatgattattgagaggaatagtatttgcaaaagtgctttgagaattgctatataatgcttttattattgtgtaaatatcccccaaacatttgctattagtgatatcaaatccaagtttattgggagtacctaaagaattactttaattccctgctttgctttggcggtgaaacttggctgaaggttggcagtgataggatgaacgtgattgttattatcatcagttgcttttttcttccctggaatccactcaagctaatcacagaagcagttgctttaaagggtttgctaaataaaaggagaagcactcactaatcaaacgtaaagaaccagtaacaagtttgagtcctggtatctagtggtaagtaataagttgtaagttggttttggctttaaataacattgggctacmgcatttctgtgtctttttgcctttctgatttggggttaagccaactaatatttgtcagccagcctccatgttctagactagggactgctcacgtgattaagccatgatccctat

SEQ ID NO: 187752 - DNA, 366 bp, Homo sapiens
tccccaagcagatctaacataaatagcttctaacacactgagcaactactctgtgcctaattctgatctaagcagcttatctcattcaaactcacaaccatcttatgataagcaatattcttagcccttctcagttggggaaactgagacttcagggagcttcagmggctggcatgaagtcacactattaagaattgttggtgttggacttttgaagccaggcaattcaattctaggactagcaccctttacagctgtgctatactgtctctaagtctgtgaaactggttcccttggaacctgctcttatcacttctacccatatgcaaatgaccaccaaccctacgttgagatcagggcagtttt

SEQ ID NO: 187753 - DNA, 552 bp, Homo sapiens
ccttggggacatttggcaaaatgtctcctcaggagacagttttgattgccacggagaagggggatgctgctgttacctggtgtgtagaggccaggggtttctgcctaacatcctacaatgcacaggacagccccccaagcagataagtacccagtccaaaatgtcaatagtgctgaggttgagaaacccagagttaatgtattgttggctgtaacattacatgtatatttaacatatatgtaatgctacattatgcatatgttgaatatataaatgctaaaactcagtaatttactgcagtgggtgcttgtgtttttgcttatgtaaagtcaaaacgtatgtccttgatcaatagtttcctgcaagcagggatttagagacccaggctccttttaccttgtggctctgcaatctgaatacatggtttccaaatgtgctgggraaaaagcctatgaagaattgcacttgggagatttgtatgagctaagtttacacccatattcatttgctgaactcagtgacatggctgtatttagctacaggagacctgga

SEQ ID NO: 187754 - DNA, 523 bp, Homo sapiens
agtatagtgcagatatcagataaaccttggtccaaatgttcagtccaatgcttattaagtgggtggtgctgggcaagtcacttgatctctctgagcctcaatttcttcatctgtaaaatgaggataaaatgcccatctttcagaacagctgaggatgaaataagatacatgcataaggtaattcacacatgatgtgcttggtatatacaagtgcccaagaaatgttaattccttttttcccttctttattcactatggtggacatttgtgggttttcagcctcayagcattctccttttgaataaagcctcccccatagctattttgggtattacctctcactgtgtagagtgctgatgggaatgtaaatcaagattcccttttaccccttggtttgcccatgacctggactagggcagtcagtctgcttcttgtaggactctgaatcttgagcagagggttgtaagaacagaaaaaaaaaatggttgatgttcattcatttgagaggcagcctgctacagag

SEQ ID NO: 187755 - DNA, 608 bp, Homo sapiens
gtaaaaaccattcttacctcatgagctgtacaaacacagttgactggatttgccctcgggtcatagtttgtcaaccccagctctatatcaggttgccttccaagctcccaactctcataagtcctccccttgaccaggtggaatgaatggaactcgcagttaaatgggatcaaatctttcaactgtttctggagctgtgccatgcaggcaatgggtcacctcccagaaagccttccccacatatgggaacccgtgaattctcctcagtgcccagtatacacwgtgtcttttctttaaccagacctctgcaaaccaaataagttctggcttattgcaggattaaataaggtgcaaaataataaagttggtctgttccaagagggcaattatctaatctgttaatgaaagagcagtcacatatcatagcaaaatttcatctggaatattcattacaggcaaaattaagataagtgaaacttgctttatccccttattaagtcagacaaatgactacatatattttccagataagagactgtttagaagaaagaacctctatattttactaatgtagtttccattttcttttgaccaaggaaattcagaac

SEQ ID NO: 187756 - DNA, 473 bp, Homo sapiens
ttgtggtgatctggagtattattaagtgaggggttccacatagtccctctacagactgaagacactggggaaggakcatccgtgtgtgtgtgacagctgtgaaataatctgttctggaacaagaagctccaaaatatctcagcctgggatgactttgcgtgctttccatagagcatttggctacatatcaaagccgttatcagtgggctgttccctggctcagggcaggtgtctgcctcagccatgtacataatggacataaggagctcaactcttctgtctcctgctgcctgatcccagataaggaaaaggattatgaggaggtgccacatgatggtgaaatttgctttcttctcattgtaagttgaatctttagtaccttttttggtctgtgacatttgatttctcatggagcactcacagtgttgagtaacatgataagctcatagagtgggatgtgtttaacctcactg

SEQ ID NO: 187757 - DNA, 473 bp, Homo sapiens
ttgtggtgatctggagtattattaagtgaggggttccacatagtccctctacagactgaagacactggggaaggatcatccgtgtgtgtgtgacagctgtgaaataatctgttctggaacaagaagctccaaaatatcwcagcctgggatgactttgcgtgctttccatagagcatttggctacatatcaaagccgttatcagtgggctgttccctggctcagggcaggtgtctgcctcagccatgtacataatggacataaggagctcaactcttctgtctcctgctgcctgatcccagataaggaaaaggattatgaggaggtgccacatgatggtgaaatttgctttcttctcattgtaagttgaatctttagtaccttttttggtctgtgacatttgatttctcatggagcactcacagtgttgagtaacatgataagctcatagagtgggatgtgtttaacctcactg

SEQ ID NO: 187758 - DNA, 341 bp, Homo sapiens
cagcttataccagcttgtgcatatcctgctttccccaagattcccttgtgtgagttagaaaatttctcccaaattctcttgtacatggagtgtcaacagcttcaccataatatctactaattagaaaagatccatctcacctccgtrggtgaccacaaaatatgccaagagagcaagtatttgatgaatcaagaaaataaggtaagcttttatgaactgaatatttgtgtcccctcaaaattcaccagttgaagccctaactccatgtgcgcgtatatttggaggtatcgctaagaaactaacagtcaaatgaggccataaggttgagattctgatctgat

SEQ ID NO: 187759 - DNA, 526 bp, Homo sapiens
cttaccttattctaattttaacacaaaagtcccaagtccaagtcyaaagccacatctgatactcatatccttccactgataagtctctgaaatcaaaacaagttatctactttcacaacaatcaaaagacaaaatcccattgattagtcacagcaggaattaaaaacttagaaaaatatctattttgagaaataagtaccatgttgatatagccacatattcttcaacttagtccctaggatttcagattcttggaaatcatgtctcaactgtgtgcatcctagtatggcaccaatagcatctcaacctcccactttagaagtagctcaatcaattctaaacttttccatttagtttctgaaatattctaagtgatgtgtaggactatatatttgtccaaattactcaggaacatccatccactggtgggtaccactatgttttaatagacaccagtcctctcttccttccttcacatcatcaacattccagtgttgaatggccatgatggaaatatttgacattt

SEQ ID NO: 187760 - DNA, 526 bp, Homo sapiens
cttaccttattctaattttaacacaaaagtcccaagtccaagtccaaagccacatctgatactcatatccttccactgataagtctctgaaatcaaaacaagttatctactttcacaacaatcaaaagacaaaatcccattgattagtcacagcaggaattaaaaacttagaaaaatatctattttgagaaataagtaccatgttgatatagccacatattcttcaacttagtccctaggatttcagattcttggaaatcatgtctcaactgtgtgcatcctagtatggcaccaatagcatctcaacctcccactttagaagtagctcaatcaattctaaacttttycatttagtttctgaaatattctaagtgatgtgtaggactatatatttgtccaaattactcaggaacatccatccactggtgggtaccactatgttttaatagacaccagtcctctcttccttccttcacatcatcaacattccagtgttgaatggccatgatggaaatatttgacattt

SEQ ID NO: 187761 - DNA, 526 bp, Homo sapiens
cttaccttattctaattttaacacaaaagtcccaagtccaagtccaaagccacatctgatactcatatccttccactgataagtctctgaaatcaaaacaagttatctactttcacaacaatcaaaagacaaaatcccattgattagtcacagcaggaattaaaaacttagaaaaatatctattttgagaaataagtaccatgttgatatagccacatattcttcaacttagtccctaggatttcagattcttggaaatcatgtctcaactgtgtgcatcctagtatggcaccaatagcatctcaacctcccactttagaagtagctcaatcaattctaaacttttccatttagtttctgaaatattctaagtgatgtgtaggactatatatttgtccaaattactcaggaacatccatccactggtgggtaccactatgttttaatagacaccagtcctctcttccttccttcacrtcatcaacattccagtgttgaatggccatgatggaaatatttgacattt

SEQ ID NO: 187762 - DNA, 423 bp, Homo sapiens
ctgagggagagcttaagaaaatcctattccaatcctccctgccttgcctgcattgggaaataagacttaaagaggtaaataaccagacaagtaacccagatttgttgcaacacttcttgaatatatcttgaggtttagmagtttaaagtctacatttaagaggataatatgtggtaatatccaaaaattgaacttttcaactttcctaacttcttatttttctctttcaccacctatcttcccaccacatattgatggtggaaagagccttccgcacaagctgtcatcatgaggagctggatgagggcaattagtgaaaatcttggatttcagcctcagaatggacttttgtaaattggtgagagatagaaaatatgaatgctaaaattattttattcacttcaattgtgtcttgctgacaga

SEQ ID NO: 187763 - DNA, 423 bp, Homo sapiens
ctgagggagagcttaagaaaatcctattccaatcctccctgccttgcctgcattgggaaataagacttaaagaggtaaataaccagacaagtaacccagatttgttgcaacacttcttgaatatatcttgaggtttagaagtttaaagtctacatttargaggataatatgtggtaatatccaaaaattgaacttttcaactttcctaacttcttatttttctctttcaccacctatcttcccaccacatattgatggtggaaagagccttccgcacaagctgtcatcatgaggagctggatgagggcaattagtgaaaatcttggatttcagcctcagaatggacttttgtaaattggtgagagatagaaaatatgaatgctaaaattattttattcacttcaattgtgtcttgctgacaga

SEQ ID NO: 187764 - DNA, 423 bp, Homo sapiens
ctgagggagagcttaagaaaatcctattccaatcctccctgccttgcctgcattgggaaataagacttaaagaggtaaataaccagacaagtaacccagatttgttgcaacacttcttgaatatatcttgaggtttagaagtttaaagtctacatttaagaggataatatgtggtaatatccmaaaattgaacttttcaactttcctaacttcttatttttctctttcaccacctatcttcccaccacatattgatggtggaaagagccttccgcacaagctgtcatcatgaggagctggatgagggcaattagtgaaaatcttggatttcagcctcagaatggacttttgtaaattggtgagagatagaaaatatgaatgctaaaattattttattcacttcaattgtgtcttgctgacaga

SEQ ID NO: 187765 - DNA, 561 bp, Homo sapiens
tgacagaaaaggatagtttttgaaatttcagaagttgagtttcataaacagaaacttaaactataagacataggttatagaatttacctcatagaacactgaaataacacagaatgatrtgcgatttctttccccaaaatgtaagagtttgaagacagtgggcagacttcaagaatgggagaattaatggaagatagtggaggtcaactatggcccaataacctgctctttgacttacattaggtacagttgtggatgacagtgactgttgggggttggtgatataaactcagaaaggagcccaaatgtctttcttatgaagaatcacagaggagaaagtatcactccctggctccatgggttgagcctgcaccactgcaagtttcaaggaaaagtagttcatcaagaatgatcttttagttctgcaatcatcaaatgtttattgaagttcctgtgcaaatagacctgaggttctgtgactcagtcacagtcaaactaaaataacccagcagatgccatatggttgggtttgagaacacaaatcatgcagtggcatgctaa

SEQ ID NO: 187766 - DNA, 518 bp, Homo sapiens
agaatttacctcatagaacactgaaataacacagaatgatatgcgatttctttccccaaaatgtaagagtttgaagacagtgggcagacttcaagaatgggagaattaatggaagatagtggaggtcaactatggcccaataacctgctctttgacttacattaggtacagttgtggatgacagtgactgttgggggttggtgatataaactcagaaaggagcccaaatgtctttcttatgaagaatcacagaggagaaagtatcactccctggctccatgggttgagcctgcaccactgcaagtttcaaggaaaagtagttcatcaagaatgatcttttagttctgcaatcatcaaatgtttattgaagttcctgtgcaaatagacctgaggttctgtgactyagtcacagtcaaactaaaataacccagcagatgccatatggttgggtttgagaacacaaatcatgcagtggcatgctaacctgaagtcccaatagagtctacatcaactgggga

SEQ ID NO: 187767 - DNA, 518 bp, Homo sapiens
agaatttacctcatagaacactgaaataacacagaatgatatgcgatttctttccccaaaatgtaagagtttgaagacagtgggcagacttcaagaatgggagaattaatggaagatagtggaggtcaactatggcccaataacctgctctttgacttacattaggtacagttgtggatgacagtgactgttgggggttggtgatataaactcagaaaggagcccaaatgtctttcttatgaagaatcacagaggagaaagtatcactccctggctccatgggttgagcctgcaccactgcaagtttcaaggaaaagtagttcatcaagaatgatcttttagttctgcaatcatcaaatgtttattgaagttcctgtgcaaatagacctgaggttctgtgactcagtcacagtcaaactaaaayaacccagcagatgccatatggttgggtttgagaacacaaatcatgcagtggcatgctaacctgaagtcccaatagagtctacatcaactgggga

SEQ ID NO: 187768 - DNA, 518 bp, Homo sapiens
agaatttacctcatagaacactgaaataacacagaatgatatgcgatttctttccccaaaatgtaagagtttgaagacagtgggcagacttcaagaatgggagaattaatggaagatagtggaggtcaactatggcccaataacctgctctttgacttacattaggtacagttgtggatgacagtgactgttgggggttggtgatataaactcagaaaggagcccaaatgtctttcttatgaagaatcacagaggagaaagtatcactccctggctccatgggttgagcctgcaccactgcaagtttcaaggaaaagtagttcatcaagaatgatcttttagttctgcaatcatcaaatgtttattgaagttcctgtgcaaatagacctgaggttctgtgactcagtcacagtcaaactaaaataacccagcagatgccatrtggttgggtttgagaacacaaatcatgcagtggcatgctaacctgaagtcccaatagagtctacatcaactgggga

SEQ ID NO: 187769 - DNA, 548 bp, Homo sapiens
ctttctccctttgctgagtgactctcactctcaccaaccatcaggagaatggaaarctgcctgcaatgcatgatgttggctgttgagcaaatcaaagctcacaggagtctcaaacatgtacaccacataataatattttctgataatactatttggacttttcttcctttcaattctggaagtaattgagaatattttttgaactcttagaaacacttagtatatatgtgtagtaggtagtaactagttttgtctactggtttattttgtttgcttgtttcaggccatgatgcggcatgttaaaatactgaagacaaagatacattttagaattaagcatactgtacattggctctttccacaccactgcaaccaccaggggatgtgcatattgtcccttaggaatgaccttcccttgtgagtctgggagtaaagctcagctgtaaccttgccttaactgatcaggactcctcagttcaccttctcacagtgaggttccctgctcagctcctggggctgctaatgctttgggttcctggtaaggacag

SEQ ID NO: 187770 - DNA, 548 bp, Homo sapiens
ctttctccctttgctgagtgactctcactctcaccaaccatcaggagaatggaaagctgcctgcaatgcatgatgttggctgttgagsaaatcaaagctcacaggagtctcaaacatgtacaccacataataatattttctgataatactatttggacttttcttcctttcaattctggaagtaattgagaatattttttgaactcttagaaacacttagtatatatgtgtagtaggtagtaactagttttgtctactggtttattttgtttgcttgtttcaggccatgatgcggcatgttaaaatactgaagacaaagatacattttagaattaagcatactgtacattggctctttccacaccactgcaaccaccaggggatgtgcatattgtcccttaggaatgaccttcccttgtgagtctgggagtaaagctcagctgtaaccttgccttaactgatcaggactcctcagttcaccttctcacagtgaggttccctgctcagctcctggggctgctaatgctttgggttcctggtaaggacag

SEQ ID NO: 187771 - DNA, 548 bp, Homo sapiens
ctttctccctttgctgagtgactctcactctcaccaaccatcaggagaatggaaagctgcctgcaatgcatgatgttggctgttgagcaaatcaaagctcacaggagtctcaaacatgtacaccacataataatattttctgataatactatttggacttttcttcctttcaattctggaagtaattgagaatattttttgaactcttagaaacacttagtatatatgtgtagtaggtagtaactagttttgtctactggtttattttgtttgcttgtttcaggccatgatgcggcatgttaaaatactgaagacaaagatacattttagaattaagcatactgtacattggctctttccacaccactgcaaccaccaggggatgtgcatattgtcccttaggaatgamcttcccttgtgagtctgggagtaaagctcagctgtaaccttgccttaactgatcaggactcctcagttcaccttctcacagtgaggttccctgctcagctcctggggctgctaatgctttgggttcctggtaaggacag

SEQ ID NO: 187772 - DNA, 548 bp, Homo sapiens
ctttctccctttgctgagtgactctcactctcaccaaccatcaggagaatggaaagctgcctgcaatgcatgatgttggctgttgagcaaatcaaagctcacaggagtctcaaacatgtacaccacataataatattttctgataatactatttggacttttcttcctttcaattctggaagtaattgagaatattttttgaactcttagaaacacttagtatatatgtgtagtaggtagtaactagttttgtctactggtttattttgtttgcttgtttcaggccatgatgcggcatgttaaaatactgaagacaaagatacattttagaattaagcatactgtacattggctctttccacaccactgcaaccaccaggggatgtgcatattgtcccttaggaatgaccttcccttgtgagtctgggagwaaagctcagctgtaaccttgccttaactgatcaggactcctcagttcaccttctcacagtgaggttccctgctcagctcctggggctgctaatgctttgggttcctggtaaggacag

SEQ ID NO: 187773 - DNA, 542 bp, Homo sapiens
tacatttgtcaaccagatgtattcagcctaccagtcacacaactgaggctgatacatgacaacatagcactggtatattcttggtattgtttggcttagcagttactagtatatatttaatgggagaatatttggtggtgttaacacattgcttatctcccttwccccagttgtactttacacttgttcttggcacacattctcctccaggactggagcattcacagggttttatgttactgttcttatgggagtaaaaagaaaaacgattcacattcttgctactgagctaggctgggatgccctgggccaagctgaaaatgtgaaaaataagagtatgaatatttattaagttttatctggatctaagatacttatccatgaaccagtcctgcagctgtgcccagcctgctccattccctgctgatttgcatgttcccagagcacaaccccctgttctgaagacttcttaataggctggtcacaccctgtgcaggagtcagtctcagtcaggacacagcatggacatgagggtccccact

SEQ ID NO: 187774 - DNA, 542 bp, Homo sapiens
tacatttgtcaaccagatgtattcagcctaccagtcacacaactgaggctgatacatgacaacatagcactggtatattcttggtattgtttggcttagcagttactagtatatatttaatgggagaatatttggtggtgttaacacattgcttatctccctttccccagttgtactttacacttgttctyggcacacattctcctccaggactggagcattcacagggttttatgttactgttcttatgggagtaaaaagaaaaacgattcacattcttgctactgagctaggctgggatgccctgggccaagctgaaaatgtgaaaaataagagtatgaatatttattaagttttatctggatctaagatacttatccatgaaccagtcctgcagctgtgcccagcctgctccattccctgctgatttgcatgttcccagagcacaaccccctgttctgaagacttcttaataggctggtcacaccctgtgcaggagtcagtctcagtcaggacacagcatggacatgagggtccccact

SEQ ID NO: 187775 - DNA, 542 bp, Homo sapiens
tacatttgtcaaccagatgtattcagcctaccagtcacacaactgaggctgatacatgacaacatagcactggtatattcttggtattgtttggcttagcagttactagtatatatttaatgggagaatatttggtggtgttaacacattgcttatctccctttccccagttgtactttacacttgttcttggcacacattctcctccaggactggagcattcacagggttttatgttactgttcttatgggagtaaaaagaaaaacgattcacattcttgctactgagctaggctgggatgycctgggccaagctgaaaatgtgaaaaataagagtatgaatatttattaagttttatctggatctaagatacttatccatgaaccagtcctgcagctgtgcccagcctgctccattccctgctgatttgcatgttcccagagcacaaccccctgttctgaagacttcttaataggctggtcacaccctgtgcaggagtcagtctcagtcaggacacagcatggacatgagggtccccact

SEQ ID NO: 187776 - DNA, 577 bp, Homo sapiens
tttatcctatgaaaggttagaatgtcatattgctgtcctttcttacataatctttattctgtctttttaaccttttctcattttttctactacatctgccataactcaaaaaccaaatctcagktttttcccaggattggcatgcttctgtgctaaagatgttgttcattctcttactttctggatttctacgggacaaattatttcaaactcaggcctttctaatacctcagaggtatagggcataaaagagaaagaaaaagcatatgtacgagtgtgatttgacaaattgaaaagtcacttcacctttttgtgaagtcatctattctttcttgcaagggttttcaagttgtgcctatatttttaaacacgtatgacttcttcaaacacttttcttctctaagtcttttcctccaaaagccccagtcagattaactgtatccagtaaagtatggttggcccttctctgatatcctctctatatatacccaaaagtttccattctcttctaacatttttgtttcattaccatccaaagacaaaattctattaaattttcagataataacttaaaaat

SEQ ID NO: 187777 - DNA, 577 bp, Homo sapiens
tttatcctatgaaaggttagaatgtcatattgctgtcctttcttacataatctttattctgtctttttaaccttttctcattttttctactacatctgccataactcaaaaaccaaatctcagttttttcccaggattggcatgcttctgtgctaaagatgttgttcattctcttactttctggatttctacgggacaaattatttcaaactcaggcctttctaatacctcagaggtatagggcataaaagagaaagaaaaagcatatgtaygagtgtgatttgacaaattgaaaagtcacttcacctttttgtgaagtcatctattctttcttgcaagggttttcaagttgtgcctatatttttaaacacgtatgacttcttcaaacacttttcttctctaagtcttttcctccaaaagccccagtcagattaactgtatccagtaaagtatggttggcccttctctgatatcctctctatatatacccaaaagtttccattctcttctaacatttttgtttcattaccatccaaagacaaaattctattaaattttcagataataacttaaaaat

SEQ ID NO: 187778 - DNA, 577 bp, Homo sapiens
tttatcctatgaaaggttagaatgtcatattgctgtcctttcttacataatctttattctgtctttttaaccttttctcattttttctactacatctgccataactcaaaaaccaaatctcagttttttcccaggattggcatgcttctgtgctaaagatgttgttcattctcttactttctggatttctacgggacaaattatttcaaactcaggcctttctaatacctcagaggtatagggcataaaagagaaagaaaaagcatatgtacgagtgtgatttgacaaattgaaaagtcacttcacctttttgtgaagtcatctattctttcttgcaagggttttcaagttgtgcctatatttttaaacacgtatgacttcttcaaacacttttcttctctaartcttttcctccaaaagccccagtcagattaactgtatccagtaaagtatggttggcccttctctgatatcctctctatatatacccaaaagtttccattctcttctaacatttttgtttcattaccatccaaagacaaaattctattaaattttcagataataacttaaaaat

SEQ ID NO: 187779 - DNA, 577 bp, Homo sapiens
tttatcctatgaaaggttagaatgtcatattgctgtcctttcttacataatctttattctgtctttttaaccttttctcattttttctactacatctgccataactcaaaaaccaaatctcagttttttcccaggattggcatgcttctgtgctaaagatgttgttcattctcttactttctggatttctacgggacaaattatttcaaactcaggcctttctaatacctcagaggtatagggcataaaagagaaagaaaaagcatatgtacgagtgtgatttgacaaattgaaaagtcacttcacctttttgtgaagtcatctattctttcttgcaagggttttcaagttgtgcctatatttttaaacacgtatgacttcttcaaacacttttcttctctaagtcttttcctccaaaagccccagtcagattaactgtatccagtaaagtatggttgrcccttctctgatatcctctctatatatacccaaaagtttccattctcttctaacatttttgtttcattaccatccaaagacaaaattctattaaattttcagataataacttaaaaat

SEQ ID NO: 187780 - DNA, 575 bp, Homo sapiens
ctgcacagatttctggtgacttaaaagctgccgttatgaataacagggatcaaaggkggtgcagtgaaaagtaaaacagagggagataagaactggctacattttgtatacacttttcagaacacacacagatgaataggtttatgagtttcacacatttgggaaaaacgtttgcccagctcattgctatgatcttcttttccaggaccttagccagccagctattcagaaatctatatgtatacttgactccagacacttctctatctactaatttgatgaacatgtgctctgctcagatgtaagataactcaaggtagtatttgacagccatgcatgaccgttgccatagtgtggacacagtccacacttacttacacaaacatatgatgccaagccattcaagaggaagcccagcttgttctcatttttgctttgattttctttgtttttgcttattttcttttttttttctttttctttttttgtattctctctctggcattagctgatcaggaaaacccatgatatcatagagagagctgatgcagaggtgttaagttgagagagaaaag

SEQ ID NO: 187781 - DNA, 595 bp, Homo sapiens
gaatggggataactgcctactgttaaaaattaatcatttcatcctatggaagtccaatcatgcatatgctgccaatgatgccatgctggatggagttctcataactgggtgctgtattgatgtcataccactgccatggtaaaggataccctgggagactagcagtcacaagagtgggcaaacccgaagggtgaagtcaccgtacactttgcaaagagggattagcaattccatracattggctattggtttggagagatcaccaggcctcagaagaaacaaaactgaaggactcgagacaaagttggtttggaagagctatgactggatctttgaaaatacgtcaagatcaaaaataaatgcttcctaagtgaatattcatatctattccattactgaggaccagctcttagtaattaagaggatcgaatgcttggccttcagtcagtcaactttcccagattttttaggaagtgacatgaaccatagaaatccatgcaggagctcaacaatatgaatttcagttaatgaggcttgcatacctatggctcttctgagcattcaacttgccaagtagcattacccctcccaaacc

SEQ ID NO: 187782 - DNA, 610 bp, Homo sapiens
agcttttgggcagagagtgtggggttttctgaatatattatagtatcgcctkcaaagagagatagtttgacttattctcttcctatttggatgccttttatttttctctcttgcctgattgctctggctagaaattccagtactatgttgaataggagtggtgagagtgggtatccttgtcttgttctggttctcaacgaaaatgcctccagcatttgtcgattctgtgggatgctggctgtaattttgccataaatggctgttaatattttaagttgtgtagtttcattgtctagattttgagggtgtttagcatgaaggggcattgaattctatcaaaaggcttttctgcatctaatgagatgatcctgtagtttttgtatttagttctgtttatgaggtgaatctcatgtattgatttttacattttgaaccaaccatgcatcccgtgactaaagccagcttaattatggtggattagcttttgatgtgctacacaataatgtttgctagtatttttttcagaaagtttgtgtttatgttcatgagagatagcgatctgaagtttttatttattgtgcctctgtcagtttttactatcagggagatg

SEQ ID NO: 187783 - DNA, 533 bp, Homo sapiens
ttgtgcagctgcaaaagccttgacatggcaaaagcagtaggagaatggggaaggtcccatrgagctgatgctgattcatgatgcaactgaataaaagctcattcgaatcctcctttcttacatttctcaattgtagttaatcagcataagtgccaggcaattgatacaaatgttggcaacacatgctgagtgcctcctcatttgtatgtatttcatccatttttgtatattttaataggataattatttggtcatatttagaaattggtattttccaccttccaagctttctactttccttacttattgcttctcttcctatgtaataaagatactgtagacaacattttacactagttgtaaaatgtggctccccatttatacgggtagctggttgggggcaattagcaaaaatcttggtttttgagtgcctaaatagacttttgtaaattaatgtcagatacaagatccaaatgctaaaactctttgatttgccttgattacttcttactgatagatcataaaaggaattc

SEQ ID NO: 187784 - DNA, 542 bp, Homo sapiens
aggaactactcatttgtgcagctgcaaaagccttgacatggcaaaagcagtaggagaatggggaaggtcccatggagctgatgctgattcatgatgcaactgaataaaagctcattcgaatcctcctttcttacatttctcaattgtagttaatcagcataagtgccaggcaattgatacaaatgttggcaacacatgctgagtgcctcctcatttgtatgtatttcatccatttttrtatattttaataggataattatttggtcatatttagaaattggtattttccaccttccaagctttctactttccttacttattgcttctcttcctatgtaataaagatactgtagacaacattttacactagttgtaaaatgtggctccccatttatacgggtagctggttgggggcaattagcaaaaatcttggtttttgagtgcctaaatagacttttgtaaattaatgtcagatacaagatccaaatgctaaaactctttgatttgccttgattacttcttactgatagatcataaaagga

SEQ ID NO: 187785 - DNA, 542 bp, Homo sapiens
aggaactactcatttgtgcagctgcaaaagccttgacatggcaaaagcagtaggagaatggggaaggtcccatggagctgatgctgattcatgatgcaactgaataaaagctcattcgaatcctcctttcttacatttctcaattgtagttaatcagcataagtgccaggcaattgatacaaatgttggcaacacatgctgagtgcctcctcatttgtatgtatttcatccatttttgtatattttaataggataattatttggtcatatttagaaattggtattttccaccttccaagctttctaytttccttacttattgcttctcttcctatgtaataaagatactgtagacaacattttacactagttgtaaaatgtggctccccatttatacgggtagctggttgggggcaattagcaaaaatcttggtttttgagtgcctaaatagacttttgtaaattaatgtcagatacaagatccaaatgctaaaactctttgatttgccttgattacttcttactgatagatcataaaagga

SEQ ID NO: 187786 - DNA, 542 bp, Homo sapiens
aggaactactcatttgtgcagctgcaaaagccttgacatggcaaaagcagtaggagaatggggaaggtcccatggagctgatgctgattcatgatgcaactgaataaaagctcattcgaatcctcctttcttacatttctcaattgtagttaatcagcataagtgccaggcaattgatacaaatgttggcaacacatgctgagtgcctcctcatttgtatgtatttcatccatttttgtatattttaataggataattatttggtcatatttagaaattggtattttccaccttccaagctttctactttccttacttattscttctcttcctatgtaataaagatactgtagacaacattttacactagttgtaaaatgtggctccccatttatacgggtagctggttgggggcaattagcaaaaatcttggtttttgagtgcctaaatagacttttgtaaattaatgtcagatacaagatccaaatgctaaaactctttgatttgccttgattacttcttactgatagatcataaaagga

SEQ ID NO: 187787 - DNA, 542 bp, Homo sapiens
aggaactactcatttgtgcagctgcaaaagccttgacatggcaaaagcagtaggagaatggggaaggtcccatggagctgatgctgattcatgatgcaactgaataaaagctcattcgaatcctcctttcttacatttctcaattgtagttaatcagcataagtgccaggcaattgatacaaatgttggcaacacatgctgagtgcctcctcatttgtatgtatttcatccatttttgtatattttaataggataattatttggtcatatttagaaattggtattttccaccttccaagctttctactttccttacttattgcttmtcttcctatgtaataaagatactgtagacaacattttacactagttgtaaaatgtggctccccatttatacgggtagctggttgggggcaattagcaaaaatcttggtttttgagtgcctaaatagacttttgtaaattaatgtcagatacaagatccaaatgctaaaactctttgatttgccttgattacttcttactgatagatcataaaagga

SEQ ID NO: 187788 - DNA, 589 bp, Homo sapiens
cacatgctgagtgcctcctcatttgtatgtatttcatccatttttgtatattttaataggataattatttggtcatatttagaaattggtattttccaccttccaagctttctactttccttacttattgcttctcttcctatgtaataaagatactgtagacaacattttacactagttgtaaaatgtggctccccatttatacgggtagctggttgggggcaattagcaaaaatcttggtttttgagtgcctaaatagacttttgtaaattaatgtcagatacaagatccaaatgctaaaactstttgatttgccttgattacttcttactgatagatcataaaaggaattcttgaaattccaaaagttgggttttaaaaataaaagcatacactggaatatacagggcatagaattcaccctatatattgctagaagaatagagaatgataacagttttagacttcgagggtacttcaggaatgggaacacacaaggaacacagtagatatgagctactgtgtctaccgtattagacaatcctcctgcattttaacttacatttggtgaacttcagatgccagtgg

SEQ ID NO: 187789 - DNA, 411 bp, Homo sapiens
ctatagcagagatgatgtggtcaggtttgtggagatgaacatgcartgacgtgttaaccaaaaggcccagcagaaagggatagtgatcaatgtccatggttcagacatatacaaaggatgatttgcacagcactggaggaaaaaacatcctgagtgttggagatttctgccttcctacccaagctcccgcagcctgtctcctgactcagaactcagcaaatgccacatgaaaaatctggctatggttgcacagaaattgccctgtgcaaccttcaaagctcagttatgttctctcttcttgctgggtttctctgtctgtgccaaatcaaaatttctatccgaacgcacatttggtaaaaaaaaaaaaaaaaagggcagaaaaacaaaatgtcagatgaacaccaactcaac

SEQ ID NO: 187790 - DNA, 384 bp, Homo sapiens
tgatgtggtcaggtttgtggagatgaacatgcaatgacgtgttaaccaaaaggcccagcagaaagggatagtgatcaatgtccatggttsagacatatacaaaggatgatttgcacagcactggaggaaaaaacatcctgagtgttggagatttctgccttcctacccaagctcccgcagcctgtctcctgactcagaactcagcaaatgccacatgaaaaatctggctatggttgcacagaaattgccctgtgcaaccttcaaagctcagttatgttctctcttcttgctgggtttctctgtctgtgccaaatcaaaatttctatccgaacgcacatttggtaaaaaaaaaaaaaaaaagggcagaaaaacaaaatgtcagat

SEQ ID NO: 187791 - DNA, 411 bp, Homo sapiens
ctatagcagagatgatgtggtcaggtttgtggagatgaacatgcaatgacgtgttaaccaaaaggcccagcagaaagggatagtgatcaatgtccatggttcagacatatacaaaggatgatttgcacagcactggaggaaaaaacatcctgagtgttggagatttctgccttcctacccaarctcccgcagcctgtctcctgactcagaactcagcaaatgccacatgaaaaatctggctatggttgcacagaaattgccctgtgcaaccttcaaagctcagttatgttctctcttcttgctgggtttctctgtctgtgccaaatcaaaatttctatccgaacgcacatttggtaaaaaaaaaaaaaaaaagggcagaaaaacaaaatgtcagatgaacaccaactcaac

SEQ ID NO: 187792 - DNA, 402 bp, Homo sapiens
gatgtggtcaggtttgtggagatgaacatgcaatgacgtgttaaccaaaaggcccagcagaaagggatagtgatcaatgtccatggttcagacatatacaaaggatgatttgcacagcactggaggaaaaaacatcctgagtgttggagatttctgccttcctacccaagctcccrcagcctgtctcctgactcagaactcagcaaatgccacatgaaaaatctggctatggttgcacagaaattgccctgtgcaaccttcaaagctcagttatgttctctcttcttgctgggtttctctgtctgtgccaaatcaaaatttctatccgaacgcacatttggtaaaaaaaaaaaaaaaaagggcagaaaaacaaaatgtcagatgaacaccaactcaactaga

SEQ ID NO: 187793 - DNA, 390 bp, Homo sapiens
atgtggtcaggtttgtggagatgaacatgcaatgacgtgttaaccaaaaggcccagcagaaagggatagtgatcaatgtccatggttcagacatatacaaaggatgatttgcacagcactggaggaaaaaacatcctgagtgttggagatttctgccttcctacccaagctcccgcagcctgtctcctgactcagaactcagcaaatgccacatgaaaaatctggctatggttgcacagaaattgccctgtgcaaccttcaaagctcagttatgttctctcttcttgctgggtttctctgtctgtgccaaatcaaaatttctatcygaacgcacatttggtaaaaaaaaaaaaaaaaagggcagaaaaacaaaatgtcagatgaacacca

SEQ ID NO: 187794 - DNA, 583 bp, Homo sapiens
gagctttgcccttcatttcctctttgggcagttaccagaggacatgaagcttacagtcyctgcagccttcttgagaccatgagatgttgagcccaagacagaaaaaccaatgtggtcaagtttaccaagcagtaatgtagaaagaatctggggcctttctcctgtcaccaagctgctgtattaaccctgaatgtgccaaacttcagatctcttctcattgcttaagccattgttattctttcacttgtttctaaaattattgtcgcttatccttaaatgatactgaagaaaaagagcctcgttggccatagacctgccccttaggagaagaaatgcattatcatgcgtgtgtatgtgtgtgtttgtgggtgtcaaaggcagtaaaagcaagaaccagaataagtgatgtcctttcctgacatcttggctctgctgtatttatagctaaggaaacccaaaccactgcaaagagttcataatttctgctctcttcctgtctcagtttcatgttttatatcttaaggatgaacatctttttgttgtccctaattcctccctcctttatgatcatgaaattaaaata

SEQ ID NO: 187795 - DNA, 583 bp, Homo sapiens
gagctttgcccttcatttcctctttgggcagttaccagaggacatgaagcttacagtctctgcagccttcttgagaccatgagatgttgagcccaagacagaaaaaccaatgtggtcaagtttaccaagcagtaatgtagaaagaatctggggcctttctcctgtcaccaagctgctgtattaaccctgaatgtgccaaacttcagatctcttctcattgcttaagccattgttattctttcacttgtttctaaaattattgtcgcttatccttraatgatactgaagaaaaagagcctcgttggccatagacctgccccttaggagaagaaatgcattatcatgcgtgtgtatgtgtgtgtttgtgggtgtcaaaggcagtaaaagcaagaaccagaataagtgatgtcctttcctgacatcttggctctgctgtatttatagctaaggaaacccaaaccactgcaaagagttcataatttctgctctcttcctgtctcagtttcatgttttatatcttaaggatgaacatctttttgttgtccctaattcctccctcctttatgatcatgaaattaaaata

SEQ ID NO: 187796 - DNA, 583 bp, Homo sapiens
gagctttgcccttcatttcctctttgggcagttaccagaggacatgaagcttacagtctctgcagccttcttgagaccatgagatgttgagcccaagacagaaaaaccaatgtggtcaagtttaccaagcagtaatgtagaaagaatctggggcctttctcctgtcaccaagctgctgtattaaccctgaatgtgccaaacttcagatctcttctcattgcttaagccattgttattctttcacttgtttctaaaattattgtcgcttatccttaaatgatactgaagaaaaagagcctcgttggccatagacctgcccyttaggagaagaaatgcattatcatgcgtgtgtatgtgtgtgtttgtgggtgtcaaaggcagtaaaagcaagaaccagaataagtgatgtcctttcctgacatcttggctctgctgtatttatagctaaggaaacccaaaccactgcaaagagttcataatttctgctctcttcctgtctcagtttcatgttttatatcttaaggatgaacatctttttgttgtccctaattcctccctcctttatgatcatgaaattaaaata

SEQ ID NO: 187797 - DNA, 551 bp, Homo sapiens
cactaacacaaatgcagctcagagacaactcagactaaaagtgttatgatcaattgtcatcttgtttgtctttctaataccacacataaagagtaggtagaattgtttacagtggaagctatgcacatgaaaccccactgcccttagtgatgcacttgcttgttgtagaataaatattgaagaatttgaattgaaagtgatgtctggctagtaatatcttacatagcctttttattccagcatggtcaagggtacataaaaagaggactggatatatatatattagaaagataaacargatgacaattgatcatatatatatatatatatatatatatatatttacacacacacacacacatacttcaaggcccatcatctgattaagtcctcaggagaccccttgatatacacagtgttccatttcacagatgaagaaaccaatgatcagagctcatggatggtttatgcaaaatcacatgatcagcacatgtgggctggaatttgaacccaagtctgtgtggctttattatatttctttcatgcagcca

SEQ ID NO: 187798 - DNA, 490 bp, Homo sapiens
acttttgatatgtgttttctttcacttcagattgctttgaaatgtccatctcttggtttcatctttgtcccaggctttatttagtagtatgttacatagttttaaaatattgagatttttttctgatagctttctgtcattgattcctaataaatttcccttggcttctgaaactttattttatatgatttaaatccatttaatttctttgaaataacttgtggcccaaagcatgatctctcttagctaatgttttaaaatggctatggagtctgctgttgtggcagagtgttctctcagtgtcaatcctacccacatggttgatggctttggcaagtcatctgtatctgcatgggcccaagagacactgttgcctacagtgcaggctggagctrctgcagagcccttttctgccctgggtctccactaaaggctgggaagacttccatgtcacctggatggtgacatgaccagtattccacggtgtaga

SEQ ID NO: 187799 - DNA, 513 bp, Homo sapiens
gaagtttcacgtaaatgttttcccaccatatcctytcccatcaatctatttatgtgtagcagtagaaagttgaacaagaagactgaaaaccaccagagcacgtttcatctgcactttccctgcacttcattcttattagtgtccttgggctgctgtaacacagttccaaaaatctgatggcttaaaacagtttactctctcatacttttgtaggccagaaatctagaatcagtatctctgggccaagatcatggccttggcggccaggctccttcagaggctccaggagggagtctattcttgtctcccccagctcctaatggctgcatctttccttgactgtggccatacccctccagtctttgtctctgtggccacattgccttctcttctgtctgtgttaaatctcaatctatctcactcttaggaggatacttgtgattgcatttagggtccacttggtcaatccaggataatctccctgtttctagattcttaatttatacctgcaaa

SEQ ID NO: 187800 - DNA, 513 bp, Homo sapiens
gaagtttcacgtaaatgttttcccaccatatcctttcccatcaatctatttatgtgtagcagtagaaagttgaacaagaagactgaaaaccaccagagcacgtttcatctgcactttccctgcacttcattcttattagtgtccttgggctgctgtaacacagttccaaaaatctgatggcttaaaacagtttactctctcatacttttgtaggccagaaatctagaatcagtatctctgggccaagatcatggccttggcggccaggctccttcagaggctccaggagggagtctattcttgyctcccccagctcctaatggctgcatctttccttgactgtggccatacccctccagtctttgtctctgtggccacattgccttctcttctgtctgtgttaaatctcaatctatctcactcttaggaggatacttgtgattgcatttagggtccacttggtcaatccaggataatctccctgtttctagattcttaatttatacctgcaaa

SEQ ID NO: 187801 - DNA, 398 bp, Homo sapiens
atatgtgcttgaggcaaaaggaatatttatcattgatggaagttcaagttttctaataaactccaacatccttagtctccgtcctactgactttcagtgtaaactcagtacctgacccattacccctgaacctgtctgagaattcggaggcytggttggaaacctcataaatcaggagctgtggagactggcctggcttctgcaggtaccaatacaaataggtgtttccattattatacaggaggctctaactagacctgcaggagacaaaggctggctttccattatgaacaactttcatgatttcttttatgatattgatttatagttacatttttcaagttttgattcatgtcatgaaagtagactttctaaaataaacccattatttaccagcc

SEQ ID NO: 187802 - DNA, 423 bp, Homo sapiens
atatgtgcttgaggcaaaaggaatatttatcattgatggaagttcaagttttctaataaactccaacatccttagtctccgtcctactgactttcagtgtaaactcagtacctgacccattacccctgaacctgtctgagaattcggaggcttggttggaaacctcataaatcaggagctgtggagactggcctggcttctgcaggtaccaatacaaataggtgtttccattattatacaggaggctctaactagacctgcaggagacaaaggctggctttccattatgaacaactttcatgatttcttttatgatattgatttatagttacatttttcaagttttgattcatgtcatgaaagtagactttctaaaataaacccattatttaccagccaraagggaactctttttttttttca

SEQ ID NO: 187803 - DNA, 401 bp, Homo sapiens
tagcttaagaatgacgtaaggcacacatattaatccaaggagctcaggaaacatctagcataggaatgcatgatggcacacagaggtagagagtagctgacacttttcagaagtggagggagaagatttctgatgttggcctagatgwaagaagtaggaaagaaaatgtagaaatacaggaagatgatcacatgtctgagataagagatttgccatgtcgtttacccagtgtacaaggattacccaatccttgcaaagcattacactactttcacatattttgtgttaacattttcctttttcttatttttaataaataaatctgtccttctatccatccatctatgtatccatccatctttcttatacctcatcattgcatctctggctgatagtgctga

SEQ ID NO: 187804 - DNA, 563 bp, Homo sapiens
atactcatctaaatgccattgcctagcagggaactcttaataattaaggtgatccaacacatggacttcagtcagtcacctttcccagggagtctcatgaacytaagccatggagatttatgcatctgaatttcatttgatgaggctcacaaggctaatggcacgtctgagtatctgacttgccaaaaaccatgacccttcctgaaaccctaacattgtactacacatctgagatcagactaacagctggtatcaggtgagtacattggacctaacccaacacattggggcgggggtggttattttcctatatgtacatttgcctttcttatcagccatgtttctgctagaataattacttgaaagtttttcaagtgctttcaagtcaagaaacccttacataatttatcattggaaaaagtaactttattatagcaaaaaaaagtaaggcaaagtaggttcatgatgctgtcatgtgtacagaggcagctatccctacagacaggagaaaccccattactaggcaggtgaagtgagcacacaaacccttgtaatgtcaaatc

SEQ ID NO: 187805 - DNA, 563 bp, Homo sapiens
atactcatctaaatgccattgcctagcagggaactcttaataattaaggtgatccaacacatggacttcagtcagtcacctttcccagggagtctcatgaacctaagccatggagatttatgcatctgaatttcatttratgaggctcacaaggctaatggcacgtctgagtatctgacttgccaaaaaccatgacccttcctgaaaccctaacattgtactacacatctgagatcagactaacagctggtatcaggtgagtacattggacctaacccaacacattggggcgggggtggttattttcctatatgtacatttgcctttcttatcagccatgtttctgctagaataattacttgaaagtttttcaagtgctttcaagtcaagaaacccttacataatttatcattggaaaaagtaactttattatagcaaaaaaaagtaaggcaaagtaggttcatgatgctgtcatgtgtacagaggcagctatccctacagacaggagaaaccccattactaggcaggtgaagtgagcacacaaacccttgtaatgtcaaatc

SEQ ID NO: 187806 - DNA, 563 bp, Homo sapiens
atactcatctaaatgccattgcctagcagggaactcttaataattaaggtgatccaacacatggacttcagtcagtcacctttcccagggagtctcatgaacctaagccatggagatttatgcatctgaatttcatttgatgaggctcacaaggctaatggcacrtctgagtatctgacttgccaaaaaccatgacccttcctgaaaccctaacattgtactacacatctgagatcagactaacagctggtatcaggtgagtacattggacctaacccaacacattggggcgggggtggttattttcctatatgtacatttgcctttcttatcagccatgtttctgctagaataattacttgaaagtttttcaagtgctttcaagtcaagaaacccttacataatttatcattggaaaaagtaactttattatagcaaaaaaaagtaaggcaaagtaggttcatgatgctgtcatgtgtacagaggcagctatccctacagacaggagaaaccccattactaggcaggtgaagtgagcacacaaacccttgtaatgtcaaatc

SEQ ID NO: 187807 - DNA, 563 bp, Homo sapiens
atactcatctaaatgccattgcctagcagggaactcttaataattaaggtgatccaacacatggacttcagtcagtcacctttcccagggagtctcatgaacctaagccatggagatttatgcatctgaatttcatttgatgaggctcacaaggctaatggcacgtctgagtatctgacttgccaaaaaccatgacccttcctgaaaccctaacattgtactacacatctgagatcagactaacagctggtatcaggtgagtacattggacctaacccaacacattggggygggggtggttattttcctatatgtacatttgcctttcttatcagccatgtttctgctagaataattacttgaaagtttttcaagtgctttcaagtcaagaaacccttacataatttatcattggaaaaagtaactttattatagcaaaaaaaagtaaggcaaagtaggttcatgatgctgtcatgtgtacagaggcagctatccctacagacaggagaaaccccattactaggcaggtgaagtgagcacacaaacccttgtaatgtcaaatc

SEQ ID NO: 187808 - DNA, 621 bp, Homo sapiens
cagtttccatcaccagcctggaagcatccagggaaggttcctgagatccacccatgtgctctgtctaccttggccatggtccaccccagcttggtacagtggtcctgggacacacctttgcttaacagttagaagcttgggtgtcccagtgacattactggttattactgtctacaactgtgctgttccacgtgggaaacactagcagtgatagccacagatgtgtcaattagaaatacttaaaattagaaaagtagcttcacagttacatcaggtacatttcatgtactcagcagccacawatgactgatgactagccttattgcacttcatacatacagacattttcatcatcttagaaaatgactttgcttagcacagatgtaaatgataacatctgattactcgcagtgctatagctgagaacacaaacctcagcagttgttcttttagaagatcaggtgtccccggatgcttcctcagctcggaaagctactgtggttctcagagctgctctggaagtgtttctgggatgggaggaatgaggctgggttgacagatccaaaccaggggccgtcagcttctcaccccagtccctgccattatgccctacagggtcct

SEQ ID NO: 187809 - DNA, 621 bp, Homo sapiens
cagtttccatcaccagcctggaagcatccagggaaggttcctgagatccacccatgtgctctgtctaccttggccatggtccaccccagcttggtacagtggtcctgggacacacctttgcttaacagttagaagcttgggtgtcccagtgacattactggttattactgtctacaactgtgctgttccacgtgggaaacactagcagtgatagccacagatgtgtcaattagaaatacttaaaattagaaaagtagcttcacagttacatcaggtacatttcatgtactcagcagccacatatgactratgactagccttattgcacttcatacatacagacattttcatcatcttagaaaatgactttgcttagcacagatgtaaatgataacatctgattactcgcagtgctatagctgagaacacaaacctcagcagttgttcttttagaagatcaggtgtccccggatgcttcctcagctcggaaagctactgtggttctcagagctgctctggaagtgtttctgggatgggaggaatgaggctgggttgacagatccaaaccaggggccgtcagcttctcaccccagtccctgccattatgccctacagggtcct

SEQ ID NO: 187810 - DNA, 621 bp, Homo sapiens
cagtttccatcaccagcctggaagcatccagggaaggttcctgagatccacccatgtgctctgtctaccttggccatggtccaccccagcttggtacagtggtcctgggacacacctttgcttaacagttagaagcttgggtgtcccagtgacattactggttattactgtctacaactgtgctgttccacgtgggaaacactagcagtgatagccacagatgtgtcaattagaaatacttaaaattagaaaagtagcttcacagttacatcaggtacatttcatgtactcagcagccacatatgactgatgactagccttattgcacttcatacatacagacattttcatcatcttagaaaatgactttgcttagcacagatgtaaatgataacatctgattactcgcagtgctatagctgagarcacaaacctcagcagttgttcttttagaagatcaggtgtccccggatgcttcctcagctcggaaagctactgtggttctcagagctgctctggaagtgtttctgggatgggaggaatgaggctgggttgacagatccaaaccaggggccgtcagcttctcaccccagtccctgccattatgccctacagggtcct

SEQ ID NO: 187811 - DNA, 471 bp, Homo sapiens
ttttaaatcaaattatacctcttttactctcagaaagagacaggtttaataacaaaattgcacaaagatcaaaagattagcatcctgctttagaaatctttaatctccttcttcaagtgaatgaagctttcctgcagagcaaaacaaattatctcacatttaacaatggaagaatatgtgacayatttaaagtccccttcagctgcaagagcctcggcagggcagaacaacagcagaaaggaggatgcagtgggctctgagccacatcttgccagaggaaaggctcaatgaaagctcatcttgattctttctgccggtgtgcagatgcctaacaaatacaggtagcagaacagccagaaaactcaggccgctttgtagcaaaacaagttgaatacacatgcacacatttaaccaaaattggattgatttcacttgcataattgtcagtgtggagcctagagacagtgcaca

SEQ ID NO: 187812 - DNA, 471 bp, Homo sapiens
ttttaaatcaaattatacctcttttactctcagaaagagacaggtttaataacaaaattgcacaaagatcaaaagattagcatcctgctttagaaatctttaatctccttcttcaagtgaatgaagctttcctgcagagcaaaacaaattatctcacatttaacaatggaagaatatgtgacacatttaaagkccccttcagctgcaagagcctcggcagggcagaacaacagcagaaaggaggatgcagtgggctctgagccacatcttgccagaggaaaggctcaatgaaagctcatcttgattctttctgccggtgtgcagatgcctaacaaatacaggtagcagaacagccagaaaactcaggccgctttgtagcaaaacaagttgaatacacatgcacacatttaaccaaaattggattgatttcacttgcataattgtcagtgtggagcctagagacagtgcaca

SEQ ID NO: 187813 - DNA, 471 bp, Homo sapiens
ttttaaatcaaattatacctcttttactctcagaaagagacaggtttaataacaaaattgcacaaagatcaaaagattagcatcctgctttagaaatctttaatctccttcttcaagtgaatgaagctttcctgcagagcaaaacaaattatctcacatttaacaatggaagaatatgtgacacatttaaagtccccttcagctgcaagagcctcggcagggcagaacaacagcagaaaggaggatgcagtgggctctgagccacatcttgccagaggaaaggctcaatgaaagctcatcttgattctttctgcyggtgtgcagatgcctaacaaatacaggtagcagaacagccagaaaactcaggccgctttgtagcaaaacaagttgaatacacatgcacacatttaaccaaaattggattgatttcacttgcataattgtcagtgtggagcctagagacagtgcaca

SEQ ID NO: 187814 - DNA, 609 bp, Homo sapiens
aatagcaatactctctgaaattcaaaaatattaaagaatattttgtaaaaataacatattcttgaattgccttgcaaaagaaagcacgaaagattttttatcatttgtcattttctctcaattcaagcatccatattagatggtagatagaactgatccttcatttaacatactttcagagtaatcctttaaaaccagacataatgcattcaatagtgttcttttttgttagtatgttaagtttagtttgcatttattattttttctttccacctaccaatatttctgaatcctttcactagcatgattaattaagagtctgaaattttcaagactaagaacctgcattgaattggtcaacatcatgggataaaaaagttaaatacacaaaacttacaaaattaaataaaagaaaataataaatattttaaagactgraatataagacttttattgtactcctacctcctcatgataatttgtggtcatcaactcagaatattaacatggagttcgacatttaagatcatttttactcaattactttttccaatcttgttaaaaagtcttattttggtagatttcccaaaagatatgcagaccaagctt

SEQ ID NO: 187815 - DNA, 346 bp, Homo sapiens
gaactggctcaagactatgttttatttgtaggctgtctgctcatcagtgyttgtaggaaagggtaacgtttccttttttagattagctgggagggagccaagaagaatggcattcatccatattcattctagacatatctctacattgttagggttgttatgctttcctagagttgcatatcctatacaatgggacctacccaagatccaaactgtcacagtcagatccttcctcccattttatatcacattgctcacaggagagacatatcccctgcccgcctgccccattgactctttccacaccactgcatgcaccaggggatttgcatattgtcccacaggg

SEQ ID NO: 187816 - DNA, 346 bp, Homo sapiens
gaactggctcaagactatgttttatttgtaggctgtctgctcatcagtgcttgtaggaaagggtaacgtttccttttttagattagctgggagggagccaagaagaatggcattcatccatattcattctagacatatctctacattgttagggttgttatgctttcctagagttgcatatcctayacaatgggacctacccaagatccaaactgtcacagtcagatccttcctcccattttatatcacattgctcacaggagagacatatcccctgcccgcctgccccattgactctttccacaccactgcatgcaccaggggatttgcatattgtcccacaggg

SEQ ID NO: 187817 - DNA, 577 bp, Homo sapiens
cctgaaagtctgtcctggtcttaattgcacaggccacatttccttaactagtgaagccagcattggcaactgaaaaactagaaatttgacttcattgtcatcctcagggtctggcccactccaatcccaccacataaagaggcccttgaactttctctttcccatgcaacttaacttagacacatagtgaaatataaacatygcaaaactcttggcacctacacagcagccatcccctctccttgggcgtataagggaccagcttcgtcctgctgcacatggcaaggacaatgaagaggagcagggagtggggcacatgagctccacaatgagatgtcagaggtgagcagcacttcagggaaggactttgatccctcataaaggcatagaaggtgaagagctttgtcctgcatttttttcctgaaacaggtatgcgtgcacattgatacttggaggcactgcagccctcctaagatcatgaggctttgaacccaagactgaaaaactgaagtgcaaagaagaaatgtagcaaaaacctgggtccttttgctgtcaccaagttgctgcaccaacctca

SEQ ID NO: 187818 - DNA, 577 bp, Homo sapiens
cctgaaagtctgtcctggtcttaattgcacaggccacatttccttaactagtgaagccagcattggcaactgaaaaactagaaatttgacttcattgtcatcctcagggtctggcccactccaatcccaccacataaagaggcccttgaactttctctttcccatgcaacttaacttagacacatagtgaaatataaacatcgcaaaactcttggcacctacacagcagccatcccctctccttgggcgtataagggascagcttcgtcctgctgcacatggcaaggacaatgaagaggagcagggagtggggcacatgagctccacaatgagatgtcagaggtgagcagcacttcagggaaggactttgatccctcataaaggcatagaaggtgaagagctttgtcctgcatttttttcctgaaacaggtatgcgtgcacattgatacttggaggcactgcagccctcctaagatcatgaggctttgaacccaagactgaaaaactgaagtgcaaagaagaaatgtagcaaaaacctgggtccttttgctgtcaccaagttgctgcaccaacctca

SEQ ID NO: 187819 - DNA, 577 bp, Homo sapiens
cctgaaagtctgtcctggtcttaattgcacaggccacatttccttaactagtgaagccagcattggcaactgaaaaactagaaatttgacttcattgtcatcctcagggtctggcccactccaatcccaccacataaagaggcccttgaactttctctttcccatgcaacttaacttagacacatagtgaaatataaacatcgcaaaactcttggcacctacacagcagccatcccctctccttgggcgtataagggaccagcttcgycctgctgcacatggcaaggacaatgaagaggagcagggagtggggcacatgagctccacaatgagatgtcagaggtgagcagcacttcagggaaggactttgatccctcataaaggcatagaaggtgaagagctttgtcctgcatttttttcctgaaacaggtatgcgtgcacattgatacttggaggcactgcagccctcctaagatcatgaggctttgaacccaagactgaaaaactgaagtgcaaagaagaaatgtagcaaaaacctgggtccttttgctgtcaccaagttgctgcaccaacctca

SEQ ID NO: 187820 - DNA, 552 bp, Homo sapiens
atcatctaatactaatggactgaataggaaaacccagcaaggcttatctgtctagattcttcttggcctctctttgtggcattccttccttctgagtgtggagcagcaccctctctggaatgagggtcgtatgagctgtagtcaaacaaagtaggtcaaatattttctttatagacagtttttacacaaatagggcagagaaaaagagtaatattttaagattttatgactggctttggggaaaaggaaatctggttctatgactcaccttggggaagatggcttccagtttctatgactcttaaatgtatgcagcttaaatttaagcaaattattttacatctagaaatctcaaactactcatatgcaattgaatgataattatagattttatttcacaagtttgttgagacaatgaagtaatctgatgtttggcatagtgattgacacacagtgagaactcataagtgtttgttaggtaactagttgtataaacttgaayaataataataatacatcagtgccttttaagtactgagcactatgctacaa

SEQ ID NO: 187821 - DNA, 533 bp, Homo sapiens
cttatttttgttccttgatctattagtctgtctttatgtcaatagcacactatcttcattactatggctatatagtttgtcttgaaatcaagaagtatagatccttcaactttgttctttttcaagattgttcaggctattctcaggcctttgtattctcatataaaattagaactagcttctcaaaaaagcctaataaaattttgatagaatttgtgaygagtctattagtcaatctagagataatattgagtaaaaattgtcgagattttctttgtgcataaatttaagtctagttgtataattaaagtaagaaagtagagaaaataaaattacagtttaaaatgttttaatttttttagattagaaaaatatacatgtattcttcttttctgtttttacagggagactgacttttttttaatttgcaatattggcatagccattgaaatagaaaacagaaatttttctttcctgtcaaacatgttgcaattcttgatattaatgtttcttgttgggatattttgaaccat

SEQ ID NO: 187822 - DNA, 533 bp, Homo sapiens
cttatttttgttccttgatctattagtctgtctttatgtcaatagcacactatcttcattactatggctatatagtttgtcttgaaatcaagaagtatagatccttcaactttgttctttttcaagattgttcaggctattctcaggcctttgtattctcatataaaattagaactagcttctcaaaaaagcctaataaaattttgatagaatttgtgacgagtctattagtcaatctagagataatattgagtaaaaattgtcgagattttctttgtgcataaatttaagtctagttgtataattaaagtaagaaagtagagaaaataaaattacagtttaaaatgttttaatttttttagattagaaaaatatacatgtattcttcttttctgtttttacagkgagactgacttttttttaatttgcaatattggcatagccattgaaatagaaaacagaaatttttctttcctgtcaaacatgttgcaattcttgatattaatgtttcttgttgggatattttgaaccat

SEQ ID NO: 187823 - DNA, 540 bp, Homo sapiens
gtaacacctggaatctgtcttcaaataggatgaattcaacctttttgttagcattacatcaaaatttttttaaaaaaagcatttaagcaaggtttggatatgcatatcttcttggtcatatcaattaagaaataaaaggcatggagaatttctgtgttcagacagcacatgaggagtgtgtcacagaggcaatgaraaaagatcatatgagtagccagaaatagattaattcagttaattttgttatacacaatttcaatgatcttatagtagctatgttcagggattttctacaggttgcttaaacttttagacatcagttcctcatctttaagtaaaatgatagctttgattaaaactatgtattactccattctcatgctgctaataaagacatacctgagactgggtaatttttaaagaaaagaggcgtaattgactcacagttcagcatgcctgggaggcctcaggaaattcacaatcatgatggaaggcaaaggggaagcaagcaccttcttcacaaggcagcaggaaggagaa

SEQ ID NO: 187824 - DNA, 657 bp, Homo sapiens
aatgtttaaaatatggtttttaatatagtttgactctctgtccccactgaaatctcaagtcaaattgtaatccttgcatgtcgaaggtagagcctggttggaggtgattggatcatggaggtggtatctaacggtttggcatcatccccctagtgctgcctcatgatagagtctcatgagatctgttaagatctgatggtttaaaagtgtgtggcaattcctctgtctctttctctttctctctcttgtygccatgataagacatgtcttgcttccctttcaccttctaccatgactgtaagtttcctgaggcctctccagccatccatgcagacatgtaagttaattaagcctcctttcttcataaattactcagtcttaggagtgtgagaatggactagtacagttttgaaaacatgactaacgaacaacaagatgattaagaataggaagatatgaaatacatgcactatgttacatgttctgaatctgtgtcttaattaatagttttatatgaactacttgctgtaagttggacatcagtaatatatttcctttgtaattcattgattttatttgttttgaactatttgggttctgaattttcctttgaggacttgctaactgccgtgcataagaaaccaccatgtgtacaaa

SEQ ID NO: 187825 - DNA, 561 bp, Homo sapiens
aataatacaattttcatttattaaattttaaatttcgtttttagatttttttttttttagttttttttcactattttaaattgtcagaattttttttcttttacaattaatgatgctgtgtatttcatcttcacctcgtttccaatactggaagtataaattgtgtaaagacttttagagaattctaatttgttttatgcactttttgcaaatttaagtccatgaaagtgcattatcacaatgttgcccttgtgtataagaattgtgtatatacataacgttaaattttctcaacatgtacaaagatgttctttgttatgtttatatttgtgaaagataaaatttcttgagatcttggctctwtaagtgactgcatatgcagtggtgacccaacataatttttgatttgtgttgttcatcatggtatttcagatgaccacaattgtaaagctaggtgcacacaattaccaaacatggtaacgtgtttatagtttctttttggacctattcttttataaatatggttcatttgctcataactattatacccatatgactgtt

SEQ ID NO: 187826 - DNA, 469 bp, Homo sapiens
aaccaatctcaaaccctttctgatataatttttataagcaaatacttatctgatttggctccactctgtcagactcattgatccacctgagttgtctcctctccaccctcaatggatcccactgaaaaaccaaaagatatagtgtgtctttattgggatattgaaaggaagtatcatctattctaatcaatattaatttactttactgagatgcaattatcmtactaaaaaatgtatagaacatacatagattgtttgtgatttcatagttaaatacattcatattaccaccaccaaaaataaaatatagaataatatctcactaaagtttctttctggtcatcctccttaacctttattttttatttgtatcaccatacattaattttgtctgttcttgatttttcacaatggaatcatacagtatatattttgtttgtatgtgtgtctggtttattttgcttaacat

SEQ ID NO: 187827 - DNA, 479 bp, Homo sapiens
ataactagtgttgctataaacaccattgaacatgtatttggataaacatttatctgaatttctattacatatatacctgagtggaattactgggtcataaactatatatatatgtttagccgatcagttatctaatgtaattatatcaaattacactgctactrgtggtatatgggagtttcgtttctttcacatttgaagcaacattgtatatcactgcctttttcattgaactgttctgtgtgtgtagtggtattacattgtgtgtgtgtgtgtaacacttttattaagatacaattgacttaaaataatctgcacataaaacacaccatttgttaaattttggcgtgggtactgtatgcatccttgaaaccattaccacaatcaaggtaaaataataaatatactcattatcccacaaatgttttctcatgccctttgtagtttctcccttccgccacacccccactcccacgtcc

SEQ ID NO: 187828 - DNA, 479 bp, Homo sapiens
ataactagtgttgctataaacaccattgaacatgtatttggataaacatttatctgaatttctattacatatatacctgagtggaattactgggtcataaactatatatatatgtttagccgatcagttatctaatgtaattatatcaaattacactgctactggtggtatatgggagtttygtttctttcacatttgaagcaacattgtatatcactgcctttttcattgaactgttctgtgtgtgtagtggtattacattgtgtgtgtgtgtgtaacacttttattaagatacaattgacttaaaataatctgcacataaaacacaccatttgttaaattttggcgtgggtactgtatgcatccttgaaaccattaccacaatcaaggtaaaataataaatatactcattatcccacaaatgttttctcatgccctttgtagtttctcccttccgccacacccccactcccacgtcc

SEQ ID NO: 187829 - DNA, 654 bp, Homo sapiens
agttcacccagcaaactggaggacatttcaggttggaaaaataagagtattcaagtaggaagataaatgggctttatacaaatgttaacatgaagttaacttgtattagcacaggtgcttaataataaaagaatgatgtaaattatgtagacaaacaggaaaagttagaatttatccttcatttatgaccaacaattagatgttgcttgaagactgaacaacataatgttcaaacatatgaatagtttttacccttctctttcttccttctgtttaagtagcatttatttcaaaattattcagcattacttagagacaaagacacccccatatctttcttttccatggcttttatggcctttaataaaaattgatgattcttttccctcccctcatttgatgtaaaaagtcaggcaacttggacatttcaaaaaccaaggcagccagcttggtgccataaagtctgagatggtcaaaaacatctcaagwcgggatagagctgtgtctaatggatagcaaaatatggagccatgaaaaatgaacattataacagtggtatattgcatcatttctcccagttatccactcctttggcatgtctttgcattgcttctgcttctaaaccaggtgtactttctcatcccatcagtgctg

SEQ ID NO: 187830 - DNA, 613 bp, Homo sapiens
catggttgaaattactcttgaagtatctcttcaggatttaacatctgaaacattcattgacatgaatcaaccactgatagcgaytggctattaagttttcttttttgcagtaactagggcttgactgactcaatggataagaagccccaagtacttgtagcagtcacacacacacacacacacacacacgcgcacacacacacacacacacacaaacactaaattaggagaaaaataaaagctaaggatgaacaaaacatctcaatatcataagacctaagtggaatttgctaaagaatgctatttgttctccttattatgaattttattttcaaaaagcaacaaaaactgtaactgttctcaagtattgcagtatttaactagagccttttcatattaaagttgcagaatctatactttattattttttttattctgccagaaatgaaagtggcctctagcaatagtcaggggtgaccttgttttcggaccagattgcttagcccagtgtttgaatgaaaacagataatgctacgatgtaaatctgttctaataataaaaaattggagatagtgaaaggtgacagatggatttcaaactaaagttataaaga

SEQ ID NO: 187831 - DNA, 572 bp, Homo sapiens
caacagtaggagcaggtgggagatactggaatctagaaaatcttctaaacaaagtaataatttgcctggcataacagagctacctgcctatccatttctccaatttgtgtgaaaaaamtaaagctaaaataggattaaaaagaagaaataatgcagagcaggtgagacccccaaactggggcttagcccatcatttctttctcacttataagtgagaatatgtggtatttggttttctgttcctgtattaatttgcttaggtatatgcagttgtaaaaattcactgtatatacttaatatctgtatatgttatctcatacaaatatacctatattttgaaatgttaattattataacatgaaaagcaaaaatgtttattttttagagatatacagtgggatatttgtagatcagtgatgcacactttgaaatttgcttcaatgtaacagagtatttgggaagtgggtggaatcatagatgaaccaaaagtggccatgaggtaataattgttgaaactgaggaactggtacgtagagattcatcccataattctttattcttttatacatttt

SEQ ID NO: 187832 - DNA, 470 bp, Homo sapiens
gggcccaacagcaagagtatgatgattgccccatcctgttttacatggattagaaaaaacttggagcaatcttcgcaattgaagaggaaaagaagatattccaaggattgaggccaggttttggctttgaaaaggaacaagttttggaaactgagcacatttcaaaaaaagcgcagttccaaaatatgtatgtgtcacatatggaggatggattaaatctgatctgtgttgtcccatarcatagcaatgggaccaataatggtaaaagctgtgagaaggcagattccagccacacttggagaagtctctggaaaagaacaggatgcttgaaactgtagttgcctccaccacaggggatggcccatcttggagtgtggctggatagtgacttgaatcgcctgacctgcaaagcccttttccaccctgggaatctatcattcaataaaaggaatggcagtagaggggcaatt

SEQ ID NO: 187833 - DNA, 592 bp, Homo sapiens
cagtatattaaacatgtggtcttttgtttatgaattaaagctgtgagtatattgaattggagatagtgataaattccagaaggaaataagcataggacgttgcacagtactgtaatgatccatccatgtacctgtctccctaactgaattaaaatatccttataggactgcatatcatttttatctctttttttcaacctcagtacccgacattgcctggcacacacaggcactcaataaaggtctatattatacacattgttgaaagaaggcagatcccatcattcctattctaggccactgctctttaaaaatgtttaatgcygtgtttcccctaatgtaaaaatgcaaatccaggtggagggacgtgcctttagtctaattagcatggtataccttaacataataatttaaggttcttgagagcttctcaagattccttccgtgtcccacctctccactggcctggcgtgcagtgcattggcacaggcagggatgagggggcatagaggtaggcactagacccgtgagcaggtttgactacaagagtcccaggggctctacaagagaaggcggatgggtactaacaaat

SEQ ID NO: 187834 - DNA, 650 bp, Homo sapiens
aataaatcatttacgaggcttaaaaagaaatgcttctcatgtagttctttttcatgtagttctctgaatacaagtcaaagtgcaggtcacgaaagaatccattgttcacaagcgagaaatgttgttggctgtgaggacggttcagaacaagccatcgtagtctgctcaaacagyaaatattggttttaaaaccccaaagcatatcggtcatgttttttatcttccaattgctagaaccaaaattcactgaaacaactctatgtctctgatactattttctagaaatgtgtgtgtatgcgtgtgtgtatgtgtctgtgtatgtttgtttggtaaatccaaatcacacaatcaacgtaaatctttcaggctaagttttgccccagttatttttatgctgtgctttcaaaaaggtcaaaaaagcttacctctgtcagtgtactgggacgctcaggaagccccttctccgcctcggcctcagcgtgcagacatatgccctgggagcccacaatctgttaacaggaagcaggtaaacccgagagcgtccgcctgcgttccagtccagtgcccgtcccagcacacacctgctttttcagacctgccgctcatatgccacagccacgcacaggaccagcgttagcagagtgcaacac

SEQ ID NO: 187835 - DNA, 650 bp, Homo sapiens
aataaatcatttacgaggcttaaaaagaaatgcttctcatgtagttctttttcatgtagttctctgaatacaagtcaaagtgcaggtcacgaaagaatccattgttcacaagcgagaaatgttgttggctgtgaggacggttcagaacaagccatcgtagtctgctcaaacagtaaatattggttttaaaaccccaaagcatatcggtcatgttttttatcttccaattgctagaaccaaaattcactgaaacaactctatgtctctgatactattttctagaaatgtgtgtgtatgygtgtgtgtatgtgtctgtgtatgtttgtttggtaaatccaaatcacacaatcaacgtaaatctttcaggctaagttttgccccagttatttttatgctgtgctttcaaaaaggtcaaaaaagcttacctctgtcagtgtactgggacgctcaggaagccccttctccgcctcggcctcagcgtgcagacatatgccctgggagcccacaatctgttaacaggaagcaggtaaacccgagagcgtccgcctgcgttccagtccagtgcccgtcccagcacacacctgctttttcagacctgccgctcatatgccacagccacgcacaggaccagcgttagcagagtgcaacac

SEQ ID NO: 187836 - DNA, 578 bp, Homo sapiens
cactaacctcccgagaagagggcttccttgtccttttctttcttttttgagacggagtctggatctgtcgcccaggctagagtgcagtgacgggatctcagctcactgcaagctctgcctcccgggttcacaccattctcctgcctcagcctcccgagtagctgggactacaggcaccygccaccactcccggctaattttttgtattttagtagagacggcatttcactatgttggccaggatggtctcgatctcctgacctcgtgatccgcccacctcggcctcccaaagtgctgggattacaagcgtgagccaccgcgccaggctgtccttttctttctaaccttgttctgctcctctttttgtagactgaaatgcagatgtcattctgtgggggtgcatgctaacagagagatgatacagcgatggagagaggatagagaggaacctactctgggctacctgtccgtgggatttcttgttatttgaggcaaacccaacctggtgaaatgactgtattgaggtcatctgttccatgaaagctagaaacagaaacaaaacaatcatctaaaaacaa

SEQ ID NO: 187837 - DNA, 569 bp, Homo sapiens
tattatcagctggtctgtttgggacttgtttgatgaactgttagatgactgactgccagccaatcattatcctggctgctccttagctgactgccagtcaacaattactccatgctgattctacagtttttccacagttgtcagtgttctagttctgagtatagtctcttggcataatgtggttcataaacgactgcactgataacttttgttagaactcaccacttgccagatagcccagatgccatatgttactcattcagtaaataactcttaagagcctgccaaatgctagatacttaaaggcagtgggttataagggtgaactgaacttagcttcttagagcatactacctagtggtataggcagtcaataatcattgagtaggcaaatacctaatattatttcaaatggtgataaattattatgaaaaccaaaaagctgagtaaagagaagaatgatggggaagggtaggatacacttgaaccagggtggtcaggggaggtcctgtttgatgggtaacgggccaggccrtcatgaaaggtcttgtaggtcacagttaaagaat

SEQ ID NO: 187838 - DNA, 460 bp, Homo sapiens
gaattctgaggtcccctctaagcccagcaagaccgatgtgattgatgggcagcacctgccaagggtatgggttcagggaaggacggcatagaaagcatatttttgccattactgactggacagtaaactttctaggtgtgtgattttgtgaatcttaaaattctcagtctttcctagatwtttagtgtttgttccccttatgggaaatttgcctgaaactaatagaacttctttgttccagatatgaagacaaacatgcctatcatcacatcaaagaggtaagtcataatgaactttggcttctgtcaaaatgatggtttaagtcagatgtttttaggtagtcttgtcccatgtagcagtccagtccacacctttttttctttctgtttttggtagtagatgtatccttgaaaattatgttggaatttaatgtggatcaaatcatttttgcaatgcctta

SEQ ID NO: 187839 - DNA, 613 bp, Homo sapiens
ggtgttcaacttgttttaaggacagtttacccagaaaggcttgctaagatcatccaaaaggctactacaaagaacgaatgtttgaaaatgttgcaacttgaaagtgccactgaagaatcagaacaaactagggccccatttcccccatgcccactccctccctggcagcaaggcccttggcagttgacagtgttagcaagggaagcacatggtagagattttaggtaatgctgctgaagatatctatctgttgaaaatgtattcctgccattttatgcactttgcagctctgggaagttctggggattgcttgaatatttcatttttgctattttgttttcgcttttgtttttttaagacagggtccyactctgtcactcaggctggatctttgctcactgcagcctcgaccccctgggcttcaagtgatcctcccatctctgccttctgagtagtgctatttcttattaatgtttatatcagttggttgattactagtcgtgaatagtaatatttctttctctttctctttcaacaggctgtagtgctgtgctgggtactgtgaattgtggttactcttaagcatatttagaaatccaaggagatactattt

SEQ ID NO: 187840 - DNA, 613 bp, Homo sapiens
ggtgttcaacttgttttaaggacagtttacccagaaaggcttgctaagatcatccaaaaggctactacaaagaacgaatgtttgaaaatgttgcaacttgaaagtgccactgaagaatcagaacaaactagggccccatttcccccatgcccactccctccctggcagcaaggcccttggcagttgacagtgttagcaagggaagcacatggtagagattttaggtaatgctgctgaagatatctatctgttgaaaatgtattcctgccattttatgcactttgcagctctgggaagttctggggattgcttgaatatttcatttttgctattttgttttcgcttttgtttttttaagacagggtcccrctctgtcactcaggctggatctttgctcactgcagcctcgaccccctgggcttcaagtgatcctcccatctctgccttctgagtagtgctatttcttattaatgtttatatcagttggttgattactagtcgtgaatagtaatatttctttctctttctctttcaacaggctgtagtgctgtgctgggtactgtgaattgtggttactcttaagcatatttagaaatccaaggagatactattt

SEQ ID NO: 187841 - DNA, 613 bp, Homo sapiens
ggtgttcaacttgttttaaggacagtttacccagaaaggcttgctaagatcatccaaaaggctactacaaagaacgaatgtttgaaaatgttgcaacttgaaagtgccactgaagaatcagaacaaactagggccccatttcccccatgcccactccctccctggcagcaaggcccttggcagttgacagtgttagcaagggaagcacatggtagagattttaggtaatgctgctgaagatatctatctgttgaaaatgtattcctgccattttatgcactttgcagctctgggaagttctggggattgcttgaatatttcatttttgctattttgttttcgcttttgtttttttaagacagggtcccactctgtcactcaggctggatctttgctcactgcagcctcgaccccctgggcttcaartgatcctcccatctctgccttctgagtagtgctatttcttattaatgtttatatcagttggttgattactagtcgtgaatagtaatatttctttctctttctctttcaacaggctgtagtgctgtgctgggtactgtgaattgtggttactcttaagcatatttagaaatccaaggagatactattt

SEQ ID NO: 187842 - DNA, 613 bp, Homo sapiens
ggtgttcaacttgttttaaggacagtttacccagaaaggcttgctaagatcatccaaaaggctactacaaagaacgaatgtttgaaaatgttgcaacttgaaagtgccactgaagaatcagaacaaactagggccccatttcccccatgcccactccctccctggcagcaaggcccttggcagttgacagtgttagcaagggaagcacatggtagagattttaggtaatgctgctgaagatatctatctgttgaaaatgtattcctgccattttatgcactttgcagctctgggaagttctggggattgcttgaatatttcatttttgctattttgttttcgcttttgtttttttaagacagggtcccactctgtcactcaggctggatctttgctcactgcagcctcgaccccctgggcttcaagtgatcctcccatctctgccttctgagtagtgctatttcttattaatgtttatatcagttggttgattactagtcgtgaatagtaatatttctttctctttctctttcaacaggctgtagtgctgtgctgggtactgtgaaktgtggttactcttaagcatatttagaaatccaaggagatactattt

SEQ ID NO: 187843 - DNA, 581 bp, Homo sapiens
gagtccatgctgtgcacaatgtgctactctcctctcttttctgggatcagtgcccttttctttggggtcagctttggagaaacagtgaagcatttttggtatttgggtccccctcactcacccactaayacataacccagccccactgagcagctccttttctctaaaatatttttgagagcagatagcccaattcagctttgagagagttactttgttctttgaaatggcagaagggaaactctacctggatgtgtctaccccaggaataatataagtcgaactttccagattaaagtacttttaaattcctggaggtcagttgttgggggcacaagcccagtagggtcaaggttgcactttcaatatcctttgaggccagattccttccttctgttgtagagccactaattttacctttgaccttgagcagcatctataaaatgctagctgttagcaaaatgaggaactgggcttggcgatgtcaattagttggatgaagactagtattgttaaaggtcttatgctctgtcttgggatgtgttatgcagtttacttagaagtatgcttttgaaatcatc

SEQ ID NO: 187844 - DNA, 581 bp, Homo sapiens
gagtccatgctgtgcacaatgtgctactctcctctcttttctgggatcagtgcccttttctttggggtcagctttggagaaacagtgaagcatttttggtatttgggtccccctcactcacccactaatacataacccagccccactgagcagctccttttctctaaaatatttttgagagcagatagcccaattcagctttgagagagttactttgttctttgaaatggcagaagggaaactctacctggatgtgtctaccccaggaataatataagtcgaactttccagattaaagtacttttaaattcctggaggtcagttgttgggggyacaagcccagtagggtcaaggttgcactttcaatatcctttgaggccagattccttccttctgttgtagagccactaattttacctttgaccttgagcagcatctataaaatgctagctgttagcaaaatgaggaactgggcttggcgatgtcaattagttggatgaagactagtattgttaaaggtcttatgctctgtcttgggatgtgttatgcagtttacttagaagtatgcttttgaaatcatc

SEQ ID NO: 187845 - DNA, 414 bp, Homo sapiens
aagaactgacatcacataaactagttttaccaaatcttcagggacagaaaattttacacaatttgtttaaataaaaaayggaataaaggagagtgcttcccattcatcctattacatgagactaacatagcgttgataatgcaaacaagaagtaacagaacaaaaaagaaaaatatagaccaatctcacaaatgaaatagaaaacaaacgtaaaattcagcaagttgaatccatcagtatataaaattttgtcactgtcaaagaaggatctgtctcataaatgcgttgattcaatatcagacctttctaatataataccccatatgaatagtttaatgaagaataatatgcatagttatctcaacacatacagaatatgaattttataacattaaacaccattcacaaaagatt

SEQ ID NO: 187846 - DNA, 576 bp, Homo sapiens
agatctaaagagcagccacatggtaaccactggatactggatgactgcacttcatgctagtgagcattgattgtcagctctggctcagtagctgaagtgacaataacaatatcaattgtagcataaataatacttttatttatgtgggatctcaaatgaactccagaaaagtctgtgagctgggaagtttttcccacactgcagatgagaatactgaggtggtgagagattacagttttgagagatcacacagcttctgccttttaaatgtggaataaaggattaacatctttatcttgagctatgtatataagagatccaaaccaayggtggttcttattatgtgtctaaactctgttctattccattacctgtctccttcttgctcttaatgaccctgcctctgtgtattagtccattttcacgctgctgataaagacatgtctgagactgggtttataaagagaagaggtttaatggactcacagttctggctggggaggcctcacaatcatggtggaagacaaaggaagagcaaagggacttcttacatggcagcaggcaaaaagagagaat

SEQ ID NO: 187847 - DNA, 411 bp, Homo sapiens
tattctggagctgagtccttggacaagttactttacttctttagggctcaatttcttatcttatttaaaataagtttcacttctgctgtacagtgtctcaagagccttcaataacagtcctttgttattctgtcttatgtaaaggtgacttttactgtcatataatttgtcttctaacaagcacrtatgttatcaaaatctgtaaaaaaaaaaaaaaagttttggcgaaaaagttttggcaaaaacccaactctgcttctataagtatgtagttatgattgtaacagtttggaaggagtaaatttccctccctgccgctcaaaagtcaggctaagggtctcattattagccttaaaataactatcagaaactttcaggcctttgcccattaaggctttatccaagccgtct

SEQ ID NO: 187848 - DNA, 426 bp, Homo sapiens
gaattctcagtcatataagatggctctctcactatagaacctgagagtgccaagtatttgcttcccagtctttagtgtctaagatacaggaatgtgaccaaggttttayaatccaccatacccacactagactttcactctgaaggcaatgaagtaaagaagcaaagacatctcaaactgtattctttggagagtttgaggcagctatatctagccttcaaagtcacaatgttagttcagtctgtctcatatggtgcccagtggttttttttcagcagaccagtttggtgttgtgttctttggatattagttctggaagtgtaacttcaacacctaagttttccaaattctattatatacgcaagtagcctgtcaattaatttcctttctatttaaatcaacctgagcttcccccccattaacacc

SEQ ID NO: 187849 - DNA, 630 bp, Homo sapiens
actgcagtcgccaggagtttcctggtgaagtttctaagcccctgaggtattggcacaaaatagctctcaagctgcaagtttataacacaagagatttatttttcagaaccratgtacttttactcagcacacagttctagtaactcttccttaaactacaagctattgcctctatctggttaattcctatgcattttgcagtcctttaccaaggcttaatgttaccttcttcatgagatcttccccagcctgactctttccccagattcaggttaagtatacttcttatgtgatcttaagcatctctgatagaattgatcacactgaactgtatttaactattttcttgtcagtttcccccactagccataaaatcgatgaggacaggaagtaagttatcactatctccaagattctaacataggacctggcacttagtagattcagtacgtcattgtatgtatgtgtgggtgaataaatgaattttgatacatcacaagctgaaaatcagaaatggaattatgaagcccttacagtcagacatattgacattgagagggaatagcaataagggaaagcaaacaaaaatacagatctggaactgttgcacagtacaacaatggcttttta

SEQ ID NO: 187850 - DNA, 358 bp, Homo sapiens
agtctagatctctcttctaaatctcatacttttacagataactttctaccaggtatcttaccaccatttggatgtcccataagcacatcaacatgtccagagaggaatctgttatttttcttataagaaattaaacctgatcctgaatggcaccaccatccatactccatttttagcttcttccttttccttactcttcacagccaatattgatttagtctcttaaacacttttcaaatgcatttctccaggttcaaacaatccctatcgtcagcttacttcaggctgccaccatctcacttgaatatccaaaatagcttagaagsttttctgctataggtttgccttcctccaatct

SEQ ID NO: 187851 - DNA, 413 bp, Homo sapiens
taaaattgtaggaacaagaaagacttaaaaaaaaacaagaaagaacatgatactatgaataaaataaggcagatatgacaaatagaatttctagaaataaaaaataaaagcattgccaatggccatataaacagtagatcagacattgccaaagagaaagccagtgaactggaaggtaaagctgaaattacccatgatgcctctcaaagagacaaagagaagaacatgcaagcaaagtgaagagacatggaggatacaatgagaagattcaatatgtgtctagcaatagttatagaaggaaggaatagagaggatggaaaagaggcaatatacagaggtaatagttgaagtttttccawaattgataaaagacatcaattgggaagcacatcaaagttccagaaaaataaagc

SEQ ID NO: 187852 - DNA, 581 bp, Homo sapiens
gggaagatactatgtactgtgtaactcaccttgacccattttcttgactgctcagaaatgtgggctaagttttgtgttcaaatgcaatggcttccctcagtcttttcccgctaccttctattttggtctaattaatttcctctcattcattgattgttctttaatccttattttgttggttatatttttaaattactaattgcctcaggtcctctttgtatgggtatgaagaagtaaagtgataataacagtttctttaaaaactaaaaatcsaagggtggataccaaatagaaaaccatagtaaaacgaaggatcaaggaaaataaggaaactgcagagatgtataaagctgatctagcctttatgaagaataaaactggggaaattcctatttctagatgcgttttatagccaaaagaccagagatgttataacaaaacctgataatgaagggatgttttggattattttatagatgggtaaattgaggttaaaagagaggaaatggtttgtcttgtggtgatctcatagcagaatgtggatcagaacccaggtctcttgaccctcattctggagatct

SEQ ID NO: 187853 - DNA, 545 bp, Homo sapiens
tgtgttcatggattggagacattaatgttgttaaaatatctrtattacccaaagtgttctacagattcagtgtaatccctattgaaattccaatgtcatttttcatagaaatagcaaaaaaatcctaaaatttgtaagaaaccgtaaaagactacaaatatctaaagcaatcctgagcaagaagaacaaaactggaggcatcacactccttgatttcaaaatacattttaaagctatcttaatgaaaacagcatggtaccagcataaaaacagacatgtcaaccaatggaacagaatagaaatcccagaaataccagcctgggcaacatggtgagaccctgcctctacaaaaaaggaaaaaaaaaatagctaggagtggtggtacacacctgtagccccggctgcttggggaggttgaggcgggaggatcacttgagcccaggaggttgaggctgcagtgagctgtgttcatgctactgcacttcagcctaggtgacacagtgaggccctgtctcagaaaaatcccaaaaagtaacccatgcgtt

SEQ ID NO: 187854 - DNA, 547 bp, Homo sapiens
aaacagcatggtaccagcataaaaacagacatgtcaaccaatggaacagaatagaaatcccagaaataccagcctgggcaacatggtgagaccctgcctctacaaaaaaggaaaaaaaaaatagctaggagtggtggtacacacctgtagccccggctgcttggggaggttgaggcgggaggatcacttgagcccaggaggttgaggctgcagtgagctgtgttcatgctactgcacttcagcctaggtgacasagtgaggccctgtctcagaaaaatcccaaaaagtaacccatgcgtttatgatcaattgattttcaacaaaggtgctaagaacagacaatggggaaaggacagtctcttcaataaatggtgttgggaaaactggatatctacatgcaaaagaatgaaattggacctttatctcacatcatataaaaaaaaaacccctcaaaatgaattaaaacataagacctgaaatggtaaaactcctaaaagaaagcataagagaaaaccataggttgagcaatgacttcttggacaggacc

SEQ ID NO: 187855 - DNA, 389 bp, Homo sapiens
catgtcacctgtgaacaaagacagttttatttcttacttcacaaaatatatagctttaatttccttttcttgtcttatttcactaagttatccaatatgatgttgactaatagtggtgacagaagacatctttacctcattctcaatcttagggagaaagtatggtttcttaccattaagtacaatataggctttttttgtaagatgttctttaataagttgaggaaattcacctttatgcctagtttgctgagaatgtttatcatgaatcaaygttgcattttgtcagaggctttttaagcatcaattcctagccttcaaatatcttaccatatatttcttctgttctttctttgccttctcatataattgcacatcttatacctatt

SEQ ID NO: 187856 - DNA, 656 bp, Homo sapiens
ttgctacgattgcagaaatgaataaaacactatccttgtcctcaaggagcacaaaatttagcagaagaggcagacacataaataaagtgagatgggaagctcagttcaaaagagctgaatgttcacagggaagsaaaggcatagttcaggcagcactagctgatttcaaatagtggccagaagagttgttattgttttttttttaacctaaccaaggaaggatagctgacacttaggcagaaaagaagcctgcttctctaaggaccaaagaaaaagaagataggcagatctattaaaataatatagtgaggacaggaatgaaggttagaaagccagaactgaaaagcaggaaaaatggagtttgtgaaaggctgcactttccaatacagtggcatcaaccacaagtgcaaatgagatgtgagatgtgaggggaaacacgtgcccaatttctaagatttggtatgaaaaaagaatgtaaaatagttcattaacaatttgttttataatgagtacatgctgaaatgagaatattatggatacagtgtgttaaataaaatacatcattaattttacctgtatcctttcacttcttttgtttttttgctttggctactacaaaacttaaaatttcacatttgcaatttgcattatatttt

SEQ ID NO: 187857 - DNA, 511 bp, Homo sapiens
cagggcaaaataaataattgatgtattaatgcattctccagtcacacatgcrtactccaaggggagaatatgatttgacttttaatgtcatataaacaactaatgatcataacaatgtcactgcaagaggacttatttttatcttacgtttttacattggtatttattaccataggtaaaaaacctaacatatgagtctctgtaaacacatagaccactgaaaatatgcttttgtttattattgcattggcaacaaaaatatattttgagcatcaactcaataatagatcttttctagaaactaaagtttagttctagaaactaaaccaagcagatgagattcactaccttcatggaggcttcagctgccagatgagattcactaccttcgtggaggcttcaggtgcaagaaagagaaaatacaataaatgcataaaatgcctgataccttaaatgatgaaagagcaatacaaatataaagctataaaagaacaaatgtaagaaaattaat

SEQ ID NO: 187858 - DNA, 612 bp, Homo sapiens
atttgggcacaaaaacaggagtgcctgttatcacttaggtctgtggagcctttgtcagggaccccacccttctctacccagcacttccctgcctccctgcctcccttctgtggttaagaatgacatgtgatttgaacattaaataatcataatgtccaccttggtggggtatgtggtttaagtgaagtggtcatctgtaagataataattgggatttccaagtcagacacacctggattccgacatttgatattwtataatgaagccctgctgggaaaattatgtaacatttctgactctagtttattttttagcagaatgggttttataatgttacctatctcattgaatggttgtaaagattaaatgacatgatgtacgtaaagtgctagcacagtatttggcatgcagtaagccctcaacatgtaatttggtgttattacctttgaataagataaatggaagaaatctttgataacttatcactaaactccaaaaaaagactaaatttcgtgtcaaatgattgtgagattttaaaagaatctttggagaaggtgatgctatatctctgtgtatgtgattttcctttaaaaaatttttctttctaagcct

SEQ ID NO: 187859 - DNA, 612 bp, Homo sapiens
atttgggcacaaaaacaggagtgcctgttatcacttaggtctgtggagcctttgtcagggaccccacccttctctacccagcacttccctgcctccctgcctcccttctgtggttaagaatgacatgtgatttgaacattaaataatcataatgtccaccttggtggggtatgtggtttaagtgaagtggtcatctgtaagataataattgggatttccaagtcagacacacctggattccgacatttgatattakataatgaagccctgctgggaaaattatgtaacatttctgactctagtttattttttagcagaatgggttttataatgttacctatctcattgaatggttgtaaagattaaatgacatgatgtacgtaaagtgctagcacagtatttggcatgcagtaagccctcaacatgtaatttggtgttattacctttgaataagataaatggaagaaatctttgataacttatcactaaactccaaaaaaagactaaatttcgtgtcaaatgattgtgagattttaaaagaatctttggagaaggtgatgctatatctctgtgtatgtgattttcctttaaaaaatttttctttctaagcct

SEQ ID NO: 187860 - DNA, 612 bp, Homo sapiens
atttgggcacaaaaacaggagtgcctgttatcacttaggtctgtggagcctttgtcagggaccccacccttctctacccagcacttccctgcctccctgcctcccttctgtggttaagaatgacatgtgatttgaacattaaataatcataatgtccaccttggtggggtatgtggtttaagtgaagtggtcatctgtaagataataattgggatttccaagtcagacacacctggattccgacatttgatattatataatgaagccctgctgggaaaattatgtaacatttctgactctagtttattttttagcagaatgggttttataatgttacctatctcattgaatggttgtaaagattaaatgacatgawgtacgtaaagtgctagcacagtatttggcatgcagtaagccctcaacatgtaatttggtgttattacctttgaataagataaatggaagaaatctttgataacttatcactaaactccaaaaaaagactaaatttcgtgtcaaatgattgtgagattttaaaagaatctttggagaaggtgatgctatatctctgtgtatgtgattttcctttaaaaaatttttctttctaagcct

SEQ ID NO: 187861 - DNA, 633 bp, Homo sapiens
cacactatctagttactatgaagtaactatatctaccatatagcctgtggtagatagatacaaggaatctgccttatctgaggtattccccatccatggcagcaatcttccaatacagaggtacaaaaaggaataaatacctcaaactgggcctaccctgaaaggttatccagctcaagagtttcaaatggtcagtgaaagatctctgttgcaactgcctcacagtgcagcttctctttctgtccagtcctgcttctctcagctctcacaggtgtcaccaaaattactatccaataaaacccctatatttgttgtgatcccaaaaagaaattcagctactcctaaatgtttggtgtttacttggctttctgggaaggtaacatgtagttgacagtaatatgaaagatattttaggrccatttcatatgatcacaatcatatgatccattgaagactcattgataaggtgttatggactgaaatgtgactgcccaaaattcatatgttgaagcccaacctccaggaccttagaatgtaatcatatatggagataagtatataaagaggtgattaagttgaaatgaggctgtttttgtgtggtcataatccaatgtaactgatgtcattataaga

SEQ ID NO: 187862 - DNA, 576 bp, Homo sapiens
tgtaatactatatggttatacatgtaaactataatatatgctttaggtttccatcacttttttaasaatgtctctaccacaataattttcccccatttttaccatgaatgaacacaatgctttcccaaagatggatgtagatgtcacattttgcagctggcctgtctgctgatccctctacccaccacctttatgcatgcctgacatcagggatgcctttactgctcactgagaaaccttcctacccctcccctttcacctaccactgccttaatgggccctaaaaacccagtacatggcctgtatcctttagaaagaaaaccacagcctactgtagcctgttgtgacttccccaccttctaagtttctccaaaagttattctctatgccactttgtcactggttaactgaaacaacaaaacaaaatcctaaagtatatatcaaattagaattgaaagatatgaaagctaaaatctatgttctttgcacagaaaaacatccacctatttgaactcaaaaagattcttgataagttaattatagcccataagattcataaatcttaaaattttacaa

SEQ ID NO: 187863 - DNA, 576 bp, Homo sapiens
tgtaatactatatggttatacatgtaaactataatatatgctttaggtttccatcacttttttaacaatgtctctaccacaataattttcccccatttttaccatgaatgaacacaatgctttcccaawgatggatgtagatgtcacattttgcagctggcctgtctgctgatccctctacccaccacctttatgcatgcctgacatcagggatgcctttactgctcactgagaaaccttcctacccctcccctttcacctaccactgccttaatgggccctaaaaacccagtacatggcctgtatcctttagaaagaaaaccacagcctactgtagcctgttgtgacttccccaccttctaagtttctccaaaagttattctctatgccactttgtcactggttaactgaaacaacaaaacaaaatcctaaagtatatatcaaattagaattgaaagatatgaaagctaaaatctatgttctttgcacagaaaaacatccacctatttgaactcaaaaagattcttgataagttaattatagcccataagattcataaatcttaaaattttacaa

SEQ ID NO: 187864 - DNA, 328 bp, Homo sapiens
atccatattttacacatgatggaaatggaggtatggagagacatcaggttatctacccaaagttcttactctatatctgcactgcaccgtaataagccatgaacatccctaggaaacagcarattttattaattttatttagagaccccttagctaatgcagcacctgacttttaatacgtgattaataaatatttgtttttttaaactaaatgttcactgtgactaagaggcacaatatagcagtatgctttctggtatacaattgcaagctgtgaatattccaaaattttgccataaacctactaatatctacccaaatctagaag

SEQ ID NO: 187865 - DNA, 328 bp, Homo sapiens
atccatattttacacatgatggaaatggaggtatggagagacatcaggttatctacccaaagttcttactctatatctgcactgcaccgtaataagccatgaacatccctaggaaacagcaaattttattaattttatttagagaccccttagctaaygcagcacctgacttttaatacgtgattaataaatatttgtttttttaaactaaatgttcactgtgactaagaggcacaatatagcagtatgctttctggtatacaattgcaagctgtgaatattccaaaattttgccataaacctactaatatctacccaaatctagaag

SEQ ID NO: 187866 - DNA, 540 bp, Homo sapiens
ctgtcagtgaacattcttctgtatgcattttggtgtgtatttaatagcatttctgttagraacatacttagggccagaattgctgggttatattgtatgcttatattcagttgtaggagatattgccaaatagttttccaatgcagttgtaccaacctatgctcttaaaatcaatgattgagaattgcagttgctttccattttatactgaactatgtcgatcgtttttaactttttgccattttggtctgtgagtagtgctattcgtagtggttttagcttgtattctcctaatgattaaagttaaccactttaaaaacattcactggtcatttcaaatcatattttgtgaggtgtgaagtgttcaagcttcctgaccacttacttttctataggattttctatttttatattaaattatagaaattattcatatactttaaatatgagtcgtcttcagactatctttttgcctatctagctatcattttggtatctgtcatctgtatacacaacacacacacacacatacacacacac

SEQ ID NO: 187867 - DNA, 560 bp, Homo sapiens
cagtcatcaaactatgatctgcagaccacatggagtctgctgcttgtttttataagaaaggttttttggaacccagtcacattgatttatttaggtgctatagctgcttgtacaccacaatggcagaggtgartagaaaccatctcaaagcctaaaatatttaccatacatcccctcacagcaaaagtttgctaatctcgggtttagggactccattgagaattaaagtttaagatgcgtggctgccacccggaattgaccataataggcagaggaaacgtggacacccaatgttagactgagtacaactaactaattaaagcaaaaaactaaaacattatattgtggggtttgtaagtacatgggtgcgaagtatttgaaaacaacggcaaaaatgaaaaagaatttgaaattgcacaaagccaaatttcttatattttacattaagtgactcaatattaagtagaataaaaatgcatattgtaatctcttgagcaaccacaaaaattttaatacaaagaggagcatttaaaagccaatagagagataagaaagaacaa

SEQ ID NO: 187868 - DNA, 613 bp, Homo sapiens
gtgtgtataccccaaagatcagagatcttggatgccattttagaatcttacctacacattttcaatatacaatctgatccctgttttccaatacatgtctcttaaataaaattcatcaagacacagttctctgctgtcattactgtatgtcattacttagcaggtttatgaagtatgaaatgtgctggagttttagaattagcaagatctgagtttatatcccctctacatttgtcatggggttttgagtaggttatttaatcccycagatttcctcagttataaggctagttaatcctccagtttcctcagatgtaaaaactagggctaataattatctctaaggcctgcagaactttagaaaaagtcatacagtggaaattatcttatgatatacaggtggcaaatttcaagttcctgactttttcccttcttttgaatgttctgatatcactcctccaatctacctctacttactttttatgaatcctttgaaatgagaaatattgagatttatacacctcagaaataagttgattttcagtggataacattatctttttctgaacaattctaaattttgattctttttggaattaattcattagtgttg

SEQ ID NO: 187869 - DNA, 628 bp, Homo sapiens
taaatggaaatatttgaatatcaccgaggtaagcagtgattggtagtgtaaatctcttcccacgtcctctccccactacccactgcccctactcccagctcacctcctaacactttttcctgctttgcatttaggaggctctagtctgttcttccccttaaatctctctatattcyttctcttctctctttgaggttacttgtaatttagtcaaattttccctttccccatacttcctttacaagcacttgcacttcttccagggaaagacagtaccactgggttccagcagacatacagcacaaactgtgtatataccaatggcagtgaagagggacaagtcactttccttcttccttagatgccctagggtgtacccaaattgtatacaaacatcttttcatgccttttatttttatttccaatacaatgtttcatgtattttccaaatcattgtagaagactttactttttcttattctgttatactctcctctagcattatattatgagccctctgatttcaaaaacttttatcttaaaattcctaaataactttgagtgagcagtgcatagaatgatagttatgttgaggagtatgatcccttcaccacttttgatggcacat

SEQ ID NO: 187870 - DNA, 524 bp, Homo sapiens
ctaaacaaggggtggattattcatgattttccaggaaagcggtaggcaattcccagaactgagggttctttccctttttagaccatataaggtaactttctgacgttgccatggcatttgtaaactgtcatggcactggtgggagtgtcttttagcgtgctaattagaatataatgagcagtgaggaccaccagaggtcactttcattaccattttggttttggtgggatttggccagcttcttcaccgccacctrttttatcagcaaggtctttatgacctgtatcttgtgccaacctcctatctcatcctctgacttagaatacccatccttctgggaatgcagcccagtaggtctcagccttattttacctaacccccattcaagatggagttgctctggttcaaacgcctctgacattttcatttatacttttcacatatgtatcaacatataatataaaaatttaaaatgtcatatattatatattaatacatattatatttaccatcattagaatgta

SEQ ID NO: 187871 - DNA, 608 bp, Homo sapiens
taaaattcccatgaaaatttgggaacgaggggaggattcatatgtatctttttggtattgtatttctagcgcctgggagcttgctcagcatgcagtagttgctaaatatgtttttggatgactgagtgatggcatgatttgaatcagacaacattattttaccagccttggaatctgggcaaaagtgggctgcttaggagcaaagacacgagtctgtgtatttctgtggttgcctttccatggaaattcccattcaaggggatacctaatatgtaaggattaaagatgcctcctccatggattttccatggtgtctcacattctctaattagttattccttaaagttttgtccacctgtgtatctttagtggtatggcttcatgtcacctcaaatatggaggcattagcctttgtttagttcagtatataccagattatgggatggaaaatactgaagggatatcaaatgatcatacrtaatctaagatataattaaataataaacttacataaagcatttaaaaaaaatttagttctctttcccttaattctttcaatatttcaggtagagtcaaaggctggttttgtgctatcatgattttataac

SEQ ID NO: 187872 - DNA, 558 bp, Homo sapiens
acctttgggtgtttataagaatatatattctacattataaatcctttcctctataattaagccaattacagagacaccagactccttgacattcaaattggatatctgccttagttgcatttatttgtgagtgctctagagccctgaaataaatgaataatattcagatgttctgaaaatatgccattaatattttataacaattgttgtctaaggaccttacagcatgaaaatgcataagtaactgagacaaccagaataaaaatgtgggccaggaattaatacaaaatttcacatccttcaccactgacaaagtaagaaatgatgaagaataaatgtgtatgccagagattatggtcaraaatctgaatcagtaatctcagtggcatcttcgttgctattcggaagacaatgtgaaattattaacatttttccacaggattaccaagaagcttgctcttaacttgctactgcatactcaaagcaaaagaattcactaaagatgaaggtactttagactcccgaccagaatttctacaaaaaggctggtcagtgaag

SEQ ID NO: 187873 - DNA, 410 bp, Homo sapiens
gtcttatatttaagtccatgatccctcttgagttgatttttgtataaggtaggagatgggatccagtttcattctcctacatgtggcttgccaattatcgcagcatcatctgttaaatagggtgtactttcccccactttatgtttttgtttgctttgtagaagatcagttggctgtaagtatttgsgtttatttctgggttctctattctgttccattggtctatgtgcctagttttatacaagtaccatgctgttttggtgattatggccttatccaaagagtatatattatgttttattatggtgccaggcagtgacattggtacaactaatatatgcccttatggaactcaagatttcttatgttaaatacagaataaaggaagtaggaatatttatagctgttag

SEQ ID NO: 187874 - DNA, 410 bp, Homo sapiens
aggtatcgggtcttatatttaagtccatgatccctcttgagttgatttttgtataaggtaggagatgggatccagtttcattctcctacatgtggcttgccaattatcgcagcatcatctgttaaatagggtgtactttcccccactttatgtttttgtttgctttgtagaagatcagttggctgtaagtatttgggtttatttctgggttctctattctgttccattggtctatgtgcctagttttatacaastaccatgctgttttggtgattatggccttatccaaagagtatatattatgttttattatggtgccaggcagtgacattggtacaactaatatatgcccttatggaactcaagatttcttatgttaaatacagaataaaggaagtaggaatatttat

SEQ ID NO: 187875 - DNA, 593 bp, Homo sapiens
gtaagtgccaataattagtatcacgactagtttttaaagacaaaatgattggaggaaaaacaaaaacgagtaatttttttctcaatgatgaaagaatggttttcttactttctcaggagcacattatgtcaccaagagaatatgcactccrgaagaaataagatattacttggtgcatgaagaatttttttctatgcatttgttgcaaatgggaccttaatacaaatataaaataatgaagaccatgtggaaagagatagaaaatcttgactttatgggttactgttagcatacctggttcctggtaacccccagcggccttctaaatgaatgcaggccataccaagaataagtctatgaagaaactctctgtgctttgaaaaacatttgatctcttctctcatccactggagtggttttgccctccactatttttagatcttcacttgggaactttctccaagaggggttctccatacagactttctaaccacagggcatctgaaagtctcttgtaacattaaaaatggtttgaagtatattctaatatccttagagaaaactcttcccaaaacctgattaatcaattcctt

SEQ ID NO: 187876 - DNA, 547 bp, Homo sapiens
cattctactataaagacacatacacatatatgtttattgcagcactatttacaatagtaaagacatgaaaccgataccaaggcccatcagtggtaggctggataaagaaaatgtggtacagatacaccatggaatactatacagccataaaaaggaatgagatcatgtccttttcagggacatggatgaagctggaagccatcatcatcagcaaacatgtgggagaagaacaatgagaacatatggacacagagwggtgaatcacacataccagggacttttggggtgtggagggcaaggggagggaacttagaggacaggtcaataggtgcagcaaaccatcatggcacatgtatacctatgtaacaaatctgcatgttctgttcatgtatcccattttttaatgaagatgtaaagaaaaacaaaaattaaaaaaagaaatttgtcataaggaaaaaaatgaagaaattagcagtacaaatcacaaaagcaaaatggactgtgcagttggtattttctaagtgctctgtatgttaatgttttctaa

SEQ ID NO: 187877 - DNA, 547 bp, Homo sapiens
cattctactataaagacacatacacatatatgtttattgcagcactatttacaatagtaaagacatgaaaccgataccaaggcccatcagtggtaggctggataaagaaaatgtggtacagatacaccatggaatactatacagccataaaaaggaatgagatcatgtccttttcagggacatggatgaagctggaagccatcatcatcagcaaacatgtgggagaagaacaatgagaacatatggacacagagaggtgaatcacacataccagggacttttggggtgtggagggcaaggggagggaacttagaggacaggtcaataggtgcwgcaaaccatcatggcacatgtatacctatgtaacaaatctgcatgttctgttcatgtatcccattttttaatgaagatgtaaagaaaaacaaaaattaaaaaaagaaatttgtcataaggaaaaaaatgaagaaattagcagtacaaatcacaaaagcaaaatggactgtgcagttggtattttctaagtgctctgtatgttaatgttttctaa

SEQ ID NO: 187878 - DNA, 587 bp, Homo sapiens
gatttcagctactatgggccctcgtgcagggcacagaagtcctatttcaagaggttattaaagtatattctttcatctaagaaggtacatttttcaaaaattgtcaggatatgcagtattctaatattgtatcaaatggacacctgagtaacatgacctgacatgttaattcatgtcaaagttttattatgtctagaattatggtgagattcttgattaacaattcaaggtaatattggttggcaaatctttctattattggtgtaggaataagggctgattctgtctataatcaaaataactatgtttcattacactgcaatttaaagtaggtttatataattcaaaattctcagcatttyatatgaaatgtacataaaaatattaattatgtgagcctcctttcctcctcacaaggatgacactatttaagttatttcaacaaaatgctaattattatgaatacattttaaattttacggaacttgaaaaatactttaatagttatctcaacaatggtacggggtaaaaggtgaagtttataaagaagcagttttctcatagtaaacctgatcacaaattggtaa

SEQ ID NO: 187879 - DNA, 615 bp, Homo sapiens
tccttttcttttgctgtacatccttttcttattttatagcatttgtctctttctgtgccctgagtaaatcagtgtgccagccccacagactatatttttaaagcactcaaatacyctcccacaatatctacttatctctgatgtcttttacattttcaagtgtcatgtacacttttcaagatgccctcatgaagtcactgaagatggtgatgattgtttttatacttcaaaaagtaaacctatatcaaggttaagcaactcagctaggtgtaaggagcgtgaagcctcgaatccaaatggaactttgcactcctattgcccaatacagtgcttggcccaaaatggacctcaaaactgctagtggccagagagatggacaagtttagaaagtttcaatatgctgtagtgtctattttatatgttaaaaatatatacgaatcgtatcaatggaggattaaggacacttttttttttacatatacaaaaggcatgttgagaatggagttaagtgagagcctatatagtatagtgattgagagcatgagctttagtctcaggcagatttgggttcaaatcctggttcagcccattcccggttaggaaaccttgtcttat

SEQ ID NO: 187880 - DNA, 615 bp, Homo sapiens
tccttttcttttgctgtacatccttttcttattttatagcatttgtctctttctgtgccctgagtaaatcagtgtgccagccccacagactatatttttaaagcactcaaatactctcccacaatatctacttatctctgatgtcttytacattttcaagtgtcatgtacacttttcaagatgccctcatgaagtcactgaagatggtgatgattgtttttatacttcaaaaagtaaacctatatcaaggttaagcaactcagctaggtgtaaggagcgtgaagcctcgaatccaaatggaactttgcactcctattgcccaatacagtgcttggcccaaaatggacctcaaaactgctagtggccagagagatggacaagtttagaaagtttcaatatgctgtagtgtctattttatatgttaaaaatatatacgaatcgtatcaatggaggattaaggacacttttttttttacatatacaaaaggcatgttgagaatggagttaagtgagagcctatatagtatagtgattgagagcatgagctttagtctcaggcagatttgggttcaaatcctggttcagcccattcccggttaggaaaccttgtcttat

SEQ ID NO: 187881 - DNA, 514 bp, Homo sapiens
ctgagggcagagtgggcaccagtggggatgtcccaagaaggcagctctctacccctgtgaggagggcttttccagcaggccaggtggtccagggatgtggctttttcaggtagcagctgagcctggcaagccactcacctttcacagggaccatggaaagaattcctgtttgaggatgctggactcatggtcctgaggcccctccttgtgctggaaaccctggtttctaggatgctggtctctcctcagccctttcccgtggaaggagttrgttctgctctgatagccaccttcccatttcctattctcccactgagctcctttcaccttcccctaacaacttctccgtcaaggagcatgggaacaaagccattaccacctctctctagcctttgtgtcccgtctgtaagaggatggtctgaaaggtctttagaaccttaaggggaaaaatgtggtcatgtccccctttctcctctaattccaaagaacttcgctctcctccagcatcccccac

SEQ ID NO: 187882 - DNA, 558 bp, Homo sapiens
gtatggggacaaatgtgcctctctgcactaactgagcccccatgggcaactaggagtggtgtcacttggggtggaggtgggcaaggatctctggactgggatttccaagccctgacttcctgttatttcaggcactacctcattgttccatcttgggcaagacctgtccccttgagggtaagagacacatgtgacctctgacctccagagtctctcttctgagcttctgtgcccagatgattctgtgttctaggggacaggcgaggctggggggtgacccccatgccactgatgggcagactaaggagcaggggcccaggactggggccagctcaggactctggtggcctcggtgcccttgacctggtattgctgccgttttgccccactgctgtctgtctccgcgtccgagtcaccacctgtccctctccagtcctctcctctcttcctttattactatctctatmttgcctcctgcctcaggcttatctcctcctgtcatacctctatccacctctgtcactcccctgcgactctgcctcactccctggcacaccc

SEQ ID NO: 187883 - DNA, 558 bp, Homo sapiens
gtatggggacaaatgtgcctctctgcactaactgagcccccatgggcaactaggagtggtgtcacttggggtggaggtgggcaaggatctctggactgggatttccaagccctgacttcctgttatttcaggcactacctcattgttccatcttgggcaagacctgtccccttgagggtaagagacacatgtgacctctgacctccagagtctctcttctgagcttctgtgcccagatgattctgtgttctaggggacaggcgaggctggggggtgacccccatgccactgatgggcagactaaggagcaggggcccaggactggggccagctcaggactctggtggcctcggtgcccttgacctggtattgctgccgttttgccccactgctgtctgtctccgcgtccgagtcaccacctgtccctctccagtcctctcctctcttcctttattactatctctatattgcctcctgcctcaggcttatctcctcctgtcatrcctctatccacctctgtcactcccctgcgactctgcctcactccctggcacaccc

SEQ ID NO: 187884 - DNA, 587 bp, Homo sapiens
ccaacgtagaaacttccaccccttgaagaaagttcaacagcttggaatatcatgatcaagtgtcctgggtttcatggagttccttgcagactaggtcctgcatttttatagtggatgcttttcctcaaggcagtgaatatttctcagggcttccctaacgagtacagataaggctctatgtggctcctatatcaggatgagcatatgtcctaaagtgtcaaagggtcagaggtgcaggcactgaggaagaggtagkccaactgcactggctatggaggcacatgccaccaggaccaggctgtactgggggaaaaccaccagatagtcactggaaacatgagggttccatgggtccatggtttaagaaaaattcaggaaatcaaaagaaaaacaaagagatccattatattaaatagcatgggttttgtttcataatttctgaatcaaaagtcccatcaagtttcctcttctcttccttgagtcctgttccttttcccttccttgaccatccgaaatcaggagagactcaagggctagaagagcttcaatcctctcccctatggagtgaagcaattctagcacaaagc

SEQ ID NO: 187885 - DNA, 625 bp, Homo sapiens
atctgccttcatgtctcccctcatctcttggagaacctctttttgtaatctgcatgacaatcttcatagactttttgagaaatcccaaacctacccatgaagttgtttttgtctttaggattaatctatttttcgaactgtatttccttaagtttgagttattcagctcatagtgatacccaagggggctccagcaggagaatctatggtggaaggtttgggcattccatattccttagatctttccagaaggaagctttggtgttctaagtctcatagaatcatcaggaatcattcatctaatctacatggaggtcttcccaccaataaaatttagatatctatcttcttattttcttattgtctaactggtaatggttcaaacgcatacaaatagacctttcaaaaacawgtattaattcttaaatgcagtagaggctaaaagcataaggagaaagtggaaatatctttctaattgcctcagaatttgcatgaccttctctctgagaatagaaattagattttatttccaatctcttccttgctctctcttcaaagtgcattatttgaacctgcagggaataagaaattgacctgctgctgagccatgtacaacacacaagac

SEQ ID NO: 187886 - DNA, 469 bp, Homo sapiens
agatcttcctgggattctattcttctaccggggtgtgtacctttgaacaatttttcattgaataggctatttttgaaatttgtagaggtagaggttaacttattagaaaactgatatcattgcaaagattattttttgagtcaaagaactcccatgtgtaacaatgcgaagggataagatacaattgatgcaattggatgtgcttgatttctctctgayggaaaagacagccttgaatattgttgccctttagcatttcaaacatgtttatatctgttcacatatttatctcagaattctttttactgattatatttatccctgttcctctaaatcagtcttaataccttactgattttctttcattatttaagagttgaataaaatcattgacatttggtcattttatatttgtatgtgccaattttttaactttaaaatctttgttatgctttgtattttatatgtc

SEQ ID NO: 187887 - DNA, 583 bp, Homo sapiens
aacattccagtttctaaaatctgatgtaaagctcacagggttaggagacagagatagggaggtagtgtgcatctacccccttggtaggtgagctatgcctttgaccctctgaacagaactttcagaaaaagagatagccagaagctggtaaacaggtgcaaaattacagccaggtagaaggaataagttatagggttccataacaatgtaggataactataattaacaacaatgtattatgtattttcagatagctagaagaggggattttgaatgttcctcacacagaaaaatgacacatgtttggggtgatatatgctaattaccctgacttcatcattacccattttatacatgtatcaaagtatcacactgtactcccaaaatatggacaattatgtcaattaaaaataataataataataagtccagaaacaaagagttaagtcaccwactattttttccttcttggtgaattgatcttcagtaagcctttttttctttttcccttccaccaccccaaccctgctctctctgtttccttacccaagcttgtgtcctctagttttatgggtgttgctat

SEQ ID NO: 187888 - DNA, 570 bp, Homo sapiens
attatccctaacgaatcatgctttgttgcactgttgaagtgttcaatatttcagatcaagtcatgcagaactgttagacatgtctacattgggtaaatatcgggratttattaaaatctttgagtgtgtgtgtctgtatgtgtatgtgtaggagtgagtgtatgtgtctgtgtgtgtatgagttagctgcaacattaaggagtacaataatttttaacatataaatgttacagtgctatataagaaaatgatgttaatagcaaattcactttttaaaaattaggtaacctgaataataagtgatttagggatactcgctttgtagtggtcacatagcagagggaaacaaagttgaaaagaatataaaacatcaggaggtctgtataattaatcagcaatcctacaaagtatgccataaattagagctgtaattataccactgtgcttggaaaataggaggctggatttttatataagcattcaggtttatttctgaatacctatctccagcataatttttatataagcattcaggtttatttcttaatacctatctccacataatgtaaa

SEQ ID NO: 187889 - DNA, 559 bp, Homo sapiens
ttatgtggtatggaagatttcataaggaaatgaaggcccaaagacccagcctgagttgaatgcttatatagtgaattggagaaagattagtaaattgtgaaaatgtgacaaggctaaggggcttgggctagggcagttaattgggtagagaagtaactaggaagataagggttagtgtaacaaggtttgtacagatttccctcagccccaacttcccatcctcgatgataggagtattttttttttctcgtatagggaggacacctttcagatgggaatttcatcttctatttttaaaaagaggaagagtgatcttcttgtaccttctgtttttcaagtacctctaattcaagattgtcaatatgccagttggtgccttttgggggcaatgtgttctgaacttctctataactaaacacatataggccatccctgcaacttctgtactgatatcttccccacttccttcctttccttcctttggccttgcaaakcccaagtttgggaaatctaaatattctcttctctgcatctacataggagcagctactgagcatag

SEQ ID NO: 187890 - DNA, 552 bp, Homo sapiens
ggatatgtttaccaactcagaagctctccacttcatttagggatttttaaggaggcttcatcacgtaggcaagattgattatcaatccaatctccagcccctctcccctccctggtagacagtggatgggcctgaaagtcccaagcttctaatcatggcttagccttcccatcctgaagctactcaggaactctaaagacttgcctcactagagcaaaagacactcctgtcactccagaaattccaagggttttaggacctctgtgtcaggaactgggggcaaagaccaaatacaaatttcttatgtcacaggtagaaacagataagggatactgcttattacatatgaccagagtctccaaaacaaaggcagatgacaaggctgacaagagtttccccaacaatccccaccctgcatggwggacagcagagcatcactcattttccccagaagctactttagcaatgtgggtgtgtcgtggccttggcagaatcttgcaacttattagagatggagcttaagaaagggaaaaaggctgagcaaggtggctc

SEQ ID NO: 187891 - DNA, 405 bp, Homo sapiens
atttaagtccatgatccctcttgagttgatttttgtataaggtaggagatgaggatccagtttcattctcctacatgtggcttgcsaattatcgcagcatcatttgttaaatagggtgttctttcccccactttatgtttttgtttgctttgtagaagatcagttggctgtaagtatttgggtttatttctgggttctctattctgttccattggtctatgtgcctagttttatacaagtaccatgctgttttggtgattatggccttatccaaagagtatatattatgttttattatggtgccaggcagtgacattggtacaactaatatatgcccttatggaactcaagatttcttatgttaaatacagaataaaggaagtaggaatatttatagctgttagg

SEQ ID NO: 187892 - DNA, 403 bp, Homo sapiens
aggtatcgggtcttatatttaagtccatgatccctcttgagttgatttttgtataaggtaggagatgaggatccagtttcattctcctacatgtggcttgcgaattatcscagcatcatttgttaaatagggtgttctttcccccactttatgtttttgtttgctttgtagaagatcagttggctgtaagtatttgggtttatttctgggttctctattctgttccattggtctatgtgcctagttttatacaagtaccatgctgttttggtgattatggccttatccaaagagtatatattatgttttattatggtgccaggcagtgacattggtacaactaatatatgcccttatggaactcaagatttcttatgttaaatacagaataaaggaagtagga

SEQ ID NO: 187893 - DNA, 589 bp, Homo sapiens
gtaagtgccaataattagtatcacgactagtttttaaagacaaaatrattggaggaaaaacaaaaacgagtaatttttttctcaatgatgaaagaatggttttcttactttctcaggagcacattatgtcaccaagagaatatgcactccagaagaaataagatattacttggtgcatgaagaatttttttctatgcatttgttgcaaatgggaccttaatacaaatataaaataatgaagaccatgtggaaagagatagaaaatcttggctttatgggttactgttagcatacctggttcctggtaacccccagcggccttctaaatgaatgcaggccataccaagaataagtctatgaagaaactctctgtgctttgaaaaacatttgatctcttctctcatccactggagtggttttgccctccactatttttagatcttcacttgggaactttctccaagaggggttctccatacagactttctaaccacagggcatctgaaagtctcttgtaacattaaaaatggtttgaagtatattctaatatccttagagaaaactcttcccaaaacctgattaatcaatt

SEQ ID NO: 187894 - DNA, 589 bp, Homo sapiens
gtaagtgccaataattagtatcacgactagtttttaaagacaaaataattggaggaaaaacaaaaacgagtaatttttttctcaatgatgaaagaatggttttcttactttctcaggagcacattatgtcaccaagagaatatgcactccagaagaaataagatattacttggtgcatgaagaatttttttctatgcatttgttgcaaatgggaccttaatacaaatataaaataatgaagaccatgtggaaagagatagaaaatcttgrctttatgggttactgttagcatacctggttcctggtaacccccagcggccttctaaatgaatgcaggccataccaagaataagtctatgaagaaactctctgtgctttgaaaaacatttgatctcttctctcatccactggagtggttttgccctccactatttttagatcttcacttgggaactttctccaagaggggttctccatacagactttctaaccacagggcatctgaaagtctcttgtaacattaaaaatggtttgaagtatattctaatatccttagagaaaactcttcccaaaacctgattaatcaatt

SEQ ID NO: 187895 - DNA, 423 bp, Homo sapiens
gttgtttttggaaagtagactttttaaaagaggcataattccacccgttagcgattttacttatatttctttaatccacacttagaagtttctattatcttagattmaattttatagcacatatttcttctactaaaaagcctttaaagtgtttcagtgggatgtttaatttcccattatggttggtttctcaaatcattccttttgtaattgtcacatttttacagtcctgtttaaaacaaattcagtttttcaactaaaaatatcaagctgagttggaaatcgaaatccaaggactgcaaaatcaaatgataataaaccaaccataaggttaaactttccaaccaccacaaacttagagaccaccagaaatttgtgttacttgtttcttataaaatatagaataatcttttgaagattctt

SEQ ID NO: 187896 - DNA, 562 bp, Homo sapiens
cttactgcagcctctgcctcctgagttcaagtgttctcccgcccggcctcctgagtagctgggattacaggcgtgagccaccacacctggctaatttttctgtttttagtagagatggggtgtcaccatgttggccaggctggtcttgaactctcgaccttaggtgatctgcmcgcctcagcctcctgagtagctgggattacaggcgtgagccactgcacccggctctgagttgtttaattgatattttccacttttctatcctagcaaaccctcaatttgatgtagccaacagggaagctacgtttgcaaaattatgacaataaatgtattaggccattcttgcattgctataaagaaatacctgagaccgggtaatttgtaaagaaaagagttttcactggctcatgcttcttcaagctgtacaagcatggcactggcatctgcttggcttctgggtgagcattagggagtttttactcgtggtagaaggcaaagttggagcaggcacaccatatggtggaaggagaagctagagagagacttagttggggaggagcca

SEQ ID NO: 187897 - DNA, 562 bp, Homo sapiens
cttactgcagcctctgcctcctgagttcaagtgttctcccgcccggcctcctgagtagctgggattacaggcgtgagccaccacacctggctaatttttctgtttttagtagagatggggtgtcaccatgttggccaggctggtcttgaactctcgaccttaggtgatctgcacgcctcagcctcctgagtagctgggattacaggcgtgagccactgcacccggctctgagttgtttaattgatattttccacttttctatcctagcaaaccctcaatttgatgtagccaacagggaagctacgtttgcaaaattatgacaataaatgtattaggccattcttgcattgctataaagaaatacctgagaccgggtaatttgtaaagaaaagagttttcactggctcatgcttcttcaagctgtacaagcatggcactggcatctgcttggcttctgggtgagcattagggagtttttactcgtggtagaaggcaaagttggagcaggcacaccatatggtggaagsagaagctagagagagacttagttggggaggagcca

SEQ ID NO: 187898 - DNA, 447 bp, Homo sapiens
ctcatccaatccagaagctcacaaaatttcacccatcccagccctgaggtcttttggaaatcacccaatcactctgctattaagaagcctgaaaacacgtatcgtaaaccttgtcatctcacaaccrcttattctttgattgtttcctgtggaggtttcctgtgcaggggctgtgggttataatttacaacagcccccaaagcacccatatcatcttaatagaagtacaataaataaaataataaaacagccttgctcataaaatcccctttatcacatcctcattcaagcttaagctgttcttatctcccttgcggaataccaactggtcctcctctccattgcaatctactctgcatgcaacagccaagttttgttttgtttgtatatataaatatatatacatatagacacaaattacatcaactagcttaactgttggaattc

SEQ ID NO: 187899 - DNA, 436 bp, Homo sapiens
catacgctctgtccctctatctttgttcattcacatactgaacatgatatagaaggataattatcactacaataaaaaaccgtgctactaatctgtctgcatagattgccccatacaatgtccacaagaacacatgtgrcatgtgagctaagtatggctatttccccgtttctaaagaagaaactagtcttagagaggtcaacatgactaagccaatgccacacacctgcaagctgacagacttagattttgaaccctggcagcctgacttttatagccagtgcatgtaaccaccacaacagttcgcttcctgctgtgccagacactttaagagtttatgagatgcataaaaggaaatgtataccctcaaggagtttacagtctgaaaaggaaattgtgatgcacactaaaattcataggttgtataggaaaatgg

SEQ ID NO: 187900 - DNA, 436 bp, Homo sapiens
catacgctctgtccctctatctttgttcattcacatactgaacatgatatagaaggataattatcactacaataaaaaaccgtgctactaatctgtctgcatagattgccccatacaatgtccacaagaacacatgtgacatgtgagctaagtatggctatttccccrtttctaaagaagaaactagtcttagagaggtcaacatgactaagccaatgccacacacctgcaagctgacagacttagattttgaaccctggcagcctgacttttatagccagtgcatgtaaccaccacaacagttcgcttcctgctgtgccagacactttaagagtttatgagatgcataaaaggaaatgtataccctcaaggagtttacagtctgaaaaggaaattgtgatgcacactaaaattcataggttgtataggaaaatgg

SEQ ID NO: 187901 - DNA, 612 bp, Homo sapiens
gtgggcaagttaataccaatgtcaagcttctttggtaatgataatgggatacatttatacagggctaactacaggccaggcactctcttaagtgctttacattttattaactcattttatccttacaacccatgaggtagatacggttttgctttttttttaatgtccttcatttaacaatgaccaaactaaggcatgaagaagttacatattgcctaatgtcacatgaccatttctccaggatggagctttataattttgataaccttaaatattgccataggtgttatcgcagcatcagtacacctttaaagcaaactcttgttctttatggccgcaagattagtgacacaaatatttttaataatgtttagaaagaggggggagggatagcattgggagatatacctaatgctagatgacgagttagkgggtgagcgcaccagcatggcacatgtatacatatgtaactaacctgcacaatgtgcacatgtaccctaaaacttaaagtataattacaaataataataataataatagtaataaaaaaagaattataaatcattaagtcacactgaaatacatgtgaaaactgcctggaagtcttttagg

SEQ ID NO: 187902 - DNA, 534 bp, Homo sapiens
ctcttttgatttcatttaggcccattcatgtcttgatgcaccacttgttaaattcttatgcacatgtaataaagtcctggcttagaagtgaaatgcaaaccctgatcataatttttttcttagtatttgtctatattgtagatagaaaataggtagtattcttattagcaaagcctgtttccactgaagatatagtttttcaaatctgatcaatgtcaaaggacttttcagaaagctytctcattttgaaagaatcttaatgggtcttcaaaatagggaagtcagcagaagattttgagggttttgatatcagggctcaagtagcttaaggcaagcacctcaaggtgagaaactaattaggataggacaaagtaaagatataataatttacaattggtggtctcagtaagatgagagtcttgaagtgagtttgacaaatgagatgtttgcctacatgagcaatctaatgtcctcataggagaactgatttgcccagatgagaaaactgtttgctcagatatattggtttgtagg

SEQ ID NO: 187903 - DNA, 614 bp, Homo sapiens
atttgacccactgcagtgggttacagaatcagtgccacttaccatttgagcttggacaagtctctcaactgcttgggaactccagttctttatttgaaaagatgggagtttcgcagaattatggtttgatccctctgagctgtaaaatgtcatgattcttttcagtgctaactggacctcaagggaaataacccactgacctgttttctcattaataccattttgtgaacaacaagactaaatattcaactgcactggagaagtgaaaactttatgattttacaggcagggttttattctgtccctcaaaatctggcagatggtgaaatactgggaacatagagaaagcagcttctattacatctcctgtatttcatagagggagagcctattccactcttacccagataattgtgtaggtgtgtagctgccaaaatcctaaaaccagacctgacccatgactaggactgcagataaattttagtatgccgytgggtgcggtggctcacgcctgtaatcctagcattttgggaggctgaggtgggcggttcacgaggtcaagagatggagatcatcctggccaacatgataaaaccccatctctaccaaaaata

SEQ ID NO: 187904 - DNA, 401 bp, Homo sapiens
tttctatttgtatttaaaatggagtctcttctgtcgcttgaaaatttagttttttgtctatagcaaggccgttaatttttgttgttgattaattttgttcccaatcatgtcactgtattctcttgttataagacgtcaagatgattttcttgagtttttcaagtatgtcatatctttttcaaataatgatagcattatttccctctttcccatttttatgccacacttatatttgtgataatgaacgtccttgttttcttcctaacttcaatgaaaagttataatattgtatttctattcattctgtcatmttttatgctgttttctgttttattgctctattttttctgtgttgtgtatatttctttgcttttttgtgtgtgggttgggtatcttactac

SEQ ID NO: 187905 - DNA, 596 bp, Homo sapiens
gcatttgcctgtggttatatcagcaaaactctttatactgttcttttcttatctccaatccattgggtggattttgacctctctttttctgtagttgggctgttttaataaacatttatttgaacacatgggttttgaagagaaacacacaaacaagawaattttatcttggtgccccctttaattattatttgtcaaggtcaaaatagctaaaattaaaatctgttataaaagtttacattttattgaaaaggttacatttccagctttaatcataactgaattgcataagaccagtaaaatgctggccccaaaaaatgttgtaaacaatgatcattcattgttcacccaactatgatacattttattttctggatattatattaagagcttaacttgaataagaagtcaatcaaactgaatatactgtattttaatgtttagtttttgtatgtctaagtaaatttactaaattttgctttcattacataaatttcttgcctcctatatatgcccattctcaatcaatttaattaattcttattaaaacaagacaaattacaaagagttcatctgaaattgtactgcaaatggta

SEQ ID NO: 187906 - DNA, 565 bp, Homo sapiens
cacaattagacaagatacagaaataaaaggcacagccattagaaggagataagtaaaactatwgctatttatagatgatatgattatacatcttgaaaacccaaaggaataaaataaaaaactcctacaaatagtaacataactcaataagatagcaggggaaattaacataaagaaatcactagctttcttatatacagacaataattagaagataggcaggaaaagccccagtcacaatacaaacaaaatgatgaaataactaagaataaatttaagaaatatgtaaaacctatatgagggaaattctaaaacatattctaggctaaatagattcaactttataaacatataaattctaaattaatttatgaatataaatgttatcccaatatctataggaagaaagctttaaaacacattctagatgaaataaattcaatcttataaacatctaaatcctaagttaatttatgaatataaatgttaccccaatatctaaaaacaaaaatgataaaagttcctgaaaaaatacatggcaggggagagacgaacaggcagagca

SEQ ID NO: 187907 - DNA, 634 bp, Homo sapiens
tctgttattatgtaagaacagccaaacaataaaaccccaaaaacaccatgaccaaaattcaaagaactttggatcaaactccatgatcccctacctcttaacacttttccttatagcagcatcttttgttgagcctgaggaagagcctttgtattacaaggctgcccacagcaagagctcaaggtatacttacatgttccataaagaccctctctgtgaacacagtagcctggggtctgtaggggttggcactgcaggagttgagaagtaggcagaccattaactccacaggcagaagtaattgaacagttattcctagtgagattcacgacattcatgaatccacaagcagtgtgagattttcccttttaaattggcaatctataaaacctaagcttctggatgagacaggcaggtagtttatttcaattgaaagttgtattgattttaacatmtacctgtgttccatttatcacacaataaatgtacaatatattaatatttaatgagcattcaaaatatgttgaaattgtcaaatatttatggataaatattcatagacaacaagaacaatagaacacataactaggtaacattattttctaggagatggcaatgtaattgtcttacatgg

SEQ ID NO: 187908 - DNA, 634 bp, Homo sapiens
tctgttattatgtaagaacagccaaacaataaaaccccaaaaacaccatgaccaaaattcaaagaactttggatcaaactccatgatcccctacctcttaacacttttccttatagcagcatcttttgttgagcctgaggaagagcctttgtattacaaggctgcccacagcaagagctcaaggtatacttacatgttccataaagaccctctctgtgaacacagtagcctggggtctgtaggggttggcactgcaggagttgagaagtaggcagaccattaactccacaggcagaagtaattgaacagttattcctagtgagattcacgacattcatgaatccacaagcagtgtgagattttcccttttaaattggcaatctataaaacctaagcttctggatgagacaggcaggtagtttatttcaattgaaagttgtattgattttaacatatacctgtgytccatttatcacacaataaatgtacaatatattaatatttaatgagcattcaaaatatgttgaaattgtcaaatatttatggataaatattcatagacaacaagaacaatagaacacataactaggtaacattattttctaggagatggcaatgtaattgtcttacatgg

SEQ ID NO: 187909 - DNA, 582 bp, Homo sapiens
atcattttatctctttttctattagtcttgctcagaatttctcaattttattagtaatctaaaatatgcaacttttgtattcattgtttttaatggcttatctttttgctttaattcattaatttttatttgtattattattcacttcctactgccaatttttacagcttattaaattggaaacttaaattattaattttgccttttttatttctaagcacttagagttataaatacagctttggctgcattccacagattttgatatcttgtgatgttgtttacattaagatcaaaatatttttccaatttctccaggagtatctkttttttgaccaattgatcttttttgacctattgcttatgtagatattttgttttgtaagttcccattatttagtgcttttccaaatatctgttttctactgattcttaatttaacacattgtgggcagagaatggattctgtaagatttcaatctttttgaatttattgagatttatttgatggcacagcatgtggtctatcttggtgaaatttcatgtgcacgtgaaaaacatgcataagttctgttgctgttg

SEQ ID NO: 187910 - DNA, 595 bp, Homo sapiens
ctaacttcctactaaattcattttagtaaaagcaaaaaataatgaatgaaataaatgaatgtaatttcaagttattgccagaagttagacttttattatcatggcattaactcagaagagaaacatcttacttttcccaaattacaattttattttagggaacccttttcctcctactctgaatttcaatctaatattgttttcaaattagcttttattgttttacttttaaagtaatattattgtatgcttttaaagttttactccaaaagkaagaaaaataaaaaaaagttgcagctttaaaaaatttctaaaatatagaaaaatgacttacagcataatttaaaacagttctagtgaacatttgatttgtagagagcttttggtctgagagctctctgttacctgtgactaatcagtacacaaaccaaggggcagcattaggaatttttataacaacctgatattttcatagtatttttactgtattttccaaatattgtcatctgctatggtccagagaggaaaaacattctttaacacagaaacattaagaaacattgaattttaaaagacataggtcttactttcttaa

SEQ ID NO: 187911 - DNA, 578 bp, Homo sapiens
actgtttgttgggtagaattttctagtaatttcaaataggtcaattagttcaaattggttgatagcactgttcaatatgctttctaactttttgtctacttgttttataacttattaatagaaaggcatacacattttcaactataacagcacatttgtccatttcttctgtttggtcagtttttgtcatgaatgttgaagctctgtcactagatacataaatatttggtttgttctctcatcttactgaattgatctttcatcatcatccaacaaccctttttatttcaggtagtgttcactgttctgaaatctatttcatctaatatcaatataggtcctcctgtttggtgtgggttaatgtgggactaatctgtttttcatccatttatcrttaagctttttgtatactggagatgtgtttaaaatagtatttctactttcagccaaggtatatttaccctttctaccacaaacaactagaaaactggacaaaacatatgaaacagttgtttccaacacagaacatcatgcagtgcagagcagtaactcctgaaatagtggaaacaagtgaagtg

SEQ ID NO: 187912 - DNA, 578 bp, Homo sapiens
actgtttgttgggtagaattttctagtaatttcaaataggtcaattagttcaaattggttgatagcactgttcaatatgctttctaactttttgtctacttgttttataacttattaatagaaaggcatacacattttcaactataacagcacatttgtccatttcttctgtttggtcagtttttgtcatgaatgttgaagctctgtcactagatacataaatatttggtttgttctctcatcttactgaattgatctttcatcatcatccaacaaccctttttatttcaggtagtgttcactgttctgaaatctatttcatctaatatcaatataggtcctcctgtttggtgtgggttaatgtgggactaatctgtttttcatccatttatcgttaagctttttgtrtactggagatgtgtttaaaatagtatttctactttcagccaaggtatatttaccctttctaccacaaacaactagaaaactggacaaaacatatgaaacagttgtttccaacacagaacatcatgcagtgcagagcagtaactcctgaaatagtggaaacaagtgaagtg

SEQ ID NO: 187913 - DNA, 608 bp, Homo sapiens
aaataaattcctctctttgaactagtagatgatctactagttgtgtaagttgtgttgctagagccttcctaatctctgccctccacaatatcataacawgggagtggcagggccaaatgaggaaatgcacagaaaagccatagggcaggagtcagaatgtcattgtgacagtgccaattaaacctggatgggattcagtttacatcacgagaaggactcatgacaaatcaggttccactctgagcaaggccagaatacagacacgtcatggagcaggttatttcttataatgtgttctgaagcaacggactaacatcctagaggctggctgatccaccccacactcccaactacttcctgacactattcttcaaagattatctggtctggaaaaaaagtactcctatttaaaaatgagtaaccacagcaacaaacgctatgggagctacagaatcatctacatcagaattaagagggatgaaaaacagccaggagaaaaataattcaagccataaaagctatacagcaaagcaaatttaaattatgagttttacataagtgccactggaaatacaaaaaaaattgaaaagtctaatttcaatgtttca

SEQ ID NO: 187914 - DNA, 608 bp, Homo sapiens
aaataaattcctctctttgaactagtagatgatctactagttgtgtaagttgtgttgctagagccttcctaatctctgccctccacaatatcataacaagggagtggcagggccaaatgaggaaatgcacagaaaagccatagggcaggagtcagaatgtcattgtgacagtgccaattaaacctggatgggattcagtttacatcacgagaaggactcatgacaaatcaggttccactctgagcaaggccagaatacagacacgtcatggagcaggttatttcttataatgtgttctgaagcaacggactaacatcctagaggctggctgatccaccccacactcccaactacttcctgacactattcttcaaagattatctggtcyggaaaaaaagtactcctatttaaaaatgagtaaccacagcaacaaacgctatgggagctacagaatcatctacatcagaattaagagggatgaaaaacagccaggagaaaaataattcaagccataaaagctatacagcaaagcaaatttaaattatgagttttacataagtgccactggaaatacaaaaaaaattgaaaagtctaatttcaatgtttca

SEQ ID NO: 187915 - DNA, 562 bp, Homo sapiens
aaatacaaaaaaaattgaaaagtctaatttcaatgtttcaagttcaaacaagatatgaaaaacaacaaaattataaagtgaaaaataagctgaaaggccttagtgaagaaatggaagagataaacactaacattgtgaaagcaaaagtcacatttaaaggaataaaatgaaaatcagtcactccttaaagcacagcaagggtgaataagatcagcttccgaaaactgagtggaatgaaattgaaaagacgtgcttaacacgtttgagaaaaagaatagatatagaagagaaaggaaagtcacatacaaatggtttaactccctgaaagggataaattgaacagaaaataatcagttacatgtatacagtaaacaagaataggggtgaaaccaaccaaaatatgtggtggaggccagggtcaggaatgggggagataaacagacattgtatagacaccatatcartcagggaacaatcagagaagtagagtcgttgagccacatttattatattgattggaccttctacaattgtggaagctaagtcatgtatgtaagactgt

SEQ ID NO: 187916 - DNA, 562 bp, Homo sapiens
aaatacaaaaaaaattgaaaagtctaatttcaatgtttcaagttcaaacaagatatgaaaaacaacaaaattataaagtgaaaaataagctgaaaggccttagtgaagaaatggaagagataaacactaacattgtgaaagcaaaagtcacatttaaaggaataaaatgaaaatcagtcactccttaaagcacagcaagggtgaataagatcagcttccgaaaactgagtggaatgaaattgaaaagacgtgcttaacacgtttgagaaaaagaatagatatagaagagaaaggaaagtcacatacaaatggtttaactccctgaaagggataaattgaacagaaaataatcagttacatgtatacagtaaacaagaataggggtgaaaccaaccaaaatatgtggtggaggccagggtcaggaatgggggagataaacagacattgtatagacaccatatcaatcagggaacaatcagagaagtagagtcgttgagccacatttattrtattgattggaccttctacaattgtggaagctaagtcatgtatgtaagactgt

SEQ ID NO: 187917 - DNA, 490 bp, Homo sapiens
gtgtgtacactccaaattctgtcttattgctcaatctggtttgttctatgatttggaatatgtcactttacctttctttagtgtcattttatcccttcatagtgcttacaattttcaaaaacacacttctgacttaaatgaaatatatagtcaaagataaacaatataacaaatayttccagtgctgagtcttttttataatgtagaaatgtaacaacttgattcctgcgtttgaaaaagtttaaaagaaaatgacattttctcaattgcaatattgctcaaaatagaaagatggacagaactcttgtggtgattttcgttccaactaaccatccagctagggaaggagtcagatattatgcaaaaaaggaggaaagacacttattttgatcactgatttctactttgaacagttagtatttttagtcatgcaagatttatcgggaaatctaaaagttcttaaaaagatgataccactatgtataatcaa

SEQ ID NO: 187918 - DNA, 390 bp, Homo sapiens
ggaattctaaaagaagatggaaagaagacctcagtaaatgctggtgagtccttaattttaaayagtcaagatattttgataattctgataattaagaggggttactaggaagtattccttagctataggtaattatataataatacaacaacaatcaccatctccaccatcacggctactaagtggcatttattaagaaattattatgtttcaggcatagccttcgctcttaatcaatgctctattgtgcatcctgtgtcttcccgaacgaaggtattgtttttcaatcggtttatgtattagtttaggatctactacgaggagcctgatagctgcagttcctactttggaaaacactgcttgaaaatcccattcacactccagacatgg

SEQ ID NO: 187919 - DNA, 578 bp, Homo sapiens
agacacttcgtaccatacacaatagcaccttttcccagtgattcagtgaagcgctgatattagtactgctgtgaaaggatctggcaggtgtaattaacatcctaattagttgactttaaggaggtcatttggcaccattgtagaaagcccccactaggacaatgcttagtggaggcttggagagtgaggcttcccccaagatgccagacctgcagagccacaagtgtgcaacaactctagcctggaagagctacagaacctaactccaaccgctgagagctgccgtgcagcctgcacccagcaaagtgatgatggtgggctgccccaggccttaggggaccaacctccaccccagtgtgtccagatagtcatgcatagagtcaaagaagatttttctcaagcctcaagatttcatattgtttgccctatkgagttttgaacttactcagggccttttactactttcctcttatctatttctgctttttggaattggaatatctatttaatgcttgtcccaccattgtattttggaagcacataagatgtttgatttcacaggctcacagcttagagag

SEQ ID NO: 187920 - DNA, 616 bp, Homo sapiens
gattacacagtggactctggggactcagggggaagggatgtgaagaggatgagggaaaaaagactataaatcgggttcggtgtatactgctcgggtgataggtgcactaaaatctcacaaatcaccagtaaagaacttgctcatgtaaccaaataccacctgttcctcaaaaaacctatgaaaataaaaaaaatctaaagcctayggaaacacacacacacacacacacacacacacacacacacacacacacacacaaagaaagggcccaggtccttgggaaaagcattcctgggttataaacctggcaggtggctgggagaagatttacatctcaaacgaccagataaataatttacaatgtaaaattatctaaactaaatgctctaagaaaagagaggtcaggagcttcaagtcaggaagaagcttgtctcaaatttagccaagcttaggggaatattaagccttttgatcaaaccactttatacttcttgtgacctcttcatcaagtgctgctggcttactttcatagaactagggtttgggagcacatttacttttctgaatataagttttatttatttaatcatccactcattcattttcagaagacact

SEQ ID NO: 187921 - DNA, 607 bp, Homo sapiens
tcatttcctccggtaatgagcaaatgacccctgctgtttctgcctcatttttcccatctgtgaaatggggataaggtagtactgctatggtttagatatggtttgtttggctccaccaagtctcatgttgaaatttgatcctcagtgtcggagatggggcctaatgggaggtgtttaagtcacaggggcggatccctcatgagtggctaggtggcatccttactgtaatgaatgaattcttgctccattagttccctcagaattctcacaagagctgagttgttaaaaagaactaggcatctttccactcctcctccccaccacttgtaatctctgcataccagctccccgtcccttcctgctgtgagtagaagcagactgaagccatcaccagaagcaaatgctgtgagccgtgctttttgtacaggctgaagaaccatgagccaaataarccttttttctttatcacttgcgcagcctcaggtattcctttacagcaacacaaaaacgcacgaagacaagtacctacctcagaggtattagaaggtttacataagttattacatgaaggttacttagaacctagaaatcgttaaggctcaatatt

SEQ ID NO: 187922 - DNA, 562 bp, Homo sapiens
ctgtttaatttgcccattcagcatactgctccctcagaatatatgccttagttaaaatgtatcagcaaattattasgataaaaaagatatggaaaatgaaagatataatggatttgaaattgttaatataaaaaaaaatcctggccgggcaaggtagctcacgccagtaatcccagcactttgggaggccgaagtgggcagatcacctgaggtcaggagttcaagaccagcctggccaacatggtgaaacctcgtctgtaccaaatacacaaaaattagccgggctgtggcgtgtgcctgaaatcccagctactcgagaggctgagacaggagaattgccttgaacccaggaggtagaggctgcagtgagctgagatcgcgccactacacttcagcctgggctacagaatgagactccgtctcaaaaaaaaaaaaaacaaaaaaaaaaaaacaagaccaaaaacaacaacaacaaaatcgtgtttcaaaaggaaaaccaaaagaaagagatggagttatgagaaaacaaatcaaagatgtttactaatgtagactgagacac

SEQ ID NO: 187923 - DNA, 622 bp, Homo sapiens
cacatgctgcaatcctatgagcattctccagaggtttatcatagctgagctttacaggcatattctgtctctctcatggatggcttttctttcttttgsccaagttagctcctcctccatcctccagccttcaattggctcagtcacttcttcaaggataccattcctaatctctgatttgaggtgaaactcccttaaaatggagtctcatagtcaatgactgtcaatgatgtcaatgatgcagtttcatactgtacatgagagaacattagattatcatctattctccttgctaagtgcacgttcagtgagggcagggacaatgctttggttcaccagttgagtcctcatcagttagtacaatgcctggcaccaaacagacaactaataagtatcagtcaaataaataccaaaataatggctatttacaacagagggtagtaatgacccctcatagcaggtagcatagtttactatgtgccatgcaattttttgggcactgcaaaaatgcagtctcacaatgagtctttgcactaaagagatgtaataatatctcttaagccccattttacagaggtgaaaatgatgaaaacatagaggttactatggtctgaatgtttat

SEQ ID NO: 187924 - DNA, 422 bp, Homo sapiens
tcctaccagccccatagtagctccagatggttttaaaacaaatttaaatatagagcagagaccagtgaaagaaggcatttcaacagggtacctaaatcttgaatactccatgatagaaatgcccacaataccggatatgcctaataagatgcttgacagtgaaatctgcaaggcttccagaaaatcttcaatggttttgccataatgttgtcaggtaatgactataaagcaaatcagttagtcttctgctcaagcctcctytcgttatagacaatcacctcaagtggtgatgacactcatttgtgtaacagtaacagtgacgagaaagtgaagagctatgaattccactccttctccccagactcctgacattgtaatctgccatccttaattgaatcctgtaaacggcacttaaagccaag

SEQ ID NO: 187925 - DNA, 422 bp, Homo sapiens
tcctaccagccccatagtagctccagatggttttaaaacaaatttaaatatagagcagagaccagtgaaagaaggcatttcaacagggtacctaaatcttgaatactccatgatagaaatgcccacaataccggatatgcctaataagatgcttgacagtgaaatctgcaaggcttccagaaaatcttcaatggttttgccataatgttgtcaggtaatgactataaagcaaatcagttagtcttctgctcaagcctcctttcgttatagacaatcacctcaagtggtgatgacactcatttgtgtaacartaacagtgacgagaaagtgaagagctatgaattccactccttctccccagactcctgacattgtaatctgccatccttaattgaatcctgtaaacggcacttaaagccaag

SEQ ID NO: 187926 - DNA, 597 bp, Homo sapiens
ttttagagcaaaatgaaatatattctaagatcagagtcagttcaagaagcagtatttaaaatccatattttatctcatcctttgactctctgaagaactttaaagtttatctcaacttctataagatgtggtatgtaaataaatacacatttactgtatttgtttatatatgtgcccttacacattcatttatgtcttaatatgttaaaggcaccttaagttacagcttctgtcagctactttttaattgctggggaaaaattcagtatttaagtacttcaacttttcagcttgactcttacatgtgaacagagtttgtgaacatgaattattaatccatgccattaacttccatgcagtggcatcagcgattctcttggtttgctccaaaagataagcaatataaatgttttctatggtttctgtaaaagcaaaaattaagacagcagaaaggccctctgggaaaacaagggctactgccacaamaattggaagaatcacaaattcctgaacttccttaagtaccttctgatattttgggaggatttgatgtttatcttgactttgagtgtgaatttaaatcttttgtgtttaaat

SEQ ID NO: 187927 - DNA, 461 bp, Homo sapiens
gagcacttttctgtctgttaatccattgaattaaatcttcacaagaactgtgacaatgaggcattattctcccctcaattttgcatttgaggaaattgaggcctggataagttaagtgacttgctcagctagaaaatgacagcgtgaaaatatcaacccagttttttwcactatatatttactgctctttttgcttaagtaagccatttcttagtagaacttaacagcttttactttcactataaaacatacttagctagccaggtgtagtggtgcatgcctgtaatcccagctatttgggaggctgaggcaggagaatcgctgaaactcaggaggtagaggctgcagtgagctgagatagcaccactgcactccaggctggttgacaaagagagaccctgtctaaaaaaaaaaaaaatgccaaacatatttgccattatattttcattcctgctggaaat

SEQ ID NO: 187928 - DNA, 625 bp, Homo sapiens
cttatagtccaaatgttctaacaaaactagacaaaaacattttgccttagaagtcacagtgctacttccaaattagtcacaggctcactcaaagggaggaaaaataaatctcacctcttgatgaaggaaagctaacatcatattgcaaaaaaagcatgtgagatctgccatctctacaaaatataacctactccaatttkttttctagaaactagtaaattgaagtacagacatgcttcagatgaaatccttctttctatagctattatttgagattttacaatcaagacaccaaattacttaaatttatatttgatgggccaacataaagataactaaaatgaatttaggcttgggactttgcattgatttgggatgcaggaaaaatatctaggcatgataaaaactaaattacccatttctttcctcaatgcataagaggaggctaaatacttgatgaaactgtatcaatgcctttagggtacgatattatcatttcttaaattgctactttggcaaatgtgaagaccagaattattaaattatactctgctatctggaacagaactcctacctatacagcaaattttgtactaatgtaacagtgaaacataatctcaagctt

SEQ ID NO: 187929 - DNA, 625 bp, Homo sapiens
cttatagtccaaatgttctaacaaaactagacaaaaacattttgccttagaagtcacagtgctacttccaaattagtcacaggctcactcaaagggaggaaaaataaatctcacctcttgatgaaggaaagctaacatcatattgcaaaaaaagcatgtgagatctgccatctctacaaaatataacctactccaatttgttttctagaaactagtaaattgaagtacagacatgcttcagatgaaatccttctttctatagctattatttgagattttacaatcaagacaccaaattacttaaatttatatttgatgggccaacataaagataactaaaatgaatttaggcttgggactttgcwttgatttgggatgcaggaaaaatatctaggcatgataaaaactaaattacccatttctttcctcaatgcataagaggaggctaaatacttgatgaaactgtatcaatgcctttagggtacgatattatcatttcttaaattgctactttggcaaatgtgaagaccagaattattaaattatactctgctatctggaacagaactcctacctatacagcaaattttgtactaatgtaacagtgaaacataatctcaagctt

SEQ ID NO: 187930 - DNA, 385 bp, Homo sapiens
aaacatgttggacgatttaatacaaactgacttggattttaacagctgtgctattcccatagcggtcacttttcatgtggtctgagtattaaatttcttttgtsctggaaaggttgcttcattggtgcacgtatttccttacagtagaaacgcagcatttacttacttggctaccttctttatttgcttaggagattgtcattctctattatctgcaaacccaacattaatactttaaaatgacaaatccaattacattttcatttctgtgtatttgaatttttcttaatgtatatttagtataatacatgttatacagagtcatgtcatagttgttgtttcaaaagattggggctaaaaattacttttaaaaatttatcctttg

SEQ ID NO: 187931 - DNA, 603 bp, Homo sapiens
aggggccttctgaagagcaagggggatggcccaggacacaagcctgaagtgacctgtctgagccaaacatctgtttaggtccacctgaatctcagcagccttgtcaaggcaggtgagatcagccctgggtatcagtgacagtggaggccggcagctggtgggtggggaacacgcgtgaactaaagggagtggataaagaaagagacttctgtgtgcgaatctttcttggtggatcaatagggaggtgaagtctttggcataccctcaaacccagcttgtgagattgcaatcccagtgaagttgggacaagttggcactgctcgaccaggccacccaatacaccatgtcccttttccaccacagctggccctggatgggggtgtggactcccatagagtctagaggatgggaccctaaccagtagtggtgctggtgtgtggcatgaagggagctaggggaggccctccaggtgggaggaggagccagcctctcttgtgggaccytgggcaagtcactgccatctttgggccaccgtttcctcatctggagaatgcaggaagtctgttgtgcaggcctttcagggtcatgataaggtgcaacgga

SEQ ID NO: 187932 - DNA, 593 bp, Homo sapiens
acagcatatttttggatattgtttactgtgaatccacttatgcattttatgccttttgtatagaaagtttaatgaatttatatttaaagtaattactgtagaaaaagaatttctattgccattcaattattttctgtttcttatagttatgtttttttctccttttccttcttactgcctttttttgtgcattgttgattttgaatggatatattttgatttcttttttatcttcttttgtgtacttcccatagatattttctttgtgatcatcaggaggaatagagagtatataaaacactttaaaattatgtaaatatattttatctcataacaacttaactttaattgaatacaaaaaactacctctttacatctcttctttgccttattatgttaaaacaataaaattttaccttattaatttttacaacatatacatttttatattgtgtacttattaacaaacatatttgcaaatttttagtgtttttatttttacaattttatagcagaattatgtgtattttatrcaccatcattatgataatagaaaattctctatttttttgtatacttacctttaacagaga

SEQ ID NO: 187933 - DNA, 593 bp, Homo sapiens
acagcatatttttggatattgtttactgtgaatccacttatgcattttatgccttttgtatagaaagtttaatgaatttatatttaaagtaattactgtagaaaaagaatttctattgccattcaattattttctgtttcttatagttatgtttttttctccttttccttcttactgcctttttttgtgcattgttgattttgaatggatatattttgatttcttttttatcttcttttgtgtacttcccatagatattttctttgtgatcatcaggaggaatagagagtatataaaacactttaaaattatgtaaatatattttatctcataacaacttaactttaattgaatacaaaaaactacctctttacatctcttctttgccttattatgttaaaacaataaaattttaccttattaatttttacaacatatacatttttatattgtgtacttattaacaaacatatttgcaaatttttagtgtttttatttttacaattttatagcagaattatgtgtattttatgcacyatcattatgataatagaaaattctctatttttttgtatacttacctttaacagaga

SEQ ID NO: 187934 - DNA, 582 bp, Homo sapiens
aataatatttcaaaatagggaaggggcataggctgtgcgctatgaagtctaaaacaaatatcttggttaaagtacaagtacataggatgtactcatacccttatatctaacagctacataggatggggcataacaaagagttattagcacaaagcaaggagtcttgaaggaagttagtctttaaaagaaactattatttctaacacttatgaattattctttaacaaaaaaggaaacgttgaagggaaccttttttactttctacaggtatgtttaattctgcatcttgaataataagcrgtatcataaataattccaggtaggaattgggaaattattataaaatgattcccttatcttctgattcctgtgcccctggctctgtttttttgtttgtttgtttgtttgtttttatttttgacactatggcaagacccagaaaatgtctcccaataactgtgtctaggtctctaataaaactacagcaagaaacttttctttttgaggcgctaatgagagccagaaaaagaaaacagccaagaagagtaagccacacccagctgagggacatataaaaaggca

SEQ ID NO: 187935 - DNA, 582 bp, Homo sapiens
aataatatttcaaaatagggaaggggcataggctgtgcgctatgaagtctaaaacaaatatcttggttaaagtacaagtacataggatgtactcatacccttatatctaacagctacataggatggggcataacaaagagttattagcacaaagcaaggagtcttgaaggaagttagtctttaaaagaaactattatttctaacacttatgaattattctttaacaaaaaaggaaacgttgaagggaaccttttttactttctacaggtatgtttaattctgcatcttgaataataagcggtatcataaataattccaggtaggaattgkgaaattattataaaatgattcccttatcttctgattcctgtgcccctggctctgtttttttgtttgtttgtttgtttgtttttatttttgacactatggcaagacccagaaaatgtctcccaataactgtgtctaggtctctaataaaactacagcaagaaacttttctttttgaggcgctaatgagagccagaaaaagaaaacagccaagaagagtaagccacacccagctgagggacatataaaaaggca

SEQ ID NO: 187936 - DNA, 574 bp, Homo sapiens
cccaaaattcttcctggtaaggactcagagccagatggctgcattttctttctcttaacttattccccttctaaccatataaatatattaaaattgcaacgttggccacaccaatataaataagtgaataaataatgtaatattgtaaaaaaagacaaaacaacttgcacagtctgatgacagctytgtcacatatgttcattaaaaatgttcaagagagaatttggaaagtataaattttaaaaataaaaataatacttttagtttgtttaaagttaaaaaaaaatgtttgacaataatttgacacatagaaaatttaaatcttagctatcctgaaacttcaagtctctagaatgagtccttctccaaaggttcatgtcactcaaatattattacagtttagtaacttttaatgcaaaaaacttttaatgaataatgcattttatgaaatattatagatttacagagaaaggactaatcactataatactacatatattaattttataacattatatatcttattatatatgcactattgttgtaaccgagtgagttatagagaaaagccaca

SEQ ID NO: 187937 - DNA, 579 bp, Homo sapiens
attcatacatgtaagctccaacctcaactgcaatcactgtctaattagggcagtcactgcctcacaggtatgctgatgtttagtataaaagtcaccattccacctgtgaactggttctatatatgagagtcacaatgtcaactttcaactgatctggatgtgatattcagaatttccacaatggactgtgtctatacgggaagatgacatacctcaktgtatgttctgggtgcatagagcaatcacaatgtcacctgcgtgctgggtgtttataagataccttctgtgccacttaagagcttcgtatggtctgcatgagaatgaaacctgctctgagaccttaatgatggtataaacccatgatcctacatgttgccctaagttcaggtatgagagtcatcaatgtgcctgtgatctgggtccagaaatgagaaaccatctcatttgtggatggatccagatatgacagtcacaattccaactgtgaattgtttctgtgagtgagaaccaggacctcatgagtgggttctgttcacctttaatcctaacttgggctgtgtgcatacaaaagtcccaata

SEQ ID NO: 187938 - DNA, 609 bp, Homo sapiens
tgaacattaagcatttgaatatgacattaatagattctttcagagatgaaaaggctgcatgattaagataaatagttcatggtttgggatatctcacctttgatttttttatctctatactgtttcataactgtttattttttgcattattttttttgtcatcacatttctttttccattctctgagacaaattttttggttaaagacaatttactggttgaaaaatgctaaacaccaaacagtgatacaaaaaactttagtcttattttcctctaaaatctgtagttcacagaaacatccctcttgtcaattcaaaattttcaagtggaatataataaagcaaaccaactataatcagagagatttggggcataatcacatcccagtggttgtttaaatgggattttttattcaaattcaaaaaggtataggtatttttgttgcaaacagtttaatagatgtatcagtgctttggatatgttggtagaaattttaatcttctcactgtacaaatcattaaaagcaaacstattctattcaagccataagatacaaagtatgatttccagatacttaagacacatttataagaaactcataatttcctt

SEQ ID NO: 187939 - DNA, 585 bp, Homo sapiens
ggagtagtagtggaagaaggaataactatgagatactgcacaattactagggagattaagttacttcaagcaattacagggcttatcaacctgagggcccttgaaatttccaactgaataattccttgttgtgaggagatatgctgggtgttgtaggagaatttaggagaatcactggtctctacccttgagaaaccagtaatacaagtcattactaccaaaaaatgtatctagacattgtcagatgtcccctaggggaaaaaaataaccccagttgggaattactgggttagaaaatgtgatatcattaattagaaatcctgtagcaaacagttgttgtgtgtgcgtgtgtgtgtgtgtgtgtgtggtgcatgtgtgtgtgtgtgtggtgcatgtgtgtgtctaygtgttttaacaaagacacttactattagttaacttttaaaaccagagaggaaagttatttccactctattactcattaaagaagagtaatgattaaacttactacccacccaaccaaccaaatttttcctatttcatctctacccttcactgactccttctcagagaaaaaggtatttt

SEQ ID NO: 187940 - DNA, 315 bp, Homo sapiens
ttttgtgctgggttctgcaatttatgtagctggtcctgcatgcagatttccattatgaaccaacaccatttcagggcttggaagtggtgactgtatcatgccatcaagcttgaaggtagtaccactgcaccagctaaataatcaggggccaaagtgaagataggagggaagagactaagtctcgagcttcagtcttcaatgttatgcagacaccatcttccatcaggctycaaaaggctctgacagcttcctggatttaaccatccaattctttgttcagtccaaccctgagtaaagtagccaaactcagtgctg

SEQ ID NO: 187941 - DNA, 577 bp, Homo sapiens
aggcaattttcccctttcttttttgaaaattgatattcaaggtgtcttttactgagatactggtttacactgggaaatccatactcaatcctcattagaatgagtgaggattttatgacagcattcgtataaaaatgactgttttctatgtcggaaggttggtcttcagaatcctccacttggctacaagtcatgggcccattaatcccagacacagaatttctgcatgaaaatatgctccatggcttcatttattgatgacatcatctaagtgttttctccacaaggttataaatgcattgcttggccatattgaatatttgctgatggaatgcctaagtgaaatatgataatgttctgctcttctctccttgtgatttcaacacatttcaaatcaaagcattggcctatcaggtcagctggactgcatygatctttggttttcctttccctcggagactcagtggggacggcgtaagcactgcaaaaaatcacttcagaggaagcactcagagtggggaaggaaatgctttaaataatgaataatggtgttgctgatactaattttaatcatttg

SEQ ID NO: 187942 - DNA, 577 bp, Homo sapiens
aggcaattttcccctttcttttttgaaaattgatattcaaggtgtcttttactgagatactggtttacactgggaaatccatactcaatcctcattagaatgagtgaggattttatgacagcattcgtataaaaatgactgttttctatgtcggaaggttggtcttcagaatcctccacttggctacaagtcatgggcccattaatcccagacacagaatttctgcatgaaaatatgctccatggcttcatttattgatgacatcatctaagtgttttctccacaaggttataaatgcattgcttggccatattgaatatttgctgatggaatgcctaagtgaaatatgataatgttctgctcttctctccttgtgatttcaacacatttcaaatcaaagcattggcctatcaggtcagctggactgcattgatctttggttttcctttccctcggagactcagtggggacggcgtaagcactgcaaaaaatcacttcagaggaagcactcagagtggggaaggaaatgctttaaataatgrataatggtgttgctgatactaattttaatcatttg

SEQ ID NO: 187943 - DNA, 451 bp, Homo sapiens
tagcctctgaaacagtcccaggtccagatgtctttacaggtaatttgttcaaattttcaagatgcagttgattcctaacttacacaagttgtctaaggaaaaaatacaaaaaaacaaaatctacctagcttgttatatggtgctagtgtattcttaactccaaatatagataacaacaaaagcaggaaaatatatagaaataataggcacatttcatttgtgaacataggtgtaaaaatataytcactaactgaattgaagagtggataaaaatataaatcaggactgtgcatagtagtacacacctgtgctctcagctacgtgggaggtcgaagcaggaagatagcttgagcccaggagttttaggctgcagtgagctatgattgcaccactgtacttcagcctgggcaacagagagaagtcctgtctctaaaaataatatatatgtcaa

SEQ ID NO: 187944 - DNA, 456 bp, Homo sapiens
ccctggtaatcaggaccagtcacctcactgaatgcagtgaccccttttctatacaatggtccagctacataaggagctcagaatggccagaggcagcttcagcttccaattcactaggaccatgactcttttagaagtagtctttctttgggcattagcatctccagaacattaagcagaagtacttccaatgggttatttggtgtatcagtaagacrggccactctcatctccacccttggttcccatacctgggcattctggctataagggatgacactatattctagccattggttttgaggcatatataccatatcatgaaggagagcactccaaatttgtagaacgttgccttcccaccatcttcataactgagcctttggcaggccatcccactattctgttaagtagctgcttctagatgatgttgcacatgataatgccaatgaattc

SEQ ID NO: 187945 - DNA, 456 bp, Homo sapiens
cccagccctactcaagagagtggggagttttgggtccaaactcaacctgaaaccaattgtcaagagagccctttggtgtcattcataggtcatccccccagagcacagaacaaggtagagaggataaagactgtaaccagagggcaaagatattcagctctgtagatattattgtcccttttttcagataaagaaactaagagtccaaaaagcaaaaatatcttgcctgaagtcacacagctggaagaggaagctgaggttmaaatcttccattttaaaacttgtgttcttctctaggccattagcaccacatggaggaagagaaagcctctgggcttcctgccaggcagaattaggttcatctgagatgcaaaccaattaccagcttaaaacattttcttacattgataagtgaaatccaaagttccctcctgtggtcattaaaattaaaactta

SEQ ID NO: 187946 - DNA, 576 bp, Homo sapiens
gtgcaactcccagagagctgaatggataaatacactgagtactcagtaaaatctacctcaaaagaattattctgatttttgcttagttagtatttgttcttcctaattgtattaagagaaccagttgtttccagaggtcagtcctggagaatgccagcaagccctgggatctttattggctgggatcttcatgttggctctgatgctacactgaccaacaaagttaccacaggtctcacacagctattgagcactgaaatagggccagtccaagtggcatggactgtgtgcagacaaagtgactccatattaaatgttaatagctatgttgacttattaacctcagtcccaggaatgctttctgattcccactctatttactgtcctcaatgtgagaacatgtacttgctataaatcccgcctttacatcaaagcaaccttgatgttattgcacaaattataggctatgaygcacatagcattcttgccttttctggagggctgcctttaattggctatagagcacatatgccctttctctgtggtatataagctcctggtctgaggagtaatggt

SEQ ID NO: 187947 - DNA, 293 bp, Homo sapiens
ttggaaatgcagaaatcacccrtcttcttcatcgatcatgctgggagctgcagaccagagctgttcctatttggccatcttcttccctccacccctgcctcaaatagacctatatatttttttaaaattgtgataactaacctaaaagccttgactacaccattatgcaatctatgcatgaaacaaaattacccttgtgcaccataagtttatacaaatttttatttttttaatttttaatttttgtgggtgcatagtaggtatatatatttatggggtatgtgatatgtttt

SEQ ID NO: 187948 - DNA, 293 bp, Homo sapiens
ttggaaatgcagaaatcacccatcttcttcatcgatcatgctgggagctgcagaccagagctgttcctatttggccatcttcttccctccacccctgcctcaaatagacctatatatttttttaaaattgwgataactaacctaaaagccttgactacaccattatgcaatctatgcatgaaacaaaattacccttgtgcaccataagtttatacaaatttttatttttttaatttttaatttttgtgggtgcatagtaggtatatatatttatggggtatgtgatatgtttt

SEQ ID NO: 187949 - DNA, 293 bp, Homo sapiens
ttggaaatgcagaaatcacccatcttcttcatcgatcatgctgggagctgcagaccagagctgttcctatttggccatcttcttccctccacccctgcctcaaatagacctatatatttttttaaaattgtgataactaacctaaaagccttgactacaccattatgcaatctatgcatgaaacaaaattacccttgtgcaccataagtttayacaaatttttatttttttaatttttaatttttgtgggtgcatagtaggtatatatatttatggggtatgtgatatgtttt

SEQ ID NO: 187950 - DNA, 533 bp, Homo sapiens
gacctgttgtagaaactgttcaggttccattatcaaaatgagaaaaatttgttggaccaggtggatataacttaaaaaacttcaggctgaaacagttgtaactattagtcaggtggatgaagaaacgttttctatatttgcaccaacacccggtgctatgcatgaggcaagagacttcattgctgaaatccgcaaggatgatcaggagcagcaattagaatttggagcagtgtgtactgccacaataactgaaagcagagatactggtgtaatggtaaaattatatccaaatatgattttggtactgctttataacacacaacttgatcaaygaaatattaaacatcctactgccctaggattagaagttggccaagaaattcaggtgaaatactttggatgtgacccagctgatggaagaatgaggctttctcataaagtgcttcagtcttcagctacaactgttgtcagaactttgaatgacagaagtagtattgtactgggagaacctatttcacagtcatcatctaata

SEQ ID NO: 187951 - DNA, 600 bp, Homo sapiens
gctgggaaagagtgaggtaaagggaatgggtagttgaggatggttttctccattgtgtttttccttgaatgactggatatgtgctagtgacatttattgagacgaagaaggctgggagaagagacgacatgggggcataagattaaaagtgggaagagttgtggaggaatttatgggttaggccagtggaaacttccatctttatcccactggctaaaactcaacctcacagccagatctaactgcaagggagactggggcaggtaatctaggtgtgtgacctcaaagagaagaaaagtttggtgatcatctctcccatggtgcaccactggccacttgattcttaggtacgaaagcttctcaacctaagagtcattcaactcacgacttgggccaggggtcctttcttctcagtcatgacctcactcagccacttgggagctgagccagyccacatttaggtaagacctgagctagaatttggagtaggttcccctcctttctccccctgagttcagttaacttatttttatcctgtagctctaactctggactcaatctttttttttcttttttaagagacaagctcttgctgtgtcc

SEQ ID NO: 187952 - DNA, 616 bp, Homo sapiens
catagttttttcataacacacattttctatgaacttgtgaagagccctcatacacctctcacttactttgtataatttactttmaagctgcaaccacactcaaggtgtggatcacagctatcctggccacgtgcaaggaacaaaacaaaaaacgactttaagatggaagatatattaaaaattagggctgacttagaagtgtagagcagctgtgtttaataaaaaatcatgaaactaggaaataaaagacctaggttcaagttctacctctgctactcagttgtggtaggaccttggtcaagctatttaagatttctaagcctagtttccatatgtataatttaagaaccattcactcattctcatggtttttatggtatagagggagagttaagtattaaataatcatacaacaaatgaatgaggatttgaagacaactaatatggtcctttcagagaatagaacaaaagtacctgacctccttcgtagcaggtgatgcttcaacttggatttgacagatgagtggtcattaattcactgaaaggaggaaggagttaagaggaagtatattctaggagaaggtaccaccatgttcaaaggctccgtagtggcagg

SEQ ID NO: 187953 - DNA, 578 bp, Homo sapiens
ttatttaatgtctttaagttttagtcaggttcaactacatcatttgcagaccccagtacaaaaggaacatgtgagccccttgttcaaaaggcagaaaaaaattgccattaaaggcattaaaatataaaatgttttcttacttccctggtatctttcttgatctggaatgatgttttttatttgctttttaatggcactttccttttgggcatgggaatactttctcagcgaccctcacatgacctgggggccttgccccaccattcagtgtaaatrtgactcactgctgacccactgacttccaggttctccctttcatcagctgcctaaccaatatgcagtgccccagctcatagccccaactcacactaatggaaaatcctcaaaggctttgcaacatttgtgcaaattagacttctgcggtagaagatattctggaggttccaggagccacggtggggaaatatattgggagcaacaaaattctaacacagaaagatctcaggtactttatatctgggtgtgatcttggagctctctagtcttatccctgggtgaaacctgaaatttacccaggc

SEQ ID NO: 187954 - DNA, 599 bp, Homo sapiens
tggattcagtggctgtcatttccattgttcagtctacagggtcatatttacgacagaagatctgacaggagaacatttgtgataagaaaactgagaagttccatgagatgctgctaaaaaatttccgtttgagtttcagattccatctgaaaatacctcctctatacctttgtatttaacaaaataactcttaacgtgacctctcagaggacattctatgagctcctatgccaattaaaagacatttagtaaattgggtgcctctgaagagatgtacaaatttgttagctttacctctggctgtagctaaatgaacaggaaattcttaggggaaaaaataaagcctctgtaaaagcgaatgtattgtgtgggtaccagagaaatgcctcaagctgagatttgcagagaagacccattttataaagggctatattaaattaagtaagtgcttggagtctctggagagagacactatgaagatatttgaatgagcacaaagttaagtagcaatgaatgtagarttttctattactggtgttttctccagtgtattttgtaagccctttgtgaggcagtaatacccactgcatcagaaaatc

SEQ ID NO: 187955 - DNA, 376 bp, Homo sapiens
gcttctactattgtctctttctcttaaccagctgagtaacattgagtgattcatgtacaatcacattgattgtcagtttcctcctttgaaaattgaagggtttgacctagaagtcaccttcaagtttcttccagctctaatattctaagatggtttgattccatccagtgtataatttcatagcaaatgttgccctttatcatctgattgcttatcagcatactataatgaggccaaagcccgaaagatgttttatttggcattcctctatactgctagcctaaatarctaatatttatgcatgggttgccatttgtaaaagtttcatttgtgaaagtttaaattgcctgaggaaggagaatactctggctcaatg

SEQ ID NO: 187956 - DNA, 376 bp, Homo sapiens
gcttctactattgtctctttctcttaaccagctgagtaacattgagtgattcatgtacaatcacattgattgtcagtttcctcctttgaaaattgaagggtttgacctagaagtcaccttcaagtttcttccagctctaatattctaagatggtttgattccatccagtgtataatttcatagcaaatgttgccctttatcatctgattgcttatcagcatactataatgaggccaaagcccgaaagatgttttatttggcattcctctatactgctagcctaaatagctaatatttatgcatgggttgccatttgtaaaartttcatttgtgaaagtttaaattgcctgaggaaggagaatactctggctcaatg

SEQ ID NO: 187957 - DNA, 454 bp, Homo sapiens
gttatctaacaaaattaatcaatgttgagattatgtttattaaatgaaggcattaatatagaattgaaataccttgkggtaaaaatggaaagtctgaagcatctgctcggtcaaagcggtagcgttaagatgccctgtataacaatcttacattttgtgtagttggagtgcagatacatttctcatttcttcaaaacaacgaaatgtatgtgaaaatactttgactactttggaaaacttacaaatgtgagttactaccaaaaagaattttatatatgcttgccaatagttttcagaaaacaaattaaattatctttgacacattgcaaacatactgaaaatgcctttgagtccattataaattaaggtatttagcaaatgccatattgtcttctaaatatataaaattaacaagcataaaaggcgacacactcactagaagattaattatgtt

SEQ ID NO: 187958 - DNA, 583 bp, Homo sapiens
gcactgaatgttaccgactcataagttatacttctctttcctcatgcatcttctcagagatgtaggaattcaagagagggagactttctgtgggtaagtggtaatgtggagatgatggaagacttactgattttggagtggcccttgaagggaaggaagaaatgaaaatgtgygttcagagggatcaggcactgtaagaaatggggagtgctcgaagaaaggcagtggcacagagagtttgagagtgccattttaaaattcagtccgtgctaaaatacaacttctgttactgacctgccatgttatcttgagtaagtcacttaacctcttcagctttgatttcttcattacaaatggaaacaatagtaatgcacatctcatggttattgcctgggtaatatagataaagaactagtgagatactcagcagctactaaatggtcaatgcaggtagctgttgtgattattattattataagtccttgtagaagtgagtgtgtgtgtgtagtgggggtgatgcactcagtttggccagcacaaagtgtctttatagaagaaaggtaggaaaaaagtttgaaaaagc

SEQ ID NO: 187959 - DNA, 517 bp, Homo sapiens
atctagtacatggatagtgtttatttaaatatgtacaaatataaatgtcctcatgagatcaaagtataaaataagtataaaataagtatattttttaaaccaaaaggcagatgaacatacacactgtgatggttagtactcagtgtcaacttgattggattgaaggatacgaaatattgatcctggctttgtctctgagggtgttgccaaaggagattaacatttgagtcggtgggctgggaaaggcagacccatccttaatctgggtgagcacaattgaatcagctgccagtgcagctcaaataaaaagcaggcagaaaagatgtgaagagagactggcctaccctygcagccaacatctttctcctgtgctggatgattccacgcctcaaactccaaattcttcagttttggaagtcagactggctctccttgctcctcagcccgcagacagcctattgtgggaccttgtgatcatgtgagttaatactgaaaaaactcccctttaaatagatat

SEQ ID NO: 187960 - DNA, 580 bp, Homo sapiens
tagattacttgaaaggtgtccagacaggtttccctgcttcctgtyccctccttcattcaagtcctctgacacaccacttctagattattcatgaaaatataataaaaattgtcacacccacttaagagcattcttatttaattctgtgttatctactaaagcaattccaatatctctggctagtttaagaccctccatgactccatgtgactgatctctccagctttcttaccactcctcagcacttaaactgcattgaaacgagtgtcattgaagtcacacaagcatgtacctaaactccagcttctaagcctttatccatgccaattcctcaaactaaaatgttctctttctcttttttcccaaagatgtgcatttttcaaggaccaactaaaattccacctatttagagctttctctagcatttcaagtctctgttaaactttcttctcacctaaatacaacagcagctaaaactcgatgatggacaattgattattgcttcttaatttttcaaagcattgtttgttttaatctcccaaccaaattaaaatattcctaaaggcagaaatcatgtctc

SEQ ID NO: 187961 - DNA, 580 bp, Homo sapiens
tagattacttgaaaggtgtccagacaggtttccctgcttcctgtcccctccttcattcaagtcctctgacacaccacttctagattattcatgaaaatataataaaaattgtcacacccacttaagagcattcttatttaattctgtgttatctactaaagcaattccaatatctctggctagtttaagaccctccatgactccatgtgactgatctctccagctttcttaccactcctcagcacttaaactgcattgaaacgagtgtcattgaagtcacacaagcatgtacctaaactccagcttctaagcctttatccatgccaattcctcaaactaaaatgttctctttctcttttttcccaaagatgtgcatttttcaaggaccaactaaaattccacctatttagagctttctctagcatttcaagtctctgttaarctttcttctcacctaaatacaacagcagctaaaactcgatgatggacaattgattattgcttcttaatttttcaaagcattgtttgttttaatctcccaaccaaattaaaatattcctaaaggcagaaatcatgtctc

SEQ ID NO: 187962 - DNA, 605 bp, Homo sapiens
ccagcctgagcaacttagtgagaccatatctctataaaaaatttttgaaaaaatattagccaggcatggtggcacatgcctgtagtcccaggctactcaggaggctgaggaaggaggatcacttgagcccaggagatcaaggctgcagtgagcccagatggtgccactgtgctctagcctgggtgacagatcaaaccctgtctcaaaaaaaaaatttttttwaaaagcttttgaattagctttataaaaaagcatgcagtggatattcttctaagacttgtcctttattccattctgtgtttctggacttcatctctgttgataaacatagctgtagttcattttcattgccattattcattttgtttatgaacaattcatttgccatttagtgtctgattaatattattttggctttggtgttttgccatcacaaacaatggtactaggaactttctggtaaacgttttttagagcacatgtacaagaatttctctagggtatgtatcagtgggtgtgagggtaggtacatcttcacctttataggataaaccaaattgtgatccaaagggatggttctaattttcattcagtctaacaggctt

SEQ ID NO: 187963 - DNA, 379 bp, Homo sapiens
gaattctaattaattgaatttttaagaggcagaacctgaaagtataattttttgcaagtgatttattagatgagtttttagaaagaacccaaaggaaaagagggaagtggggcagggaaragatagtagccaagctcggtatactgtcaagcaaagttccacagaaggtaaatttgattcaatcctatagctctggagagaatacaggtcatacctagagttgtctcacaactaggagcacgggagctggagaagttataccctagaagccagtcatttattggttaatggctgctcctgggggtatgtaaattcctaggtactttcagttctctctttgtgaagataaattagctataacagcttgaggacagtgtcc

SEQ ID NO: 187964 - DNA, 528 bp, Homo sapiens
ggaacaataaattgcttgttttggtttcttaaaaacctttatcaggtcttatactggacagatgactccaaagaatccatgataggtaaaattagagtcagtggaaatgtcacaaccaaaaacatcacggggctcaatctaataccatctactttgcttccgtaagagcttacaacactgctgggacagggccctcaagccccccagtcaatgttaccaccaaaaagtctcgtaagtatgcatacactccaggaaacaagattcatctgtgaagagcaacctattcctttgcttgatgttcatttcattcccacacctcatttctttactaattggttactttggttagttggtttgtcccttaaatatggatacttgttgaaaccttttggtaacaatcaaggtaattgttttcatatttctggaattccaaaagaggaatatyccaagtatatcgatgaaagacagaagagcataatgtttaagactggccctgacgccctccttctaaatgcattcaaaaactga

SEQ ID NO: 187965 - DNA, 626 bp, Homo sapiens
gtgactgaaaaaattctgcattcagcactgtcactgtctagatttgtaatctgatatttgatcttccattggaaagtctgaaaaagcagagctcacatttaccaaaatctctgcctgttctaattggctaagctaaagagaagacagaggtattttctttgtttgtttgttttctcacatgatcatccagtcatctactcaagagatagtgcctcccatgagccatgcctagagttagatgctgagggcctaagagcaattaaaccaagcaagatctttgccaaccggcaatttctcttttagagaagaggcaacctaaaacaagaaaaaaagacaratgaataaaataatcataaattatgaaaagaacagtgaagaaaataaatgagaaactaagatgtacataaggagcatctatatgggataggctatgtattttgatacaaaattaaagataaagaggagttaaaggacaaaagaacttccagacagaaggaacagcatatgccaaacttcttaagtattattgttgctgttgatgatgatgatactagtattattaaacaaatatcagtgattcatctgcaagtaccaaagcctagtggaaatgatggatttccaaaaga

SEQ ID NO: 187966 - DNA, 601 bp, Homo sapiens
catttcaagtcctgaatacaatcataaaatgcaccaacaaattttctacctgtatgaatcccactgtgaacatttaattaaaaaaacaactagagaatttctccacttcaatgacttccttaaactttctggctctctaaatcttgtaccagccatgacttgactaagctacaaagctcgtcagagactagtgtgaattatgttccttggaggaatataattagtataaatcttgtgtttcattcttctctggaatgctcataattaatgttggtttgctttgctttccttggatatgaacttttccctccattttgccagccacgtaaataaagggtgaacaacaaaaaaagggcaaatatggaaaaaaggggccattaaaaagtagctgcaacatatgttcattaaaaatatattgattcagttatatgtttggcagcacccacacgtgcacacatacacacacgccaactccccggaacatcrtttttgtttttacaaaacagtctttaagcaaaaaaaagacaagctgtttcaatgccagaaaggagatggcttggtatacccagaaccatgtctactgcaccatgtgggtgaatta

SEQ ID NO: 187967 - DNA, 547 bp, Homo sapiens
acagtaatcaagtcaaagtgctcgtccacaaggagctaccattctagcggaagaaacatatcctaaagaaaaatacaagtcaataaatactgtgtcaggtggtgataaatgctatggggaagaaagagggttagtgatggctgaagtgggtctgctgtttatatagggtggtcaaggtgatctggcaacatttgagcggagatctaaaggaaatgagtcatgcagagatctgcaggaaaaaacatcacaggaggtgggaacagcctatgcaaaggccctggggtgggcacatctatggtatgttggagaggcagcgaggagtttagtgtggctggagctgagtgagtgaggggagataaacttaggtgacaggggttagatcacggagggcctcgtggtcatggcagraacttcggttttgactttgatgaaacagggagccactaaaggacaactcccagaacccatgtccttaattgctatgctatactactgatggattacgtgaatgaatgccgaaaggtacttgtggactttttctcattaa

SEQ ID NO: 187968 - DNA, 601 bp, Homo sapiens
aatttacatgcaaagcgtgtaagaaaagtaaaatgtgtttgtagtgaaagattataagaaggcatgggaatgtaaatttttgcctagtttagagggttaaaggattgttttgaattagataagataaagctgaaacttgaaataaattatggaaggtttgtaaaaattagtcttacaaaataaattgtatgtgtgaacatattgactaacttcaaaaatgcattatatggttttgccataaattgaacatcagaataaaagcacaacaaggttgtattagggtactgatctactctttaacaaacatttttaaagggttatacaaagtttatgagaatctcacctcrtggacaaactggttaagattgggtagaattatctataaagtttcgttttaaaaaattgggttgacattagtagtagactaatgaaagggtgatatttggctttctccccattgattttcatgtaataataaaggataaggaaagattttggtttgccttgcaaatatactaccaaaaaaaaaaagaagaaaacaagagatagactagttggaaaactaagtcctccctcttaatgagtaaaggtttttgccttg

SEQ ID NO: 187969 - DNA, 630 bp, Homo sapiens
gtactctcatggacgaaggctgtacatttcattacatctatgcccaaatggctatggtgtgatgataggaaaaatatcagtaatacattaaaggtatcttaatgcaaacatgccaatacagagacatcactaaagacatctgggaaagcacagcaataacctggcctgggtcatattaaattaagagctacatgggctgagtctaaaggaatgctttaatttaaacagcaactagggtcaaagttgtccacaaccagtttcctaagcaggtagttctgaccacagactaaagcacagcccataacttatggaaagaacaaaataactttgactggaccctgcacctgtgtactcagatggtaaccaacagcatgattctcaagcacacacaccagtgacacagtcatcacaaatttcagccattatcagagactcatcccatatctggagcaggaaaaaataataagctagtccaaagtgtctctggttattcacttctagctttattccattgtggtcagatgagataactgatmtgatttctattttaaaaaaaattttgagacatgttttgtaggttaatatgtggtttattcttgagaatgtttcacttgctgaggagaagaatgt

SEQ ID NO: 187970 - DNA, 543 bp, Homo sapiens
tgcctacattatatttatgtttcttcaaatcctttttgaaaactcttgaggaataaaaaaaattctaataggtatctacaaacccatagaaataaatatcatatacatgcatagaacatgtacttcactgttaggagataatattttgcataatttatttttacattttgcacagtgccaagtataawttctttgacagagatggtgctcaattactttactaaaaatagaaagatattctgttgatgcaatgcattgagacatgagaagaatggagagaaaggtgaattgtcattgttaaaagaatggcataaaaaatcctctgtttgctacctgtaaattttctaaaacccaaagcagaagggaagggtgtaacaattgcgggctttggaatcagatggccattgttagaaacccagttctataacttactgatggtgagatcttttttgcgtttcttacactctctgtgcctcaatgtcctcatgtataaaaggaagattatagtatcttcagtgtacattcagtaactcattcaatgtc

SEQ ID NO: 187971 - DNA, 609 bp, Homo sapiens
ggaatgtgagaataagctagatgagataaagccatctcacaactttgaaaataacatttgcattctaagcatagtaaataataaaagtcatatgctaaacctaatagttcatgaagttagaaggaacctggttcctaggtagctctacccatcctgggttacttaccaatgaaatacttataacatgaataaaattatttaattgttataataaccatatttttgttattgtattaacccattttcacactactgataaagacatccaagactgggcaatttacaaaagaaataggtttaatgaactcagagttacayatggctggggaggcctcacaatcatggcagaaggtgaaagatacgtgtcacacggtggcagacaagagaagagaatgacagacaagcaaaaggggtttcccttataaaaccatcagatctcatgagacttgttcactaccatgagaacagcgtggaagaaaacaacccataattcaattatctcccactgggtccctaccacaacaccagggaattatgagagctacaattcaatattgggtggggacacagctaaaccctatcagttgtatacagataaatatatatgat

SEQ ID NO: 187972 - DNA, 539 bp, Homo sapiens
agtgcctgcccagtaggaagataagaataatgacttactatttttcttattaaacacacacacactcacacacaagcatatacacatatacacacaaaaaagcactcctcttttgtcttccttgaccatactatcattattctgtctccttcctttgatgtgttgagacaattgtctgtattcactgtcctccaatttttacctacttctgttttctcttcagcattctccaatcatygccaatctctgaaatcacttttctgatggatatttatggccaccactttactgaatctaacaattaattcttagaccatctacactggcctatgaatagtttgagtatacatcctatacttttcctgggacaatcatatctctgtctattgtcctgttttaattatttatagctgctgctttcattctgcaatgcatccagatttggataatatattataaggtcattttaactcttagtaccatatgacccaatcactccatgaaatactttttatacttgctcccctgttaccacatgc

SEQ ID NO: 187973 - DNA, 539 bp, Homo sapiens
agtgcctgcccagtaggaagataagaataatgacttactatttttcttattaaacacacacacactcacacacaagcatatacacatatacacacaaaaaagcactcctcttttgtcttccttgaccatactatcattattctgtctccttcctttgatgtgttgagacaattgtctgtattcactgtcctccaatttttacctacttctgttttctcttcagcattctccaatcattgccaatctctgaaatcacttttctgatggatatttatggccaccactttactgaatctaacaattaattcttagacyatctacactggcctatgaatagtttgagtatacatcctatacttttcctgggacaatcatatctctgtctattgtcctgttttaattatttatagctgctgctttcattctgcaatgcatccagatttggataatatattataaggtcattttaactcttagtaccatatgacccaatcactccatgaaatactttttatacttgctcccctgttaccacatgc

SEQ ID NO: 187974 - DNA, 376 bp, Homo sapiens
tacagtgtctcactcatttcctgtagaataaataagcgaaagaaataattaagattagagtaacacaaaaggacagcaagagttccagagtagtaatgagtacaatgtttctgtatatgagaagcattttagattcactaaatgaggctgcagcggtaggctgaggtaagatcatggggaatcttgaatgccaggctaccaagtttagcttttctcttaagggggtaaggaactactggggctttctgaggaggaagttcatgactgcagctgcatgatggctctgtggagaatgatttgragagggaagtgagacatacagcagactgtatcacaagcaaagagtatcacaagcgttggactgacattagatgga

SEQ ID NO: 187975 - DNA, 604 bp, Homo sapiens
cgtgatacttacaagcagcatacccacatgaaaaaagaaaggaaagaagggaccaggatatgcatacctactttcttatttcaaggtcaccattcagatagatattgttcctccatctctagggcctaatatgtgagagtgcaaagcaaggccaggagttgttgttattggaacatttcaccggaagaaactaggagaattggggagaaagcatgttaggtactgtgtcaagcttttacaggcattctctaactcaatcctcaccaaagctctatgatgtgctattaatattatctccatgtatacatcagtaaaaggaggtttagagaggttaaataatttgccccatgtcagatgagtagctagtatccagaatctacaaagaactcaaacaaatttacaagataaaaacaaacaaccccatcaaaaagtgggmgaaggacatgaacagacacttctcaaaagaagacatttatgcagccaaaaaacacatgaaaaaatgctcaccatcactgcccatcagagaaatgcaaatcaaaaccacaatgagatatcatctcacaccagttagaatggcagtcattaaaaagtcaggaaacaacag

SEQ ID NO: 187976 - DNA, 169 bp, Homo sapiens
tcttaaagcacacctgtgactcagtgattacagaaggaaacacagaaacccatttctaaggattrgtaaactaaagtgaaaaaaacaaatgggttaaaatcaacaagatttatatgaattgctcaacactgggcatattctccttcaaaacatcaaggccatatagcct

SEQ ID NO: 187977 - DNA, 394 bp, Homo sapiens
ctaattcttttttttttttttttttttgaattcttggtagaggcaggtttttgccatgttgctccggctggtctcgagctcctgagttcaggcaatctgctgctcagctcccaaagtgctaggattacaggcatgagccactggtgcctggctaatgttttatttatttctttrttttatagacacagggtttgctatactgctcaggtcagtctcagactcctggcctcaagagatcctcccgccttggcctcccaaagtgctgggattacaggcgtgagccgccatacctggctgatagttcttattatctgcaaaaataagtgcttttgggtccacaggatacgaattccatttcaatgttgctttcctgataccctaccaatccttccat

SEQ ID NO: 187978 - DNA, 435 bp, Homo sapiens
taccctaacaaatctaactcctagggaggaggcctggaaaaacctacatttaaaataaataccccaattgatccttatayacatcagagtttagaacattgcattttcaggggtttcacactatgctctgtgggccaaatccatacctgttttatataccccaggggctaagcatggttttcacatgttagctggttgagaaaaaaaccaaaagaacaataatatttttgggcatgaaacttttatgaaattcatcttttagtgtccataaataaagttttgttgtcacatagccatgtcatttttttacatattaactaaggttgctcttgccttacaacagcaaagttgagtaattatgacagagactgtgtaatttttttttttttttgagatggagtttccctgttgttgcccaggctagagtgcaatggt

SEQ ID NO: 187979 - DNA, 566 bp, Homo sapiens
tttaacagtaatacctcccaaccattctctctgtctttataggcttatgccattaaaaaaaaaaaaaaaaaatccttgtactactgtttaaaaaagttttagaaggttcctaggactctaaaaggatcattgtgacgaagaaatggataatttaaggaagccagcacaatgcctgacacataattgtagtgattatttttgttattttgttaatattcaatccttgtaaaatcatccaagtttataaattatgtactatatagccaaacagcatggacgaggagggmgctgtgaaattaagacctacgtcgttcaccttcccagtggtgtcaggtcatctctacaaccatgagcttttagtatggttagttcccattccatttcatttagaataaccttgtaaaagaaacagggattgggtgtgagtgacacctaaccactaacatgataagcattctaaatctatgttcagcatcatgtaagtacaccctcattgaaatgcagatctccactactggtaattccacacactcctattgaagaaagaattgctcctctgaagtttg

SEQ ID NO: 187980 - DNA, 566 bp, Homo sapiens
tttaacagtaatacctcccaaccattctctctgtctttataggcttatgccattaaaaaaaaaaaaaaaaaatccttgtactactgtttaaaaaagttttagaaggttcctaggactctaaaaggatcattgtgacgaagaaatggataatttaaggaagccagcacaatgcctgacacataattgtagtgattatttttgttattttgttaatattcaatccttgtaaaatcatccaagtttataaattatgtactatatagccaaacagcatggacgaggagggcgctgtgaaattaagacctamgtcgttcaccttcccagtggtgtcaggtcatctctacaaccatgagcttttagtatggttagttcccattccatttcatttagaataaccttgtaaaagaaacagggattgggtgtgagtgacacctaaccactaacatgataagcattctaaatctatgttcagcatcatgtaagtacaccctcattgaaatgcagatctccactactggtaattccacacactcctattgaagaaagaattgctcctctgaagtttg

SEQ ID NO: 187981 - DNA, 610 bp, Homo sapiens
aagtaaatattcgcttactttttatcagtagatgcagcccgatgcccagcagatgcaatcacacattcctttaatcagcaaagatcttattatgccattcttacacattgactatgatgaaatttactgtatttcactgatactaatgggattttggggggactcttttgctcagtgagtcataagggagagttacttatgtgcagtcactgaaataaacagaaaacattctaattattatttgatgaaaatgtttctccgtgggtaaaagatatctgtggttcccatttatgattcttttttatcttccatcacagtcaaaggcacgccatagagtgattttaattataccttgactcgaagatacaatgtatttaatttgtcattgacartagtcttttcctagtcctttcagattgtcatttcttttgaatcgtaaagaaagcttcaaaaagaaaatgtgagagggcaaatttaacatataccccccttccctcttctgttattacttgctattttgcttgaggaagtattcttattcatagtgggaagcttaggcacctgcagaaaattctttgcatttagaaagacttcccagatgagaaaccct

SEQ ID NO: 187982 - DNA, 403 bp, Homo sapiens
attcctttaatcagcaaagatcttattatgccattcttacacattgactatgatgaaatttactgtatttcactgatactaatgggattttggggggactcttttgctcagtgagtcataagggagagttacttatgtgcagtcactgaaataaacagaaaacattctaattattatttgatgaaaatgtttctccgtgggtaaaagatatctgtggttcccatttatgattcttttttatcttccatcacagtcaaaggcacgccatagagtgattttaattataccttgactcgaagatacaatgtatttaatttgtcattgacagtagtcttttcctagtcctttcagattgtcatttctttygaatcgtaaagaaagcttcaaaaagaaaatgtgagag

SEQ ID NO: 187983 - DNA, 610 bp, Homo sapiens
aagtaaatattcgcttactttttatcagtagatgcagcccgatgcccagcagatgcaatcacacattcctttaatcagcaaagatcttattatgccattcttacacattgactatgatgaaatttactgtatttcactgatactaatgggattttggggggactcttttgctcagtgagtcataagggagagttacttatgtgcagtcactgaaataaacagaaaacattctaattattatttgatgaaaatgtttctccgtgggtaaaagatatctgtggttcccatttatgattcttttttatcttccatcacagtcaaaggcacgccatagagtgattttaattataccttgactcgaagatacaatgtatttaatttgtcattgacagtagtcttttcctagtcctttcagattgtcatttcttttgaatcgtaaagaaagcttcaaaaagaaaatgtgagagggcaaatttaacatataycccccttccctcttctgttattacttgctattttgcttgaggaagtattcttattcatagtgggaagcttaggcacctgcagaaaattctttgcatttagaaagacttcccagatgagaaaccct

SEQ ID NO: 187984 - DNA, 413 bp, Homo sapiens
ctattgccctactgtgaaattaccttatgtactgtgttcartctttggttactctgtcctttaagcttctttgcagggctgaatattatcttgtgatcacatatacatagcacatccatggggaattagtatgctctgctgtaagatgcttaagtattcatttattgatgaccttagagatactcaaacaccatttgcagtgtcatcaagcctacagttttgcctttagaggcaaaggactgtagcacaaaggctctagacatttagtcttacatgtaatttgaagaagaaaaaaagggtttttttggactcaataaccaggtgaccaacttagaaaatagaaagtgaaaaagtcagttgttcatccagatgttttcatttgtgacactggtaatggaaaacgcaagaaagag

SEQ ID NO: 187985 - DNA, 330 bp, Homo sapiens
ttgagtatcaaatggattgtagaagttaagacacactttctagaagaattcccctctacacagtgtttttcaaagcttatctaaatggatggctttgttttcgccctcaaagcattgcaccatggctaaactccagtctgcttatttcattctctctaagccctgtttaaagcattttagattaataatagcctttgtttccctagccattaagcagtgttgytgtgtgtgacttcaaaggatggctctcttctaataacaaggtggtctggttcagaggtgggtatgttgtctctagcagggatttaacaacatttgatataacaggca

SEQ ID NO: 187986 - DNA, 521 bp, Homo sapiens
acaagtctattttccccaagcttaaaaagactttgatgaagaaggaaaaggcaatggatttttataggaagtgccactgaaagcaggaacacaaaaattttgagtatcaaatggattgtagaagttaagacacactttctagaagaattcccctctacacagtgtttttcaaagcttatctaaatggatggctttgttttcgccctcaaagcattgcaccatggctaaactccagtctgcttatttcattctctctaagccctgtttaaagcattttagattaataatagcctttgtttccctagccattaagcagtgttgttgtgtgtgacttmaaaggatggctctcttctaataacaaggtggtctggttcagaggtgggtatgttgtctctagcagggatttaacaacatttgatataacaggcagtgaggaaaataaaaatatctttatttttatgtaaggtatgctctcaagggttgtcatttgctataaggagacagtcctatagtttttcaac

SEQ ID NO: 187987 - DNA, 527 bp, Homo sapiens
tatataatatatacacaagtcatgttgtacaccttgaatatttaatttttatcaattaaataattaaaaataagaaataaaattagyatcatttacctattaaaaataaaaaagaagtaacattcccatcatttattaacttagatgggagtatatattgcccctttgatttttgtctttgcctattttccattttttatatcttttttactgtggtaaaatatatatataacataaaaaatgccattttaattatttttaagtgttgaattcagtggcattaagtacagtcacactgttgtgcaactgtcaccaccatccatcttcagaactttttcatcatctctagcaaactctttacccatctaaacaatgacttcccattacccccttcccatcaccttgtaaccattatcctactttctgtctctatccatttgcctattctaggtacttcatataagtgcaattatgcaatatttgtccttttgtgtccagtttatttcatttaacatgatgttttcaag

SEQ ID NO: 187988 - DNA, 527 bp, Homo sapiens
tatataatatatacacaagtcatgttgtacaccttgaatatttaatttttatcaattaaataattaaaaataagaaataaaattagcatcatttacctattaaaaataaaaaagragtaacattcccatcatttattaacttagatgggagtatatattgcccctttgatttttgtctttgcctattttccattttttatatcttttttactgtggtaaaatatatatataacataaaaaatgccattttaattatttttaagtgttgaattcagtggcattaagtacagtcacactgttgtgcaactgtcaccaccatccatcttcagaactttttcatcatctctagcaaactctttacccatctaaacaatgacttcccattacccccttcccatcaccttgtaaccattatcctactttctgtctctatccatttgcctattctaggtacttcatataagtgcaattatgcaatatttgtccttttgtgtccagtttatttcatttaacatgatgttttcaag

SEQ ID NO: 187989 - DNA, 527 bp, Homo sapiens
tatataatatatacacaagtcatgttgtacaccttgaatatttaatttttatcaattaaataattaaaaataagaaataaaattagcatcatttacctattaaaaataaaaaagaagtaacattcccatcatttattaacttagatgggagtatatattgcccctttgatttttgtctttgcctattttccattttwtatatcttttttactgtggtaaaatatatatataacataaaaaatgccattttaattatttttaagtgttgaattcagtggcattaagtacagtcacactgttgtgcaactgtcaccaccatccatcttcagaactttttcatcatctctagcaaactctttacccatctaaacaatgacttcccattacccccttcccatcaccttgtaaccattatcctactttctgtctctatccatttgcctattctaggtacttcatataagtgcaattatgcaatatttgtccttttgtgtccagtttatttcatttaacatgatgttttcaag

SEQ ID NO: 187990 - DNA, 527 bp, Homo sapiens
tatataatatatacacaagtcatgttgtacaccttgaatatttaatttttatcaattaaataattaaaaataagaaataaaattagcatcatttacctattaaaaataaaaaagaagtaacattcccatcatttattaacttagatgggagtatatattgcccctttgatttttgtctttgcctattttccattttttatatcttttttaytgtggtaaaatatatatataacataaaaaatgccattttaattatttttaagtgttgaattcagtggcattaagtacagtcacactgttgtgcaactgtcaccaccatccatcttcagaactttttcatcatctctagcaaactctttacccatctaaacaatgacttcccattacccccttcccatcaccttgtaaccattatcctactttctgtctctatccatttgcctattctaggtacttcatataagtgcaattatgcaatatttgtccttttgtgtccagtttatttcatttaacatgatgttttcaag

SEQ ID NO: 187991 - DNA, 542 bp, Homo sapiens
tgtgacatctaaataaatctccattttggaaacgattatgcatattttagaaaagttratttgggaattaatgattcagaaatactccattccctgtttagtatgaaaaccaaaaggtgattcctaagaattgacttaatttagaaaacttatttcctagataattggccctaaacattttatctagattcttagcatggtacttggcaaatgatgtagtcactaaataatatttgaatgaatgaatcggtgcattaatgactcaattaatcaatgaatccctctaggtgattcagagaacacgtgtcatccaaatcaataggcccagcaaagcttcactgctttcctctcctttcactaagggggaagacaatttatatgttggagtcaggacatttttgcctaggatagattgcaaagacctaggtaggtgttgaatatatcattcaatatactcaaattctgggagaatttcaggctggaaatataaatgacttctccagtgtttaggtaagttggaaggctatagactagaggaagac

SEQ ID NO: 187992 - DNA, 612 bp, Homo sapiens
ttatttattatcaatgataacaacaaaagacacaattctaagcttctcgtgggttacctcatataaccctttctaagatggttaccattattatcaccattgaacagatggggaattaggtttcgagagattaagtaacctgcccaaagtgatacagctagtgaattcattcatcatatatgtatttaatgtccattatgtgtcaartactatgctaagtgcataagatatgacaatgatcaagataggcaactcgtgttgtcatgaaatgtaaggtctagtataggacacaaattctaaataaataatttgaacttcagatgttataaggataagttcatgggctgtggaaatagagattagattatcttgggattcaggaaggtctccatatagagttaaaaccaattcatcaaagaatgctgggatatcttttcatcctccacattcataaagcactgacaagggagctcaaatgagagtctaggtgagtggccacacgttgccttctctattctttctcagcttatgcaagaccatctgggcaatgcgcaccattttgctggaagaggacctagtccagcatctttgggctcacatgtcatgcacaga

SEQ ID NO: 187993 - DNA, 571 bp, Homo sapiens
attatccctaacgaatcatgctttgttgcactgttgaagtgttcaatatttcagatcaagtcatgcagaactgttagacatgtctacattgggtaaatatcgggaatttattaaaatctttgagtgtgtgtgtctgtatgtgtatgtgtaggagtgagtgtatgtgtctgtgtgtgtatgagttagctgcaacattaaggagyacaataatttttaacatataaatgttacagtgctatataagaaaatgatgttaatagcaaattcactttttaaaaattaggtaacctgaataataagtgatttagggatactcgctttgtagtggtcacatagcagagggaaacaaagttgaaaagaatataaaacatcaggaggtctgtataattaatcagcaatcctacaaagtatgccataaattagagctgtaattataccactgtgcttggaaaataggaggctggatttttatataagcattcaggtttatttctgaatacctatctccagcataatttttatataagcattcaggtttatttcttaatacctatctccacataatgtaaag

SEQ ID NO: 187994 - DNA, 624 bp, Homo sapiens
gtattcggatcccaggtcttcaacataccagctgtgtgaaaggcaagtgactaaactctatgccacagctcttcatccgtaaaactagcaataataactgtacctatcttcatggttattatacagttaagatgaggccaggcatggtggctcatgcctgtaatcccagcactttgggaggctgaggcaggcggatcacctgaggtcaggagttyaagaccagcctggccaacatggtgaaactccatctctactaaaaatacaaaaatcagccagtcgtggtggtgggcgcctgtagtctcagctacttgggaggctgaggcaggagaactgcttgaaccctggaggcggaggttgcagtgagccaagattgtaccactacactccaccttgcgtgacagagggagactctgtctcaaaatacaacaaaataaaatataaagttaagatgaattggaacagtgcttagtagacgtattagtagtagtttctgaatggactgaacagaactcatttatgttatctgcctggccctgcaggtagtttaatttgtgatactaaaaccagatgctctccttttagctctaatgccataaagtagcttaaggatttgtgttgacaaaa

SEQ ID NO: 187995 - DNA, 405 bp, Homo sapiens
tctacatcctgcacctcagtggtacatttgttccaatgtattattttatctagaaataatatttcaacatattgcccaggctggtctccaactccaaggctcaattaattctcttgcctgagcatcccaaagtgctgggattacaggcatgactcttgatgaacytacaatgacacatcaccatcacccagagttcataagtttattttagggttcactcttggtgttgcccattctatggctttggacaaatttatatttgcagtgtattttatttttgtattttgtcattgttgttcttcatggcatattaaataatggtgcatcttattagtagatggtataagatgtgatgaaatatggtatctgtctccactcccaactcatgagccatcaccagaattc

SEQ ID NO: 187996 - DNA, 307 bp, Homo sapiens
tgaacataaatttaatttcctcagcaaggccatttttactttctgcagaaagggtacactcgccagctgttttgcaagagtataccgaacaaaggagacagggtcatttataaactgatgtgtcatcttactgctgtgtctggtttccattccctggaatgggacttcacattctgtccttgtcctgattggctagcaacttagaactttctaaaagaggcaaaggcagaggagaacaaaggaaggaggaagtaacttgtakaatgctaagaaaggtaaaaacatcttcaaataaggaagaggaaca

SEQ ID NO: 187997 - DNA, 581 bp, Homo sapiens
gtatctaaacacattaaaagattcactcatatttgttctttgatcattattagtctaaatcttccaaagaaaattgctagagatcttgaaaggtaacctaaatctttctaaaatcattttttatctcatttcctatgttctgcatgctttcatctcccccaaatttgtatgttattatcttaaccctatatagtacctaaaatacctaggtgatagtattaagaggtttgatttttggaaggtaattgagtcataagggtgagaccctcatgaatgggattagtgctcttataaaagtgaccctagagagttacctaaccccttctgccrtgtgagaactcagcattaagatgtcttctaagaaccaaaacattggtcttctccagacacagaatctgctagttctttcatcttgagctcctcagcctccagaactatgagaaagatatttctgttgtttataagctacccagtttatgtattttgttatagcagcccagctggactgcagcacaattcttagaatggagtagagtatacatattccaggcgaagtccaaaggctattccctctgtgtatc

SEQ ID NO: 187998 - DNA, 581 bp, Homo sapiens
gtatctaaacacattaaaagattcactcatatttgttctttgatcattattagtctaaatcttccaaagaaaattgctagagatcttgaaaggtaacctaaatctttctaaaatcattttttatctcatttcctatgttctgcatgctttcatctcccccaaatttgtatgttattatcttaaccctatatagtacctaaaatacctaggtgatagtattaagaggtttgatttttggaaggtaattgagtcataagggtgagaccctcatgaatgggattagtgctcttataaaagtgaccctagagagttacctaaccccttctgccatgtgagaactcagcattaagatgtcttctaagaaccaaaacattggwcttctccagacacagaatctgctagttctttcatcttgagctcctcagcctccagaactatgagaaagatatttctgttgtttataagctacccagtttatgtattttgttatagcagcccagctggactgcagcacaattcttagaatggagtagagtatacatattccaggcgaagtccaaaggctattccctctgtgtatc

SEQ ID NO: 187999 - DNA, 600 bp, Homo sapiens
agtcaatactctgtgttctaaagccttcagtacagagatgaaagagaggaagtaaatgagtacatgttctgagagctgaaagctctctagggcaggtgttttatagttgtggtacgaggactctgtagcaaaagggtttataaaattaattcctttatctgtaacataccaatgataccttgctacctatctcaaaggtagtgagaattaagtcattatatagatgtgtaatgactttattagtgttgttatgaaaacaccagcattgccatctttgtctaatacttagaagagagacaacgtagtttagagggcaaaccaatggaataaacaaataagtttagcagccagacaggcctgggttttctactgcttataactgtgaatcactgggcaaagtagccaacatttctgaacctcacttttcctatccataaaatgagaatgaccatccttagttaacagttataccatgaaaattactgtgaagtatttagcaatgaacctgcggatgatccataggagttgttaactaatgcctaktccagccgtctaagcttcagtaccttttctccattcctgggacatgggattgaactg

SEQ ID NO: 188000 - DNA, 510 bp, Homo sapiens
tgatcaagaaaaagaaaaagaacgatggttgaaacacaacgcataacagggagggaagtctcaggtgagggaggctagcatagaaatacgtaatttctctaaattcaaagaaaaatatttaragggttttaaccaatgaagtgacaaaaacctcttacaaggttttttgcctttcttgttttctttaagatcattccagtatacatgtggagagccagcagaagagaggcaaaagcaatcagtaaaagaaaaacaaaaaaggtaaaggcaaatttgtaattaattgcagcgtccccagagaaacaataatgaaatgacataaatgagtaagctcgttggatgtaatcaaaatgtacaatgtgatcgttagcaaactgaagaacatatttcctaaatatagaaatggctactgctcagttttagccaattgttgcaccattaattataagcacaattttggtagctgttgtcatctttccaaggtctagatgtctagatttttaagatatt

SEQ ID NO: 188001 - DNA, 307 bp, Homo sapiens
accacagtaacaatgttgtacacagcatgctcaagatagagtttaaaatcaaaaccggttcttatagaagatcatgaaatacatgggtattgcagacagtagaaaaacagtttgttgaaatcagctgtgtagcgtactttgtgcgtaactattacttgatggtgcaggcctttattgacctgagcaaaacagtgtttaaatcgatgtsattcccacattatgctgacatcattaccctatttataaataacatgtgagttaattcacatcatagaagtatgcattgtactaaaacagactgtagtcc

SEQ ID NO: 188002 - DNA, 380 bp, Homo sapiens
taaattatcttcaaggaaataaatacatattcttctccaaacaggattctagatcaatgtatattttacagtgatatgtcgatacagctgattataaagatactttcatakgtgatgagtcagcagaggtttagaaaagaaaaactccttgatattggccttggcaatgatttttttgaacatcacactgaaagctcaggctacaaaagcaaaaataaataaatgaggcttcatcaaactaaaaagtttctgtatagcaaagaaaacaatcaatgatgtaaagagacacctaaatacaagaaaatatttggaaaccagtatctgataaggagataatatccaaaatatacaaagaattcacacaaatcaaaatcaggaaa

SEQ ID NO: 188003 - DNA, 630 bp, Homo sapiens
ttccaaacaattgagtttctcactcagcaactttctcctggttgaagagagttttctttaattaaatgtaaacacatttagcaaatcagtgtagtaagtgtaaaggcctcctaggatgatgtgaattgtcatcagacgtttccatcagttatgagtgtttgatttgaatgycaaataatttccttaaggaccaggtcctaaacaaaagatgagcttgaatcaacaacaaactaaataggccattcttgacaatttctactgatgcaccaggatgctgcataaatgctgcacagccaattagccctataactccttctaggtcagagacaggcattgacacaatgagaaaattcatccattttaggtgaccctgttaaaaaggccaaaggacaccaatagaggaatacactaaaaaaaaaacgcattctcattgttatctacaggcatcattcaaataaacagtgtagggagtctataccatcttttacttgcttgttagatgttaggacatttgctttagaaaagagtataatttaccttaatttcaatatgagacagaatgagagggaacgttttgaacatttcttacgttgctagttctgcaggtacagttgggccaagaaccaaatg

SEQ ID NO: 188004 - DNA, 630 bp, Homo sapiens
ttccaaacaattgagtttctcactcagcaactttctcctggttgaagagagttttctttaattaaatgtaaacacatttagcaaatcagtgtagtaagtgtaaaggcctcctaggatgatgtgaattgtcatcagacgtttccatcagttatgagtgtttgatttgaatgccaaataatttccttaaggaccaggtcctaaacaaaagatgagcttgaatcaacaacaaactaaataggccattcttgacaatttctactgatgcaccaggatgctgcataaatgctgcacagccaattagccctrtaactccttctaggtcagagacaggcattgacacaatgagaaaattcatccattttaggtgaccctgttaaaaaggccaaaggacaccaatagaggaatacactaaaaaaaaaacgcattctcattgttatctacaggcatcattcaaataaacagtgtagggagtctataccatcttttacttgcttgttagatgttaggacatttgctttagaaaagagtataatttaccttaatttcaatatgagacagaatgagagggaacgttttgaacatttcttacgttgctagttctgcaggtacagttgggccaagaaccaaatg

SEQ ID NO: 188005 - DNA, 349 bp, Homo sapiens
aggaaaggtacataatcaatgtttatataatgtgattgggttggacatctggcattaaaggctttaagaagttttcacagaaattaaaacctcttgaaggtttaggtggtatagtaaatcacttggctattaaatkattttccatagtaggtagattgaagttttacatcttcagtttttaaaataaataatgaaattgtattttgaggcaaaatttcatgttatgtatattttttaaattgtcatttatagttagaaatgtactgaagtacatttgtaggttaaaatggtttggctttgatttgtgttcatctaatttaagggaagctaaacatatttaatttaaaaa

SEQ ID NO: 188006 - DNA, 313 bp, Homo sapiens
aatcaaccacagtaaacaatgttgtacacagcatgctcaagatagagtttaaaatcaaaaccggttcttatagaagatcatgaaayacatgggtattgcagacagtagaaaaacagtttgttgaaatcagctgtgtagcgtactttgtgcgtaactattacttgatggtgcaggcctttattgacctgagcaaaacagtgtttaaatcgatgtgattcccacattatgctgacatcattaccctatttataaataacatgtgagttaattcacatcatagaagtatgcattgtactaaaacagactgtagtcc

SEQ ID NO: 188007 - DNA, 417 bp, Homo sapiens
ggtgataggtgcaccaaaatctcacaaatcaccactaaagaacttacacatgtaaccagataccacctgttcctcaataacttatgaaaagaatacataaaataaaataaaataaattataaagtaaaataagtaaataaataaataaaaacagcaaatcctctgtcagcttagatccctaaatgactgtgtggatcagaagatcccacgctgcatacccaccacctttkgctctacacgaattaaattttcattgtgttaagctgcagagatttccagatttgcctattatattagcttgtgttgccttaaccactatggacagcttctgttggacattacatacataagttcttatgaaaaatatgcagactcagatggggagaaaagggcaagttaatattttttcttgtgtta

SEQ ID NO: 188008 - DNA, 417 bp, Homo sapiens
ggtgataggtgcaccaaaatctcacaaatcaccactaaagaacttacacatgtaaccagataccacctgttcctcaataacttatgaaaagaatacataaaataaaataaaataaattataaagtaaaataagtaaataaataaataaaaacagcaaatcctctgtcagcttagatccctaaatgactgtgtggatcagaagatcccacgctgcatacccaccaccttttgctctacacraattaaattttcattgtgttaagctgcagagatttccagatttgcctattatattagcttgtgttgccttaaccactatggacagcttctgttggacattacatacataagttcttatgaaaaatatgcagactcagatggggagaaaagggcaagttaatattttttcttgtgtta

SEQ ID NO: 188009 - DNA, 590 bp, Homo sapiens
ggttaccgggggtgaggaagtgttcgtcaaaaaatatgaaattttagacaggaagaataagttcaagagatctattgtacagcatggtgactataggtaaggtattataatcttgaaaattgccaagacagactttaagygttcgtaccacaaagagtaagtatgtcaggtaatgcatatgttgttagcttgatttaaccattccacaatgcatatatgtgtccatatatacatatcaaaacctttatgttgtacaatataaataattcttgtcaattaaaaataaattatgagaaaaatggggaagtaaagcttgtctttctaaagctataaatctgttacttctaattaagttaataggccccagtaatgcatcttttttttttctttaaacatgacaacctacattttctttggtcagcaaaacaaaaatacaaacatcaatttagcacacattttaatttactattatttaatgtgaacactacaaacactaattttaataacaaagtattgtttgtgtacattgtattatagacaaaattgcaacaaccaagaaaaaataaaaaatctaaatatttaattcccca

SEQ ID NO: 188010 - DNA, 477 bp, Homo sapiens
cctcaaagtccagtataacttaaagttccttcacataaccttctcttccatgtactcagtagacagttatgagcaagttacatcttttctcaccccagggcagggtgaggggagggtatagaatcaattcaaatcaattgtttctgctccattaagacaaaagtgttctactgcatatacaggatcacatacttgagtcagctgaacaattactgcatttatatatgttgcctgaatgtcactgggaacatacaaaggaaataaagkgttgatcaatttaaggggcatcatttgctggggaggagagagaaagtatatttaatagctcaaagataataaggtgtcatgaatcattaaaaataatgtgtatagaaaacataatctggcagggtttattaaggtgacctaacttctttgtgtgtattatattaaaaatgatttggcctacttccttcctaagagaccctatctacagtc

SEQ ID NO: 188011 - DNA, 597 bp, Homo sapiens
aacaccaacaacctcgttatattaacgagcccaaagttcccttgtcttttatgtgcatagctttcacatggttattaaatgtacagaatttagaattattctatgactggaagtcttcttagagacagcaatagcatgtgtcattagagcaatggctcccaagttttaagtgcctctgaagcagctggggctcatgttaaaatgcagactctgcttcaagaggcctggagtgcggmctaagactctgttttccctccaggctccaaggtgatgctcatgctaccagccccaaacaacaagttaaggagcaagggtttaaaactgaactataacatgaaattgcaattgccagagtctagattctgttgccaccagtgggtgacattgggcaagttacttaatctccttaggtctcagtttctttgtctctaaaacaatactatagtggcaatcatgaggattaaaatgaatacgtcacatattgtacttcgaatgttggcactataccatgtatttaataaaggtggttttattttattattactaccattatgcacaagtttaatcctctacttttaaaactggcccaactgttcc

SEQ ID NO: 188012 - DNA, 494 bp, Homo sapiens
aagtgcctctgaagcagctggggctcatgttaaaatgcagactctgcttcaagaggcctggagtgcggcctaagactctgttttccctccaggctccaaggtgatgctcatgctaccagccccaaacaacaagttaaggagcaagggtttaaaactgaactataacatgaaattgcaattgccagagtctagattctgttgccaccagtgggtgacattgggcaagttacttaatctccttaggtctcagtttctttgtctctaaaacaatactatagtggcaatcatgaggattaaaatgaatacgtcacatattgtacttcgaatgttggcrctataccatgtatttaataaaggtggttttattttattattactaccattatgcacaagtttaatcctctacttttaaaactggcccaactgttccacggaaccgatattgacagttttaaataaacaagacattaaccctctgtagtcttacaatttgt

SEQ ID NO: 188013 - DNA, 597 bp, Homo sapiens
aacaccaacaacctcgttatattaacgagcccaaagttcccttgtcttttatgtgcatagctttcacatggttattaaatgtacagaatttagaattattctatgactggaagtcttcttagagacagcaatagcatgtgtcattagagcaatggctcccaagttttaagtgcctctgaagcagctggggctcatgttaaaatgcagactctgcttcaagaggcctggagtgcggcctaagactctgttttccctccaggctccaaggtgatgctcatgctaccagccccaaacaacaagttaaggagcaagggtttaaaactgaactataacatgaaattgcaattgccagagtctagattctgttgccaccagtgggtgacattgggcaagttacttaatctccttaggtctcagtttctttgtctctaaaacaatactatagtggcaatcatgaggattaaaatgaatacgtcacatattgtacttcgaatgttggcactataccatgtatttaataaaggtggttttattttattatkactaccattatgcacaagtttaatcctctacttttaaaactggcccaactgttcc

SEQ ID NO: 188014 - DNA, 520 bp, Homo sapiens
tggggcactaatccaggaaaaaggaatgggaccagtgactagggcagttgccatgacaaagaacaagggaaggatgcaagaaacatcatggagttggaattcaccgaccttagcaacagtgttgatgtacgaggtgaaaatggatcatttgaatcagatgatttctggtgtttgcttttcggtgactaagaatccaaataaggaaaaattttagctgcaatatagaacttaggaggaggagcagcagctccaagggtgatgaatctcctgtatagctctgtgcgtgggtgggtatgagggtgtgtgtgtgagtatattaatttctttaattctgaaattagaaaactttgatgtcatttcctcttgtttctgaaagagcasagaaaaaaattctgttattgaaattttcagataattgggggtttgctaaacagcaggaaaactgagcacttatctagactcgacggtgctccttcctccttaacttctgttgcagtatgatcctctaaacccagcggag

SEQ ID NO: 188015 - DNA, 632 bp, Homo sapiens
tagtactttacctctgtgatctacctctctaaaacccataaccctaatttacccatgagacaaatctcaatttggagacattctaaaaaatgcctgacctatactcatcaaaactttcaaagtaattgaaagcaaataaggtatgaaaaactgttacagccaagaggagcctaaggagtccagataactacatgtaatatggtatactsgatgcgaccccagaacagaaaaagggcattagataaaaacaaagggaatcttaataaactatggacttcttaataaatattctcttactaaataattatgtattgatattgtttcattaattttaacaaatatactacactaatgtaatgtgttaataataaactctgtgtatgtcagaggaaagagaggtaatgtaggaattctttgtactatatgctcaattttttagtgaatctaaaacttctcttaaaaatgaagttgattcatagaaaatcaattgaacaaatgttgcttttggttaattgatgatataactaaatagttcctgttttaaccttgtggaaagcagaaattgttggcttggttatatatttgatttattactatgtgatggatggtatgtgtcaccaaaactgaacaga

SEQ ID NO: 188016 - DNA, 574 bp, Homo sapiens
tcacgtaataatttgctattaataaaattgctgttattttcacatttatcacaattgatcctcatggccacactggaaagtagcctagcaggtatgatttctcccaacttatgcataaggaatgtgttgctcagggcaattgaaggtgtcattgccattaggaactgatagaggagggacttaaatccaggtgtcacctatsagaacttgctgtttccatcatatcataatgtcccttggctagtccattaggagtgcctctcctcactagtgaatctaatgaacagaataaaacaatcattcatttatgaaatatttgctgagtacctgctatattttgtgcaatgcaattggcactaaggatttaaggtaaacacaatatgattcttgtccttcaggaacacaaaatttactactggaaatagattaacaaaattcgtgatattgtacagcaagtaagctatagggttgcaagtaatcaatactgtagaaccatgaaagaactgcataactctgcctgtgatagtcagctcaggctttgctatgacaatctctctttgtcaagaaaattgca

SEQ ID NO: 188017 - DNA, 574 bp, Homo sapiens
tctaatcttcaataagtcatgtggtgagtgtcatatgtatattttaaattatgtcttttgtaaaatttaaaagaaaagacactttttataaaaatttaattcacttattcagcatacattattaaggatcttttattccaaacagcatactaggacccagaagtatggtattaaataagatagtattttctattaaaaakgtgtttaagagttatttgaaattgatgattcataggaacaaaaatataacagaatgctaattgctggaaacagttcaaatactgaccttgctttgctttcattagctaaccacatggctgattccttgaaacacattgtgtccatggatcttgtctctcccactacttattttaaattacgttggaaatgcaagtggtcctgaagatcagtaatagtgtttatgctagcagtaatagtacactaggcaatttaattatatccttcagaagacttttctgaaccaattagttgaacccattttctctgagtaattcattgtagtctatttcaaattactaatacgtttcattaaataagtaacaatccagatgat

SEQ ID NO: 188018 - DNA, 574 bp, Homo sapiens
tctaatcttcaataagtcatgtggtgagtgtcatatgtatattttaaattatgtcttttgtaaaatttaaaagaaaagacactttttataaaaatttaattcacttattcagcatacattattaaggatcttttattccaaacagcatactaggacccagaagtatggtattaaataagatagtattttctattaaaaaggtgtttaagagttatttraaattgatgattcataggaacaaaaatataacagaatgctaattgctggaaacagttcaaatactgaccttgctttgctttcattagctaaccacatggctgattccttgaaacacattgtgtccatggatcttgtctctcccactacttattttaaattacgttggaaatgcaagtggtcctgaagatcagtaatagtgtttatgctagcagtaatagtacactaggcaatttaattatatccttcagaagacttttctgaaccaattagttgaacccattttctctgagtaattcattgtagtctatttcaaattactaatacgtttcattaaataagtaacaatccagatgat

SEQ ID NO: 188019 - DNA, 525 bp, Homo sapiens
tcctgtcaaagctttgataaaataaccagtttttctaattgtgtcttattgaaaaaaaaaaaaaraagacttcttgtggcactgatgcaaacaactatattgccgtaagttaaggttactcacagatggtttccaaattctagaggaaccaggtacagagaaacaaacctgctccgaattttgttcacaagagtataacttacttaattattaaaggctgcacatagttcaaaataagtttccttgactctgaaaaacaaaataaggatcagcaatattctaagcaaaagtcaaaaagattgctttagctttctgagtacaatccatttaagtcaactcttgtttcacttgatattcataaacatttcagttcttcatgagtcctgtacattttttccaatgttacaatcttcaaagctattggaaatctgcatttgagaacagctgttaaagtcttatagcttgattatatcccatcttttgagaaggaacatagcaagataacaattgtctgtaagtgacaaa

SEQ ID NO: 188020 - DNA, 553 bp, Homo sapiens
gtgcttttatcagctctgcaagctgagattgactctttaaagggggaagcatacacttcctgtcaaagctttgataaaataaccagtttttctaattgtgtcttattgaaaaaaaaaaaaagaagacttcttgtggcactgatgcaaacaactatattgccgtaagttaaggttactcacagatggtttccaaattctagaggaaccaggtacagagaaacaaacctgctccgaattttgttcacaagagtataacttacttaattattaaaggctgcacatagttcaaaataagtttccttgactctgaaaaacaaaataaggatcagcaatattctaagcaaaagtcaaaaagattgctttagctttctgagyacaatccatttaagtcaactcttgtttcacttgatattcataaacatttcagttcttcatgagtcctgtacattttttccaatgttacaatcttcaaagctattggaaatctgcatttgagaacagctgttaaagtcttatagcttgattatatcccatcttttgagaaggaacatag

SEQ ID NO: 188021 - DNA, 553 bp, Homo sapiens
gtgcttttatcagctctgcaagctgagattgactctttaaagggggaagcatacacttcctgtcaaagctttgataaaataaccagtttttctaattgtgtcttattgaaaaaaaaaaaaagaagacttcttgtggcactgatgcaaacaactatattgccgtaagttaaggttactcacagatggtttccaaattctagaggaaccaggtacagagaaacaaacctgctccgaattttgttcacaagagtataacttacttaattattaaaggctgcacatagttcaaaataagtttccttgactctgaaaaacaaaataaggatcagcaatattctaagcaaaagtcaaaaagattgctttagctttctgagtacaatccatttaagwcaactcttgtttcacttgatattcataaacatttcagttcttcatgagtcctgtacattttttccaatgttacaatcttcaaagctattggaaatctgcatttgagaacagctgttaaagtcttatagcttgattatatcccatcttttgagaaggaacatag

SEQ ID NO: 188022 - DNA, 509 bp, Homo sapiens
tcctgcctacttattacacatcaaagctctctcctaatgtgaagtattttgatacacccaaaactcaaaatggtcagaacacacaaagcaaaactgaacagaacctttaatttagagagggcactatctgctcttaattcctggggtttcatgaggaaaagaaagggttttttttgtttgtttgtttgcttttttccccacaatggggtctgtggcacctcctctgtttttcccaaggactaccagaagttatcttagggcctctcayacatgcattaagagtgtcaagaaataaaatggagaaagatgatttagtcaactgagaaaaataaaaatttttttccagaaaacaagatccaagaagagaaaaatataaaggccttttaaatatatttattacttgaatacccagttttaattaagctgagcactctttaacaaaatccctttaaatccactgttactcaactttagctatgccaagcagttaagattttcagcttctgaac

SEQ ID NO: 188023 - DNA, 509 bp, Homo sapiens
tcctgcctacttattacacatcaaagctctctcctaatgtgaagtattttgatacacccaaaactcaaaatggtcagaacacacaaagcaaaactgaacagaacctttaatttagagagggcactatctgctcttaattcctggggtttcatgaggaaaagaaagggttttttttgtttgtttgtttgcttttttccccacaatggggtctgtggcacctcctctgtttttcccaaggactaccagaagttatcttagggcctctcacrcatgcattaagagtgtcaagaaataaaatggagaaagatgatttagtcaactgagaaaaataaaaatttttttccagaaaacaagatccaagaagagaaaaatataaaggccttttaaatatatttattacttgaatacccagttttaattaagctgagcactctttaacaaaatccctttaaatccactgttactcaactttagctatgccaagcagttaagattttcagcttctgaac

SEQ ID NO: 188024 - DNA, 589 bp, Homo sapiens
aaacaagattacctccctgaactataaaatttcccatacattgcatacacagagaggatgaaatagatatgatgatcgcagacaggaaaggaggaaattatgataaaaagttggagattctgttgccgacatctcatcagggtagtcagaggctggggtccgtccaaatacctttggataacaatggtggtaaccctggccggaaatcctcaggtacaccaggacttcttccagccccacatgacagctaagtcctcmgtgaaaggaagctggttcaaacagggccagtatgcccagtgacccatgggtactgggggatgctccatgttctccctagcaatcctgtcccccaagtcttgtaaggctggcagccatgctaattatttttaaatggctgaaaggggccccgtatttggtttgatctggttctaaaatggaagccaagggcctcagaataaaaggacagagttggagtctgctcctctactcaccatctcgatgaatgttgtatgttgttatcccggacgagcccccattataaagcagctatgtctggggtgtaaacccagggtttgtcgtcacgcaccag

SEQ ID NO: 188025 - DNA, 566 bp, Homo sapiens
catgtccataattttcttctactgggctattcagtgtcattaatttgtaatgtgggataaaagttaacaataggaatgatagtacctttactgaggtctttgggaaatgtcagatatgaagtaaagagcagatcatgagttcagttttggataagtggagttcaggtacatttcaaagataaagtagtctactaggtaggagaatatgtaagttgagagctcagaagagatatataggctgtaaatagaattgagagamtcatcacgataatagcaaatcaaggacgtgtttgttaaaattaagagaggaattctaagaaattatctttgagggacctcagcatttaggttgaaaaaaaaagatgaactctaaattggagacaggaacaggcaaatccagagatgttgatgggaaaccaagagtgttgtgtcatccaagccaatggaagagagtatttacaggcaagaccaccagtgtcaactgaatttaggagatcaagtgaaaataacactgaaatggccatttggatttattgaggtggagagaattggcaatttaacaagac

SEQ ID NO: 188026 - DNA, 566 bp, Homo sapiens
catgtccataattttcttctactgggctattcagtgtcattaatttgtaatgtgggataaaagttaacaataggaatgatagtacctttactgaggtctttgggaaatgtcagatatgaagtaaagagcagatcatgagttcagttttggataagtggagttcaggtacatttcaaagataaagtagtctactaggtaggagaatatgtaagttgagagctcagaagagatatataggctgtaaatagaattgagagactcatcacgataatagcaaatcaaggacgtgtttgttaaaattaagagaggaattctaagaaattatctttgagggacctcagcatttaggttgaaaaaaaaagatgaactctaaattggagacaggaacaggcaaatccagagatgttgatgggaaaccaagagtgttgtgtcatccaagccaatggaagagagtatttacaggcaagaccaccagtgtcaactgaatttaggagatcaagtgaaaataacactgaaatgrccatttggatttattgaggtggagagaattggcaatttaacaagac

SEQ ID NO: 188027 - DNA, 503 bp, Homo sapiens
aaaaacatttgctctttattgttttctagatttgtttttttgtttgtttgtttttgtttgtttttgttttttgttttttgttttgagacagaatctcactcactctatcacccaagctggagtgcagtggcggtatgtcaagtcactgcagtctctgtctcctgagttcaagcgattctccatccttagcctcccaagtagctgtgattacagacatgcaccaccatgcccagctaatttttgtatattttttattagagacragcttttgccatcttggccacgttggtctcaaactcctgatttccagtgacctcatcttcccaaagtgctgagattacaggcataagccaccgcgcctggcctgttttctagaagattgacatgatttggtggaattaacagaagatgtgaactatcatacatatatatacacacacacacagatttatatacacacatatatacatatgtatatttctatttgttgacaggcattgtga

SEQ ID NO: 188028 - DNA, 503 bp, Homo sapiens
aaaaacatttgctctttattgttttctagatttgtttttttgtttgtttgtttttgtttgtttttgttttttgttttttgttttgagacagaatctcactcactctatcacccaagctggagtgcagtggcggtatgtcaagtcactgcagtctctgtctcctgagttcaagcgattctccatccttagcctcccaagtagctgtgattacagacatgcaccaccatgcccagctaatttttgtatattttttattagagacaagcttttgccatcttggccacgttggtctcaaactcctgatttccagtgacctcatcttcccaaagtgctgagattacaggcataagccacygcgcctggcctgttttctagaagattgacatgatttggtggaattaacagaagatgtgaactatcatacatatatatacacacacacacagatttatatacacacatatatacatatgtatatttctatttgttgacaggcattgtga

SEQ ID NO: 188029 - DNA, 621 bp, Homo sapiens
ggattcctaggtagtttattctctttgaagcaattgtgaatgagagttcactcatgatttggctctctgtttgtctgtttattggtgtataagaatgcttgtgatttttgtatattgattttgtatcctgagaatttgctgaagttgcttatcagcttaaggagattttgggctgagaygatggggttttctagatatacaatcatgtcgtctgcaaacagggacaatttgacttcctcttttcctaattgaataccctttatttccttctcctgcctaattgccctggccagaacttccaacactatgttgaataggagtggtgagagagggcatccttgtcttgtgccagttttcaaagggaatgcttccaatttttgcccattcagtatgatattggctgtgagtttgtcatagatagctcttattattttgggatatgtcccatcaatacctaatttattgagagtttttagcatgaagggttgttgaattttgtcaaacgccttttctgcatctattgactttctgtttctgagttgtttcatttattataatgacctctagtttcattcatgtttctgcaaaagacatgattttattctttcaatggcagaatac

SEQ ID NO: 188030 - DNA, 621 bp, Homo sapiens
ggattcctaggtagtttattctctttgaagcaattgtgaatgagagttcactcatgatttggctctctgtttgtctgtttattggtgtataagaatgcttgtgatttttgtatattgattttgtatcctgagaatttgctgaagttgcttatcagcttaaggagattttgggctgagacgatggggttttctagatatacaatcatgtcrtctgcaaacagggacaatttgacttcctcttttcctaattgaataccctttatttccttctcctgcctaattgccctggccagaacttccaacactatgttgaataggagtggtgagagagggcatccttgtcttgtgccagttttcaaagggaatgcttccaatttttgcccattcagtatgatattggctgtgagtttgtcatagatagctcttattattttgggatatgtcccatcaatacctaatttattgagagtttttagcatgaagggttgttgaattttgtcaaacgccttttctgcatctattgactttctgtttctgagttgtttcatttattataatgacctctagtttcattcatgtttctgcaaaagacatgattttattctttcaatggcagaatac

SEQ ID NO: 188031 - DNA, 577 bp, Homo sapiens
acctcttttctttcctgcagtaggttgaacaggcttgtgtataaatacctaagctttgatattagaactgattttaagttcttattctgtgtccctttaatagttatttgaccttgagtaagttgtttaatctctctgctgtagtttcttcatctgggaaatgaggataatatttcattccagtctcactgggttgttttgaacattcattgagattatgtgcataaaagcttacccaactctaactctcaataatgttagatgtcattgatacattttttcaacatttttaaattttatttttaactgacaataataattgtacgtattcatggagtacatagtggtgttttcatacatataatgtayagtggtcacatcacactaatttagcatatccatcatccaaacatttagcatttctttgtattgagtgggagtattcaatctattattattattattttcaaacaacctttcttccctttaatcgtttatttaattctgagcaaaagctctggcgtaagctctctgttctttctcttcactcagtttcttggctttacctctcattgtt

SEQ ID NO: 188032 - DNA, 534 bp, Homo sapiens
agaaaagctgtagaaatgtttcagactaacagaggctaaagagacatgacaattaaaagcagtacatgatcctagactgcatccaaaaggtacctgatcctagttggatccagtactgaaggacaaaaatggcaacaaatgatattattgggtcaactgacaaaaatggaataggtaaaatctatgatgtatcaacttttaaatgtactaaagttggtaacttaactatactcatgtaaaagaacatccctaatcttagaaactacatacttagaaaacaagggcctcaccctccgatgtttcagaaaatygaatgctgtaaggtgatacaaatacacatcagaaagcaaatgaggtaaaatgtttaaccacagtttgatcctagaaaggggtatgagtgctgtttgcaatgcatttatttctgcaacttttctataaattttaaataatttccaaataaaacaaattttaaatagaaataatcaaatactacctcattctttattatatcaagtgcatctcaaaacagaagac

SEQ ID NO: 188033 - DNA, 579 bp, Homo sapiens
gaattcatgtatcaaatctaggagctttttggatgagtctttagggttttctaggtatatgatcwtatcatcagtgaatagttacagtttgacttactcttcattgatttgggtaccctttttttctttctcttatctgattgctctggctagtacatgagatgaggttttgggaagaggtagaagttaagccatccgtgcctttcatctatttatgaaagaatattaaacactattgctatctttagatcaaagaaaaagccatggccagaggggggatagacattatcaaatttgtgcgtagaaaatatttccccatctgaactctagagatctaatgggagggagttaagagaggatgtgggtcaactatttaagcaggctactttgcacctaaaagcatcaggacaccaaatatcacccatgtgtgcagagctagaatttctactttcattgctactttggattaaggtagtagatcaaaacttttattaccattctgtagcagaacctatattgcaaacaaaatcttcagcttcataaaaaatgataaatattgtactgccctggcttaggtgg

SEQ ID NO: 188034 - DNA, 534 bp, Homo sapiens
atgagtctttagggttttctaggtatatgatcatatcatcagtgaatagttacagtttgacttactcttcattgatttggrtaccctttttttctttctcttatctgattgctctggctagtacatgagatgaggttttgggaagaggtagaagttaagccatccgtgcctttcatctatttatgaaagaatattaaacactattgctatctttagatcaaagaaaaagccatggccagaggggggatagacattatcaaatttgtgcgtagaaaatatttccccatctgaactctagagatctaatgggagggagttaagagaggatgtgggtcaactatttaagcaggctactttgcacctaaaagcatcaggacaccaaatatcacccatgtgtgcagagctagaatttctactttcattgctactttggattaaggtagtagatcaaaacttttattaccattctgtagcagaacctatattgcaaacaaaatcttcagcttcataaaaaatgataaatattgtactgcc

SEQ ID NO: 188035 - DNA, 559 bp, Homo sapiens
gttttctaggtatatgatcatatcatcagtgaatagttacagtttgacttactcttcattgatttgggtaccctttttttctttctcttatctgattgctctggctagtacatgagatgaggttttgggaagaggtagaagttaagccatccgtgcctttcatctatttatgaaagaatattaaacactattgctatctttagatcaaagaaaaagccatggccagaggggggatagacattatcaaatttgtgcgtagaaaatatttccccatctgaactctagagatctaatrggagggagttaagagaggatgtgggtcaactatttaagcaggctactttgcacctaaaagcatcaggacaccaaatatcacccatgtgtgcagagctagaatttctactttcattgctactttggattaaggtagtagatcaaaacttttattaccattctgtagcagaacctatattgcaaacaaaatcttcagcttcataaaaaatgataaatattgtactgccctggcttaggtggggatgggagttagtggacagaattc

SEQ ID NO: 188036 - DNA, 559 bp, Homo sapiens
gttttctaggtatatgatcatatcatcagtgaatagttacagtttgacttactcttcattgatttgggtaccctttttttctttctcttatctgattgctctggctagtacatgagatgaggttttgggaagaggtagaagttaagccatccgtgcctttcatctatttatgaaagaatattaaacactattgctatctttagatcaaagaaaaagccatggccagaggggggatagacattatcaaatttgtgcgtagaaaatatttccccatctgaactctagagatctaatgggagggagttaagagaggwtgtgggtcaactatttaagcaggctactttgcacctaaaagcatcaggacaccaaatatcacccatgtgtgcagagctagaatttctactttcattgctactttggattaaggtagtagatcaaaacttttattaccattctgtagcagaacctatattgcaaacaaaatcttcagcttcataaaaaatgataaatattgtactgccctggcttaggtggggatgggagttagtggacagaattc

SEQ ID NO: 188037 - DNA, 559 bp, Homo sapiens
gttttctaggtatatgatcatatcatcagtgaatagttacagtttgacttactcttcattgatttgggtaccctttttttctttctcttatctgattgctctggctagtacatgagatgaggttttgggaagaggtagaagttaagccatccgtgcctttcatctatttatgaaagaatattaaacactattgctatctttagatcaaagaaaaagccatggccagaggggggatagacattatcaaatttgtgcgtagaaaatatttccccatctgaactctagagatctaatgggagggagttaagagaggatgtgggtcaactatttaagmaggctactttgcacctaaaagcatcaggacaccaaatatcacccatgtgtgcagagctagaatttctactttcattgctactttggattaaggtagtagatcaaaacttttattaccattctgtagcagaacctatattgcaaacaaaatcttcagcttcataaaaaatgataaatattgtactgccctggcttaggtggggatgggagttagtggacagaattc

SEQ ID NO: 188038 - DNA, 559 bp, Homo sapiens
gttttctaggtatatgatcatatcatcagtgaatagttacagtttgacttactcttcattgatttgggtaccctttttttctttctcttatctgattgctctggctagtacatgagatgaggttttgggaagaggtagaagttaagccatccgtgcctttcatctatttatgaaagaatattaaacactattgctatctttagatcaaagaaaaagccatggccagaggggggatagacattatcaaatttgtgcgtagaaaatatttccccatctgaactctagagatctaatgggagggagttaagagaggatgtgggtcaactatttaagcaggctactttgcacctaaaagcatcaggacaccaaatatcacccatgtgtgcagagctagaatttctactttcattgctactttggattaaggtagtagatcaaaacttttattaccattytgtagcagaacctatattgcaaacaaaatcttcagcttcataaaaaatgataaatattgtactgccctggcttaggtggggatgggagttagtggacagaattc

SEQ ID NO: 188039 - DNA, 374 bp, Homo sapiens
catattctaccattcaatacattttgaatgtcatagttacaaagatgtaagatgtacctacagagatatggaagagaatctgtttgtgatggtttagtcatgcaaaccatcaagtaattttctaatgtatttgcctggggagtttcaggaattccacaatactgactrtcagtcaggaacccatcagcagaaaagaaatctccgtgcatttaccttaaaaacaaagcctcaggtaattagaaataaatggaaagatatgtatgcatctttgtggtcacataaagtcaagggtgagagtacccaacagacagaggccataaataacccacaatttgtgaatttaagataggcaagaagctgactggccagctgtt

SEQ ID NO: 188040 - DNA, 581 bp, Homo sapiens
acttacaactctagcaaagctgaaagaagcttaagggtaggaacttaaagggttcttacctttccacaaacagtagaagctcaagggtagtaaatcatccagccccactcctcgcttgtcctgtcccctccaatacagccccttagtcctaggcacacgttagattataccaaacatcaacactgcttactgaagacttgtttcctccctgttcatgtatcaaagagtcacaaatatttctaaaggactttctytattagcaaacatagataaaagaactgtgctaagagggacacaaaatgaaaaggctaagatcccatttgggggaagctcttgatgaagctaggaatttagacatgggagcaagtaagtattcaacaatgcaatgcatgccatggctatgagatgctctagcaacacctggagtagagtagcccggagttcctgggaaggtttcggaagggaaaggacagaggagaaggtgggtaacagaaataaggctaaattgggtaacatccttgcaattcctagactgttgctcacttctaacccagaatgtctcgtcatttctaactgaatca

SEQ ID NO: 188041 - DNA, 399 bp, Homo sapiens
tagcactggcctccttgcttttcacaaatatgccaggcttgcccctgtctcagtccttggtactagccattccctctacctgaagcactcttcccccatatatgattcactccttcatctccttccaatcttcattcagatgtcactttctgggagaagcctctgtaacacccaaaagaaaactccagtctgtgactcccagtgttccccatccttcttccttagtttaktgctgatcatagcaccatctgcaatgccatatgttttagtcatccggcttcactagaatataaactgcatgagagcagggacttttacctgttgtattcactactgtattcccagggttaggaatagtatttagcacataaaaactgtcataaatatttgtggaataaa

SEQ ID NO: 188042 - DNA, 533 bp, Homo sapiens
ttgcaaacgcatttcactagacttggaagcagaaaagcaaaaycagtagaaacacagagtaacaaagttgtcaggaacacatgtaacttcacacatctgcactggccttaaattattgatttggttaggttattattcacacattttagcttgagtacttatgctgttcttgctgggttttatggctcagggaatatatttagaattaaaacatcctgtcccagaacactaaaattcctaaaactaaaaatgtagaagttagcatatgataagaatcgttgggaattgagatgcagtgaagaccatagactttggtcttcagagctccctttattctgtattacatcagaattgtcaatcatccatggggggaaaaagcccagctgatttatctaggacctaaccaaaaagttgtgaaaattctattttctttatgctctatgataaatgtgatagagaataaagggagaataggaatcataagaaaagatagaaaggtaggtacagaggttgcagtgttggcagaatcgtga

SEQ ID NO: 188043 - DNA, 422 bp, Homo sapiens
aatgagaatgtaatttccacagagaatatgcaactgggagtcctggacagaaaggactaaggaattaggtagttagatggttaaagatccagtactgtaggtcatgtgaacctcctggttcctgaccagggaatgtaatgatgccagcaggtgtrtaaggaaaatgatgtgttgcaccgcttgcaaaaactttatttcaaaacgtcagcaacactggagtcaaatgttaacatttccatggcagaagcctcatcataaccaatcttcacaaatagtggaggtggtatggtttggctctgtgtctccacccaaatctcatctcaaactgtaattcccacgtgtcgagggagggacctggagggaggcgattggatcactggggcagcttcccccatgctgttcccgtgatggtgagggaattc

SEQ ID NO: 188044 - DNA, 422 bp, Homo sapiens
aatgagaatgtaatttccacagagaatatgcaactgggagtcctggacagaaaggactaaggaattaggtagttagatggttaaagatccagtactgtaggtcatgtgaacctcctggttcctgaccagggaatgtaatgatgccagcaggtgtataaggaaaatgatgtgttgcaccgcttgcaaaaactttatttcaaaacgtcagcaacactggagtcaaatgttaacatttccatggcagaagcctcrtcataaccaatcttcacaaatagtggaggtggtatggtttggctctgtgtctccacccaaatctcatctcaaactgtaattcccacgtgtcgagggagggacctggagggaggcgattggatcactggggcagcttcccccatgctgttcccgtgatggtgagggaattc

SEQ ID NO: 188045 - DNA, 558 bp, Homo sapiens
tgttaactctaggaaggtacatgcatgcatatgtacatgcacactcacatgtgtgtgtgttytcactactgtactctcagcatctagactagtagttgacatattctaccattcaatacattttgaatgtcatagttacaaagatgtaagatgtacctacagagatatggaagagaatctgtttgtgatggtttagtcatgcaaaccatcaagtaattttctaatgtatttgcctggggagtttcaggaattccacaatactgactatcagtcaggaacccatcagcagaaaagaaatctccgtgcatttaccttaaaaacaaagcctcaggtaattagaaataaatggaaagatatgtatgcatctttgtggtcacataaagtcaagggtgagagtacccaacagacagaggccataaataacccacaatttgtgaatttaagataggcaagaagctgactggccagctgttttgagagtatttgtttctagaatgtgattgtgtctatactgggtttttaaaggtacattagagtcactttagaaaataagatgtc

SEQ ID NO: 188046 - DNA, 558 bp, Homo sapiens
tgttaactctaggaaggtacatgcatgcatatgtacatgcacactcacatgtgtgtgtgttctcactactgtactctcagcatctagactagtagttgacatattctaccattcaatacattttgaatgtcatagttacaaagatgtaagatgtacctacagagatatggaagagaatctgtttgtgatggtttagtcatgcaaaccatcaagtaattttctaatgtatttgcctggggagtttcaggaattccacaatactgactrtcagtcaggaacccatcagcagaaaagaaatctccgtgcatttaccttaaaaacaaagcctcaggtaattagaaataaatggaaagatatgtatgcatctttgtggtcacataaagtcaagggtgagagtacccaacagacagaggccataaataacccacaatttgtgaatttaagataggcaagaagctgactggccagctgttttgagagtatttgtttctagaatgtgattgtgtctatactgggtttttaaaggtacattagagtcactttagaaaataagatgtc

SEQ ID NO: 188047 - DNA, 558 bp, Homo sapiens
tgttaactctaggaaggtacatgcatgcatatgtacatgcacactcacatgtgtgtgtgttctcactactgtactctcagcatctagactagtagttgacatattctaccattcaatacattttgaatgtcatagttacaaagatgtaagatgtacctacagagatatggaagagaatctgtttgtgatggtttagtcatgcaaaccatcaagtaattttctaatgtatttgcctggggagtttcaggaattccacaatactgactatcagtcaggaacycatcagcagaaaagaaatctccgtgcatttaccttaaaaacaaagcctcaggtaattagaaataaatggaaagatatgtatgcatctttgtggtcacataaagtcaagggtgagagtacccaacagacagaggccataaataacccacaatttgtgaatttaagataggcaagaagctgactggccagctgttttgagagtatttgtttctagaatgtgattgtgtctatactgggtttttaaaggtacattagagtcactttagaaaataagatgtc

SEQ ID NO: 188048 - DNA, 370 bp, Homo sapiens
catattctaccattcaatacattttgaatgtcatagttacaaagatgtaagatgtacctacagagatatggaagagaatctgtttgtgatggtttagtcatgcaaaccatcaagtaattttctaatgtatttgcctggggagtttcaggaattccacaatactgactatcagtcaggaacccatcagcagaaaagaaatctccgtgcatttaccttaaaaacaaagcctcaggtaattagaaataaatggaaagatatrtatgcatctttgtggtcacataaagtcaagggtgagagtacccaacagacagaggccataaataacccacaatttgtgaatttaagataggcaagaagctgactggccagc

SEQ ID NO: 188049 - DNA, 559 bp, Homo sapiens
caactctagcaaagctgaaagaagcttaagggtaggaacttaaagggttcttacctttccacaaacagtagaagctcaagggtagtaaatcatccagccccactcctcgcttgtcctgtcccctccaatacagccccttagtcctaggcacacgttagattataccaaacatcaacactgcttactgaagacttgtttcctccctgttcatgtatcaaagagtcacaaatatttctaaaggactttctytattagcaaacatagataaaagaactgtgctaagagggacacaaaatgaaaaggctaagatcccatttgggggaagctcttgatgaagctaggaatttagacatgggagcaagtaagtattcaacaatgcaatgcatgccatggctatgagatgctctagcaacacctggagtagagtagcccggagttcctgggaaggtttcggaagggaaaggacagaggagaaggtgggtaacagaaataaggctaaattgggtaacatccttgcaattcctagactgttgctcacttctaagccagaatgtctcgt

SEQ ID NO: 188050 - DNA, 578 bp, Homo sapiens
aagctgaaagaagcttaagggtaggaacttaaagggttcttacctttccacaaacagtagaagctcaagggtagtaaatcatccagccccactcctcgcttgtcctgtcccctccaatacagccccttagtcctaggcacacgttagattataccaaacatcaacactgcttactgaagacttgtttcctccctgttcatgtatcaaagagtcacaaatatttctaaaggactttctctattagcaarcatagataaaagaactgtgctaagagggacacaaaatgaaaaggctaagatcccatttgggggaagctcttgatgaagctaggaatttagacatgggagcaagtaagtattcaacaatgcaatgcatgccatggctatgagatgctctagcaacacctggagtagagtagcccggagttcctgggaaggtttcggaagggaaaggacagaggagaaggtgggtaacagaaataaggctaaattgggtaacatccttgcaattcctagactgttgctcacttctaagccagaatgtctcgtcatttctaactgaatcatggagagaacatg

SEQ ID NO: 188051 - DNA, 463 bp, Homo sapiens
agatttttatatttttaccattctgatgggtaaaattattaccattttagtttgcattgcatgatcagtttccatctttgtttgttattctaattttctcttctgcaaatttactgtttacattctttgtcaatttttctgttgatggattagctatttctgattaaaaagaaagtttattctccaactgttaagagttgggtgctatgtatattatgggtatatcctgtaaactgtgccacttctttacccttaatagatrtaattctatttaatctacatgtttttaagaaaggtgtattaaaatgttctaccttgattatgtttgttttttgttttattcctctatataattttatcaagttgtgagaaaaagaatttccttgttagatgtatatatatatcacattcagaattggtatctttcttcctgagttttccctttcttaatgtttcaatgact

SEQ ID NO: 188052 - DNA, 471 bp, Homo sapiens
taatatgttcagtatcttcataaaagaaatatggtaggtgttagagattgtctatcaagaaaaccaagaccaatagggtgtattgcaaacattttttattgattatatatagagtgtctttggcttaatcttgtttgcattattattattttttttttttatgtaggactcaaaagagttcagaactttctatgatctccaactggrccaacaagatgcttcctgttggaagagatggacaagatcttaaagggacagtatctggaacacacagttgttatttccctatgctaaattccagggagcacacatcttggtattgtgctcctgctgccaaccatggctgaacacttaccgtaggattggtagattccaaggcattatatttttaaactcctttttataaaagccaggcctcaaaggatcagtcatccaccagaatttcttttctctgttccctgaactccaata

SEQ ID NO: 188053 - DNA, 616 bp, Homo sapiens
agtgacttggctgtcattctctcttgtctgctgtcatgtaagatgtgcctttcactttctgccatgattgtgagtcctccacagccatgcggaactgtgagtccattaaacctctttttctttataaattactcatgaaggttcaggtatatctttatcagcagcatgaaaatggactaatacaaaaggaaatggataaagatgtctccagaaatatccagaaactgaaggacaaaaagaataatgtctaaaaaatatgactagaaacgactcccctccttccctgccttcagacctcaccctccctcatagaagaaatcgtgtacatcagtgtcagggttggtactttaatatgtttggtgcaagataaattaaaaatcagaattcatgtttcctcttccattcctcaggcagcagtgtggtaatgtgcctgaactgtggtagaagatgatttagaactacttaaaagtttctgaaattcaggattcartaaattaatctatgcttacatttcctcaagtcttgaatttgattttaggagcctgatttgttggttatctgtatatgttgctaacttgaacaagtgcaaaagttcccagtaaaacactattttcag

SEQ ID NO: 188054 - DNA, 469 bp, Homo sapiens
ggaagtgcagctctgaatagtgattatgtcaaggacatgttccatgggagaggcagcatagtgtcgtggaaatccaacctctcccattatgatcgctgggatcttagctttgttagacaagtctctgtgcctcagtttccacacaaaacaaagtccaagtaacaaaacttacttgcatgaaatattagtaagatataacatgagtgaaacaggctttctcaaggtccagcacttatagatactctatgactattagttaaacatatatatatgtacatatatattttttattatatatgttttatgctgttcaagygattttcccacctcagtctctactctagctagatctacaggcccatgtaccatccctggctaatattaatatttttattgaggccacacctcgctttgttgcccaggctggtctagaactcctggcctctagcaatcatcccacctcagcctc

SEQ ID NO: 188055 - DNA, 405 bp, Homo sapiens
ctagaaaaatccaggatactgtaattatcccataggaatgttgattgagtgcccgtggggagaacatattgtgtgtctgtaatattattttccattttctttagaatttccaactttaacctgcaatgaatactactattttatatatagaatataattttctactcattattctcytacagttttagcaaacctagccaagaaaaacaatattttttttcagtagtacctacactttaaaggaaagtctttggaatttagtatcctttgtaaataaaataggatacaaatgggagttttagtagaatgaagatattgaatgctttggctagttttaaagaaatattttccattttatatataatagacaaagatataatcaagggatgaaccagaacacaaagg

SEQ ID NO: 188056 - DNA, 405 bp, Homo sapiens
ctagaaaaatccaggatactgtaattatcccataggaatgttgattgagtgcccgtggggagaacatattgtgtgtctgtaatattattttccattttctttagaatttccaactttaacctgcaatgaatactactattttatatatagaatataattttctactcattattctcctacagttttagcaaacctagccaagaaaaacartattttttttcagtagtacctacactttaaaggaaagtctttggaatttagtatcctttgtaaataaaataggatacaaatgggagttttagtagaatgaagatattgaatgctttggctagttttaaagaaatattttccattttatatataatagacaaagatataatcaagggatgaaccagaacacaaagg

SEQ ID NO: 188057 - DNA, 479 bp, Homo sapiens
tcaaccattacaaggagagcgtttgcttctcttaaaagtttctttccacctctaggtgcattctgtttcaccagctatataaggatcaacagtgtggaaacctgcatcaactggcattgtatttgtaatttattctgatgattgtttagtgtcctttatatttacacaatttgtggaacccagtgtaaaatgaaaatgtgaggctccttgttcagaattattaataatttcaagaaggcaattctagggcattaggcaagtgcaggactctgctgagtctaggtcctgtacagtggcaaaggtcacacgtttgtatcaccggccctgttgatgttgaagttcttagcacgaagctggctgacctggttccasgtacaggaagtgacacccatgaggaactttcagatcccctttatactctcaaaattttagtttttcttttaactttagaaaacttgcctggatttcagttattcatc

SEQ ID NO: 188058 - DNA, 336 bp, Homo sapiens
agtgctggcacatggtcttaatggtttccttaatttggtaagagacaagatttgtgtcctcctccccaaagaagacattgagggttaaaaatactgtgaggtttttgtttctactaattaagtgaatcagatatacagtcatttgtgtgtgagttcaaaagctaagttagtttttatcaataattcttatatgtttgcagagtactatttagttcatgatttctggaatattaaatgtctgtattcaytgtctaacatatctaacatattatttatcttttcatcagttcactaaatttttcagaatatactttggcattaataataagcagcatg

SEQ ID NO: 188059 - DNA, 596 bp, Homo sapiens
ctttgaggaacataacattatataatagaaatcacttctcaattttatttttcaacaatttttttcacaggaaattacatgagagaattgacatgagactagttcaacaaaacttatcacaagaagctcaaacttaaagtaaaatcttggaatcaagcatcagaatatatgagtctatagttctatcttcactgttttgtggttgagttsagttcaaaacaaatatgtaatgttttaagaactttgttctacctccgttgtctcttctatgaagagttttgaggatgaaactgcaagcagtatgcaaaagtactatccagagttaaaagctccatgcaagcatgagattattattacgttcttttatcatttgacccactatttgttccacaatgtgaaaggaatatagctgattgctcccaaagaccttggtaggtcaaagtaaagaaaagtgcatattatcaggccagaggccacaaggtgtgagactggatgaaatgaacacaatacaatgatctctgtgagaaaataatttatttcaaaataaatgccctaactctagagagctggtagagtttgggacatgaggtacacag

SEQ ID NO: 188060 - DNA, 644 bp, Homo sapiens
cctttctaatcttctctgtatcattccaattttagtatatatgctgccaaaaagagcacagggttcctttccaagcaaatgcaatactcagaaagatgtctaagtgggaaatcatgataccaggattgataatgttctgaagttgacaccaaaagcctcaaccacagggctgttaagcagacacaattatttactctccttcactggaactttcttagatgtgacctaaatgtaatctgatttatagagctgttcattataaaaggagtctcatattaattttatttggaaagggtttccccccatgttttacataatgttgaggaaagagaagagctaagtataaagaaaacatatttctgggtgctaatttgtatatattagcctaaagattacacaaatttaagaatacctgtccatgtgtamaaagtctcaaaaaacatagcctgtcaaataaaaaaaaaattcttttttactatacacaataaatgcggctaaaaaagaaacagtttttaaaggttatggacatgttatttgacaaacaaatctgtatgtgacataataaaattgataactctttaccaaggctcataagagagaagatacaaatttccagtatcaggaatggaagtggggaacattac

SEQ ID NO: 188061 - DNA, 530 bp, Homo sapiens
aactatcaacagagtcaacagacaagctaccattgaatgggagaaaatatttgcaaactgtgcatctgacaaagcatctgtaaggaacttaaatttacaagagaaaaacaaacaaccccattaaaaagtgggcaaaggacatgcacagacacttttcaaaagaattacacaaatgtttcaattaactagaaaaagaggaggagaagggttaccataattccattacctgaatcctctgaytggttatggcttaagcagaaatgccttgtgtctgaaacttcttaatcaaacaatttgttgccctgtgtaaatactactaccactgctacatctcatatttactgaacatctgtggtgtatctggcgttgttgaatgctacttacccatttatgcctcacaatagcactatgcaatcaggattcttaggctgctcattttaactgatgaggaagctgaggtagaaattaggtaaaaagaatgaatgcaaccctctaatgactaagtgccttcatcacttccttaccatcat

SEQ ID NO: 188062 - DNA, 517 bp, Homo sapiens
gccacaggtccaaatttcatttactacctgattaccaataagtgatacccccctccaatgggtcagaggcattttgggtctctagagattagcatagactcagaaccaatgtccagaaatctaccaaaagcctggatatgcccccttcctcagtacacagttaccctagtgaatggctgcatgtcttttggggaagactgaaaggaagatttatgctagatacttatagcaatgttatagggkccttcctcaaacttcccaatcctctccttcatctaaactttagagttctcaagccttagcatgcatcagaatcagctgaagtgaagattgctaggacccacctcctgagttcttgtgtcagtgggtttggggcagggtctgataatgtgcatttctaacaaagtcccaggtgatgctgttgctgcaacttcttggccacggtttgaaaatcggcaatctaaggatttctgtgttttagaactgactcaggtctggaatgtagatgagaggcaat

SEQ ID NO: 188063 - DNA, 458 bp, Homo sapiens
gcaagactggtttaacataggtacgttaatcaaagttacacatcacagactgaaagacaaaaccacatgatcatctcaattgacacaaaaagtattcaacaaaatccaacatcctttcttgataaaaacrctcaacagtctgggtatacaagaaaagtccctcaacataataaaggtcatttacaaatgacctttggctgagtcctctccccacccatggtgttttaaactctcagacttgtccctatggagcctctagtaatttaccaattactgttcaggtttcccttcctcaccatttgtttccatggagggttctacttacaggtttgctcctgttaagttttgactccctatattcatctctctctctaattttggagggcagcaatttgccctgtgacctcagtttcaacaaatctaaaaagagttcttgattatatttcagtttgtttggc

SEQ ID NO: 188064 - DNA, 458 bp, Homo sapiens
gcaagactggtttaacataggtacgttaatcaaagttacacatcacagactgaaagacaaaaccacatgatcatctcaattgacacaaaaagtattcaacaaaatccaacatcctttcttgataaaaacgctcaacagtctgggtatacaagaaaagtccctcaacataataaaggtcatttacaartgacctttggctgagtcctctccccacccatggtgttttaaactctcagacttgtccctatggagcctctagtaatttaccaattactgttcaggtttcccttcctcaccatttgtttccatggagggttctacttacaggtttgctcctgttaagttttgactccctatattcatctctctctctaattttggagggcagcaatttgccctgtgacctcagtttcaacaaatctaaaaagagttcttgattatatttcagtttgtttggc

SEQ ID NO: 188065 - DNA, 543 bp, Homo sapiens
ccgagtcttacataaatatgactttaatggtactaacgttttaagccaacctaggttgttctgattcccgttctgaacactgaggttcaacatcattaacagacaagccaaagataatcactatcccaagcgctttgccagctgcgtgagtgaacatgctgtctgttttagcagcagccactttttggtggcatattttgttctgtttctttatggaaatatggtttatctataccactaaactcttttctttttctggcaaccgattcwgagttgaaaagtttatgccagacacggtggctcacacctgtaatcccagcactttgggaggccgaggcgggtggatcacctgaggtcaggagtttgaaatcagcctgggcaacatggtgaaaccctgtctctactaaaaatacggaaaaaaaattagccaggcatggtggcatgtgcctgtaatctcagctactcaggaggctgaggcaggagaatcacttgaacccgggatgtggaggttgcagtgagccgagatcgtgccactgcattcca

SEQ ID NO: 188066 - DNA, 618 bp, Homo sapiens
gtactcagctggtggacagagtcatctgtgcagtccaagataaatctatttacatgtttgtttccttatctggaatgattggaagacttgggtcaggtgggaatgtccagagcacctgcatgtgtttcctccgttagtagtggtctcaggatagtgggatttcttacatggagcctccrgcctccctgagggatgtaccaagagccacgaagtggaagctgccagtctcttaaagcttggacccagagactggacaagtgtcatttatgttatatattaccagtcaaataagttacagagccccccaaactcatgagaggagtatcagataactagcgtgcatccttaaatcactagaattgttaatcccaggccttcagaataccctctgaagatatttgatgtatatattgggtgagaatgccattgtagttcacatattaccaattaataaaggttgaattatttttttcttgaaaggattaacggaaatagaaatcataatatattgttcccatacaccagcggatcgttgtatgcacagcctgttggaagcaatgccagagaagtatattttgcttaaatatcgactatcacaatattattacattttacact

SEQ ID NO: 188067 - DNA, 262 bp, Homo sapiens
agaaatgtggcctcatatttattgagtggtttctctgtgccaggcacttttctagacactggggacacatcgttcttgaacccaacaaacaaaatcctcctcttcatgtaaccaacctacaggaaataagttactatgagtgctttaaaggggctgactgtctaagaagttacataactaaagatattttacactctttgtrggaacttccatgagtgaagtaagttaaaagtttccaaacatatatcattgctttttggct

SEQ ID NO: 188068 - DNA, 592 bp, Homo sapiens
ccagtgcaattgttggttaggtagggaaacagattcttgatacttcctactyttccatcttcccagaaccctccttctattatcagtattttgtcatctttttatagctcttaagcaagttagatagctcccttctatgcaatatttatgaaataatcaaaactatggactgctggatagcaggagcgctccaaaaattaataaataaattaactaattaatataaagaaaaaaactcacaagggtataatgtctatagaatttagaaaatagaagtctacatttgtgcacagtgaggccaagattaatttggagttctagaaagccagagaagcatcatgaatgtataatggcctagaaagtgtggcaggcactagttgaggtgggtacctgctatggtttagatacggtttgtttggctctaccaagtctcatgttgaaatttaatccccaatactggaagcaggccctggtgggaggtatggaggtggatttctcatgaatagcttggtgctgccctcacagtaatgaaacgagtgagttctcattctattgattcctactgagagctgcttgttaaaaagtgcctaaa

SEQ ID NO: 188069 - DNA, 620 bp, Homo sapiens
aggtgggtggggagaagaataggcaagtaaaggcagccatgaggaaactgaactttcatcaccttgagcacggtatttttgagtattaactatgcttggcatgcaaaaagcagttaaaagtctaacaaccaagcgtgaacttcacgcacctaaatctcctgtgatagttctagacaatacttggcaatccgctttgtaaatgggttttaaacaagtactcataatgatgaaacaatatagaggaacaaattgcggtaagaaaagcatgctgttgatgtcaaaagaagccagcccgttaccgtaattccagcaacacattgactgtggtcctggccacaggcaaatttctgatacctgctttttaaattatcacccagggtggcttggagaaatgtggtaactttgggtatgttaacacttccataaattaattcagttagaagaagatacacttagaaatgtagaatataagcctgatgtgttgacatgtattgaaaaggaacaaaaaagacaatagtkatttattttaatagcaagttgtgataccaaacaacattcttccttttacctcattgtcttccatggcctaggccttcctttatttttagttaattcctaca

SEQ ID NO: 188070 - DNA, 620 bp, Homo sapiens
aggtgggtggggagaagaataggcaagtaaaggcagccatgaggaaactgaactttcatcaccttgagcacggtatttttgagtattaactatgcttggcatgcaaaaagcagttaaaagtctaacaaccaagcgtgaacttcacgcacctaaatctcctgtgatagttctagacaatacttggcaatccgctttgtaaatgggttttaaacaagtactcataatgatgaaacaatatagaggaacaaattgcggtaagaaaagcatgctgttgatgtcaaaagaagccagcccgttaccgtaattccagcaacacattgactgtggtcctggccacaggcaaatttctgatacctgctttttaaattatcacccagggtggcttggagaaatgtggtaactttgggtatgttaacacttccataaattaattcagttagaagaagatacacttagaaatgtagaatataagcctgatgtgttgacatgtattgaaaaggaacaaaaaagacaatagtgatttattttaatagcaagttgtgataccaaacaacattyttccttttacctcattgtcttccatggcctaggccttcctttatttttagttaattcctaca

SEQ ID NO: 188071 - DNA, 486 bp, Homo sapiens
tgcctaattccaacacctcactgttttttcttctttcaggctgccatctccgttttaattaaaaaaaaaattaacattctgaggcttaagttctatataacagtatttgctctgttrttgactagcagtgtacggtcttggacaagttacgtaatctttcaggaactcagttctcttttctgtgaaatgagcatgctggtctcaatgatttttgaggctgtttctagttctaaactcagattccactgaagtatttctgagaattacaattactgtattgtctgagctcccttttcactaaacacaagatacacaagggggcagtataacacttaaaatatgaattggttacttcttacattcaagaattactctttcgaaaggatttagagatattaaatcctcccaagattaaaagaatcaactccgattagaacaatgattctattcatttataatacagcaatagctttatatatttctgat

SEQ ID NO: 188072 - DNA, 486 bp, Homo sapiens
tgcctaattccaacacctcactgttttttcttctttcaggctgccatctccgttttaattaaaaaaaaaattaacattctgaggcttaagttctatataacagtatttgctctgttgttgactagcagtgtacggtcttggacaagttacgtaatctttcaggaactcagttctcttttctgtgaaatgagcatgctggtctcaatgatttttgaggctgtttctagttctaaactcagattccactgaagtatttctgagaattacaattactgtattgtctgarctcccttttcactaaacacaagatacacaagggggcagtataacacttaaaatatgaattggttacttcttacattcaagaattactctttcgaaaggatttagagatattaaatcctcccaagattaaaagaatcaactccgattagaacaatgattctattcatttataatacagcaatagctttatatatttctgat

SEQ ID NO: 188073 - DNA, 400 bp, Homo sapiens
gaaatctccctgttttaaaactaaaattaagggttggcaccatactgcactaagtatggatatgccctgaggcagaaactacattcttttagtctgttacctctgctttaagggtactccattgctcaagaccggcctgaccaacaggtgaaaccccawctttactaaaaatacaaaattatcagggcatggtggcaaatgcctgtagtcccagctactcaggaagctgaggcaggagaatcgcttgaacctgggaggcagaggttacagtgagccaagatgcgccattgcactccagcctgggcaacaacagcaagactcccgtctcaaaataaataaataaataaataaaagtcggggggtactccattgttctttaggtaaaatcaaaagtcctcag

SEQ ID NO: 188074 - DNA, 578 bp, Homo sapiens
ggccaataataattctagaatttgagagttgtgaagggttttggggatcatcaatttacaccctctcacttttacagataatagagatctagagaaaatatataactagcaaggagcaggataaagacttaaatgcagtttctctgactttaatcaggtgactgggtgttaaaaaggaggggaaaagtcacttggagatttaaaaacatgttttttttaatctactattatctacttttttatctatttttaaaaaatatacaaagtaaataatctatagatagagaatatgttgacaatgttttagtacttcttattgaacagtatatgaaaayatcattagatttaaccttaagtaattgtcctattctaactgcttattattttaactgataccattacacatatgttcagtacatactccgaggggaaagcgatttccctattcttgatgttttgtttttgcagtggatgctcaagtagttttattcctggcttttctgcttcattacccatccactacaagataaagggatttataaaattagtaaatttatgaataaactgagcatgcttta

SEQ ID NO: 188075 - DNA, 602 bp, Homo sapiens
tgattaattagagtatagtctgcttatacaggtatgctataatgtcctatgacttgtcatcaagggcattttatttagtgagtgtggtcatttacaaggcagcttgatcagtgtgagcagcccaagacagcctcaaagaatagagagtcagtgtgtgtaatggaaagatccttggattaaaaatcaggagacctggctcctaactgggcgtcaggagacctggcctctggttctggctctgctacttggtaggaaacttgcccaaagtcactcagctatcttttctgggctcagtgtcctcaaccataaaatgaaggggttgaagtagatgatctctaatgtcttttccagatccaaaagtctgagttttaggaaatccatctcttgaaacccagtttggggtagttgagacagacattartatatataaataaggagaagatttacataaatgaatgactttttttttcaaattaagacttttttaatggtcgtagttataacacaaatgcaattgatggtttatgaaattttctcagaaaaggaatcctaaaagaatctcaagatacagtaaagtttgacctttgaattgacttcagttc

SEQ ID NO: 188076 - DNA, 517 bp, Homo sapiens
tttttccacctgcagaagtcattattttaattgggggctaaaatatgaactacttaaaaagtaatttgttttccttaagactgctcccaaaaatggaaaaaaaaaagtcattttaagcagatgtttcttgaaatccaaatatattagatattctgagtttaacttaaatggttcatctgtttttccagtcggattttatttatttatttatttatgagacagagtgtcactctatcaccaggctgcagtgcagtgcgtgtgatatctgctcactgcaacctccgcctcccaggttcaagccactctcctgccttatcctcccaagtagctggrattacaggcgtgtgccaccatacctggctaatttttgtatttttagtagaggcagggtttcaccaagttagccaagttggtcttgaactcctgatctcaggtgatctgcctgtcttggcctcccaaagtgctgggattacagtgagccactgcacccggccagattatatttattttaaggttc

SEQ ID NO: 188077 - DNA, 517 bp, Homo sapiens
tttttccacctgcagaagtcattattttaattgggggctaaaatatgaactacttaaaaagtaatttgttttccttaagactgctcccaaaaatggaaaaaaaaaagtcattttaagcagatgtttcttgaaatccaaatatattagatattctgagtttaacttaaatggttcatctgtttttccagtcggattttatttatttatttatttatgagacagagtgtcactctatcaccaggctgcagtgcagtgcgtgtgatatctgctcactgcaacctccgcctcccaggttcaagccactctcctgccttatcctcccaagtagctgggattacaggcrtgtgccaccatacctggctaatttttgtatttttagtagaggcagggtttcaccaagttagccaagttggtcttgaactcctgatctcaggtgatctgcctgtcttggcctcccaaagtgctgggattacagtgagccactgcacccggccagattatatttattttaaggttc

SEQ ID NO: 188078 - DNA, 517 bp, Homo sapiens
tttttccacctgcagaagtcattattttaattgggggctaaaatatgaactacttaaaaagtaatttgttttccttaagactgctcccaaaaatggaaaaaaaaaagtcattttaagcagatgtttcttgaaatccaaatatattagatattctgagtttaacttaaatggttcatctgtttttccagtcggattttatttatttatttatttatgagacagagtgtcactctatcaccaggctgcagtgcagtgcgtgtgatatctgctcactgcaacctccgcctcccaggttcaagccactctcctgccttatcctcccaagtagctgggattacaggcgtgtgccacmatacctggctaatttttgtatttttagtagaggcagggtttcaccaagttagccaagttggtcttgaactcctgatctcaggtgatctgcctgtcttggcctcccaaagtgctgggattacagtgagccactgcacccggccagattatatttattttaaggttc

SEQ ID NO: 188079 - DNA, 522 bp, Homo sapiens
agaaaattagggattgtgcaataaaggtgtctggagaatgcctcagtgaggacggtgtttagccatcttaattttagcagtgagcatggtatgtattggagagagaagttgaggacacaaagaatagccattgttcttgttgctagaggtttaagtatcaccttatgaagatttttattaaggttatggcatgagaaatagaaggaagcttgaatctgtaggacttctgactaataatttacagaaaaawtaaggcaggaaaatggaatattctgaaacttggattaataggaaacaaaaaaaggaaggggctttgagaaagatacgtttagaaagagtatataagaaagcagtgcagtggcacgatctcagctcactgcagcctctgcctcccaggcccaagccatcctctcacctcagcctcccgagtagctgggactgcatgcaggcatgcaccaccatgcctggctaatttttgtgtttttgtagaaatggggtttcaccatgttgccccatggctgg

SEQ ID NO: 188080 - DNA, 522 bp, Homo sapiens
agaaaattagggattgtgcaataaaggtgtctggagaatgcctcagtgaggacggtgtttagccatcttaattttagcagtgagcatggtatgtattggagagagaagttgaggacacaaagaatagccattgttcttgttgctagaggtttaagtatcaccttatgaagatttttattaaggttatggcatgagaaatagaaggaagcttgaatctgtaggacttctgactaataatttacagaaaaaataaggcaggaaaatggaatmttctgaaacttggattaataggaaacaaaaaaaggaaggggctttgagaaagatacgtttagaaagagtatataagaaagcagtgcagtggcacgatctcagctcactgcagcctctgcctcccaggcccaagccatcctctcacctcagcctcccgagtagctgggactgcatgcaggcatgcaccaccatgcctggctaatttttgtgtttttgtagaaatggggtttcaccatgttgccccatggctgg

SEQ ID NO: 188081 - DNA, 551 bp, Homo sapiens
attcacctccaaatcagagacaatgaaatgtcttgcttaatgttttttgtttttttttccactgagagtttctgttctatactatcttccagagatatgcctaaatcgggcttcaatgccatagcaatacatgttggtaaatcatatagaataaaaagaatggtatgtaaaggagcttgacttttatttttcaaataaaactcatcacaggagacttgatatgggctacatttgcagatgggggtgggsgagcggaaagcagcaatgtgaaaaattgggcaagatagggagtgagtgatgtgcctatggaacttatctagatcttcatgtctaattgagcccatcccatacatggcacttgtacttgtaaacccagaaaatcggagacaagtctcagttaatttagaaagtttattttgccaagactgaggacgtgcgcccatgatacagcctcaggcagtcctgatgacatgtgcccaaggtggtaggggcacagcttagttttatacattttatggagacatgagacatccatcaatatatgtaagaag

SEQ ID NO: 188082 - DNA, 431 bp, Homo sapiens
gtttttatcatgaaatgatattgaattttatcaaatttttttggcatctatcgaactgaccatatggtttttgtacttcattctattgacgygatgtatcacgttgattggtttgcatacactgaaccatccttgcatccatgagatgagctccagttgatcatggtgaatgattttttttggtgtgttgttaaattttgttagtcttttgttgaggatttttgcatctatgttcatcagaggtattggcctgtagttttcttttgtgttttgtgtctttgtctgatcttagtatcagggttagtatcaggcttcgtaaagtgagtttgaaagtacttcctcctcctcaattttttggaatagtttgagtatgattggttttagtttttctttaaatgtttggtagaattcagtagggaagccattaggtc

SEQ ID NO: 188083 - DNA, 538 bp, Homo sapiens
cgtgagcaactgtacctggccccaatccagtgtttttttatgtcattttccctcttcctttcagggctgttatggcacctacctttttttaacgatattggggatgttattgcaaactgccaagatattactagatagaatgagcctttggcccaggcatcagatatgcaattcagaaccatgcaatttctgtctgtttttataggcatccccaacccctaacttactggcctcaggcagcacgagatggatgggtgagtggtagctccctgctgctaccccatcccctcccagctggggctcatggccatgtctgcttcatgcacacactgcatacaatagccatgcggggctagaatgagctgcagctgccacccgggccacaaggtggtttcaggggctaargacccagtgtgtctggctggctagtttttcctgttcgctgtcccttcctgcctcgtgcccacggagtatttcctcctatggctgaaccaggaagagggtacaaacaattatgagttttccaccatgttggagg

SEQ ID NO: 188084 - DNA, 622 bp, Homo sapiens
acattcttctcctcagcaagtgaaacattctcaagaataaaccacatattaacctacaaaacatgtctcaaaatttttttwaaaatagaaatcatatcagttatctcatctgaccacaatggaataaagctagaagtgaataaccagagacactttggactagcttattattttttcctgctccagatatgggatgagtctctgataatggctgaaatttgtgatgactgtgtcactggtgtgtgtgcttgagaatcatgctgttggttaccatctgagtacacaggtgcagggtccagtcaaagttattttgttctttccataagttatgggctgtgctttagtctgtggtcagaactacctgcttaggaaactggttgtggacaactttgaccctagttgctgtttaaattaaagcattcctttagactcagcccatgtagctcttaatttaatatgacccaggccaggttattgctgtgctttcccagatgtctttagtgatgtctctgtattggcatgtttgcattaagatacctttaatgtattactgatatttttcctatcatcacaccatagccatttgggcatagatgtaatgaaatgtacagccttcgtccat

SEQ ID NO: 188085 - DNA, 622 bp, Homo sapiens
acattcttctcctcagcaagtgaaacattctcaagaataaaccacatattaacctacaaaacatgtctcaaaatttttttaaaaatagaaatcatatcagttatctcatctgaccacaatggrataaagctagaagtgaataaccagagacactttggactagcttattattttttcctgctccagatatgggatgagtctctgataatggctgaaatttgtgatgactgtgtcactggtgtgtgtgcttgagaatcatgctgttggttaccatctgagtacacaggtgcagggtccagtcaaagttattttgttctttccataagttatgggctgtgctttagtctgtggtcagaactacctgcttaggaaactggttgtggacaactttgaccctagttgctgtttaaattaaagcattcctttagactcagcccatgtagctcttaatttaatatgacccaggccaggttattgctgtgctttcccagatgtctttagtgatgtctctgtattggcatgtttgcattaagatacctttaatgtattactgatatttttcctatcatcacaccatagccatttgggcatagatgtaatgaaatgtacagccttcgtccat

SEQ ID NO: 188086 - DNA, 567 bp, Homo sapiens
ggtgtgtgtgcttgagaatcatgctgttggttaccatctgagtacacaggtgcagggtccagtcaaagttattttgttctttccataagttatgggctgtgctttagtctgtggtcagaactacctgcttaggaaactggttgtggacaactttgaccctagttgctgtttaaattaaagcattcctttagactcagcccatgtagctcttaatttaatatgacccaggccaggttattgctgtgctttcccagatgtctttagtgatgtctctgtattggcatgtttgcattaagatacctttaatgtattactgatatttttcctatcatcacaccatagccatttgggcatagatgtaatgaaatgtacagccttcgtccatgagagtactatgartttcacaactgcctgtttttttcactgtttgtaaagggaactgagagctgaaattataacctagccatcacaggagtctcacacttcatttgttctgggttacgatgggtgataaataaatacatatttcaatttaattgtgcaatcagccttgtctttgtatatttt

SEQ ID NO: 188087 - DNA, 567 bp, Homo sapiens
ggtgtgtgtgcttgagaatcatgctgttggttaccatctgagtacacaggtgcagggtccagtcaaagttattttgttctttccataagttatgggctgtgctttagtctgtggtcagaactacctgcttaggaaactggttgtggacaactttgaccctagttgctgtttaaattaaagcattcctttagactcagcccatgtagctcttaatttaatatgacccaggccaggttattgctgtgctttcccagatgtctttagtgatgtctctgtattggcatgtttgcattaagatacctttaatgtattactgatatttttcctatcatcacaccatagccatttgggcatagatgtaatgaaatgtacagccttcgtccatgagagtactatgaatttcacaactgcctgtttttttcactgtttgtaaagggaactgagagctgaaattataacctagccatcacaggagtctcacacttcatttgttctgggttrcgatgggtgataaataaatacatatttcaatttaattgtgcaatcagccttgtctttgtatatttt

SEQ ID NO: 188088 - DNA, 537 bp, Homo sapiens
taaagcattgttcataatatgtcartagtctctcttaattgcaaggaaaacgaagaagtacactatttctttttgtttattttgaagtttggccatcgctgcccccacccaaataaaagtaggattctattaggaaggaaataaaggaaaatggatgttggataggttaaaaaattagccagctttgtctgctgcatttattaatgttttcacactaatggactccgtttaaaaaatataattgatagagcaataagcattcattcacttattcattcatttattcttccaacaagcattaactagaaagttttaataagagaagtgtagaaaagagtaagacacactgctagcattcaataggtttatgtttaagtagaagaaatacatatatggatgattgttctgcaatgtaataagtactatcagagatgaaaatatgggatgctgctatggacacaaaagaaagtcggcaatcagataagacttcccagaaaagctaacaaattctaggagaatgactttaaatgtcactcc

SEQ ID NO: 188089 - DNA, 537 bp, Homo sapiens
taaagcattgttcataatatgtcaatagtctctcttaattgcaaggaaaacgaagaagtacactatttcttttkgtttattttgaagtttggccatcgctgcccccacccaaataaaagtaggattctattaggaaggaaataaaggaaaatggatgttggataggttaaaaaattagccagctttgtctgctgcatttattaatgttttcacactaatggactccgtttaaaaaatataattgatagagcaataagcattcattcacttattcattcatttattcttccaacaagcattaactagaaagttttaataagagaagtgtagaaaagagtaagacacactgctagcattcaataggtttatgtttaagtagaagaaatacatatatggatgattgttctgcaatgtaataagtactatcagagatgaaaatatgggatgctgctatggacacaaaagaaagtcggcaatcagataagacttcccagaaaagctaacaaattctaggagaatgactttaaatgtcactcc

SEQ ID NO: 188090 - DNA, 257 bp, Homo sapiens
gtttttacttataaagcattgttcataatatgtcaatagtctctcttaattgcaaggaaaacgaagaagtacactatttctttttgtttattttgaagtttggccatcgctgcccccacccaaataaaagtargattctattaggaaggaaataaaggaaaatggatgttggataggttaaaaaattagccagctttgtctgctgcatttattaatgttttcacactaatggactccgtttaaaaaatataattgat

SEQ ID NO: 188091 - DNA, 537 bp, Homo sapiens
taaagcattgttcataatatgtcaatagtctctcttaattgcaaggaaaacgaagaagtacactatttctttttgtttattttgaagtttggccatcgctgcccccacccaaataaaagtaggattctattaggaaggaaataaaggaaaatggatgttggataggttaaaaaattagccagctttgtctgctgcatttattaatgttttcacactaatggactccgtttaaaaaatataattgatagagcaataagcattcattcacttattcattcatttattcttccaacaagcattaactagaaagttttaataagagaagtgtagaaaagagtaagacacactgcyagcattcaataggtttatgtttaagtagaagaaatacatatatggatgattgttctgcaatgtaataagtactatcagagatgaaaatatgggatgctgctatggacacaaaagaaagtcggcaatcagataagacttcccagaaaagctaacaaattctaggagaatgactttaaatgtcactcc

SEQ ID NO: 188092 - DNA, 537 bp, Homo sapiens
taaagcattgttcataatatgtcaatagtctctcttaattgcaaggaaaacgaagaagtacactatttctttttgtttattttgaagtttggccatcgctgcccccacccaaataaaagtaggattctattaggaaggaaataaaggaaaatggatgttggataggttaaaaaattagccagctttgtctgctgcatttattaatgttttcacactaatggactccgtttaaaaaatataattgatagagcaataagcattcattcacttattcattcatttattcttccaacaagcattaactagaaagttttaataagagaagtgtagaaaagagtaagacacactgctagcattcaataggtttatgtttaagtagaasaaatacatatatggatgattgttctgcaatgtaataagtactatcagagatgaaaatatgggatgctgctatggacacaaaagaaagtcggcaatcagataagacttcccagaaaagctaacaaattctaggagaatgactttaaatgtcactcc

SEQ ID NO: 188093 - DNA, 623 bp, Homo sapiens
tgaattttaattacaatataatgtagtattcagcatttatgaaacatttaatattaatgtacagcctggatattgacatggaaaatttttgtgagacattcaaagcctgtttacttaaagcacaataattgttgctttattctgtgtgctggagtggtttccgtgatcttcactgccttttccctgcatgagggctcccagtattcttgagactgttatgcagatgctaaattttgaggtatcagagaaacactctcagcaattcactctctctttcttactgttggctacacttgaggttagtgtggcttcctagtgtcaggtgccagaaggcacaacatcatgtgamctaccccctctccagcaaagtcagcacacacatggaaaccttcaaatatgcccactgggacggagaatgtttgttggcttctattcttcttcctcccgtaactattttgaattcctgacttcaccctcttcttattgagtacgcttacaggttctcaatccattcagttcttctatcttttcctctttctatattaacagattgctccatgttttgatatgactgttttttcatgagtcactgctcatggtgaatcgtcagctctgcaaggtag

SEQ ID NO: 188094 - DNA, 579 bp, Homo sapiens
gctccgacttggatggacatagcagcgtgtagaggctcgcatcgtgaattttcactcccaaatgactgcaggaataaatcaggaaacctgagaggaccccagaccccatgaagggagtagattgctcctgtaggacctgggagacaaccgaattactgtgagtgcccaaactgtggaagcgggaaaggcagatcatctgcccccaaatatgcaccccaactggggaaactgaaggcctagattatgggagaagattttgactttacctgcagctgaatcaatttagagagccaagtgaaatacaggggtagaggaagcagcgggaaaagccctgggagcgtgtwggatccccgagcaaggcatttttgcctggcctcacaggggtccttcaggagggtggcaagatgcagtgggcaagggccatagggagaaggaaatttccagctgaattttgtaaaaatttgaactgatttagaagcctcctggcagaactcaggtgaggacgtgaatctggtatgcagactccacaggcaggggaagaagaaaagccagatttgcttttgcagctgggaggcaggt

SEQ ID NO: 188095 - DNA, 579 bp, Homo sapiens
gctccgacttggatggacatagcagcgtgtagaggctcgcatcgtgaattttcactcccaaatgactgcaggaataaatcaggaaacctgagaggaccccagaccccatgaagggagtagattgctcctgtaggacctgggagacaaccgaattactgtgagtgcccaaactgtggaagcgggaaaggcagatcatctgcccccaaatatgcaccccaactggggaaactgaaggcctagattatgggagaagattttgactttacctgcagctgaatcaatttagagagccaagtgaaatacaggggtagaggaagcagcgggaaaagccctgggagcgtgttggatccccgagcaaggcatttttgcctggcctcacargggtccttcaggagggtggcaagatgcagtgggcaagggccatagggagaaggaaatttccagctgaattttgtaaaaatttgaactgatttagaagcctcctggcagaactcaggtgaggacgtgaatctggtatgcagactccacaggcaggggaagaagaaaagccagatttgcttttgcagctgggaggcaggt

SEQ ID NO: 188096 - DNA, 579 bp, Homo sapiens
gctccgacttggatggacatagcagcgtgtagaggctcgcatcgtgaattttcactcccaaatgactgcaggaataaatcaggaaacctgagaggaccccagaccccatgaagggagtagattgctcctgtaggacctgggagacaaccgaattactgtgagtgcccaaactgtggaagcgggaaaggcagatcatctgcccccaaatatgcaccccaactggggaaactgaaggcctagattatgggagaagattttgactttacctgcagctgaatcaatttagagagccaagtgaaatacaggggtagaggaagcagcgggaaaagccctgggagcgtgttggatccccgagcaaggcatttttgcctggcctcacaggggtccttcaggagggtggcaagatgcagtgggcaagggccatagggagaaggaaatttccagctgaattttgtaaaaatttgaactgatttagaagcctcctggcagaactcaggygaggacgtgaatctggtatgcagactccacaggcaggggaagaagaaaagccagatttgcttttgcagctgggaggcaggt

SEQ ID NO: 188097 - DNA, 488 bp, Homo sapiens
cttcccaccatggacttccagaatcctagctgcaggagcccccataacccccacagacatttgagttggcagggaaatggcccagagagcagacagacagagctcaaatccacctggagcccaggtggtttggcacggggacagctgcagtggaacacagctataggcgcccatcaaggctctccatactcctccagatagttctggcctttgttcactggtggacatggacagagcagggctgtttcttgcaggaccagagcacgtctaatctkcacatccccctgtcaccagcttctctgagtccctgtctggccacactggctcacagtgcagcctcagctgccctcccagagtgcttttgccagtggccaccattatacaactttcactggtgacccccgctgcctcactgaagcaattttgctgatgacccactggagcactttcacctatgacctcattgccaccctaccagagcactttca

SEQ ID NO: 188098 - DNA, 476 bp, Homo sapiens
cctaatacaatttgcaaacctcactgttttcactgttctgtggccatttcaagacaggtttaaggaagtagrtataaaataagtagtaagtatgattctctgtgcaacaggttagaagataaaaaatatatatatatttgctactaaagatttaaacagaggtcctcaattttttagcatttagacagcaattttttacagatatgtatgaaatgttcaaccctccatgtgagaggaaactggaatactttgccccaaaatctacttctttggcatatttcaagacggctattcaaaggggctacagacagtagaatagctctgaaaagctgtctttttgtgggagggattttcatctgtagaggaaatctacattagtgaagtaaataacagatgctgacaggctttctctgagactccccttatctgcgttgtctagatataggaaagattaactcacgggaaaaggagaccta

SEQ ID NO: 188099 - DNA, 592 bp, Homo sapiens
gaggaacataacattatataatagaaatcacttctcaattttatttttcaacaatttttttcacaggaaattacatgagagaattgacatgagactagttcaacaaaacttatcacaagaagctcaaacttaaagtaaaatcttggaatcaagcatcagaatayatgagtctatagttctatcttcactgttttgtggttgagttgagttcaaaacaaatatgtaatgttttaagaactttgttctacctccgttgtctcttctatgaagagttttgaggatgaaactgcaagcagtatgcaaaagtactatccagagttaaaagctccatgcaagcatgagattattattacgttcttttatcatttgacccactatttgttccacaatgtgaaaggaatatagctgattgctcccaaagaccttggtaggtcaaagtaaagaaaagtgcatattatcaggccagaggccacaaggtgtgagactggatgaaatgaacacaatacaatgatctctgtgagaaaataatttatttcaaaataaatgccctaactctagagagctggtagagtttgggacatgaggtacacag

SEQ ID NO: 188100 - DNA, 529 bp, Homo sapiens
gcactacttctgttcatgtatactattattttctgctgaagagggagagaagggttcatgaatgagacttacctggatttttttttttaattccacacttgacagtttacagttttttccagcgttccccttacaggtgattgtttgtttttgcatttcatagtaattgatgataaatcttcttggaagagcctacacattttatattgtctgtggcttcctggtaacactgtttttgtacataagtttccaattctcctgagaggaagtaatgtcaggatatgaactgcttctggactttctgaaagaccactacctggaaaagaagagtgcatacattccatatcctgatttatcttctctccacattccatctggctttttgctacccttcctcttctcagcctctcccaratttgaactccctccatccttttattctcatttcgtataatgtcacattattatataaaataagtattctcctctttttcacattaagccaaactgaaagacactttgaagacag

SEQ ID NO: 188101 - DNA, 553 bp, Homo sapiens
attcacttgcctgccttcagctagtgttcatggtgcaccggctggtatgtccagctcagtgctgggaaccactgagagggtgctgctctcaggggatactgcaggggagaaggacacagagaaatgaagaagatagagagcccaatgggaatggattgagtgaactgtgtggccactcaggaagtgaggagggcttcctggaggaggtgacctttgaacagaaatctaaatgattaggaggaactatccaggagaagagtgggggccccgggtgcaggggacagcaagtgcagaggccctggtgagggcatgcttgacaggattgggccacagagggaggatggtgttgctggagcagagtggaccaagaagagaggtaaaggggctggggctgttcatggaggccctggagtaaagagtcacatcgtcrtgctggaagctaaagatatgaagaaaagactgggggttaaagaggttggggaactgcattggggcctcccaaccatgagggggtgtcatgagcctggggcctgaaaattcagaggcctggcca

SEQ ID NO: 188102 - DNA, 597 bp, Homo sapiens
cagaaaatcaatatgactggatcataatgagcaaggaaggcgatttgagagcaatcaaagggaaggtatagaataggtcatataggccatgataaagagtttggattttattctaattgcaaggcaaagacattagtgaagtataggaagggaagtgrtaggtctgatttatattgttaaatggctaataacagagaatgaactctgggaaggcaagagtggaaaccaagacgccagtcaagaagctgttgtcatggttcagatgatagctgctgatggcgtgcactaggatagtagctataaacatggaaggtggtcagtcagatttgggacaatatattggaaggccagtggaacttgacagttggatactggaaagaagagaaaaagaagaatcaaagttttgatctcttggttctctcatcagaaatttctacacctgcatgctgctaaaagtcagttgttctactgcagatctttcattcagcaaccataacaatgtaaagctagtcaaaatttctgcttctgcatgacaatactcgaattatgtgtgccaatttattatagaggagtcaaaaacagtttattttgcattaa

SEQ ID NO: 188103 - DNA, 220 bp, Homo sapiens
cttcctaattcctgctccagagtctttgtaaagcaccgcattgctctgttgtgcatctttagcctttcttctgtcagtttattcattaatctttgccatcttttaacagaaatgagtgactgtgtggggactttcttagccttctctcttagcctctgtgttgtrctgaacacagaacacattctcctttattcttgaaactctctacttcccatcttct

SEQ ID NO: 188104 - DNA, 415 bp, Homo sapiens
taatacatataattttttattacaatatacacataggtagagaactattcgaagagggcatatagctctcacctactctagtagtagaaggctatgtttaccagaaaaacctgacacctggaaaacatctgcttggcttaactgaaatctcaaaagaggaaactgctgaagaacccagcagtgaagtgaaagtaaagtccttgtctgtcaactgtcaggctgtatgtgaaaggaaacctcatttcacattgccagcmtgcattggacaaatgtgaggcaaggtgcacaggagttgctgcacctcgacttggggagagctgcaggaactatcttgagtcctctgctggcccttggacacatactatttaggactgaaacttctttgatcctcagccgattttggtgcagaccctcc

SEQ ID NO: 188105 - DNA, 612 bp, Homo sapiens
atgtggtaaccacagcacaaagggtgactgtaagacttaataattctccaagaataaatgcagtgtgggacctttgctcaacctcccaggtatgactgtaaagcaggaggactggaagcagccatgctggctgtcacaaggacatggaagtactcactctgtcatgagacagaaccttgagatccaggcttttgctgcatacactcggccaattctgcactgtttacagctgctgggaaatcacaaggggaagagtataataggaaagagaattgactcaatcttttcagggatatgtagctcctggatagacccttcaaagatggggtaacaggccaccttctattgctccaggttcatgcaggatgacccccctgtggaagagggccagggcacaagcttgaagtagtccctaatcttgctcttttggaatcctagggggtggcaggcaggtgtccctggatccctgggctgtgctgaattccttagtaaccctagagtagcaaaagaaaactcagccaygcaaaataaaaactgtaacagaaaagtttcttgatggcatttgcagggcaaagatgaaaaggttgaatgtgtaaagaacagcagtttcta

SEQ ID NO: 188106 - DNA, 313 bp, Homo sapiens
gtttgatttaatgattccacagtgcatacatatatcaaaacatcatgttccactccaaaaatatataatgttcatttgtcaattacaaamgcaataaacaattgctataaacagtttaatcttctattacagtcctctttcagtatactcggggattggttgcaggaccctctcccaccctgcacatattccaaaatatgtgcatatttaagtcccacagttggccctgctgaacccacatatatgaaaagttggccctctgtatatgtggttttgcatcccatgaatattgtatactgtattttcaatcctc

SEQ ID NO: 188107 - DNA, 516 bp, Homo sapiens
aactttacttagcattcattgagcgtaaagcatwatgctagggagtgaggagggctcctgtgatggttaattttatatgtcaacttaactgggctaaagtctgcccagttagctggtaaagcattatctctgagtgtgtttgtgactgtgttccagaatagattaccatttgaatcagtagactgagtaaagaaggcccaccctcaccaatgtgggtgtacatgatccaatctgttgagagcctgaatagaagaaaaaggcagaggaagggtgaattctctctcttcttgaactgagacaattatcttctcctgccttcggttattggagctcctggatcccaggcctttggactccaggactcacaccttatcactcctcccctcccccttcagactcatactaaattacactgctagctttcctcgttctccagcttgcagatggcgtgttgtgggacttctcagcctccgtaatcacataagccaatttgcataataaatctcctcttatata

SEQ ID NO: 188108 - DNA, 602 bp, Homo sapiens
gtaaaaacacacagaactatggtgtttgagagggcgaagccttgggaaacaagaacgaggatggagttccaagttgtcataggtaagactagcaaaccaggaggaaaggtcaatattagcaacactacatagatgcctccaawatatgtttccaattaatttgcagaaatacttaagtgccttactataatgtcttgctaaggacatggctcatgcagaagagttgggtgaagacttgaaaacagaaattgagaaagagtatgaaaactgtggcaaaactggaaaatgtgaaatgttacgaattcctggtacatggaaggatacctaatgataggctttaaatttctattatcaggtatttggatagcttaagctatatctctcctcttacagtggaaataaatcaacgtagcatagcaaattaaaactcaggttttggaatgactatagaatagagtgactttgaacaaataactctctgaatagcagtgggctggaaaactagctctccacaagaaaacaataggcttaatttgtagtgtttgcttatttcctcggtataaagactccaaccatggttgatttcaaactaccaacagttt

SEQ ID NO: 188109 - DNA, 612 bp, Homo sapiens
acaattccacaaagttaatatacctcccctttaaatggccacatcatagtttatggagttatattttaatttagataaacatttatcagaacaacttcaatttgcttaaaaaatattacacctaaatagactcttgcaacaaaataaccttgttctaaactataactttatgatcacataaagaaaaaactcaataccaacaaaaatggcccaggaaaagtaacattagttaacactgaataagctttcagaaaactcttaactctagcaagagcaaggtagtaaaatcagatggaataatttaagagaaaggtaaaatgtctggggtatgcatgttcactaggaaacatttttccagaaaatacattgtcataatgttttatggaacccataatacaatcatatagtattatgagttcttttaagtcctgtagagttatagaagaagtacatcttacawaactgtgtgaacaattaagttgcattaggcttggttgtactctttatgagacaacagtcagtttactaagggttccagatggtagcttttcatagtaaaagtctgttttactgtcttttcaaagatggccttttaaattgtagtacacacag

SEQ ID NO: 188110 - DNA, 612 bp, Homo sapiens
acaattccacaaagttaatatacctcccctttaaatggccacatcatagtttatggagttatattttaatttagataaacatttatcagaacaacttcaatttgcttaaaaaatattacacctaaatagactcttgcaacaaaataaccttgttctaaactataactttatgatcacataaagaaaaaactcaataccaacaaaaatggcccaggaaaagtaacattagttaacactgaataagctttcagaaaactcttaactctagcaagagcaaggtagtaaaatcagatggaataatttaagagaaaggtaaaatgtctggggtatgcatgttcactaggaaacatttttccagaaaatacattgtcataatgttttatggaacccataatacaatcatatagtattatgagttcttttaagtcctgtagagttatagaagaagtacatcttacaaaactgtgtgaacaattaagttgcattaggcttggttgtaytctttatgagacaacagtcagtttactaagggttccagatggtagcttttcatagtaaaagtctgttttactgtcttttcaaagatggccttttaaattgtagtacacacag

SEQ ID NO: 188111 - DNA, 486 bp, Homo sapiens
tcttttgacctcctcccataaaccaaaaaaaaaaaaaaaaaaaagttcttaatggcatctataatggtaaatcctttccaggaggttttcaatttacttttcctagatccatcagaggaatcactatctatgacagctatagtcttatgaaatgtatttcttaaataatgagacgtgaaagtcaaattactttttgatagatgggtacagaatgaatcttgtawcagaagtcattgaaacaacatttatctctgtacatctccactggagctcttgggtgactgggtatatcaccaatgagcagtaatattttgaaaggaatctctttttctcagcagtaaatctcaacaatgggcttaaaatatgcagttaactatgctgtaaacagatatgctgtcattcaggttttgttgttccatttatagagtgtaggtagatttagcatagtgcttaagggccctaggatttttggaataagctttggct

SEQ ID NO: 188112 - DNA, 551 bp, Homo sapiens
gcacagtgctcacacctgtaatcccagcactttgggagcctggrgtaggcagatcacctgaggttagaagtttgagaccagcctggtcaacatggcgaaaacccgcctatacaaaaattagctgggtgaggggttgcatgcctgtggtcccagccacttgggaggctaaggaacaagaatcgcttgaacccaggatgctgaggttgcagtgagctgagatcgcgccactgcactccagcctgggtgacagagcgagactctgtctcaaaatcaaacaaacaaaccaaaaaacaactcattgtgaattaaatcctgagactaaaaagaagtgaaatcagtccaacagggctacataaaacagtgatatgtcatcaggatctggagtcctgccagtccaggctcagcatgaccattgtttcttccagcaagtggctgagctgggatttgaacaatgccagtctgactgcaaggtactaataacagcacagtctaccagttcccctaataccaatgcaatggctggctttgcaaggtatttggtaaatgttagt

SEQ ID NO: 188113 - DNA, 551 bp, Homo sapiens
gcacagtgctcacacctgtaatcccagcactttgggagcctggggtaggcagatcacctgaggttagaagtttgagaccagcctggtcaacatggcgaaaacccgcctatacaaaaattagctgggtgaggkgttgcatgcctgtggtcccagccacttgggaggctaaggaacaagaatcgcttgaacccaggatgctgaggttgcagtgagctgagatcgcgccactgcactccagcctgggtgacagagcgagactctgtctcaaaatcaaacaaacaaaccaaaaaacaactcattgtgaattaaatcctgagactaaaaagaagtgaaatcagtccaacagggctacataaaacagtgatatgtcatcaggatctggagtcctgccagtccaggctcagcatgaccattgtttcttccagcaagtggctgagctgggatttgaacaatgccagtctgactgcaaggtactaataacagcacagtctaccagttcccctaataccaatgcaatggctggctttgcaaggtatttggtaaatgttagt

SEQ ID NO: 188114 - DNA, 551 bp, Homo sapiens
gcacagtgctcacacctgtaatcccagcactttgggagcctggggtaggcagatcacctgaggttagaagtttgagaccagcctggtcaacatggcgaaaacccgcctatacaaaaattagctgggtgaggggttgcatgcctgtggtcccagccacttgggaggctaaggaacaagaatcgcttgaacccaggatgctgaggttgcagtgagctgagatcgcgccactgcactccagcctgggtgacagagcgagactctgtctcaaaaycaaacaaacaaaccaaaaaacaactcattgtgaattaaatcctgagactaaaaagaagtgaaatcagtccaacagggctacataaaacagtgatatgtcatcaggatctggagtcctgccagtccaggctcagcatgaccattgtttcttccagcaagtggctgagctgggatttgaacaatgccagtctgactgcaaggtactaataacagcacagtctaccagttcccctaataccaatgcaatggctggctttgcaaggtatttggtaaatgttagt

SEQ ID NO: 188115 - DNA, 629 bp, Homo sapiens
aagccctagacctcatattatgggtactggtgcttgggggtgttttccaacacttccctctaaagttaggttccccatttcccagagttgattgaccaggatgagtcaaagtcaggacagtaatcatcttgaaggagagatcctgggggttcttatacagaactaggtatcaattcactttcatggagaccagttattctcccagaatgacctttaactcatgtgggccacagtcctctccagtaacttcgattagataaggactttggttatcatattggttcatacctcgcagctagtagaaactccccagagttgctaaggtactctgtgctcaaaacatcagtgtatgtattccaatgagacaaaaattcamcaggctagtaaggcccttgtccaaagctccaaaatattatgtttctataaaatgaaaaattttttatatcaaactcattattcgattttggttaacactagaggttcagagtgtatacactcttcgatgtatatatatgaaataaacttttctgtattacttttgtgtattgctctgtttctcattttaagaaagaaactgttttgcttcaagatgctggaatagtccttaaaaatatgatctgtttggtatc

SEQ ID NO: 188116 - DNA, 581 bp, Homo sapiens
aaagacatttgaaatgttttaaaattagaagtcttcttttatgtgctttttttcttcccctgaaatcctccaggaaaaatttttcaagggaaacctatttggggggttgaaaactatccatggttttctagctttttagccatgtcttggagaagatatgctaaagttctccctttctttttatatttttcgtagwtttataactctctatctcttttttttttaataagactttattacctacacattgtgatggttcattttatctttcaacttaactgggccacagggtgcccagatatttgatcaaacattattccttgtctttaaggtacttgtggatgagattaacataagttggtagactgagtaaagcagattgccctctctaatgtgggtgggtcccatccaatcagttgaaggcctgattataacgaaaagcctaaataagagggaacttctcttacctgactgccttcatgctagaacatcagtttttttcctgcctatggacttgaacagaaacaataattcttcttgggtttcaagaccactggttttcagactggagctatattacc

SEQ ID NO: 188117 - DNA, 563 bp, Homo sapiens
cttcgcaattgcatgagccaatttttcataatctctctgtctccatacacacacacacacayatatatatatatatatatatatatatatatatatatatacacacacacacacacacacacacacatatatttataatatctacctatctctatatatgtatatatgagttattatatatataaatatatatataaagttctctctctatatatatataaagttactcattctgtttctctgacaatcctaatacacatagtgattagaaaagtgggcttgttgggagattgaaaaggagttggcttccagggaaactcaatttaatagactgatttttgagcagatattcctcttataataaagtaaatagtgagatcttaaaaaaagaaaaacaaaccaaatccttgagatttgaaatcgggaagaaagaggtaagcagaaaagatttgtcaagttatatatttttgtcactatgtgactttgagccagccacctcccttcggtgtaagttgcagcatctgtgaaattaaggcctagactagatcagatgttttcaaact

SEQ ID NO: 188118 - DNA, 563 bp, Homo sapiens
cttcgcaattgcatgagccaatttttcataatctctctgtctccatacacacacacacacacatatatatatatatatatatatatatatatatatatayacacacacacacacacacacacacacatatatttataatatctacctatctctatatatgtatatatgagttattatatatataaatatatatataaagttctctctctatatatatataaagttactcattctgtttctctgacaatcctaatacacatagtgattagaaaagtgggcttgttgggagattgaaaaggagttggcttccagggaaactcaatttaatagactgatttttgagcagatattcctcttataataaagtaaatagtgagatcttaaaaaaagaaaaacaaaccaaatccttgagatttgaaatcgggaagaaagaggtaagcagaaaagatttgtcaagttatatatttttgtcactatgtgactttgagccagccacctcccttcggtgtaagttgcagcatctgtgaaattaaggcctagactagatcagatgttttcaaact

SEQ ID NO: 188119 - DNA, 428 bp, Homo sapiens
cactaatttccattctactccaaaaacatcacttatccttcagcagccagtcctaattttccccttctctcatctcttttggcaaccactaacctattttctttctttatggatttttctattttggaatttccatgtaagtgatattatacaatatgtggctttctgcgtctgacttcatttgtttagtgtaatgcttttaagattcctccatgctgtagcatgaaacagtactttattcctttttatggctgaataatattacattgtttggttataccacaccttgtttatccattcatcagttgatggacatttgggttgtttctcctttttggctgtagtgagcaatgctgccatgaacgtttatgcayatgtttttctgtgaaaatatgtttttaattttcttgagtacatacataagagtg

SEQ ID NO: 188120 - DNA, 564 bp, Homo sapiens
atccaggctcttttggttcttttgtcttaggagagcttttagtttgttctctgayagcagaaggaggggttgtttcacagcacatatgtggtgagtgggttttgagtatttataatcccactctttgcgaagattcctgtgcatatttttcctatataacatttccagatctacatgttcttgtggtcagtattagtattagagaatactgtgaaaggaccctccagaaataactaatattggttgtcatacaagcccatgttggtaagtattctgttagatttaattaaatttaaagaaagcaaagtaatgtgacacttctggcctatttaagtactttgtaggatgagagtcactcctcgaacactggttctgatataaattccaaactaggagcactgcaactatgttgaactattgtgaaataaaataacttctttgcagggtgactttgaagtgcaacatccatttggatataagttttcatggcatgtacttaggaatgttctcatgtttgcattatctttgaaaggtcattaaagtcacataagtttgtaataactt

SEQ ID NO: 188121 - DNA, 318 bp, Homo sapiens
gtaggggaggcgatcatagggatgtggaaaacagtcctcatgcactgagtccccttctgggtgggggccgcaggactggttgagtcacgggtctgggtggggccatctggttgtcagaaatgcaaaaacctgaaaagaaatctcaaaaggccatcttagtttctgtagtagtgctgttatctgcaagattaattggggaagttgcaaatcttatgacctctggaataatggctgggaattatgtagaattcaggcctctctcatyctcctaacttggtggcctttcattagttttacaaggacagtttagttttgggg

SEQ ID NO: 188122 - DNA, 435 bp, Homo sapiens
tattgtccttcttctgccaacccacccataacgatcattccttctctacattgctctactttctattgtccttctctccccttctctgacagtgatacgatttatccataaccccccaaaaatcaacacttcacacccttgtgaggtgactgtcttagttcattttgtgttgctataaaggaatacctgagactgggtaatttataaaaagaagaggtgtatttggcttatggttctgcagcctgtacaagaagcatgaccacattttactgctggacatttgctttgtattaataatagtgagtaatgatgctatgaacattcttgggcatggcttttcatgtgtatatcctatatyatgtaaaaccacttctaggcacttccatacctaggagtggaatttccaggtcacaggatgagcaatattgagtagca

SEQ ID NO: 188123 - DNA, 533 bp, Homo sapiens
ctgcacatttttcatgggttttatagctccattatatcacatgcctcccatcttctctcttctcctggccctggggggtgacctatgagaagcacatcaagggggtcccaggcctgtggcttctggttggcttcacccagtggggagccccagcagaagatggggttagggaagggaggagagagaggtcctttggttccttccctccctgtgtggtcacttgtgacacagagccccggtccttccgaggtagctctctccacacaactatctctccttctgtgttctgggacctactctctcstttgtccatttgtgcctagatatccagacagctccactattgctagtctaggttcctgcaatatcccttgaagtttgaaatgaatctctttgtggagaaacccttcttgaattgattttgatgttgcatctgtttcctgttgggaccctgactgataaacatgatcttattagcacttgcagcagactgctcatattaatgggtcatcgcccctagcccacaagtcatg

SEQ ID NO: 188124 - DNA, 572 bp, Homo sapiens
tgaaattttcttttgatttttgttttttagctcatcacctgtagttactattagtgtattttatgtgtggcccaaggcagttcttccagtgtggyccagggcagacacaggagggacacccctcccacagaccattaagactggcagagaccaaaccaaattcgtgttactgataaagcaactgagacccacagtgataattacctacttagtttcacttgggaatggaatcagccccagaatccagtttcctgactccatttacctctctcactctcaactcttcccaacccttcttcccctgtagggacctttgaaagccaaagcttctgttcccgttgtccccagggttgaggtaacaacaggaactactcgagtcttctctttcatttcagcatcacattctccttcctacttatttcatctccaggagcttttccccaggccagttcagagtaacctcatttattggactgtatgatagatttttagtgaaatggcaccttcttctttccttagaaacaagttgataccagtgagaatgtttttcttgtccccttggaaaaaaaaat

SEQ ID NO: 188125 - DNA, 538 bp, Homo sapiens
gaattctaaatatatgagagctcgagctgctttctgatgaatgaaattttttgccatatatcaggtgctccctcctccctaatttttctcaggcttaaagtcaggggtggccctgtgaatctagagagttacgtgtaaaactgtgcccagccccattgctaactctctgtgtgagtttggtggttcagttagttctgctataatgcttgttttggaaatgcaaatctgttccaatgcaattgatggattagggaatgatttgagcataacacagatttcacatttacttatgtgcgatttagcctacgagaaacactakgtgaatgcagaaaactgcatacagctgaactgagtggcatgagaatgtatagaacgtgtgcttacacacttcaaaggtgacccagtgaccttggttggtttcccttttgttaccctaacctgctcaaggaactaggtttttctgatgatgactactattttcctggggctgacataacaaagtaccacaacctaggtggcttaaaacaacagaaattta

SEQ ID NO: 188126 - DNA, 570 bp, Homo sapiens
aactttctggttaagagttatttctgttctcttatttttaatttctgtgatcttgttctctgaaactccttgttttacaaccttctgttattgttttatgaatgtagtattctgtcttacatctcaaagcattttcatcatgaggatattttttgttttccttctacactacgccttgcattcatttcttctgagttccttctgatttgcttagttcaaattctgtctcatgttaaaaatatttcttcagatgtcttatgtccttggctgtctatttatattcaagagtgaggcactcaaatgctgattgaaagctctgtcactgtcttttctgctagttgatctcactattgattgatcaggtatgcccaggcccttttgtaaggagaccccaagtggtaatacctttagatcttttctcttgggtggattgttttactcagagaggaatacttagaactcctgccttggacagataaacctaactaccagcattccrggaagctgaatggaagaaggggaataagaggcctcagtaaattggctttaactcaacctcaccatcaattt

SEQ ID NO: 188127 - DNA, 603 bp, Homo sapiens
cgcccctgggcctttgcacatgctgttctctctgaatattgccctctcccttttccacctaattctattcacccttgcaggcctcactcaggtctcagcttctcaaggagcccatctgagatccccttctggccaccacctctcacgtagtctgggacaygtggatgtgcctgcatgccttgtcatgatggcctctgtgatggttaataccaagtctcaactttgaaggatgcaaaatattgattctgggtgtctctgtgagggtgttgccaaaggagattaacatttgagtcagtgggccaggaaaggcaggcccacccttaatctgggtgtgcaccatctaatcagctgccagtgtggttagaatataaagaaggcagaaaaacgagaaaagacgagactggcctagcctcccagcctacatctttctcctgtgctggatgcttcctggcttcaaacactggactccaagctcttcagttttgggacttggactggctctccttgctcctcagcttgcagacagcctattgtgggaccttgtgatggtgtgagttaatacttaataaactcccctttatatatatatatatatatatatat

SEQ ID NO: 188128 - DNA, 604 bp, Homo sapiens
gggatctgttgtgcacactcatggggtatacttttatctgtgaaagattttgtagccagtcttatatatatataaaaccttaaaccttgggagcttgtttggaggttctagcagaggactgcagctastcatatacccttgaccaaaaaatggtcctcctatgcagcttcaaaagggatgcacatggagtagtgagagaggaaggggacacctgcctagctagccaaatcagccaaatcaaacctggagatcaatgaggtaagagatgtcagagccatatcgccctcacatctggataactttataccttgatggatggaagatgaaggccaaatgtgagaaattttaatggtacatatgttgcctcataatcagttggaaacagacatttattcactcctcttaacctacatcatgggttaaagagaatattgccaggaagccttcactcttctaggagggcatcatttgttaggtcctatttttcccatggtttaaagtaaaagaggcaatgatttcaaatgtatctctcatgataggttctatagcacattctactgtaaaggctaaagttacaaaacagactttaaattcccttgggaaa

SEQ ID NO: 188129 - DNA, 539 bp, Homo sapiens
acagatcccattctcaggccatgagccggtggaggctctggaggcttagacaaattgatgatccaggaacccggggtgtggggcttgagatatgtgtgcaagagcaggccaggatctgcaaagacaagagagacctagcattattccccagcagcaaaatgggccacacatgtgagggggcaggagcttcattatctccatcagacaaggttcaaaatcctctatgaaaatcaccagtatttccctcactgtcatcstgcttcccaaaggccaacagtccaaaaatgcagttacttggacctgatcctgagttttttcaggcctggggcttcctaagatcaccgggtaggtcctgcctctggccagacccagatcccaggctggaggggacaggagaatgtagttcaagaagtacagaagccaggagctatcagataaggtctctctaaggcctgaaaaccaagccatttcaccctcatggaataagaaccagtgttaggatcacagaatcatgaacattgaaagtggaaggaacccag

SEQ ID NO: 188130 - DNA, 563 bp, Homo sapiens
accaaataaacatgctagacatttttaaaggagaagctgaaacattctaaaaaactagaatactatagaacaaaatggccaggtaactgcagattcttcaaacttcttttccctttaagtgagttatgcaatctaaaaattaaaaaaataaaaaaataaaaaaacatgaagagcatgtcttccacactgaggctacaaacaggtctaaccttatgccacaaaccttgccccaaattaaaataaaatctctgcaaygtactagttattcattttccagagacaagtatgcaaagtagcagcaagtgagggaaattctggaaagcctcagtacagacagttcagagggcataaaaagcatacttgatttccagcctctttcccagggcctatgctcgaagagctgccaaactaagtctttactttgatctaagaaaaaaacacaaaagggccaaagtctgatcaccactttttcacacctggcaatggaagcagcaaacaagattcagctaaaagacaaaaatcataaacttttttttttaacatttcaatgtttataggaccaa

SEQ ID NO: 188131 - DNA, 577 bp, Homo sapiens
gggtatacacaaagaaaaatacattgttctaccaaaaagacatttgtacctttatgttcatcacagcactattcacaatagcaaagacatggaatcacctaggcgcccatcaactgtggattaaagaaagaaaatgtggtatatatacaccatggaatactacacagccataaaacaacaaaatcatgtcctttgcatcaacattgatggagctggaggccattattctaagcaaattaatgaaagtacagaaaagcaaatactgaatgttcttacttataagtgggaactaaacattgaatacacatagacacaaagatggaaacaacagacactggggcctactaggtatgcaagagagggagggaaatgtgtgctgaaaaactacctgctgggtactatgcttactacctgggtgatgggagcatttataccttaaacttctgcatcatgcaatatgtccatctaaccaatttgcacatttacccttcaatctrtattaaaagttgaaattttctaaaaattaagcaaacaaacaaaaataaaaatacattgaactaattaaaaatgcaaacac

SEQ ID NO: 188132 - DNA, 457 bp, Homo sapiens
tcttgaccccccgtagcagctgatacatgaaaagcctggcatgctcttccagtaaagtgccctgctccagcacattagctaggtctgtctccatgtactcctgagcaatgtaaacactgttcagctctgtaagagagcccacatcgtctgtttcgcctgggaccaagaatttcaaacactttcacagtgttgtcatggtcaagtcttctaataattttgattttacgtacagcgtgtttgacattctggggattggtgagaaccattttcttgatggccactcttttgtyacagtcattgtctatagcagaaaaaaaccaagccattgcctccacaatccaatggttttaagaccatatacctggaacccagatcaaaaccatgaatgttcatgagactttcaaatttctctgccattttgaaacccttactattgccttttcctttcgaattgttg

SEQ ID NO: 188133 - DNA, 555 bp, Homo sapiens
taaaactaaagtgtgaggaacttgaaaagtggatggggtctgaaattttgggggtcygtaatttttttcttgagacagagtcttgctctgtggcccaagctggagtgcagtgtggcaatcacagctcattgcagtctcagcctcctgggctccagcgatcctccctccttagcctcttgagtagctaggactacaagtacatgccactatgtctggctaattttaaattttttgtgtggagacaggctctcactctgtcacccaggctggaatgaagtggtgcaatcatgccttactggagcctcgacctcccaggctcaagtgaccttcccacctcagcctccagagtaactgggactgcagttggtgccaccacacctggctaattttgaaattttcagtttgtagaaatggggtctccctatgttccccacgctggtcttcaactattggactcaaaggatcctcctgcctcagcctcccaaagtgctgggaatacgcgcatgagccagcgcacccagcctggctctgtattttaaacgacagtgtttattt

SEQ ID NO: 188134 - DNA, 520 bp, Homo sapiens
tcccaattaattttgcccttaatatgagcactcatctatgtcatttaatgttttggaaaatatgattttaatgtatgtatagttttccttaatatatattatacataaattacatgcttctatagttcccactctcatcttcttccacaacyaagtcttgtttatttctgaaagtgaatctcaattgctatcatcttgagacaggtctccaactgatatatattaataatttgtgatttctagtgtctcaaaatggattcattcatattaggtggcattaagcccacagcaaaattagttttctttaaaatgataagcatatgtgagcactgaagttacagtaagtttatttttctttaaagtgataaatatatatatgctagactaaggtaatgagataacacctgctgtggctgggtgccaggtgagaccctgtggctgagatcatgatagtgagacccctgtggagaatcataaaggtggcaagggactggcaatgtctgaggcgctcttggaatct

SEQ ID NO: 188135 - DNA, 354 bp, Homo sapiens
tggcaattatgaatattcttatgtagatatttgtaaacatgcttttatttgtcttagggaaatacctaaaattggaattgtggggtcttgaggtaagtataattttagctgtttaatataacttattttgcaaagtagttctattattttccacttccaccaacaatatatgggtgcttcggttgctctacactcttgcccacrttcagtgttattggctttttccgtttcttctatatctgctagaggctttaatttacacttccctgaatacaagtgatattgagaacattttatgtagatattgtccatttatactctttctttgaaatgactgctaagatctttcatatg

SEQ ID NO: 188136 - DNA, 502 bp, Homo sapiens
atgttgcctttgtgttctgggggttagttttaagtttctgaagctttctccaaatatctggcacagcttgggttatatctgggccagaagtgtttgaccctcatcaggctttacgtatatataaatatactttctgaaaggtcaaagagcctattaaaatacataggcagattttcattccttttctgagtaattttgttcactttgccataatttagtcactttttttggtaccttctcattccctctgatatgcaattgagaaaatgacctattcttgactggtttcttctatcctcataaacccattgggggttttgttttgggaccacttcatcagatgcctggtaaatgacatggccaggatcagatctagtaatctcatctgcatgttctctggcctttctcaagatctgagccttctcattaggaatacmaaaatggttcagaactactgcaacattgtggcaagtcaaggaaaaggttacacccaacttaaata

SEQ ID NO: 188137 - DNA, 593 bp, Homo sapiens
attttcctttacaatgtattctgaagctaagaagtttattttaagcattctgatttatcaggtaagtccttcagtatattattgggaaaactgttgtttttaaccaatttagctgatactttcttcactgaattctatcaatttttcactaatctttcttatcttagatccgttcttcataacttgttgctctgagattgctaataccccattaatgattaaaatttataaattttaatttcaaataagcattgtctaacttatatcagctagtacatcatcacatttgtatgaatacaacagtagaactaggaaaatgttatgacatttttcaggcatgcattcaccaaaacaatatttacatctaatatgaaaattaattctttccttctgtcttttttcccacaaatcactctttctctctttatcctcttcccctctctctacctctcctcyttctgtctttctttctgcctttctgtatatgatttatcagtttttctccatcttgatctctctctctctctctgtcacacatacacaacctatagtaatatgacaatataaaaagtaaaaagcaggaagactgtttt

SEQ ID NO: 188138 - DNA, 419 bp, Homo sapiens
aatgaattcagtttcttttgtgttgtaattagagatgtcatatggcccccaaatgtccaaatcaagaatagataactgttgaacttatgagaaatggaggtgggtttgaaatggwgattgtacttattagcttatagaaggttgagttatggagtgggtcaccccaacagaaggagtggatgcagacagaagagaaatgagatagcccccccaaaaaaaaaacaactggggaaattaacatttaatattttaatggtgcatgcagcattcataagaaagactgagaagagagggccaggccagagaagtagaagaatatggtgtcaaggaagccaatggaaaagagggagggaaacactacaaaacaatgataattactgttgaattgtgacatgtatatgcccacatgatttagtaac

SEQ ID NO: 188139 - DNA, 459 bp, Homo sapiens
gctaaatagctttggaattttcaacaaaaagcatactatgaattctacagtaggcaaagcttaggatataaatttttaatttggggtgtgtgtgtgtgtgtgtgtgtgtgtgaaacaatgcattttaccaccaaacaggattggagaatggattggagagctattttggaatgtaaaacatcgtactaggaagacaaccaagatgctaaatagtcagttcattagaaagcctcctggttactggatagttataatgatgtgaccaagagtttactctttgaagctactgctataagatgatacacccttcaggtatcattgacgtgctttttacttatctatcasagttcctcacaaaaatttgtttttggatcaggtggaactgagtaaatatccatgaagtttcaggatagagccatttgccttcctttaaatctttgaaatatatgttgttcagca

SEQ ID NO: 188140 - DNA, 489 bp, Homo sapiens
tgacttagcttaattcatttataatctgggatgtaataatcaacagtcttgaaagattagttggttgtataggttactacaatatagagagggtgcagagaagatggaaaaaacaaaacaaaaaaaaactagttaccaggcaactgcagtagtctgatggatgatggtagctgagaatagagtaatgtcaaggaatggagacaagttgattaattccaaagttatatagacagaggtctgaatttgrtgacagacttaatatgggcacatgtaatatcaaggatgactctcattatttttggtaataggaaggattttggtgccagttaggaaaaaaaaagtacgctttctattttatcactttgctgacttcttgtggctggagacactgctaatattatttcttcttgaacagttttattttcctattactttagaagagtatagcattattaagggttagaagactatggtattctatttagacgt

SEQ ID NO: 188141 - DNA, 600 bp, Homo sapiens
tctttattttttaattgatcttttcatttttccagcaatatttagtaatttttagtgtagtggtttttcacattcttcactcggattttttcctacacttttgatttttattatattgtaaatggcattagatttcaaaataaaatccatgttatagaatgattgcttagataaataaaactgatagttatggtattgactaaatatccagcagccttcctaaactcacttattcattttaattgaaaatattttataattctttggaaatacattgttatataattatgacatcagccagtaatgacagttcattctgttgtttattccttttaaattttatatctataatgctttcttcttgttaagtaagagttgtaataatatattagtgttatccttaattaaatgaaaaaatwttcaatatttctactttaaatatatgttcaagatatgttaggatatctttcatcaaaatgagacttttttttctgttcttaatttcctgagtttctttgtttgctattttaccagaaatagaggttaaattttataaataatttttctttgaaatttgactaacatgatcaactaaattga

SEQ ID NO: 188142 - DNA, 423 bp, Homo sapiens
taaatagctacatatttaataattttatgtttgtttatcttaaattaccacacattgtatatctatatagaaatctataaaatgaaataattttatttcttagactagcactaatatcagtgcaaatgcatgacttctgttaaaatgcaatggaattaattttgatagattatttttatatctgtatatatttgtcttgtttggaggaggcaaacactttgctttaggaaatatagacatttgttcaataayatgacagatatttatgagtttcttttataccagattttatgtcgactgaaatacaagatgataatatagactttgcctttaagacatttatactaaacaagaatccaacctataaataataatttaaccattaatcaggcattctttttgataacaatatgtatggggtgc

SEQ ID NO: 188143 - DNA, 512 bp, Homo sapiens
taaaacatggagattgttaacgacattgataaaaagagtttcagtggattgatcagtgcaaggctagtttatattatgaaatgatttggaattttggcaaaatgaaacagttcaagaaattgttttgtaataaactattaaaaacatagctatgcaggaatatggagctaagrtttaggagaattttgctttgctttattttaatgaataggagataccacccatatcattatactgatggaaatgatacaatagaaaaggaaaaacatatggtataaagcatagaaaaactaacagaacaaagtcattctaaaggtagaaagagaaaattcctaagcatcgtgataggtattagcctttgttagtgagaaatgtattttctcttggaatagggaagggaaagatagaaggaaagtcagtgggtccttaagctcattgagaacaagataagaattgtacattaatcctaacttttaaaaaatgaattatatgtttaaaacatgtcagaagta

SEQ ID NO: 188144 - DNA, 578 bp, Homo sapiens
cattgcacacaatcttgaatatcagatggatgtttctggaagaaaagtataggttttcccttagcatcagtattagctttcatatggtgtttgtttgtttgtttttaaagagttgtaaagtcactgttaaaatatcgaaaatatttctaaaaatatattatcaaaattcatcaaaaataatatttttaatgttagaaatgtctacagttgacactgaggatgtgtacttgagtatttcatagaaagaaaatggaaatacactcataattaaaataattttgatactaccttaacaatccataaaatggcacatctttgggtttaattttactgaaaatttttttttactatctattttggaaaacatttgaagaattttattcaaggagaatttgcaaaaagtatgaaggttttaaaggagaatgcaggatatgtcaagaggttaactatttaagaaatagcacttggctgtgatctatgttatayttcattaaacaattccataattgctttgaaattataactaagcacattttagtataaatagtagacatatatttcttaattttagcttttat

SEQ ID NO: 188145 - DNA, 484 bp, Homo sapiens
ggctcttccacaagcaaggaccctccaggggaagaatgtgctgcttcctctcaagcccagaaatcccagggaagggctctaattggccccaatagggtcaggtgcccagctctgaccaatcagtggtggccacgtggggagagtctgttagatcatggcagctctctttagagccatgtggttatggtgggaagaaggaacatctcccagaagaaggttgactattaccctcagcagacaaaagagtcaatgtccgccacatccctgctccagcgatctggggtgagggtcaattaaggaatgtgaggagtgctatgaccaccagatgcacaagggcctctgttaacagggaaagctgagttcttctctttaacactggccrccactggttctctttcatccgaggtttgacaataaaactgaatagcgaaagtagaggtggagagccagtgttgcaagagagccttagtgtggtggggaattc

SEQ ID NO: 188146 - DNA, 377 bp, Homo sapiens
atactgtgtctcaaaaaaaaaaaaaaaaagatactctctccttttttttttaattcccyagttttaatctggtagagggaccttgaaaatacttaaatactcatatcattcttatggattggtttgggtgtgtgagttctaacatagacaggaaggctatttttcctatcaataacatccaagaagcctgctaagtaatggtttttttttttttggaaaaaccatttggaaaagaatagattttcctgaactttattaaaacacaaatcaggtgctgaagggataattttgaaattctgtattttgaatgtctttccacttgcagaagaggtatgtagtttttaaaatttctgaatagaactacttgtgcatgactt

SEQ ID NO: 188147 - DNA, 566 bp, Homo sapiens
aagcttctgtcaatggaatcatacagcatgtgctcttctgtgtttggtttcttttggtcaacgctaagcgggygacattcctttatgctgttgtgtgcagctcacccgttctcactgctgtgcggtgctgcactgatgattgtgccgcaactactctatccaatctactgttggggagcatttgtttcctctctttcttttttgccacggtgaaaaaagtttccgtgaacattcccgttcacgtctttgtttggccacatgtacacatttctgctgggtacgtgcccaggagtggaatgactgagtcacagggttggtgccaggtggggttttgagcctagacatgcctgctctaaactcaagagcggtgccatgccatagatcactgtgtggatgtggaggcctacagaggagacacctgaggtggcagtgggaatggagggggagggatgagaagcaggagctgcagagggaggcctcctgggcagatggcagtgctgtgttagtcaggcttgggggagtctctaggtgcctgtgtgacccccaggaggcactatccagggtgc

SEQ ID NO: 188148 - DNA, 399 bp, Homo sapiens
tccgtagtggcggctggcgctagggaactgcagggtctagggtgttgtyggagtggcagttggtccgaatttctcccgaagcccgcggaggagcgggtaagagccccgcgaatccggccccaacctcgggaacgggatgggaggcggccctggccgcaagccccgcgctgctagcgggtccaccgcgtcgtagccgacagccgcccttcttcctcgcagcgcgccgcgattcaccagcctggtcccttctgcggagagcgatgccgcttcccgacaccatgttctgcgctcagcagatccacattcccccggagctgccggacatcctgaagcaattcaccaaggctgccatccgcacccagccggccgacgtgctgcggtggtccgcggggtaagcgc

SEQ ID NO: 188149 - DNA, 593 bp, Homo sapiens
cgaccaggacagcgggtcgggccagtgcggtgtgacacgagggctcgagcggcttcgcagtttaaacstgtcctcatcctacacctcccacggctgtttcggattcggtgccctcgtgcccctcagcttgcccagcggcacgtgggcctcaagcctggtccccagcggctgcgccagcctagctgtgttcaccttggggccgcgagggcctcccaccggctggcagctggtggacacgctgtcaagatcgggggaaaaaaaggaaggaaggaggctagggggacacagggctggtggcctccgcagtctttgacctgcgacgggcgcgagcgcacctccgcgcctttgcgcagagaccttcccccaagattggctcacgacgcctcctaccccgaagtcaagggctccctgtggcaaatcctcacacgccctcctcctccccgcccatccccggcgccaggactgacggggagagggcaaggccgggccagaggggctgtgggcctggactgcggctgtcgcccgcggccctgctcttttgggcagccagacgtggggtcagcgcccagtcgcagcctccgggggtgagtccg

SEQ ID NO: 188150 - DNA, 204 bp, Homo sapiens
atatacatcatggaatactatgcggtcagaaaaaagaacargatcatgtcctttgccagaacatggatggagctggaagccattatccttagcaaaataatgcaggagcagaaaatcaaatactgcatgttcttacttataagtgggtgctaaatgaagataacacatgggcacatagaggggaacaacacacattagggccta

SEQ ID NO: 188151 - DNA, 442 bp, Homo sapiens
agcgttctgtagaggccaaatacgatatgcgttatttcatacctgtttgaataaaatgtaatagagaaaccaaaatttaaacaatgggattttagtatttgtttcctttcaaaaggatctccattatattatagttaaatgtaatctttaaaagagaagtggataatttttttggaaacaaaaaaataacttaattttgtggtatagtttaatatttggagaaatraaattattttaaaaagcagcaagtaaagagggataaattcaattaaagtttactagctataatattttaatctcaaaacaaaacaatgtccaataaggaaaatatatcaactcttttttttttttttacttttgcctaataagtcaaaattgcactattcttggaagccagatagcttttcataaatcttataatcttagggttggataataagga

SEQ ID NO: 188152 - DNA, 627 bp, Homo sapiens
ccttttttgactctcttattctatcattgcttcatcatcataaaaggtgatcaatcaygtaacttctctgctcaggaactcctatttcattcaaagtgaaagccaaataccctgcaagtattcaaagtaaaagccaaatacatacccatcaggtaatgaaggcgcacaaggccctgcaatacctggttcagattttaccctgctcattttttcctagcctcatgattcattccagcctatacattctgcttaccttgttgtgctccaagtctctaaccatattcttgctttctgcttttttcaggtggttctctatgcctagaatattcttcctaaagataacaacacaactaaattcctcatttcctagaaatccttactcaaatatggtatatttataagcctattgtgattccttattgcaaattgcaacctgctttcatcacatatccaatttcttaccttctgttgtactttgaacaatctaatataatatgtaattgtttatttttaatgtttagtttcatccactagaatatatttgtatgtttttatctatgttattaagtgataagtgtcaaggacttacaacagttagtagaagcaaagtaaaagctcagtatctat

SEQ ID NO: 188153 - DNA, 502 bp, Homo sapiens
  misc_feature (1)...(502): n = A,T,C or G
gagtttgttattacccaccttctgttgcctacttctatcaattcctcaatctcattctccatccagttttgcatccttgctgtagagatgttgtgatcatttggggaagaggggttctggcttttggaattttcagcstttttacactcattatcgtgtatttatctacctttgatctttgaggctgatgacctttggatagagtttntgtctggggatctcttctgttgatgttgtttttgttgctttctgttcgtcagtttttcttttaacagtcagacccctcttcttcatgtctgctgcagtttgttggaggtccgctccagaccctctttgcctgggtatcaccagtggtggctgcagaacagcaaagattgttgcctgctccttcctctagaagctttatcccagaggggcaccagccttatgcccgccggagctctcctgtttgaggtgcctgtcaacccctgttgagaggtctctcccaattaggaggcacagg

SEQ ID NO: 188154 - DNA, 627 bp, Homo sapiens
ccttttttgactctcttattctatcattgcttcatcatcataaaaggtgatcaatcacgtaacttctctgctcaggaactcctatttcattcaaagtgaaagccaaataccctgcaagtattcaaagtaaaagccaaatacatacccatcaggtaatgaaggcgcacaaggccctgcawtacctggttcagattttaccctgctcattttttcctagcctcatgattcattccagcctatacattctgcttaccttgttgtgctccaagtctctaaccatattcttgctttctgcttttttcaggtggttctctatgcctagaatattcttcctaaagataacaacacaactaaattcctcatttcctagaaatccttactcaaatatggtatatttataagcctattgtgattccttattgcaaattgcaacctgctttcatcacatatccaatttcttaccttctgttgtactttgaacaatctaatataatatgtaattgtttatttttaatgtttagtttcatccactagaatatatttgtatgtttttatctatgttattaagtgataagtgtcaaggacttacaacagttagtagaagcaaagtaaaagctcagtatctat

SEQ ID NO: 188155 - DNA, 607 bp, Homo sapiens
ccacctcttttaatcctgatgctgataatttgtgtcttttttttcaaactgatttgtattaaacaatgaataaaatacattcatttatatcatgattttgacacaatgtttcctaagattaaaaatatatcttctgatattgtttcaaaaataaacagygaccaaatgaaatatgtcaatattgaaatatgaggtatgtgggaacaatttgctaatttataaaaattgtcaattttatcagtgatatatagaattctattgtcctcaaaataacattaaagtgtcctatgttctgactgaaggtaacagttctattatcacttctctctgtaacttaaatatctactaaatactgtaaaagttgtacataaaaattattgtagattggattatatagtaactccggtttccagcataatttttaacaattttatttctttgtatgtacatactagtagatttttccaattttaatttgcactgtttgaattaacctttaacaattaaatcaagtgcttttaaaattagctgaatttagtatacttatttaatataatttaatataccaatttaatacaaacattaatatattgaactattttactga

SEQ ID NO: 188156 - DNA, 619 bp, Homo sapiens
gggtctttctgtatgtaaggctctgttcaagagcacaggtcacatatccataaggctggctgtccaatgtatctgctttatttattttcacgttgttatgtattttataactttgtatttccttaatttatttttatttttaatttcaatagctttagggttacaagtggtttttgattacatggatgaattatacagtagtgaaatctcatattttagcacacacattactccagtagtgtgcactgtacccagtatgtagttttttattcttcatgagccttccctctcctctcttctaagtctccaatgtccattataccactctgtatgccttctttgcatacccatagctaagttcccacatacaaattagaatgtatggtatttgatatyccattcctgaattatttcacttagaataatggcctccagctccatccaagttgctgcaaaagacattcttctttttttcttctttatggctgagtagtatttcatggtgtatttataacacattttctttatccacttattggttaatgagcacttaggttagttttatatatttgcagttgtgaattgtcctccaataaacatacatgtgcaggtgtctttt

SEQ ID NO: 188157 - DNA, 418 bp, Homo sapiens
gtatttgatattccattcctgaattatttcacttagaataatggcctccagctccatccaagttgctgcaaaagacattcttctttttttcttctttatggctgagtagtatttcatggtgtatttataacacattttctttatccacttattggttaatgagcacttaggttagttttatatatttgcagttgtgaattgtcctccaataaacatacatgtgcaggtgtctttttgatataatgacttattttcccttgggtsgatacttggtaggattgctggattgaatggtagatctacctttagttcttcgaaaaatctctataatgtattttatagaagttgcactaatttacattcccaccaacactgtgtaagcattcccttttcaccacaactaccccatctattgttt

SEQ ID NO: 188158 - DNA, 488 bp, Homo sapiens
gctttagtggtcatgctcctgtttcactttcatgttccaccctgtacacttggctctgccttctagatagcagtagcagaattagtgaaagtcctaaaagtctttgaaatgcatagaagaaataatggcttaaggtgtcctctctctctctgcctcggctgccaaacaaggaagggccccctgtccagtagacacatgactcacatgaccttatcaatcattggagatgactcacactccttactctgcacattttgccttgtatccaataaataacagcacagccaggcattcggagccactaccagtctccgcgtctakgtggtagtggttccccaggcccagctgtttttttctatctctttgtgctgtgtctttatttctacgatctctcatctccgcacactaaaagagaaaaaacccacagacactgcagggctggaccctatagtccatgaacttaaaatgaccttcattctattccctta

SEQ ID NO: 188159 - DNA, 556 bp, Homo sapiens
tgtttagctacagttgacattttttaaacaaagcgtaagcacaaaaataaaattttcttgtagaattattttcgtggccttgaaaatattaaaaaaaatattcaaagcacataaagtcagcataagttattcaagatagactttaatgaaaaacaattttcttaaaatatcacatttttttgagaaacaggtagaattctaaatctataaaaattctagaatgagtttttacatactgtttttctctctatcttctagtgacagatgataaatattgagggagtaaaagggtaatggacattttatccttagctttgrgtaagattttaatattcaaacagtttgtaattgactcattatcataaatctaagtcgtttaatgtaaaaatttgcattgtaaatatatattacttgtctcagtggagaatgttcttgatttttctagtaggcacacaagttctatgctttaaagaaaaataaaattattataacaggaataattatgtctattaataccacagctcactttctttatggtaataatttgaaggttgat

SEQ ID NO: 188160 - DNA, 556 bp, Homo sapiens
tgtttagctacagttgacattttttaaacaaagcgtaagcacaaaaataaaattttcttgtagaattattttcgtggccttgaaaatattaaaaaaaatattcaaagcacataaagtcagcataagttattcaagatagactttaatgaaaaacaattttcttaaaatatcacatttttttgagaaacaggtagaattctaaatctataaaaattctagaatgagtttttacatactgtttttctctctatcttctagtgacagatgataaatattgagggagtaaaagggtaatggacattttatccttagctttgggtaagattttaatattcaaacagtttgtaattgactcattatcataaatctaagtcgtttaatgtaaaaatttgcattgtaaatatatattacttgtctcagtggagaatkttcttgatttttctagtaggcacacaagttctatgctttaaagaaaaataaaattattataacaggaataattatgtctattaataccacagctcactttctttatggtaataatttgaaggttgat

SEQ ID NO: 188161 - DNA, 586 bp, Homo sapiens
taatatgaaagtgtcttttattacattttttcttgcattccaccattcagtctctaatcccttttaagcactgaaccgcccaaggctcattgcctcaggaaaccatgcaaatttcacccttttgcgtacctaaacaacatgctwtaggtaaaagacagaatttgagatccataagtaaaaacaatagaggaaagatcataaacaactttatgtctttcttatgtactctttctgtaataagtagatttttgtgagttgggggagggggcagtggtgggagactggtaaacagaaagaagtgatgagagaaaaacactggtaagttccagggagaaagccctcatgatcttatgattcccaggttgaagcttgtgagatggtaaaatcccagagagggaaaaatgctcctccattctctatctggacaaaagagactttcaacaggcttgcagagatttctgtaccccaatagacaccaaagtagcaggaagatttctggatgcccatgtactgctcagaaacactggaggaagctacttgggaagaaataaaataaatgcaatatgtacttatgaaccaatgttat

SEQ ID NO: 188162 - DNA, 566 bp, Homo sapiens
aacttagctattttatttttcaagtcccaaagtaaacagcatgccacttttaaaaatatcaattataactttttttcacatgagaggarcgaaactgataaagataagggaaattgtacaattaatgcttttacttttagtagaaacttttaaaaatgtttcatctcaagtaaatttaaagaaaaataatcaattttgtgtaacaaagagaatgtatggatatttgtaaaagccctggtttgaaaatatttcaataaaataaagatatgactaattgaccaatgaattaaccagtaatacatatatatctatgtatatatttaaaaaattaattaacttatcaatttaataacaaggacaaactatacacggataatctgataatttcaaatgtatatattaaaattcaccttccaatttatgtgttccttaaaggaaaatagcatttttattattgttatagctccacaatacgtggtacaaataatatgattgttaaacgtgagttgactttttaaattatatgcctaaaggcaaagtatgacataattagttaataatatgga

SEQ ID NO: 188163 - DNA, 594 bp, Homo sapiens
tttagggtgaaggcatactcccttctgagaatttctgttctaactggttgtctagcttcacatcctgtttctgtggattgtttgtaaccagcttttgctgcaactattactgctgattaatattttgctaatcataggttatggaaagactgtgtttctgttttaaggctctgttagaaattactgatgcrcacactatattgtaaattcttatctctgtatactgtacttctgcatacagatgtatgttaaagaattacttcatccccatgtgaccatctcacctcataatcaaatgaccctaaatccctcactaacctacccccaccctcactaaacataataataaatgctggtatatccagtgcattggcagcatcgcaggaccagaaggcgatgacccctctggacccagctttcactatcttgtgtgtgtctattatttctcaacctgccagtccacctgggaacaaacaaagagccccattgcattgcgggaggctggccagatcccgcaatattccacaaatgtatgtcctctcttgaccaattaggtcatatttaatttggatgcacatataaaatttaaggaat

SEQ ID NO: 188164 - DNA, 508 bp, Homo sapiens
ctgattaatattttgctaatcataggttatggaaagactgtgtttctgttttaaggctctgttagaaattactgatgcacacactatattgtaaattcttatctctgtatactgtacttctgcatacagatgtatgttaaagaattacttcatccccatgtgaccatctcacctcataatcaaatgaccctaaatccctcactaacctacccccaccctcactaaacataataataaatgctggtatatccagtgcattggcagcatcgcaggaccagaaggcratgacccctctggacccagctttcactatcttgtgtgtgtctattatttctcaacctgccagtccacctgggaacaaacaaagagccccattgcattgcgggaggctggccagatcccgcaatattccacaaatgtatgtcctctcttgaccaattaggtcatatttaatttggatgcacatataaaatttaaggaatgcatgtggaacattgtttaaagagta

SEQ ID NO: 188165 - DNA, 577 bp, Homo sapiens
actaacctacccccaccctcactaaacataataataaatgctggtatatccagtgcattggcagcatcgcaggaccagaaggcgatgacccctctggacccagctttcactatcttgtgtgtgtctattatttctcaacctgccagtccacctgggaacaaacaaagagccccattgcattgcgggaggctggccagatcccgcaatattccacaaatgtatgtcctctcttgmccaattaggtcatatttaatttggatgcacatataaaatttaaggaatgcatgtggaacattgtttaaagagtaagaatatttctgttatggcacaatttctatttatatcccattattacaaaacttacatgatatccttcagcaagtaatagtctaccaaattcaaaagcttcaggtttatttatgataagcttcccagacagactggggacattctgtcaaatgcatttagtagataaagacttcctgttatcttttattcaagtatttttaccaggatatctgtcttctatgataaagttaagaaataggttttaagcctgttgaactattttcttccc

SEQ ID NO: 188166 - DNA, 619 bp, Homo sapiens
gatagtataattttaaacatcatgtaggaaactagaagaaaggcawcttagggcagaataaatactatgaataaaggcatttaaattttaaaatttccaaatgatcagctagatataaaaagttatttatggttagagtttagaaacatgaaaggcaaatgaatttggatatgtggtttggtgattgtgaaggcatgatatgtttagatttaattaatttatcctattggtagtgggaaatcagcagattttttaagtctaaagctcaactgtgtgtgtgaatatactagctaatcatgttgtaagaaagagtgtgagtaagaatatatcttggtaatcagaaatctagactgtatatggtggaaaagcagatcttgcatcttgttatacaggagaatgacaaaaatactattttcaagcctgagaagtaattcaacgttttttaaaaaatagttcataaattcattacattgcttcctatagataagtgagtccataaagaaagcaatggattctcatttcttgttcttaatcaaatagagagtaatctctccactaaacacgttataagactttttcacctgtgaacaaacaggcagcgtaacttgagcgggagtcc

SEQ ID NO: 188167 - DNA, 366 bp, Homo sapiens
caaaccaagaacagcctgaaaaccaagctgcaggccccagagaagaaaaagcttgtgtctctgaaaggaaatgccctctctgtgagcccaggtggacaaattccactcttttttgggtggctttctctcccttcagcacacctttgtcccatttcacaygcttcctcctgttggtgcttacctttcacctattttatatatacttatctttctgtgattggccgtaggctgagtctttatttgcatggactgaaacatcactccaactcctgactgattgctggtcaagccttcacttctgcctctaattggctttttacactctcatgtctttttctgaatggtgtttttccaaaacaacccaca

SEQ ID NO: 188168 - DNA, 543 bp, Homo sapiens
cataagcagcaatttacctgaaagcaggcacgttcatttgtgattccctagaatataaacatttaattactttgttattttcttaagtgacaacaatgctacaccttagcagcaaaaattaactcttcagaggttataaaatgctgttctacgtttaataattgtcaacctggtccaggtatctcacagtaagacatggacagtaccaatcatcactgaggtatttttcctttacctgaagtggttawtgattccttccttgtttcctataaccccactgagtagtttgggcttttccacaaagtttgtgagaaaaaagagaaaccctggaggggtctgtgattatttggatattctctctgggtttcactgggggagtcagcctcagttctgctgtaggtcaccaatttttgcttcaggagaagatgcaacatcagatctagtgttattaataaaaaagatgatactttaattttgatttccttatcataagtgggttatggccacgaactgtggaaccagactgtgtctattcaaatttca

SEQ ID NO: 188169 - DNA, 386 bp, Homo sapiens
aaaattatttatgctttcttaaactgtagttcagtctctattactctcaaactaaaaatagacagataaatacataaataattaaataagtcttttttgttagccagaaacgaaactctttgctcatttacagggaagtaatctcaggacttatttacttctgctatttacatttaatttaatttaacatrctgctacaatgttaatatgggatatcattttaaaaatatagctcacaagagctaccttttaatagggacattttacaataatataaatagctcttattagacaatttataaaaaacggaggtttaagatgtttgtaatttacaagtttataaatgagctgggattcaattcaatatgtttgattccacagcctct

SEQ ID NO: 188170 - DNA, 559 bp, Homo sapiens
  misc_feature (1)...(559): n = A,T,C or G
aaatgtcaagtgatttttgtgggcaaaaattcaataataaacatattgaatttttattaggaatgtaacaatgtctgtctatttcttgagaattacactttgattattgacctattactcagtaacaccattgtttcactttctattagcagttttttcagtatttaktttataatagatagctcataaatgcagaggcaatgctatatttagctgtacgctatgaatatgggtaaattcagttgttatcaatggcagattcaatctggaaattgcataacaatgtcctaaaatatatactgtttacatgtgcttcaattagaatgaagaaaaattgttgacttgtcattataaaagaaattactgggatataacacgtacgttttcacggagtctattagaattgttcactttaaacctgattgaagaaacatatgttttcattataataatatgcactggatttgacattgagcatatttttttttaattgtttttgaaacagggtctctttctgttgcccaggcttgaatgcaatggtgtgnncncagctcatttc

SEQ ID NO: 188171 - DNA, 578 bp, Homo sapiens
gatgatcaatacaagataaaagctattgttatgaggaactctgatgactaaagaccttcaagaacttaaggccattcagatgtaatttttcaaagtagataaaaataaagctgtaatggtaatttgggaaaatgtacagaagtatttttttctccttatgtttttgtctactttatgacttataaatttaaaagacaatatatastttatagtaaatacttctaacattttgtctttgaaaaaaatgactacttttagtaccactaccgaatctaggactgatgatatgtagcaaatgtatttcccagatatcttaatatatttttatataaaatgagaaaaatgttatttccatatggccagatatttgatttaatctttttaattcacccaaacttgagtttataatattacttgcattgtataaaaatatgttgttattttgacatagaattatatattccaaatgcaaatgagttgccttaaaaccagtcagcttttatcaaaatctaaataaataataatgtttctgaagaaaaattttaggtacagttttgtagttcatctgtaaaataatt

SEQ ID NO: 188172 - DNA, 277 bp, Homo sapiens
tctactcacaactcaagtgaaatatgatgtatataaaatgtcacttttttctccatgttttgcatgcccaatgttaatatgttaatgtataatgttatttttatttatcaaatttatgtcaaataaattactttttcaatgccttagtacccttatgtataaaatggaaatattattagtatttacttccatagtaaagcatttaatacatggtcacaattattttaatctaccagtcktactagataatagtaaaacattattataaaataaggaa

SEQ ID NO: 188173 - DNA, 440 bp, Homo sapiens
aactggagattatggagatattcagcttcaaaattatctgttgctttctcaataaatttacctggacacaaaactaagcaaaggactatattcactggcataaaattttcaagctataagaattatagaaacctctccaacaaattaaacaacacatattaactaaggaggatgagacaaataattaaaaataagcatgatacatatggagagttcagctcctaaaaaacaacctttgtgtgatctttgaggcccaaccacaggcaattacaaaggcttcaggaggaaagcygttcttcccgcacaagacatgcggaacagccagtgcattgcagtctctgaagggagttgcagtcaagaactcaggctcctttgccacggtctatgcatatttgcattcccagcccaggtattcatcagcagaggccttcccggtcacc

SEQ ID NO: 188174 - DNA, 393 bp, Homo sapiens
ctcacaggactttttcatctcctgggaggaaaggccagctatgagacaactttgagtcccaataaggatgtgggcagtcaagtattagttttcagtgatgtcatgtcaagaggtaaggagaaaaattgaaaatgttaatttggagagttgtaaatagataacgaaataaactataacaattaaaaatgtggcaaacactgacaaagtgtgttttaaagacaatgaacaggaccagaatctgatagcccacaaggctgtgataagttttctattagataataaaatttctatttacattcactccttcttttgatcaaatatgactaagattatycttgattgcaaaggttgaccgctttattagataggtatatcaaaaggcataactgaaca

SEQ ID NO: 188175 - DNA, 514 bp, Homo sapiens
attgaaacaaatctttctgttatcaaatcagtaattttaaacatagacctcatggtttttgtttaagtttatacttcagttgttatttttggattcagaaamtaatacataatttactttctgttattcctttattctttaagtaggaaagtcagttataaaattaaatacattttgtcttttagtgatataacaatgtctaaatataatgtattactgacatatagtagactatattgctaatatattaacattccatatttcattaatgatatatgaagatactacatctttccactttaacaaattgtaggtagaataactgatagaattcatgattttgtacttacatatttcattaaatatcattaaactaaaattattttggtaaagggtatattttattgaaataataaacataaaattagaagtccctaaaagaaagaataatgttacaaaataatatggaataataagctaatttgtattttggtgatgaaatggataataccat

SEQ ID NO: 188176 - DNA, 497 bp, Homo sapiens
tttatcattctcccatttcttatatggtttttttttcttggaaaaagatcaattgggagccatctttaatatgtatataacagtttcaatgttggaaaatatgaaatttgcatattagtaaatgtaaatgtaattttagtagctttaaatttctcttataaataatcaagcctgactaataaaaaatcwcatgaaaatagcatgaacataaaaactttctgagaaaagaaaaatgagaatactttaaaagttttacccttgcacacttataaatctttaaattctattaaacatattttgttagcattattttaaagctgtgtagcatgtccttaaattactgaaatagtataaccaaaatttttatggactagcatattcttgtaacaatttttgcaaaatatgcattaaaactggaagctttataataaattattactttatctgaatttaaccccacttgcattatctttctcagctataattatctgtcccaa

SEQ ID NO: 188177 - DNA, 561 bp, Homo sapiens
cattgcttctccatatatatataatatatatgagaagctatgtatatatatatatgagaagstatatatatatatgagaagctatatatatatatatatgtgagaagctatatatatatatagagggagagagagagagtaattgaacgtatgacaaattagtgctgaagcatactttgcttattaacattgtgggaaactgttggaggggaatactttatctgtatgaactttatttattcatggactgagtttactttataattacaatgaggaaacctaaccaagattttaatgcaactgatttttaatcactggagcaaggcattaattttcattatttggtatgatgccttaaacactctgcaagaagcagtctttacagtaaggaataatttttttctttagtgaataggacttccttcagtcagatttaagtgtgtgagacacatctatgttagagaagacacatctatgacaagaatctttaacaacctatttattaaatcccactactttaatctggacttgttctacaactgtctgtatacctgggtctcc

SEQ ID NO: 188178 - DNA, 526 bp, Homo sapiens
ggtgagcacttacagtacctggttttaccttcatattgctgaaagaggcactggagtgatttaaaaaacagtcctgaatygcaggtgccactcctcccccaatccctgtagagggagcatggtacagagagatcgctgggcactgggggaaggagaacaaagcaattgtgaagcaatgacctcagggctgtcctgttagagcagaaaggaaaaccaggccaaactcagctgatgcccacccatggagggagcatttaaaccagctctagacagagggggaactgcctatcccagcagttcaaatttgagtgcttgcaaacctcaccacagagggctacagcactctgtgtcttcaggtgaacttgaaaggcaatctaggccataaggactgcaactcctaggcgagttctaatgcagaattaaacccagagacagtgtagcacatgggggcacatgacctactgagacaccagctaggacagccaaaggagtgctggcatcacccctctcctagccccaggctcca

SEQ ID NO: 188179 - DNA, 526 bp, Homo sapiens
ggtgagcacttacagtacctggttttaccttcatattgctgaaagaggcactggagtgatttaaaaaacagtcctgaattgcaggtgccactcctcccccaatccctgtagagggagcatggtacagagagatcgctgggcactggrggaaggagaacaaagcaattgtgaagcaatgacctcagggctgtcctgttagagcagaaaggaaaaccaggccaaactcagctgatgcccacccatggagggagcatttaaaccagctctagacagagggggaactgcctatcccagcagttcaaatttgagtgcttgcaaacctcaccacagagggctacagcactctgtgtcttcaggtgaacttgaaaggcaatctaggccataaggactgcaactcctaggcgagttctaatgcagaattaaacccagagacagtgtagcacatgggggcacatgacctactgagacaccagctaggacagccaaaggagtgctggcatcacccctctcctagccccaggctcca

SEQ ID NO: 188180 - DNA, 562 bp, Homo sapiens
aaaaatgcaaatgatgtatacaaaaaaggtctaatatccagaataaatatactgtaacaactcaacaacaaaatgataaacatctaaattcacaaattggcacaagacttgaattaacatttctctaaatwtacacaagtggacaaaaatcacatgaaaagatgttaaacattattagtcaatagtgacatgtaaattgtaaccacaaaatacaagttcatattcactaggattggtataattttttaaaagaaaataacaagtattagagagaatatggagaaactggaaccattgaacattgctgttggaatgtaaaatgatgtagtcactgtggaaaaacaaatttcagtttttaagaaattaaacatagaactaccctatgtgttaacaattccagccttagttacatatctaaagaataaaaaaaacacaagtatttaaacaaatgtgtatacataaaagatgatagcatctctcttcacaatattcaaaagatgctatctgcaaatgtgtataacgttacactggtaaaactaatcagatgattataaaatgaata

SEQ ID NO: 188181 - DNA, 577 bp, Homo sapiens
tcaccaaaggcaggtaaagacagtcttscgtggagttacccaaacctatttgaaagtaaaaactccagtcaggccctccttggaggtaacgaattccataaatatagaaaactgctggccctgggaaagacttttttctttctctgcaaagtatctccccactagtccataaacattcaggtccccatcccatagattgagtgaggtggaggggaaggcctatgcatagaactgaattcaacacaattggttttctttgcaatcctttgaaataaaatctgaggattttgttatatgcattttaaaagcattattctgaaaagatgtccatagcttctctagtttgccaaaagggtttatggtacaaaaaacgttccaagcattcctgatcctagtgggtgaggccctagcgaactcacatgttccttactcttcatgaaatcattctctaacggtttctaataggcttatagataggatcctgttgttttcccctttcagcttccctgtggaaatcctcctggtttgtctgcaaatatgtgtaacagagaaagagagagggagaaacaaagaaaga

SEQ ID NO: 188182 - DNA, 577 bp, Homo sapiens
tcaccaaaggcaggtaaagacagtcttgcgtggagttacccaaacctatttgaaagtaaaaactccagtcaggccctccttggaggtaacgaattccataaatatagaaaactgctggccctgggaaagacttttttctttctctgcaaagtatctccccactagtccataaacattcaggtccccatcccatagattgagtgaggtggaggggaaggcctatgcatagaactgaattcaacacaattggttttctttgcaatcctttgaaataaaatctgaggattttgttatatgcattttaaaagcattattctgaaaagatgtccatagcttctctagtttgccaaaagggtttatggtacaaaaaacgttccaagcattcctgatcctagtgggtgaggccctagygaactcacatgttccttactcttcatgaaatcattctctaacggtttctaataggcttatagataggatcctgttgttttcccctttcagcttccctgtggaaatcctcctggtttgtctgcaaatatgtgtaacagagaaagagagagggagaaacaaagaaaga

SEQ ID NO: 188183 - DNA, 396 bp, Homo sapiens
gaattccaacaacacgcgatttacagaagccggcccgcggcctgttctcatttttccttgtaagaaggccgtgtggagcagcattgagtcactggagttggaagccacccagacctagttgatgtccagctgtcatctgtgtttaccatcattgcaacttggggaaaataatatgatctctgtgagcctctgttttcatgcyttttaaaaagaagataatgatacaagcttatcagaattagaactggtatatgaagagagtagcccatggaaatcattcaataatttgatattattatttacattcccaagtaatgctctagtgtgtcccatctcaggcagaatcctggagttgtccttgatcccactttctcccaaagacaattggccacggtt

SEQ ID NO: 188184 - DNA, 613 bp, Homo sapiens
tctgctcagagacagtgctgggcctgggaaacagagatgaattaagttcagtctatcttgagttgattatggcctaaagagggagacagatcaatacaggcattgacattaaagagcttcagttcaaatgtgaactgcatttctgacctccaacccttgactttacatctgttaaagaaaggtataacactcatctygctggtttgtggaacattaaatgaaataatatacttccagagccttacataaggcctgacatggggcagacacctctaccttgcttctgattctcacaccatttccagtcttatgatcacaaggccacaagtgtttatgtgagatcaaattcctgtgtaaaagctgtggcagacttctaaagacaagtccttctcccaacaagctttccttctcactgcaagataatgttcacccacatgccatgttctgtgagctcttggaagcagagaccatgtgggactcatttttgcaaccccagcaagtagaagagtgctgcatcaaaggagggtctgttcagcacaggttgaatgaatgactaggatgataaataataaatcacaataagctctccaaaatcgaatgcaataatgtcatg

SEQ ID NO: 188185 - DNA, 534 bp, Homo sapiens
cccttgcccctcagtggactagaggcagcatgtttatgagacaggaaaggatgtgagtgatgtgagtttcttagctggctttggaacagaacagaggctctttacgatgatgccagtgctcctaattaattatcataacaagtctcctgttctcagcatctgtcagcaggtacagctgcaccagcacagtggactggctgagcaaccagaagggttggggcaaggccaggccagggcagccagcctgtatctccaagtgcccagctggttccrtccttgtatctgacagggccctctgatcttcctgcatacaatggattgcagggaaaaagaaacttcctggcctgattgacacaaatttgtaggaaacagctgcctttagtggggacaaaaaagcaaaatccagtgtgagtgataacctcttgccagtctgggttctgggttgcatatctgctggtgactataggaggtggtgggaggatgtgaattcctacaaatgctaagttagcatccagtgtgtgacaacagggtgag

SEQ ID NO: 188186 - DNA, 393 bp, Homo sapiens
gaattccacacagcacagcacttaactgggggacagtatgatagcaagggtcctattgaactatgtatggtttgcggctgctgcagggcacttgggattcttcgtgctcagaaaccagcagacaagaagagtcatcatactggcagggataactgacccggatcaacaggaaggggcaaggctgcttctggataatgagggcaggaggaatgtgtgtggagcccatgtgatccactgtgcacctccaggtagccccactgtaattgtgaaaggatatgcagcaaccctgagaagggtttgattatttagcatttatccccttccctccccctcctctcaccccyagaatgaaggtttggctcacaccaccaggtaagccaccaacatctgagg

SEQ ID NO: 188187 - DNA, 542 bp, Homo sapiens
tgtttgtttctgtgcctggcctatttcatcccggttccattcatgttgtagcaaatgacaggatttcattctttttatggctgaattatattccattgcatatatttaccacatttccattatccattcatcagttgataggttgactttatatcttggctattgtgagtagtgcttcaataagcataggagtgcagmtatttctttgatacattgattttctttcttttggatttatactcaactgtaagatttctaaatcatatggtaactctattttaattttttgaggaatcatcatactcttttccacagtaactctactaatttatattcccatcaacaatgtataatatataagaattcctctttctccacattgtcacccacatcaattattgtctttttataaaagctgttttaaaaggactgagatgaaatctcattgttgttttgatttgcatttccctgatgattagtgatgctgcacattttttcatacctgttggccatttatatgtcttcttttgagaaatgtttat

SEQ ID NO: 188188 - DNA, 542 bp, Homo sapiens
tgtttgtttctgtgcctggcctatttcatcccggttccattcatgttgtagcaaatgacaggatttcattctttttatggctgaattatattccattgcatatatttaccacatttccattatccattcatcagttgataggttgactttatatcttggctattgtgagtagtgcttcaataagcataggagtgcagctatttctttgatacattgattttctttcttttggatttatactcaactgtaagatttctaaatcatatggtaactctattttaattttttgaggaatcatcatactcttttccacagtaactctactaatttatattcccatcaacaatgtataatatataagaattcctctttctccacattgtcacccacatcaattattgtctttttataaaagctgttttaaaaggactgagatgaaatctcattgttgttttgatttgcatttccctgatgattartgatgctgcacattttttcatacctgttggccatttatatgtcttcttttgagaaatgtttat

SEQ ID NO: 188189 - DNA, 606 bp, Homo sapiens
gagactatattcaacataatttccttgggagatgacatttgatctgattattaaccataaaagattcagaaaaagcatcatccatctgggtaaagatgcacatgatctgtatcgctgaggaataaaagagtcatgattgattaaagaagaaggagaaataggaggagaagaagaaagaggaaggaggagaagaaggaaggagaagaggatgaggaagaggaacagtatgaggaggaggtggaggagaagaaatgtccatgtggctggattctggagactaacaagagaagtaaacagagccttgactatgtaggaccatgtagaacttcacttggaaagtggactttaagtgcaccaggtcatcactagaatgtgttaaacagaggagtggcatgatttgtcattatcatgacatatcttggttttgcagtttaacttgwtaaagtactatttcttaacatgtccatgtttcttcccacatataatgctccttgagggaacacagaatcctgtacactcggatgtatattttgagctaaaaaaatgaataaataaatgattgaattaacgactataacttcaagggacttaaagttgagataatgt

SEQ ID NO: 188190 - DNA, 606 bp, Homo sapiens
gtggttttgacaatgtgactcttcatcctggagagccctctgtggtagcagagtttggctagtccatgaactttagcttctatttaacaaaaatgaaatggatgacccagggatactatcactctatgaagataatcattaacaattcgtgaaggagtaacctcataaggtcaggggcatgctcatctcagatttcttcacatcagtgcacagaatcaggaggtaattgagcaatttactgctgtccttttagcattgaagatttgttgattgttggttgatggggaagaaaggaaaaatggtattgttgtaataycatgtccctcgtattatcaccctgtgcatgcaaagagaccattttatatcaaatcagatctaggatcttgaatgaagttgaagagagcttttacagatccaatataatacctttacttttagaggatgaattatagtttttactagaggagagtattaggctaatagcttttagataagtagtgtatttcaaagggcaaaagagctgctgaggtctttcgtgcctttttttttctaacttttattaactatttaatcactctagaaaacagcttagagattgttactgct

SEQ ID NO: 188191 - DNA, 433 bp, Homo sapiens
aaaaaaaaaaaaaggccaattgggtcatagctatagctagctgagtaagtatcaagaattcccaccacattttcctcaccacattaagaagtagaaaagagaaagaaagggtgaacagattttgatgatttctttaactttctggatcaatttttgcccaaaaccrtattatttctagtcttctaaaatcaggagaaaaaaatacacatttgctaaagggagtttgatttgtttctctatttcttatagccaaagaattataacaagacagtaaagcaaatactgaaacatatatttagaaaacaaatattgtacatatgaacatagtttgcataaagttataaaggcctaaaaatcatagttaatttaatttactagaattgtcttaattctttgaagaaatattcaaaatgaacattttattactgatact

SEQ ID NO: 188192 - DNA, 520 bp, Homo sapiens
tacgaacaaactccagacgtgccaccttaagagctgtaacactcaccgcgagggtctgcggcttcattcttgaagtcagtgagaccaagaacccaccaattctggacacatttttactgtgtccactctactgataatcctatccagtaaaayatttatttcagatattctggatttttctatagtttgcatttctttccttattttcacttatttttggattattgtacatatttataatctttatggtcctgaaccaatgtttctgttggctatttttctccattttgtgaataatattttcctgctttttgcctgttttggaaatattgttgtttagagcgggagtcaccaatcctaaggccacagactgttgttggtccttggcctgttaggaaccaggccacacaagagatgacccaagagcattactgcctgagttttgcctcctgtcagatcagtgacagcattagattctcacaggagctcaaatcctaatgtgaactgtgcatgctaggaa

SEQ ID NO: 188193 - DNA, 543 bp, Homo sapiens
taaatcctcccctgcctgggctgtgttcagagtggagcccaatctctttctcccactgcaaatcctattgctgtgatccctgtgcctatctcaatggtcctcagtgaactcttccttactgtactttaacaagtatcatggaagagttttttaaccctacatagaacctcagcatatgactttatttggacataagggcattatagatgcaattagttcatgattgagatacaaacacactggattagggtgggcccagaatctaataactggcrtctttagaagacacagacgcagagagaaggccacgtgaagaggaaggctgagcctggagtgagatgtctacaagcccaggaaggccaagagttgctggagccaccagagctggcagaggcagagaaagattcttccccaggtccacctggggggcatggccttccggtactttagtttggacctctggcctccacaacaatgacagtacattgctgttattttaagccatctggtttgtggcaatttgttacagtattcgcaggaaac

SEQ ID NO: 188194 - DNA, 543 bp, Homo sapiens
taaatcctcccctgcctgggctgtgttcagagtggagcccaatctctttctcccactgcaaatcctattgctgtgatccctgtgcctatctcaatggtcctcagtgaactcttccttactgtactttaacaagtatcatggaagagttttttaaccctacatagaacctcagcatatgactttatttggacataagggcattatagatgcaattagttcatgattgagatacaaacacactggattagggtgggcccagaatctaataactggcgtctttagaagacacagaygcagagagaaggccacgtgaagaggaaggctgagcctggagtgagatgtctacaagcccaggaaggccaagagttgctggagccaccagagctggcagaggcagagaaagattcttccccaggtccacctggggggcatggccttccggtactttagtttggacctctggcctccacaacaatgacagtacattgctgttattttaagccatctggtttgtggcaatttgttacagtattcgcaggaaac

SEQ ID NO: 188195 - DNA, 597 bp, Homo sapiens
cgataaagatctcggcctcgccttgtcgtctcccagacagtcataaaccgtggagagggcccagcagagcacctgcctacgcgagcgtgggcgtccatgtacaggcacgagtgtgtgtgtgagtgtatgtgaaggcatgtgtgttcccatgagtgtgagaatgtgtgtgtgcacatgtgtgagtgtgagtgtgtgaacatgtgtgtgcacgtgcacccaaagtcaactgacagtaccgaagcaatgacctgagaccaacactgtccccaaaggtgacccagtgtggagaggcagcatgggaggaggcagagactgctgagctctgaccccgccccacactggctcaccgtggggccttctgcacagtgacgtggcatctccagctttgtttcctcgtctagaatgggaagaatcccactgttgctgcacagttaaaggagggaatgcgtgtggtgcccagcacacctcggggctcagtgcactttcactgtcatccttccacatggaaactcactctgttggagaattcaccttctggrgagaggtggccagacgggcccttggagtgcccaggctatcagggttttctctctgcag

SEQ ID NO: 188196 - DNA, 597 bp, Homo sapiens
cgataaagatctcggcctcgccttgtcgtctcccagacagtcataaaccgtggagagggcccagcagagcacctgcctacgcgagcgtgggcgtccatgtacaggcacgagtgtgtgtgtgagtgtatgtgaaggcatgtgtgttcccatgagtgtgagaatgtgtgtgtgcacatgtgtgagtgtgagtgtgtgaacatgtgtgtgcacgtgcacccaaagtcaactgacagtaccgaagcaatgacctgagaccaacactgtccccaaaggtgacccagtgtggagaggcagcatgggaggaggcagagactgctgagctctgaccccgccccacactggctcaccgtggggccttctgcacagtgacgtggcatctccagctttgtttcctcgtctagaatgggaagaatcccactgttgctgcacagttaaaggagggaatgcgtgtggtgcccagcacacctcggggctcagtgcactttcactgtcatccttccacatggaaactcactctgttggagaattcaccttctggakagaggtggccagacgggcccttggagtgcccaggctatcagggttttctctctgcag

SEQ ID NO: 188197 - DNA, 596 bp, Homo sapiens
ttttggctggatctctttggattattctttaaaatttgctcaaaggactacagtattcatacctaacctatcatcacatacctagagttaatatatgcatgtaagccaacatggcacatgtatacatatgtaacaaacctgcacattgtgcacatgtatcctagaacttaaagtataataataatttaaaattttttttaaatagatatacatgtaagagctrctcctcctcctcaccaacatttggtatgatcagtcctttacattttaaccagtctggtagatgtatagtggtatttcatagcaattttagttttcctttttgtgtctaatgatgttgaacatcttctcatgcatttgttattggaataacatctttcaaaaagtgctgttcaaatcttttgcccatttgtattgagttgttcattactactgagttgtaataactcagcctagtgcagtggcacatgcatgtaatcccagcactttaggaggctgaggcaggcagatcacctgaggtcagcaatttgagaccaaactggccaacatggtgaaaccctgtctctaccaaaaatacaaaaattagccaggcatgg

SEQ ID NO: 188198 - DNA, 531 bp, Homo sapiens
catctttgtcaccttgcctgggagttcccaggcctgccccccagcaattaattaggggtgtggtgggacagcacagacctcaccagctgagcctcacatcctttctcctgtacagttactatggagactgtcgtggccacaggctcccttttgccttctcaatgttaataaacagcctcattatttcgcagaaatcacttcggaaaatcagcagctccacagtttcatgcggtccaaattaatgaggaaagagtatggggatttttttattgcctatgaaaggaagaagagttatggctcatttgtgcacttttgctgtatttatgttttatgcattagaaagcgatttccacctccattacacatcactaatgtcctcgttacattaaaggtacagaccaggaatcytttttgcccatcaaaccaccaaataaattgtggcaaaagatgtgaggatggagaatgcctaaaaatcagctgggctgggctgggctgcaaagggggagacagacctgtttctcggtcaaatgt

SEQ ID NO: 188199 - DNA, 531 bp, Homo sapiens
catctttgtcaccttgcctgggagttcccaggcctgccccccagcaattaattaggggtgtggtgggacagcacagacctcaccagctgagcctcacatcctttctcctgtacagttactatggagactgtcgtggccacaggctcccttttgccttctcaatgttaataaacagcctcattatttcgcagaaatcacttcggaaaatcagcagctccacagtttcatgcggtccaaattaatgaggaaagagtatggggatttttttattgcctatgaaaggaagaagagttatggctcatttgtgcacttttgctgtatttatgttttatgcattagaaagcgatttccacctccattacacatcactaatgtcctcgttacattaaaggtacagaccaggaatcttttttgcccatcaaaccaccaaataaattgtggcaaaagatgtgaggatggagaatgcctaaaaatcagctgggctgggctggrctgcaaagggggagacagacctgtttctcggtcaaatgt

SEQ ID NO: 188200 - DNA, 463 bp, Homo sapiens
atacctgtaactctttccagtgggccttaactaagtacacatataaaatactgaaggcaggaaagtcttatcrttccttcactggtatagctacagtggaagtctatcctcctccaagggttctttctcagatatacatatatatatataatatatatatgatatgatttgttagatgggtttattctgcctttcaaggttccatttaaatggaaagacttatgcttctacttataatgtgtgtatagacaaagcagattattgccccaactctactgatgagatacactaggaaaacctaaaaaatgacaatttaaaaaatttcattagagaaatttttacatttctgatatttaaatttttaaatttctaactctctacggcacatgtgtatcagatgggctgaagttggagctgaatgaatagaactccacgagctctctgggccctgagagagagtaaa

SEQ ID NO: 188201 - DNA, 584 bp, Homo sapiens
actgtacaatctctctatgagtgtgcatggagcttgtgaacataattgatgtcacttctgtgattaggttacattgtatggcagaggtgaagagatttaagcagatcttattaaggtcccaaatcactttaagktgatcaaagaggaaattatcacacgcaggcctggcataaccagatgagccctttaaaagagtttctagagttcagagatttgaaggagcagattttctctttctctgggttgctgattttgaagcaagctgccataaattctagagctgtaaggaaatgaattctgccactaaccacaggagtttggaagagtgctccaaccctcagatgggatcaaagccccagctgacaccccaatttcaggttgatgagactgagcagaagaccagttaaaccaggcacaaattcttgagctacagaaactatgaagcaatacaactatactgttttcagccacaaattttgtagaaatttgttaagcggaaatagataatgaatacaaattttggtaccaggaagtagaatgatgctgtaaaaaaaaaatacttaaaatgtaggtgtggttttagt

SEQ ID NO: 188202 - DNA, 545 bp, Homo sapiens
tctctatgagtgtgcatggagcttgtgaacataattgatgtcacttctgtgattaggttacattgtatggcagaggtgaagagatttaagcagatcttattaaggtcccaaatcactttaagttgatcaaagaggaaattatcacacgcaggcctggcataaccagatgagccctttaaaagagtttctagagttcagagatttgaaggagcagattttctctttctctgggttgctgattttgaagcaagctgccataaattctagagctgtaaggaaatgaattctgccactaaccacaggagtttggaagagtgctccaaccctcagatgggatcaaagccccagctgacaccccaatttcaggttgatgagactgagcagaagaccagttaarccaggcacaaattcttgagctacagaaactatgaagcaatacaactatactgttttcagccacaaattttgtagaaatttgttaagcggaaatagataatgaatacaaattttggtaccaggaagtagaatgatgctgtaaaaaaaaa

SEQ ID NO: 188203 - DNA, 595 bp, Homo sapiens
gaatgtattttgcaagtgtgaaggaagtgatttattaagagctatggagtggactgttgccagcaaakctctaagatggctcctaagatttccactccctggcataaaaactatatataatactatcccttgaatatgggcaatatctgtgaatatgatggatatcactctcattattaggttacattatacagtgacctcaaggaattttttcagatataaagttaatttaaagaaatattatttcggctgggcttgacccaatcaagtgattccttaaaagagggtctagaggtcacagattttcctattggtcttaaaggagtaagttaccatgctgtccaggacctgagagagagtcatgtggcagggaactaagggtggcctcaagctactgagaggagcctcagctgataggtagcaaagagatagggacctccatcttacaaattcaataactgaattctgctaacaaccaggtgatcttagaagagaaccctgaggtctgtaagggcatgcagcctagccaacaccttgattacagccttgtgagatcctgagcagaggacccaatgagactgtgcctgggattctg

SEQ ID NO: 188204 - DNA, 595 bp, Homo sapiens
gaatgtattttgcaagtgtgaaggaagtgatttattaagagctatggagtggactgttgccagcaaatctctaagatggctcctaagatttccactccctggcataaaaactatatataatactatcccttgaatatgggcaatatctgtgaatatgatggatatcactctcattattaggttacattatacagtgacctcaaggaattttttcagatataaagttaatttaaagaaatattatttcggstgggcttgacccaatcaagtgattccttaaaagagggtctagaggtcacagattttcctattggtcttaaaggagtaagttaccatgctgtccaggacctgagagagagtcatgtggcagggaactaagggtggcctcaagctactgagaggagcctcagctgataggtagcaaagagatagggacctccatcttacaaattcaataactgaattctgctaacaaccaggtgatcttagaagagaaccctgaggtctgtaagggcatgcagcctagccaacaccttgattacagccttgtgagatcctgagcagaggacccaatgagactgtgcctgggattctg

SEQ ID NO: 188205 - DNA, 572 bp, Homo sapiens
tgtatctggagtttaatttcttgtattttatgagatagtggcaacatacattgttttcaaaatgactatctggtgccatttactaagaagaatggactttttatattacactgcagtgatatgcttgtcataaattattccttggcaatatatgtatgcctatttctagaacctttataatgttccatggatctattcgtctgcgctgtgtcaatatcacaatgccttaatatctatggctttgaaatataaatcaacaagtgttagtgtacgtccccaacttttaaaatttatgattgccttggatatcattgatccttccattttcttaaaatttagaatttgctcgtcattttctayacgataattctgagattttacttggttttgcatttaatctaaagatcaatttggggctacttgacatctttagaatattgagtcttccaatgcatgaaaagaattgttcaattctgtgctactaataaagtaaaatcctgaaagagaattttgtaggaagtacatgtattctaaaattggcccaaagactttttctaacttaacagatatga

SEQ ID NO: 188206 - DNA, 572 bp, Homo sapiens
tgtatctggagtttaatttcttgtattttatgagatagtggcaacatacattgttttcaaaatgactatctggtgccatttactaagaagaatggactttttatattacactgcagtgatatgcttgtcataaattattccttggcaatatatgtatgcctatttctagaacctttataatgttccatggatctattcgtctgcgctgtgtcaatatcacaatgccttaatatctatggctttgaaatataaatcaacaagtgttagtgtacgtccccaacttttaaaatttatgattgccttggatatcattgatccttccattttcttaaaatttagaatttgctcgtcattttctacacgataattctgagattttacttggttttgcatttaatctaaagatcaatttggggctacttgacatctttagaatattgagtcttccaatgcatgaaaagaattgttcaattctgtgctactaataaagtaaaatcctgaaagagaattttgtaggaartacatgtattctaaaattggcccaaagactttttctaacttaacagatatga

SEQ ID NO: 188207 - DNA, 604 bp, Homo sapiens
ttttgttgttgttaactagaccgctgtacttaacattaaatcctctcctgggctcacagctggtactgcaaacactgttaattggagagactgaagtgtgaaactcaatatatatgttgtcattttactcaacagtttctggaaaatgtattgcaggtaaatcagcaggtgttagcaaagcattcgagaaagtacacaagagcaygttaagcctcatgatggatatgtttccctgctggagtaaagcaagcatctgacttttgtagccattactgaagtagcatagatttgtcattctgcaaacaaatgagatttttcttttatgcaattttgaatgctctgatttatttttggataatagcctttctaattccttcccaacttttttattctccaacattttgttcccttctctttgacataagagaaatattaaaactttgctattaaataattacaaaatataattttaaatgcctttattgtgtcagttacacagaagaaatttattaaatgtatatctaatgactaaatagataaccatattttaactcattttgatttgcatcatggagtctcaatgaaatagaggcattggaaatca

SEQ ID NO: 188208 - DNA, 604 bp, Homo sapiens
ttttgttgttgttaactagaccgctgtacttaacattaaatcctctcctgggctcacagctggtactgcaaacactgttaattggagagactgaagtgtgaaactcaatatatatgttgtcattttactcaacagtttctggaaaatgtattgcaggtaaatcagcaggtgttagcaaagcattcgagaaagtacacaagagcatgttaagcctcatgatggatatgtttccctgctggagtaaagcaagcatctgacttttgtagccattactgaagtagmatagatttgtcattctgcaaacaaatgagatttttcttttatgcaattttgaatgctctgatttatttttggataatagcctttctaattccttcccaacttttttattctccaacattttgttcccttctctttgacataagagaaatattaaaactttgctattaaataattacaaaatataattttaaatgcctttattgtgtcagttacacagaagaaatttattaaatgtatatctaatgactaaatagataaccatattttaactcattttgatttgcatcatggagtctcaatgaaatagaggcattggaaatca

SEQ ID NO: 188209 - DNA, 572 bp, Homo sapiens
ggtgggaaagtagagaggttgggtatttatcttccttgctccctctatatcagatcacacttttgttggtggctgtttcatctacctaagacttagtctttgtgagagtttccagtcacatcacactctgaatcactgtttcttcccctcgcccattaggaagagttttactaaaagtcatgaagttcctagaccctgagacctttattgttcctcatcagctccttagccatgtccacacatctgaaaattgtccttttgttacacaagttaaacatacctaatctaaaattccaaaatgcaccaaaatcctaaactttttgagtgctgaagacacaagtggaaaattccacacctgaccttacgtgataggttgtagtcgaaacacagtcaaaactttgttttatgcscaaaaaatattttaaatattgcataaaattagtttcaggctgtatgtgtaaggtgtatataaaacaaataagttttgtgtttagactggagtccgagtctcaaaatatctcattgtgtatatgcaaatattccaaaattcaaaatttgaaatctgaaacttg

SEQ ID NO: 188210 - DNA, 572 bp, Homo sapiens
ggtgggaaagtagagaggttgggtatttatcttccttgctccctctatatcagatcacacttttgttggtggctgtttcatctacctaagacttagtctttgtgagagtttccagtcacatcacactctgaatcactgtttcttcccctcgcccattaggaagagttttactaaaagtcatgaagttcctagaccctgagacctttattgttcctcatcagctccttagccatgtccacacatctgaaaattgtccttttgttacacaagttaaacatacctaatctaaaattccaaaatgcaccaaaatcctaaactttttgagtgctgaagacacaagtggaaaattccacacctgaccttacgtgataggttgtagtcgaaacacagtcaaaactttgttttatgcccaaaaaatattttaaatattrcataaaattagtttcaggctgtatgtgtaaggtgtatataaaacaaataagttttgtgtttagactggagtccgagtctcaaaatatctcattgtgtatatgcaaatattccaaaattcaaaatttgaaatctgaaacttg

SEQ ID NO: 188211 - DNA, 572 bp, Homo sapiens
ggtgggaaagtagagaggttgggtatttatcttccttgctccctctatatcagatcacacttttgttggtggctgtttcatctacctaagacttagtctttgtgagagtttccagtcacatcacactctgaatcactgtttcttcccctcgcccattaggaagagttttactaaaagtcatgaagttcctagaccctgagacctttattgttcctcatcagctccttagccatgtccacacatctgaaaattgtccttttgttacacaagttaaacatacctaatctaaaattccaaaatgcaccaaaatcctaaactttttgagtgctgaagacacaagtggaaaattccacacctgaccttacgtgataggttgtagtcgaaacacagtcaaaactttgttttatgcccaaaaaatattttaaatattgcataaaattagtttcagsctgtatgtgtaaggtgtatataaaacaaataagttttgtgtttagactggagtccgagtctcaaaatatctcattgtgtatatgcaaatattccaaaattcaaaatttgaaatctgaaacttg

SEQ ID NO: 188212 - DNA, 552 bp, Homo sapiens
gtaaattgtccttttactgaactctctttaattaaactctttgatgtgttgtttccttccaggaccctggctaagacaaagtctctgaactacaaaataaaagcattggctcattgtctttgcagcttgtaatctacattaaattagcagacagggaatctaaagtactgttgccacttttgaatgatccctctgtgcatctgttttgttttctgttagtgatgaaccctattctaatgccatctgtataatcacatctaagactgaaggtatggaagatggctgacagggtcctgttggcatctggcctttcttgtcttcctgggagcaactgtgagaagctattatactcagggacaacagacttgaaagtcataaagtggccacatcatttttaaacattagcgatacactcgtagaaagtagggaatacactcagaaataagaggtagccaagattcatatactttagttcaagacactgactattggtgaggasaaaaattcctgattctgccacaaaagggagtttcttaactctgccccagttcc

SEQ ID NO: 188213 - DNA, 493 bp, Homo sapiens
gccataaacctagttagctgcacrgccagaatataaacccatgttagcttgctgctgagcctgttttcttactatttagaacaattataagtcctaaagaatgcaaaacgtgcaaacatgcaaaaaattcacacatctatacaaatgtattttcataatcaatgatcattgtgaacagacaaaaatattttaaaggtcaacattttaataaacataagaaaagcagtcatgttatatctaacattaaattcatttgctaaggtaagcaaaaacaaagatacaacacaaacatctgggcattaagatagtcaagtatacagaaacacaattgcaattattttagaggggaaaatattatgtttatttttatgagagaaagaattgaatctagtattaaacgtcacatgtgaaaatatataaaacattggaattaggagacagacaacattttcataagtataaaaagtagtaaattacccattaatgatagtca

SEQ ID NO: 188214 - DNA, 289 bp, Homo sapiens
tgcatgacatccagactggtgtttgtccaaatatctgggcaatgaggccaagttgatatgtaaagttaaccatcacagaggtcatgaggttcttgttttactttactttttcaagttgatgatgtacctctgggcagaacagatcataaaaaatgacttttttatggctttttctctctttgatacttcccagattcctgaaatgactactagaarcaactgactgcacttctgtgacctgggtaatgtactcccttttgctgaccagtctaactcggcttgttactat

SEQ ID NO: 188215 - DNA, 592 bp, Homo sapiens
ccagaattcctgttccctggaaggaagagaccgagagacattatggccacatggttacaaggtcaagttgccaaggacataaaaccagatggagacctcacccagtttttttgtttgtttcaaggacctgcagtaawatttattaccagcttgctgggccgtcttgagcagtttatggggtcctaagcccctgttctatcctaaggtacccttctttatgacagaacaacacagacaaattcatagcacaaaatacattagattcgttacaacttaatatgagcctcagaattttttctcattaatcaaaactttacagaggagataaacagtgatttttaccattcattcagccaatttgcacagagagagagagagagagagagagagattgagaagccataagtctgactggcaagaaatttttacccctttgccggcatgtcccgtttctgggttccccttccctgagcggccctagcgaccctgcttgccacaccatcgctcctggggccaagctgcatcacaaaggaaaatcatggaaccacaggcaaaatcctctaaattttgtaagttgccgcccaaacggctg

SEQ ID NO: 188216 - DNA, 397 bp, Homo sapiens
gaatttagcaatccaacactgtgatacttttcaagtcttatataccttaaatctatcctacatacttctgtcagattattttttttcagaatcctatatttgaataatcatttccttcctcaaaagtttttaataattccctggtattcaaggctctctatttttagaccaacttaacatctcagccttatctcctcaagtttcccaacatgaaccttccattcaggtcaaactgtccttccccacctttgctcgtggcattctcggcatataggattcagctggcttcccatgtccctttccatatccggaccaaatcaatccttcaagtctgaattattctattctgtttccctgaccacctcagygcctaggattagatacctcctttgaattc

SEQ ID NO: 188217 - DNA, 579 bp, Homo sapiens
ttttttctacctctgccacacggagacagcaagatcaacccctcctgtttctcctccttctcagccaactcagtgtgaagacaaggaggatgaaggtttttatgatgatccacttacacttaagagaktagtaaatatattttatcttccttatgattcttctaaataacactttcttttctctagcttactgcattgtaagaatacagtaatatatatagtattgaatatactgaatacagtaatacatataaaatacatatacatatagtatatgatacataacataccaaatattttctaattgactgttatcggtaaggcttctggtcaacagtaggctgttagttatttgagtttttggagagtcaaaaattatactcagatttgcggctgtgaggaaggctggcacccttaaaccccactttgttcaagggtcaactatacatactttgctagtgaaagctgaagttaatttatacctgaagtttcttttcttttcttttcttttttttggagatggagtttcagtcttgttgtccaggctggagtgcaatagcacaattttggctcactgca

SEQ ID NO: 188218 - DNA, 573 bp, Homo sapiens
ggctcatgcttgtaatcccaccattttgagaggcagaggagggcagattgcttgagctcaggagttcaagatcagcctgggcaaatggcgaaaccccatctctacaaaaaaatacaaaaattagccacgcatrgtggcatgtgtttgtagttccagctgccaggagcctgaggcaggaggatcacttgagccccagaggtgggggagactgcagtgagctgagattgcgccactgcactccagcctgggcagcagagcaagaccttgtcttaaaaaaaaaaaagcctgtctaagaaggtgtgggagtgttccagttctgaggcctgttacaaagatgtgtctgtggctgtctcctattttaggtttatttactcatatcttatctcatgtacaaaagaaaaaggcattataaaaatgaatataataaaatatgaagatgacagggtcaacaacttaggagagaaagaaataaaatgatgatactttggttattatacgttgtcacttgattttgttttgttttttaattttaatttgattttgagctttccgatagccaaaaaagataatatg

SEQ ID NO: 188219 - DNA, 536 bp, Homo sapiens
gatctcagtggtcccagtttgccttttcaatactcagttcagccaattccttgtattaaactatctctgttaatataatagatgtggccgggcatggtggctcatgcctataatcccagcactttgggaggccgaggtgggtggatcacttgaggtcaggagtttgagaccagcgtggccaatatggagaaaccccttctctactaaaaatacaaaatttagccaggcatggttgcatgagactgtaatcccagctactcaggaggctgaggcagaagaatcacttgaaccttggaggtggaggctgcagtgagccgagatygcactacagcattccagcctgggcgacagagcagaactctgtctcaaaaaaataaaaataaaaaagagatgtagtttctattttcctgactgaaccctaatacttagtatatcaacaaaaatacactctgctgcaagtatcagatacccaactattggtggattaaaccataaggtcatttacaatttactcaagaaaaggcctagagcctttg

SEQ ID NO: 188220 - DNA, 344 bp, Homo sapiens
ttaacaataatattcaatgtttgtatattatgactatgtaaakgccattcacagtccatccacctataaaaattctgtttcctgaacaactttttgttttacttacaactaataatttcttaggctttgtttgcttaattttgtatatacttgttagaattcaacctcaaactttgccaggtgtttaaatctcatcctaagataattagatccttcagagattctattattttatttttctaagtgagtttatcttggagccttctgacttgctgctttctggacaggtgccttctacgtatagctgctatcctggcatctccctaaatgatcgtcccaggggt

SEQ ID NO: 188221 - DNA, 493 bp, Homo sapiens
ccaagagagagcactgcagagatcaacaacaggaacgacagtgccctggttctccctcccaacaccttccacctcctcatcatgcagagcctcctaaagttaaacccaatccttaagggaggagaaaccctgaattgactgagagatgtttctgctaaccagcaaaataggggatttgtaataaaactgttaaaaaataaaaaggtcttgtcataaccaagttaaattacttttcttacacatctaagtttggartttaagatttaagccaactatacggtagaagtttctgggacatctttagcttgccattttctgggccttacctctaatatcagcattgtaaaagatattcatttagtaagtcctgagcagatatgcaattagaacccagagaaggaatgtgagataacataatctgtgagatacagcagctgaaattaatccacgtcaaaactcagtggctaaaaacaaccattatttattatcactc

SEQ ID NO: 188222 - DNA, 548 bp, Homo sapiens
aggacattttaaatatagaatgaagaaaaaagagctagtcaaattaatgccattttcttcattgtttaacatgaaatggattaaatgaaatgactaaaatattacataatggaaaatatcaactgcaagtaatattcacaatagcaaatggagaaattatgttttagttcagatgccataagcagaattgaatatgatggccccacaatttgctgcatttggagagatgtgtaagaaactaatggaagaatcttaatgacacagacaggcattgsactttgcagtggaggaggggattgcatctcacttaagtacttcctcctccttctctccctcccattcctgctaaatggaaatcagacacatgtgtcaaggggactcggtcactttgtctgcatattaactgttatattaagatttgctgcaaaaagacagtccattaaagttttgcctctgaagagggaaaggagtggaaataaattatcagctgaaggacattttgggaagtgttcttttgagcattcattattactatttaagactaattg

SEQ ID NO: 188223 - DNA, 548 bp, Homo sapiens
aggacattttaaatatagaatgaagaaaaaagagctagtcaaattaatgccattttcttcattgtttaacatgaaatggattaaatgaaatgactaaaatattacataatggaaaatatcaactgcaagtaatattcacaatagcaaatggagaaattatgttttagttcagatgccataagcagaattgaatatgatggccccacaatttgctgcatttggagagatgtgtaagaaactaatggaagaatcttaatgacacagacaggcattggacttygcagtggaggaggggattgcatctcacttaagtacttcctcctccttctctccctcccattcctgctaaatggaaatcagacacatgtgtcaaggggactcggtcactttgtctgcatattaactgttatattaagatttgctgcaaaaagacagtccattaaagttttgcctctgaagagggaaaggagtggaaataaattatcagctgaaggacattttgggaagtgttcttttgagcattcattattactatttaagactaattg

SEQ ID NO: 188224 - DNA, 595 bp, Homo sapiens
ggacaaaatgcccaatatttgaagtgtctggtctgggatttccaagtagttgggcagaatcaattgagttagaatccccaaggctcttttatgcagggatggggtagggggatcagatccctctcactaatacctgaggctaacttttcacttatgcagattagtttaaattttttgtttgtttaaagacagggtctcactttgttgcccaggcaagagtgcagtggcatgatcatagctcactgtagcctccgactcctggcctcaagttatcctcccacctcagcctmctaagtagctggggctacaggtgagtgccactatgcacagctaagtttctaattttttatagagacagggtctcactatgttgtccaggcttttcttgaactcctggcctcaagtagtccccttaccttgtcattaggcttttaaaagtcaccttcctttcacttagtgtgagtgagcttaaaatccagtcctggcagagtttctgataaaacgaggagactgctgggaaataggggaagaagaatcaacgtatttgaactgggatagagacatgaaagtagaccaggaaaacagagcacctcat

SEQ ID NO: 188225 - DNA, 582 bp, Homo sapiens
gcccaatatttgaagtgtctggtctgggatttccaagtagttgggcagaatcaattgagttagaatccccaaggctcttttatgcagggatggggtagggggatcagatccctctcactaatacctgaggctaacttttcacttatgcagattagtttaaattttttgtttgtttaaagacagggtctcactttgttgcccaggcaagagtgcagtggcatgatcatagctcactgtagcctccgactcctggcctcaagttatcctcccacctcagcctcctaagtagctggggctacaggtgagtgccactatgcacagctaagtttctaattttttatagagacagggtctcactatgttgtccaggcttttcttgaactcctggcctcaagtagtccccttaccttgtcattaggcttttaaaagtcaccttcctttcacttagtgtgagtgagcttaaaatccagtcctggcagagtttctgataaaasgaggagactgctgggaaataggggaagaagaatcaacgtatttgaactgggatagagacatgaaagtagaccaggaaaacagagcacc

SEQ ID NO: 188226 - DNA, 435 bp, Homo sapiens
aatgagaaattaaaaataaatcasactgtgtgttaacatgtatttaatatatatataatctacttattgaaaacataatatcaaaagaaaactatatataccgagcattcttaaaatcatttgtcaaaggttttaagaaaatgtttcgttttctgtctcctagttatatcaattacagagaaaggagtcttggaatatccagctacattttttcatttgtccatttctttttaattttatcagtttttgcttcatgtgttttgaagcattgttattaactgcataactacttaggattaagtctttttaaattgagtctttcatcattatgtaacatacctctttatccctcataaggttttaactctgaagtctactttgtctaatattaatacagcctctccagctttttcaaaattagcgtctgcatgttat

SEQ ID NO: 188227 - DNA, 435 bp, Homo sapiens
aatgagaaattaaaaataaatcacactgtgtgttaacatgtatttaatatatatataatctacttattgaaaacatratatcaaaagaaaactatatataccgagcattcttaaaatcatttgtcaaaggttttaagaaaatgtttcgttttctgtctcctagttatatcaattacagagaaaggagtcttggaatatccagctacattttttcatttgtccatttctttttaattttatcagtttttgcttcatgtgttttgaagcattgttattaactgcataactacttaggattaagtctttttaaattgagtctttcatcattatgtaacatacctctttatccctcataaggttttaactctgaagtctactttgtctaatattaatacagcctctccagctttttcaaaattagcgtctgcatgttat

SEQ ID NO: 188228 - DNA, 435 bp, Homo sapiens
aatgagaaattaaaaataaatcacactgtgtgttaacatgtatttaatatatatataatctacttattgaaaacataatatcaaaagaaaactatatataccgagcattcttaaaatsatttgtcaaaggttttaagaaaatgtttcgttttctgtctcctagttatatcaattacagagaaaggagtcttggaatatccagctacattttttcatttgtccatttctttttaattttatcagtttttgcttcatgtgttttgaagcattgttattaactgcataactacttaggattaagtctttttaaattgagtctttcatcattatgtaacatacctctttatccctcataaggttttaactctgaagtctactttgtctaatattaatacagcctctccagctttttcaaaattagcgtctgcatgttat

SEQ ID NO: 188229 - DNA, 563 bp, Homo sapiens
catggtatacatccatttctcccctccagatgactgcactctaattgccatgcaatttattttattttattttattttattttattttattttattttatttttgagacagagtcttgctttgtcgcccaggctggagtgcagtggcgcgatctccgctcactgcaagcttcgcctcccgggttcacgccattctcctgcctcagcctcccgagtagctgggactacaggcacccaccaccamgcccagctaatttttttgtatttttagtaaagacggggtttcaccgtgttagccaggatggtctcgatctcctgaccttgcgatccacccatcttggcctcccaaagtgctgggattacaggcgtgagccaccccgcctggccacaatttatttgtaacatgtgttataagccccatattacatagttaatatttttgtttaaactgtcatttataaacaattttaaggactatgtattgttaccaatgtctttaccattttcattggttttcattcctttttgtagatccacatttcatcctggtcccattgtctttct

SEQ ID NO: 188230 - DNA, 556 bp, Homo sapiens
tcacaaactctgctggttatggtactccctgtgttgtaaatgttactggagacagaccctgtgactgaggctttcccctctgtgaacaacatatcactgagcaacaactatcttctcacaggtctgacagagacagaaaaacatgccaaggtgaagacactaagaaagagggtcattaaacactgccaaattgctttcttctcaaaatggaacacttagcacaagcaataaaaaaattagcaaacatgcatgtcaccagtttgctcttattattgaaaatgaggaaatgtataagaaggctgtccacaaaaatcaaatgtctatttcattgcttgcctagatattagcagaggtgaaaatggatacacagrttccagatagaggtcaggtcagtcctgaacaacattgaaagatgaactaaggtggtttgatttccctgtaagtgacctcattgataattagggatgcctatgccatgctcactcagaggctacacctttccagtaatattgtatatgtacctatcatcagtcattcacttattatccaagaattc

SEQ ID NO: 188231 - DNA, 557 bp, Homo sapiens
tttgtggggcctcttaggggagactcatgaaaatcagtgtacagtgacaagcaattaattattaattaataattaatatgataaaggttgtcattaaagccccagagaagccccatgagtgctcaaaggaagacatctcttacttctacccagagaagttatgaagggctgtctggaggaggtgrtatttgtcttaaacaaatactatggccttgcatttccctgagaattataaaagaagggagaaactgaaaaaaaaaaacagtttaaatattggctaataagaaatggcagaatgaagggaatgggtggacaaggaggaaagatcatcttgagatggaaactacacatgcaaagatataaagatgagaaagagaacaaaatagtatgctgttgggtactgagcactgggtgagtgactgagcctgggtgggcagtgagatgtggtggcagatgtgattggaaaggtaggcagggttggatagtaaatcctcacagccatcacaagtaataagtacttgtattatctaaatgtcaactccataattccaccttga

SEQ ID NO: 188232 - DNA, 529 bp, Homo sapiens
ttgctaaatgaataaattgtccacattttacaaatgagagtcaggggcacagagatgttaagaaacttgcacaaggtcccacagcaacttgcatgtcatgctgatctcgggctggctattttacaagtggtgaacaaagtttacagaactgaaggcttttatgccgaaccctatcattttagaaatatgagagccggaatcagagcggaggactggcgaaggtcagagggtctctttaggggcgaagggcactgacttctttcgctgtagaaagtggtttcaaggtgaccccacggagctgcctcacatgagctagagctcgtgtcatctctggctaacaggtcaggggctcttcctgcctttttgtctttgcaggaactttgcttctgcctcctcttcctctgggtcaagagtcccctttgaagtctcagatagggtgagtatmgagtgtgagggactttaggagtccctattatgagactgacaccctctgctaaaggaatgctttgaagacttgcttctaaaaagg

SEQ ID NO: 188233 - DNA, 466 bp, Homo sapiens
tgagggcaggatctgtgtctgtcttattcactgattaattccagaacctaggatgggtcctagctgatagagggattttaataaatgtttgtagttaatctttcttctctaactagttactatagttaacatttgagacaggtaycctgggcactctcattgcctaaaaatctgagaaagtggttggcagttacccagcaggttctgtgccaaacttgggcatacatcatcggtggctttgccctgaaatctctagcaaacaaaagagaatctatggttcataattcaaaaaggatgaaaagaaagtaacttacttcaagatacttataatccagctgaagacaaaacacatttttaaaaaagataaatgagaacacaagtccaaatatggtgaatgcctaataaaatgaggagaaagaggtcctattaggctctgatgggcagaagaagcttcaggaaggttttg

SEQ ID NO: 188234 - DNA, 579 bp, Homo sapiens
gccaggattggtgcaaatatcatagtcatagaattggatgggctcagagtttttccaaaatacataaatatgtttatgcacaagaatatatctggttgctgactgcaaatgagtcatttggccaagtgttgactgagagattatattcgccactggaaacagagttaaaagctgagcagaatgagtctcactagtgccccaggcaacagatggacttcggagtgttgttctttgtggttgatttgcttcttttttgtgaccagccaacagcagaaaacaaataagagggggactaaatgcacttggcaggggaaatgcagatgaaacatgggtacttggtgacttgtgcagttaactcagcaattccatgggctgtctgagtgcaattcagaataagcacacacatyatcgcaaaatcttatctaggaagacagaggtgctcacctgctccttctgtggccaactttacacttagtgaaaatacatatcccaatccagaatagggatcagggccaagcagagagctggtttccatagaaatgcagctaatggtgctctgtctgttcctgaatgtcagca

SEQ ID NO: 188235 - DNA, 578 bp, Homo sapiens
atatcaaagaactgaaatttcctccttgaaagcaatgcaatgttatctatgatctcaaaatgacctttcagaaacattccattatcaccctccttcttatggttttgtayagatacactatatctttgatcatctccactgttcaaaaattctgagaatttttgattctcacaagacccctgtaatattagacaaattgagctctgtgaaagggaatctattaaagtcatttattacagacaaggactgtttctaataaggtttaaatcctatcaggaagaaaccgacaagaacctctgaagtggaggtcactgtttgggccacttttaaaaaaataatttgaattagctactagaaactaatattatactcaactggcccacttatctcattaatgtctgtctggtccctgcagtgatttcagatttcaatccctataataatactttctcattttgttattgaagaactggattctcagagaattcagatgttctatttcaagtctcacagctgatagacagaaatgtattgggatgggaaaaatttaatatgctttatttcatcatattaatccc

SEQ ID NO: 188236 - DNA, 411 bp, Homo sapiens
gagtcatgaaagtatagttataatcaaggtgtatgaggagttttactggaaggaccacagagatttggagcataaaggaaaaaatgcaaaaaaaattaaacttggaattaggaaatgcaaaggtcctagccttttgtttttcaccaggtacttattaattatttgtggttttttttttgatcttcaaatttcttatttattgaactctccaggcactraaaatacaaatgtgaacaagacaatatggtccctggtcttttgaaacttacattctacttggagaaacaacgttaatactaataaagagactcacggtcaaaacagttatagattgtaccaacgatcatgaaggcagcatataaagtgaagacaggggtgggagaatacttctgtagaattgcagaaaggact

SEQ ID NO: 188237 - DNA, 614 bp, Homo sapiens
caaggtctcattcactaccaatgaagctagctagcagtgagtcagagttgcatgacattggcaatgggtaagaaacaattcrtaaaatagtttgagcacattacaaggagtttaagttttatgttatttattaaattgaaaagccctttaaatgctttaggtagaaagcaacactattaaatttgcatttatcaagaataaccagaataaatcagatggtaacagaagaggaaaaggaagagttaggagactcatgcaatattcctggtgagggatgtggcagcatggactgcgtggtggcagataaaagaaaggataaagagaggcagaggtactcttctgatttcccccattcacagatgagtcactcaaggataaagagtttactttcagtggcctgatgacaacctgagctcccaaatgccaggctggaattcttgcaggattctgaatcataaagaacaaatttctctttttctttcttagttatgatactttatgtcacatacttttaaatacaagtagaaactcatgcattttaccaataaatgcatttaataaattgagggacacatgatacatgaatggaagagtttgaaaactttacaacacag

SEQ ID NO: 188238 - DNA, 614 bp, Homo sapiens
caaggtctcattcactaccaatgaagctagctagcagtgagtcagagttgcatgacattggcaatgggtaagaaacaattcgtaaaatagtttgagcacattacaaggagtttaagttttatgttatttattaaattgaaaagccctttaaatgctttaggtagaaagcaacactattaaatttgcatttatcaagaataaccagaataaatcagatggtaacagaagaggaaaaggaagagttwggagactcatgcaatattcctggtgagggatgtggcagcatggactgcgtggtggcagataaaagaaaggataaagagaggcagaggtactcttctgatttcccccattcacagatgagtcactcaaggataaagagtttactttcagtggcctgatgacaacctgagctcccaaatgccaggctggaattcttgcaggattctgaatcataaagaacaaatttctctttttctttcttagttatgatactttatgtcacatacttttaaatacaagtagaaactcatgcattttaccaataaatgcatttaataaattgagggacacatgatacatgaatggaagagtttgaaaactttacaacacag

SEQ ID NO: 188239 - DNA, 614 bp, Homo sapiens
caaggtctcattcactaccaatgaagctagctagcagtgagtcagagttgcatgacattggcaatgggtaagaaacaattcgtaaaatagtttgagcacattacaaggagtttaagttttatgttatttattaaattgaaaagccctttaaatgctttaggtagaaagcaacactattaaatttgcatttatcaagaataaccagaataaatcagatggtaacagaagaggaaaaggaagagttaggagactcatgcaatattcctggtgagggatgtggcagcatgractgcgtggtggcagataaaagaaaggataaagagaggcagaggtactcttctgatttcccccattcacagatgagtcactcaaggataaagagtttactttcagtggcctgatgacaacctgagctcccaaatgccaggctggaattcttgcaggattctgaatcataaagaacaaatttctctttttctttcttagttatgatactttatgtcacatacttttaaatacaagtagaaactcatgcattttaccaataaatgcatttaataaattgagggacacatgatacatgaatggaagagtttgaaaactttacaacacag

SEQ ID NO: 188240 - DNA, 646 bp, Homo sapiens
ttgctccctggacctatgggactttatttaagaaacgtaagttcaaagataaaataaaaattgtaatacagctacagcaaagcacaaaccaattatggggcctgttgagcacagggccagtgtgaccacacgtgccacctgctcatctgtagagccagtgctgcttccatgcatggttctgtagcagaggcccattttcctaaaatgtctgttccctgaccctgagagcaggaggttgaagaaatccattacatggctcagcattttagaggaaagctttgtctccagaaaatacaaagcaaacaacaacaacaacaaaaaaactcaagttgcagatgctgagtttctgcctagagtctccacgaattaacggccaatttgccaaaggcactatttgacctggggctacagctccagtctctgccttgattagtgaatgtttttctctgttmtggtgagttaaactggacacttgcctttttcttcttgtttttcatttgtaagtaattggtattcaagtagctacttaaattccttttggtcaactattgatagaaattgccaaatctcattaagaaagtcatcattttgttagattttcccaaacactttgctcaactgaatacagacctttctgaaccttttt

SEQ ID NO: 188241 - DNA, 535 bp, Homo sapiens
ttagggatgaaatcataggggtctgaagctgtcttcttgtgctgagtcacttcctgggtgggttattggtcctggtggcaccagttggtctatcagaatgaaaggtctaaaagatacctcaaatatcagccttaggttttacaatagtggtgctatctgtaagagcaagtggggaggttaaaaatcttgtgacttttgactacattaatcctgaacactaattctaaccttgtgactaatgtgttagttttacaaaggcagtttcagttcctgagcaaagaggttattcattttgggaaaatagtattatcatctttgttttaaagttaaactataatctaaattcttcctatagttagcttggcctgtgcccaggaatgagsaaggaaagcttgcaatgttagaagcaagatggagtcaactgtgttaaactcctctcactgtcataatttttgcaaagggttttgagactagcatttcctggacatgcaatcaacttatttatctctggatcttatgatataggacagaacct

SEQ ID NO: 188242 - DNA, 548 bp, Homo sapiens
tgttttcagcaactaagtttgaggtagttcgttacagcagcaagtggaaattaatacaggcatactgcattttccaaagataatggcaacaatttctcctaaatcatgtgctaatcttccagtgatatttcaaatctcttcccatcaaaagttaagttttctgtaccctcaccactatagtggaagtgatattatatatatgaattaacaggctaggtattcagaggtgatgtagcctcctcttggttctcttggggacgtttacttttgttgcccagctgctatactgtgaggaaagccaaatttacacatataaggacatcaagtgcataggccatgtatagatgctccagctgacagttcagctgagggtctagagtgcaggtgaaatcaactgtaatcacatgagggaaaacacctccagatatctccagcccgggctgctgattcactcrcagtcttcagtctcctcagctgaggacccaggcatggtgacacagagacccatcctccctaaaacccatgcctaaatttctaaaccactgaat

SEQ ID NO: 188243 - DNA, 576 bp, Homo sapiens
atttcaggctcctagataattataaactagtcacatttctacaaagccrtgcttaacttattcaaacatacaacaagtgattatattctaagagcaattcagctaattactttgcattaaaaaattagaaataaattaattctaaaagcaaagtatatactcaagttttctatgtaacagcttggcataaatatttaatgcatatgaaatctttgaagggagtgtttggcaaacattcacttgggaaagaaatcaacaaattatgtgataattgcttttgtgaagcttggctcaaaaattagaggaaattgaacttcagagttttaggattgagtatattctcagacctaagtgccttaaaattctttctcttctctgaatttttcatatatattatctatatttctttttgttccacattttttcttttctaccttttgaaatttttaaaaatatatttcttaaatgacaaatagaaatggtatgtatttatggtaacaatgtgatgttttgattcatgtattcattgtagaacagctaagtcgagctacttaatatgaccatcacctaacatac

SEQ ID NO: 188244 - DNA, 383 bp, Homo sapiens
agcagtaataaaaataaaaatcagtattcatttacaagtattcattgagcacttactatatgcaaggtactttgctaagtttcaaatactgtattgcagaatattatcttagctttgcaaaattggtttatgattgattccatggtcctacagggacccagatacttacttttggaggggaaaacaatgaccattcacatctcacttttttacttaaggtggtatgtaatctagttatggtatagaatgctttggggagaacycatatgacaggtagatgtagaaaataggacttgaggactctgcataagatgagcagtgaagaaaaaattcctacatccataggacatatacatctgtaggaaagtgaaaataaattatct

SEQ ID NO: 188245 - DNA, 592 bp, Homo sapiens
agaattctataggataccagtaaygtgtttaatattccacatatagaaaaatggagccagagtttggctagtatagcctggggcattatctgttttaatagaagctggaatgcccatcacccaaatcactgcaaaagatgacatttaacacaggcagaagactctcttaattggcatgtagctcagacaaactgagaaaaggtgtccacacatacatgtacataagatagtctcccaaatgagggaatatgtgttacatccatttgccaaagagagctaggttcaattgcttgcactacatacatctggcaaattgttggactgtttaacatgccttgtggcatcactttccaatgaaaacaattaggaggctgcaggttgtttactgcaggatttgtaaatgcaaaccgttcacagtcttgctcagttaaggggatattaaagaaacagtcttttaaatctatgactattaaaggccaattttttggaattatagcagggaaggcaatgctggctataatgctcccataggttgtataactgaattggtagctcttaagtcagttaacattctccgtttgcctgatttttt

SEQ ID NO: 188246 - DNA, 590 bp, Homo sapiens
gaattctataggataccagtaatgtgtttaatattccacatatagaaaaatggagccagagtttggctagtatagcctggggcattatctgttttaatagaagctggaatgcccatcacccaaatcactgcaaaagatgacatttaacacaggcagaagactctcttaattggcatgtagctcagacaaactgagaaaaggtgtccacacatacatgtacataagatagtctcccaaatgagggaatatgtgttacatccatttgccaaagagagctaggttcaattgcttgcactacatacatctggcaaattgttggactgtttaacatgccttgtggcatcactttccaatgaaaacaattaggaggctgcaggttgtttactgcaggatttgtaaatgcaaaccgttcacagtcttgctcagttaaggggatattaaagaaacagtcttttaaatctatgactattaaaggccaattttttggaattatagcagggaaggcaatgctggctataatgctcccataggttgtataactgaattggtarctcttaagtcagttaacattctccgtttgcctgattttt

SEQ ID NO: 188247 - DNA, 388 bp, Homo sapiens
gatggaagtggtatataaactacatttggaaaaatactaggcagrtaaaatataaacttcctgtagccctctcttatccagttgactgctcccttcacttttaatgctccaatgtttagtccttcttgcaaacagaaagaaggtaaaatgcaaacatctgattacaattcgtgtgaatcttattgagataacgttgacctatcaagttctccctttgtgtgtctgacattctgaatgtatgctacctcattacctagaatgttataccattatctggaaggtaagcaatattacaaccatttacaaatgagaaaactgaggctcagagagattaaataacttgtctcaagtttcacatccagatatcattaaatatctgtttgatgcc

SEQ ID NO: 188248 - DNA, 440 bp, Homo sapiens
aaatgaaattttactggtcaaagttaccatttaacctacaggcaaaaatccaaaataaaatgttsataagacaaatcaaagtattcgtctgtctactatctattggtccaattaataatgagggtttaccccaaaatccaagtttgatttagcattagaaaaatctattaacacaattcctacagatgcagattaatacaaaaacataattttatctcaatagttgcagaaaagcatttttaaaaattcaacaatgactcgtattaaaaattattagctaactaggaatgaagatgtgaagattaagtgtcaatttacctaagctatggtgtctggaagtctggtcaaaaacaggtctagatgttgctgtaaaggttgtttgtttattttagatgtgattaacattcacatcagtaaaatttgagtaaagcgtaccctct

SEQ ID NO: 188249 - DNA, 424 bp, Homo sapiens
gaaaagacaaactcttacgtatttatgcaatgagctatcatccagtgatataaaagaatgaactgcactacataaaaaaatctagacagattttataaacatgaggctgtctaaaagaggcaagaatcaagagaacacatactttatttcatttatgtaaggttaaaaaataaaaataaaatcacatacatacatataaatataaaatcagtgccttgaagtaatgcatacttcaatatatgaatatgtttatttacttatacataatatttaattgtaaatatttacctatatcaatattaatatagatatgcatgtacatattayaggataaggaggggaatgtgatcagaagggacacatggaggaatactgggcactactaatatactcctactccctctcagtggtggctacatagcac

SEQ ID NO: 188250 - DNA, 553 bp, Homo sapiens
agcctgcgggtccacagaagttgagaatcgaggtttgggaacttccgcctagatttcagaagatgtatgaaaatgcctggatgcccaggcaaaagtttgctacagggggaggtccctcatggagaacgtctgctagggcagtgtggaagaagaatgtggggtcagaggccccacacagaggccatactggggcactgcctagtggagctgtgagaagagggccactgtcctccggaccccagaatggtagatccactgacagctcgcactgtgcacctggaaatgctgcagatactcaatgccagtccatgaaagcagccaggaaggaggctgtaccctgcaaagccacagggcatactatgggcactcaccttttgcatcagcrtgacctggagccaaaggagatgactttagagctttaaaatatgactgccctgctggatttcagacttgcatgggctctgtaatccctttgttttgaccaactccctgcatttggctcagctgtatttacccagtacctgtacccccattgtttctaggaagtaactca

SEQ ID NO: 188251 - DNA, 567 bp, Homo sapiens
tatgcttctttttagaaaataataaaaacaataaaggacaatttggggcawtagtcagaaagtaaaaacctcacagtcactgggacattcattcaagaaataggtacataatatttattttacctaatatagcgctggacattatacaggaaataatacaaaaataatagaaagtctttaacctgaaggaacttaacatgaaagattctgattcttgttgggatttggagatgtcaattactcaccctcttgctctctaggttccccatggcaaatcctaggcaaaaaagagaagagaatgaaaatgtcaactttattaatggccacctaaatgcagatacctcagtaaaggtggattagaggacagaactgtatgtataatcaaaatgcaatggacacgatctaccactcttacagcctcccgtttttcttccctccccacaataattcaacactaatttctctcgatttgcccacaattaggctaaatgtgacaaaacaaatgcttatccaatacaacaggaaagaccgtttatccttagggattaatatgcattttatctccct

SEQ ID NO: 188252 - DNA, 611 bp, Homo sapiens
ggcctgctctcttcagctcctgtggtgatctgtgaatcaatctgtgagatggggggcttcttagcagaactccatcttgctttgctgaggttttttttttttttttttgccttttcgcccaataacatcttgctctactcaccctccaatgcgtccagatgcctaaattttcttggtcctatgacaaaaagccagatcttagctaaactaaattctgcaacatgggtataaaatcctatatagggattgttttaattgtgaaagatacagtcattaatttactcatcaaacttagtgcgtgccagtcagtgttgagttgttaaacgtaggtagacatagcccctgcatttggctcacaatctattgccctcttttcaaaaatgctgttcacaraccattgctgggtaatgaaactgaccaagttgttcatatgaagaacatatttcaaaaatgaaaatatagtaaaatagagtgaaaatatgagagtaaggatgctacacaaagtaaggatagtattattttttggtaatattgttttagttatataagggggaggagaaatacactgagttgaacagtaaaatacactttacccttgaacaacacaggtt

SEQ ID NO: 188253 - DNA, 548 bp, Homo sapiens
tgtaattctctggaaaagcatgaggcatctttagtttaccaaaagtggatttggttataaaaagggtccataaaygctgtttgcatacttttctggttgttataggcagtaaccaaaatgagcatgtgtttcatagaaatgtgtaacataacactatgaaagcctaccaacacatcaaagctttagtggtactctattgatatcacttttcctgtgagggaaccgaagtagacaaactttgtcttgatcactgtggtggcattttcggtggcactggcaccattgtttgcgcaagtagttgatggggctgcttgagaaaccctatgcagatcatagcgactttgttatccttggaaaaaaatcttacctcaggcttttctctcaatatggtctcaaatgcaagttgaatacaggaagttgagtaggataaaataaaaagggaaaagaaagaattaatacaactgtaaaatatacaaaccaaggtgagtgtgagtgtcaatagtaagtgtgtatgtagcactataccataaataacatattgtatatta

SEQ ID NO: 188254 - DNA, 548 bp, Homo sapiens
tgtaattctctggaaaagcatgaggcatctttagtttaccaaaagtggatttggttataaaaagggtccataaatgctgtttgcatacttttctggttgttataggcagtaaccaaaatgagcatgtgtttcatagaaatgtgtaacataacactatgaaagcctaccaacacatcaaagctttagtggtactctattgatatcacttttcctgtgagggaacygaagtagacaaactttgtcttgatcactgtggtggcattttcggtggcactggcaccattgtttgcgcaagtagttgatggggctgcttgagaaaccctatgcagatcatagcgactttgttatccttggaaaaaaatcttacctcaggcttttctctcaatatggtctcaaatgcaagttgaatacaggaagttgagtaggataaaataaaaagggaaaagaaagaattaatacaactgtaaaatatacaaaccaaggtgagtgtgagtgtcaatagtaagtgtgtatgtagcactataccataaataacatattgtatatta

SEQ ID NO: 188255 - DNA, 548 bp, Homo sapiens
tgtaattctctggaaaagcatgaggcatctttagtttaccaaaagtggatttggttataaaaagggtccataaatgctgtttgcatacttttctggttgttataggcagtaaccaaaatgagcatgtgtttcatagaaatgtgtaacataacactatgaaagcctaccaacacatcaaagctttagtggtactctattgatatcacttttcctgtgagggaaccgaagtagacaaactttgtcttgatcactgtggtggcattttcggtggcactggcaccattgtttgcrcaagtagttgatggggctgcttgagaaaccctatgcagatcatagcgactttgttatccttggaaaaaaatcttacctcaggcttttctctcaatatggtctcaaatgcaagttgaatacaggaagttgagtaggataaaataaaaagggaaaagaaagaattaatacaactgtaaaatatacaaaccaaggtgagtgtgagtgtcaatagtaagtgtgtatgtagcactataccataaataacatattgtatatta

SEQ ID NO: 188256 - DNA, 541 bp, Homo sapiens
cataaaaatttatttgttttaagttactccaacttagtttaaaataacctaatttagcataatgatagtaacttggtgattcatctgtaaggagttccattttgtaggaagaaaaaaaatatgtgggtctctttagttatctacaaggtagcagattttattatatcttgctcaggaggaaaaacttcatggtgcttctccttgttggttagtagcgctggagttaagtattcaacagaatcattattacatctgaatcacaatgtagccagaagttttcggagattttattttttttttccccaaaagaagcaaaagcaagtctgatgatgactattttggaatatttagccataactatctggacacaccgtgagcagcatattgtactgttttccaaatttcatgaataatatataactcatcagatacttcttagatcatcttattctgaatcctgaatctgactgcaattctaaatatatttaatcacaccaaatccccacrtgctctttggaagccatgtaggtatatcatgggc

SEQ ID NO: 188257 - DNA, 602 bp, Homo sapiens
tttattaaattgatgcaaaagtaattgcggtttctgccaataaaagtaacgccaaaaacaacaattgcttttgcagcaacctaatatcatacaggaagaaagcagtgatacgttggattccacaaggcctggtgttcaayaccaacattaacatgaattacagcattcttagaaacaggtgcttttagtcacctcaggctaagattgcacgtgtccagtgggaagtaaatcaaagttttcttaataaaatattgcactgaaacacatatctgttagaagaagtgagttattttattaaacatgtctataggaatttaggatgttttatgaaagttttataccagtatatactacaaacttggcaatagttccatttccccttagaaatgattggtctagctataaaaatccctcaagtcaatttctggtcttctatcatttcctaaaatttctggggattaagttgtctttcatcaggctgacagaaaactagacctctggaaggggtatgggtgttcctttttagaaagtaagatcatcctgatgagtacactctagattttctgcttttctcaagtgttacagtgaaacctcaaagactt

SEQ ID NO: 188258 - DNA, 604 bp, Homo sapiens
ttctaatgaaataacaaatcaaccgaatatttttgtgtatatgattaaatattaatttaaattggttagaatttaaccaatgttgcttgtaatggtgacaacacatgaatttatgtccagcttttggttaacttcctgctataaatattatttctacaataaacagttttaccaatattctctatgagttattttayacaaattggaaaaaatgaatgcctttcttaccacttttaaatattgagaagccagtacattattagctttgcatatacgttcttaaataaaactaaggtcatcaaaacttaaaagtacagtaacattttcccacattgtcacatttcttaaaacaccaatatataagggagagaatagtttacatccatatacacatgcatactgtatcagcaaaacctactaagcaaaatcccatagtttaaaaaaaaatatgatttcgaagtagtttgtaatgctgttaattgttgtagagtcactacaaaataagacaagtaattatcataatagggaatgattgccatttaagtatgactgaggggttaaatacctaaaagctgcacttaacgtattgaaatccatagaaatt

SEQ ID NO: 188259 - DNA, 551 bp, Homo sapiens
tggtcagacttacagggtatgagctcagcatgaccagctgaggaactgttctctgctccacctggccaggaggatattcgggatctggggaagggcagctggcaggcagctctttagaaggacttcctatgtaaggcctgaaatggcagaagaaggacagttgctatttggacaaataattatgtatccagatagacagaagctgaacagtagagagagagcacatgcaggaaatcttgggagacttttcctccaagtctgcctccccctgaataactccatccatagacccatcgcccctgcagccgtcagctcaggaaggtcatgtcaaaaagtggtacagactgcagactgcaggtagagtgcctgattctcatctctggttaaccgtgacctttggccaccttgctaaactcgtttctccatccgtgaaatggaagtactagagcctccttctcagcattattgtgaagattaaatgaaatcakttatgtaaagtcctaatggtgcctggcatgtaataaatgcttagaaaatgtgggctactatgt

SEQ ID NO: 188260 - DNA, 407 bp, Homo sapiens
taccctaaacaaaatgcagttattgctaaagagcttcaaagctagttcacactttaattttttttatgtgatcacgtttgagttttcatttttgtgggacttgctatgtatagcaaaaatggaaaatgtttttctgccacaagaaaacaaagtcaattacctgtggcagtgtcttcattacctcaattactgctaagccactgagaaatccttcaaggccaatagagtacagcaaaataaaagtcagatacttggtaaaagatgagcaaagtaacagcaacctcattaacagaaatgttaaggctgaagtcttcatatgagacagaacacttgtactttgaaacctgtcagcttggcagraaatgtaatgcttctatctctggtggatgaaaaaggaaaaagggcga

SEQ ID NO: 188261 - DNA, 515 bp, Homo sapiens
cagccagggatgggtcagataaccggacttcgcgaggcatgccagagaaagcctgaaagaacgagaggttggtgggaggctctcctggatctgccttctctttcctcctctgtgggatgtmccctggctaggcgacactctcctcagccctggctgcatggtaacggggagaccaggccagagggtggagggaaggctggctgccgtggatctgaagtcatcctctggtcccaggccaagcaaggcagggtgttctctgtcctacattacagaaatactgaaagtgctcaagtgaagcccgaagagacctccacatcaaggataaacacggctgaagggtgtggtcaggatcctactggaaacttcaaccactccacagcaagcctctaaccactaattacctgtctctaggaaagcacagagctgctattagagacagaggagaggcagacgctgactttagcaagactctggatctgacaggcttcttgtacaaaccctcagctccttccctc

SEQ ID NO: 188262 - DNA, 515 bp, Homo sapiens
cagccagggatgggtcagataaccggacttcgcgaggcatgccagagaaagcctgaaagaacgagaggttggtgggaggctctcctggatctgccttctctttcctcctctgtgggatgtaccctggctaggcgacactctcctcagccctggctgcatggtaacggggagaccaggccagagggtggagggaaggctggctgccgtggatctkaagtcatcctctggtcccaggccaagcaaggcagggtgttctctgtcctacattacagaaatactgaaagtgctcaagtgaagcccgaagagacctccacatcaaggataaacacggctgaagggtgtggtcaggatcctactggaaacttcaaccactccacagcaagcctctaaccactaattacctgtctctaggaaagcacagagctgctattagagacagaggagaggcagacgctgactttagcaagactctggatctgacaggcttcttgtacaaaccctcagctccttccctc

SEQ ID NO: 188263 - DNA, 422 bp, Homo sapiens
agaaacttttattctcttgttcatagcatcatccacaaaaaawctaacactgtacctagaacacacttggtgtttggtgactagttgttgaatggacatgtggcattggagtttaaggtgtagactggaaccagtaggtttgggaattgtcttcattgtcttcatagaggctatgaaaatggatgagacccatctagtgggatgagttacaaaaagaaaaggcaaacagttgaaggtctatatttaggggacagaacaaggacggtaagcagagagaaaaaaggaacagttggagaaatggtaggaaagtgggagaaagtctgtatcaatgggcattgggaaagcatatatttaaaacggactccttagtcaagaagggcatggttgaaaagtgctgaactggacactggaagacattggtt

SEQ ID NO: 188264 - DNA, 534 bp, Homo sapiens
gacagatgctgagaaatgtaattagactcttggtatgtgtggccaaattttaatttctaattgaacatgaggccccaaaatgtttagtcacagaaagaaagtaatacagcatctcttattcaatcaagtcattctgaactacttatataaccaaaggtcagtggtagcaggattgtattacatggtgattttaatgttctgcctttwgttgctaacggcttgttttaaaatctagttcagtttcctgcttagattgcagtgctgtatttgcagtagacaaattcagagattctcttgggagactctggttatggctggattcccagaacagctgaaaaggtcaggaagtagagttcacttttcattagcgatggggagcttcaaagatgggttccagggtcagcaaacacacatttgctcaaggaatttggccttgctgggtagtggttgtaatgtttagtaaagcaggattggcagtggctcttccctgagttagattcagtgttgtttctaaacctttggctggaagttagt

SEQ ID NO: 188265 - DNA, 610 bp, Homo sapiens
aactactgcctagcacatgtaagtatactcaatgaatgctgtcagatatcttgtattgtgtcagtatctgtttgggaaggctctgtgtgcaggtactattctgttttccatccgaacttttaacttttaaattttgttctttttttttttgagacagaatcttgatctgtcactcaggctggagtgcagtggcatgatcttggctctctgcagcctccgcctcccagattccagcaattctcctgcctcagcctcctgggtagttggaattacagrcatgagccacaacgcctggctaagttttatatttttagtagagatggggtttcactatgttggccagactggtctgcctgccttggcctcccaatgtgctaggattataggcgtgagccaccatgcccagcccatccaaacttttaaaaaatacaatatgcaaagtagtgaaacataaaacagaaaaatcacccgtagtcatggcccttacatagtataccataagcagtgcaaatcccttcttctgccccatgtgggctagattcttttccttctcatcaacccccttctgtaacccatggttgataatgtggtggccatccttccttaattt

SEQ ID NO: 188266 - DNA, 610 bp, Homo sapiens
aactactgcctagcacatgtaagtatactcaatgaatgctgtcagatatcttgtattgtgtcagtatctgtttgggaaggctctgtgtgcaggtactattctgttttccatccgaacttttaacttttaaattttgttctttttttttttgagacagaatcttgatctgtcactcaggctggagtgcagtggcatgatcttggctctctgcagcctccgcctcccagattccagcaattctcctgcctcagcctcctgggtagttggaattacaggcatgagccacaacgcctggctaagttttatatttttagtagagatggggtttcactatgttggccagastggtctgcctgccttggcctcccaatgtgctaggattataggcgtgagccaccatgcccagcccatccaaacttttaaaaaatacaatatgcaaagtagtgaaacataaaacagaaaaatcacccgtagtcatggcccttacatagtataccataagcagtgcaaatcccttcttctgccccatgtgggctagattcttttccttctcatcaacccccttctgtaacccatggttgataatgtggtggccatccttccttaattt

SEQ ID NO: 188267 - DNA, 610 bp, Homo sapiens
aactactgcctagcacatgtaagtatactcaatgaatgctgtcagatatcttgtattgtgtcagtatctgtttgggaaggctctgtgtgcaggtactattctgttttccatccgaacttttaacttttaaattttgttctttttttttttgagacagaatcttgatctgtcactcaggctggagtgcagtggcatgatcttggctctctgcagcctccgcctcccagattccagcaattctcctgcctcagcctcctgggtagttggaattacaggcatgagccacaacgcctggctaagttttatatttttagtagagatggggtttcactatgttggccagactggtctgcctgccttggcctcccaatgtgctaggattataggcgtgagccaccatgcccagcccatccaaacttttaaaaaatacaatatgcaaagtagtgaaacataaaacagaaaaatcacccgtagtcatggcccttacatagtataccataagcagtgcaaatcccttcttctgccccrtgtgggctagattcttttccttctcatcaacccccttctgtaacccatggttgataatgtggtggccatccttccttaattt

SEQ ID NO: 188268 - DNA, 363 bp, Homo sapiens
attttgaatatataacaaacatggacttcagaaactaattatccaagagggatacaggacacaatttttgctcatttcaaatacattttcaataaattcatgggtgaaaaacatcacaggaagatggtggagacaacagtggtattaagataagtatcttccacgcctttgacagtaacatcaaagatgataactaccatttcaccctgctcaggacttctttgcttgtgtaaaacagaattttggtttagccggaattatatgtcagwtatagaaactcataaccaggaaaagtttcacccaatgttagaacaaaaccttattgttagcaattaatttttttttttttttaactagccagtg

SEQ ID NO: 188269 - DNA, 565 bp, Homo sapiens
gataaaattcattctctaaggtggtagtaaaaattagttgagatgatgcatgtaatggtgtttacctcaatgactggtacacaatactccatcatagaagttcttttaatgtatatcaatctaaggcttagaatttcacatttaccagtatttattcctcacctctcattcacacagcatttgaaatcatcatcagctcagacctcctgactttcatggaaggcatccatgaaatcaagtcttttaaaaagtcaaaaatgatttctttcgcccagaggattccagtctttgaactacayaatttggattttttgttctgttttgttttgtttttcagctaagaaagcaagcacttcatttcttaagcaaccgcacctcagcactaacaaccccagcagactatctttccctcaaaatcacaggactgctcatagaatgctcagagcatcacagaatcttacagaactcttttataaagaaaaatatggctgtcatctttttatgtctctaagaaatgacaataattcagatttcaattctatagtgatttgatttgatcatttta

SEQ ID NO: 188270 - DNA, 398 bp, Homo sapiens
acactacactttaggcagggtamcctagagccatacctgatcaaacccctcatctgggacaggtacaggagagactcccaagaaaaagcccttctcccacaggagcagaactgtccaggccttgtatagaaggctcttccccagacatcatgcctgtagctcccaatctgtctgggaagggctcagggctgctcaaggtcctggaggatgatggaaacttcagcatgggcttgctgtctctggccacctccccagactcttcccaggcagcaatcatacaaaagagctggacagaggctgcaatgtggaagcctctctgttccaccagaacagccatgaagtcagctaatcagacctgctgcatctctcaggctatggaaacagctcctgctgtagct

SEQ ID NO: 188271 - DNA, 400 bp, Homo sapiens
cactacactttaggcagggtaccctagagccatacctgatcaaacccctcatctgggacaggtacaggagagactcccaagaaaaagcccttctcccacaggagcagaactktccaggccttgtatagaaggctcttccccagacatcatgcctgtagctcccaatctgtctgggaagggctcagggctgctcaaggtcctggaggatgatggaaacttcagcatgggcttgctgtctctggccacctccccagactcttcccaggcagcaatcatacaaaagagctggacagaggctgcaatgtggaagcctctctgttccaccagaacagccatgaagtcagctaatcagacctgctgcatctctcaggctatggaaacagctcctgctgtagctgtg

SEQ ID NO: 188272 - DNA, 389 bp, Homo sapiens
gcagggtaccctagagccatacctgatcaaacccctcatctgggacaggtacaggagagactcccaagaaaaagcccttctcccacaggagcagaactgtccaggccttgtatagaaggctcttccccagacatcatgcctgtagctcccaatctgyctgggaagggctcagggctgctcaaggtcctggaggatgatggaaacttcagcatgggcttgctgtctctggccacctccccagactcttcccaggcagcaatcatacaaaagagctggacagaggctgcaatgtggaagcctctctgttccaccagaacagccatgaagtcagctaatcagacctgctgcatctctcaggctatggaaacagctcctgctgtagctgtggg

SEQ ID NO: 188273 - DNA, 398 bp, Homo sapiens
acactacactttaggcagggtaccctagagccatacctgatcaaacccctcatctgggacaggtacaggagagactcccaagaaaaagcccttctcccacaggagcagaactgtccaggccttgtatagaaggctcttccccagacatcatgcctgtagctcccaatctgtctgggaagggctcagggctgctcaaggtcctggaggatgatggaaacttcagcatgggcttgctgtctctggccacctccccagactcttcccaggcagcaatcatacaaaagagctggacagaggctgcaatgtggaagcctctctgttcmaccagaacagccatgaagtcagctaatcagacctgctgcatctctcaggctatggaaacagctcctgctgtagct

SEQ ID NO: 188274 - DNA, 642 bp, Homo sapiens
agaaactaatttttcaggtatgtaagtgaaaaataatacaggactgtcttctccaatgctattcttagccttttgtaaatccaggtgaccaggatagacaaccagatcctgcaaagggagttcrtcaaagccctgcctatgatgactgctcccagagcagggggtctaaactatggtttggaagcatttgatttaatactattaaaaggtctgtctcagagcaaaaaagggagtttcctgggaagcactgccaagataaggaaattaactcttcaggaaagttccaggaagagaaaggtagaagtagccacagatatgagttggggaaaggatggacatttcagcagtatgaaatccatttcactggataccaggaaaccagtataaaaggaaggtgtgacttacttgggcttgatctcagagtgtggagaagagagaaaaaaatccaaaggagggagatatctagccgtgtctccatgtggagacaaaggaaggtaagagaatggtcaattaaagggaataaaaagacgatatatattattttcataaccaaagctgtaggagactgctataatctccacagttgtaatgctgctgtaaaaacatgtttttaaaaataaggcctcagtggaaatcgaaatc

SEQ ID NO: 188275 - DNA, 540 bp, Homo sapiens
gaattcatgctagcgccagggtctctactacagacactgatgtgtaactggcactagacaggactggggattttgaccaatatacatttatcaagctcaatggaggaggtggaagactaaaaacaattcaaagtgggatcccgccctcacggaacttagcatctattaaggagggagcggagtgccatggaaagaccatgggctttgkaaagagacctgagttgactacagcccagcccaattgtttactagctatgtggccctgggcaagaaacttaacatttgtagccttagtttccttcttcgtaaaatggcggtaacagagtccaactgttagggctgagattatctatatgaaggtcttggcacagtggccagcagtgcctctcttctgtattcgatgtaaatggcaccccctgaagttttgcgatgtgcacccctggcccatcttactacacaatactgtgtattgtgtagtaagtgctcaatacacagtagctgctattatgactgtctctaatgttaccatgtgggtacatc

SEQ ID NO: 188276 - DNA, 617 bp, Homo sapiens
aagcttcatcataaatttgatgtttgttcttgcttcagttttagcagaattcatgttgctccaataggggcttttttcaaactgatgtcttatccttcttagttcctcaagctcgatcctgttcagacatgttataacaagttagtaygagtttatttgggtacagaaaaattttaaaatccatgcataattttttcataatatgcattttcacaaactttgaagatccctttcatttacctatctcctcttatagacacttgagttctttaaagttttggacttttacaagtgatgctataaataaaaaaaacccagccttttatgtgtttctccctgcatttatatatttctaaggctagattcctagaaatacaatcagtgggtccaaaggtaagctcattataaattgtgccaggtgctgtcaaatggccctagagagatggtaccaatttatactcccaccagtagggtctgagggtgccagtttcctcaccctgccaaccctcaagagtactcatcttttcaacttttgccagtcgcattgttctaaacaatggcatttcacgtgcatttgtttacctgctagtgaggctgtgcatcttttcatttattag

SEQ ID NO: 188277 - DNA, 519 bp, Homo sapiens
gtatcctcattaatttaccaaaatattaaatcatcccttgtttttgattatttaagttgctattttctattgttgaaagcaaattttttyaacagaaaaggagggagaggcacaaagccctcaaggaatgtaatagaaagccatggaagcaataaataggtggacccagaaatgggagatgaagcttccaaagataagatacttcaactttacagtttggtttaaggacagctcctatttttaaaacagccccactagggacttttgatggtgaacttcccagatgcccgtgacgtcaggaggtgaagcaggtgctgcagtgggtggggctggcagctggtgtgctgctcaccgagaagggaggagggaggagccacggagaagcctggagaaggagtaacacaagaaagagactgcgccgtgaccctgtgaggaggcatttatgctttaaacccccatagggagtattcagagggcagaacctcagaagtagctgtgtgggtgtcgaggaggtagagc

SEQ ID NO: 188278 - DNA, 519 bp, Homo sapiens
gtatcctcattaatttaccaaaatattaaatcatcccttgtttttgattatttaagttgctattttctattgttgaaagcaaattttttcaacagaaaaggagggagaggcacaaagccctcaaggaatgtaatagaaagccatggaagcaataaataggtggacccagaaatgggagatgaagcttccaaagataagatacttcaactttacagtttggtttaaggacagctcctatttttaaaacagccccactagggacttttgatggtgaacttcccagatgcccgtgacgtcaggaggtgaagcaggtgctgcagtgggtggggctggcagctggtgtgctgctcaccgagaagggaggagggaggagccacggagaagcctggagaaggagtaacacaagaaagagactgcgccgtgaccctgtgrggaggcatttatgctttaaacccccatagggagtattcagagggcagaacctcagaagtagctgtgtgggtgtcgaggaggtagagc

SEQ ID NO: 188279 - DNA, 581 bp, Homo sapiens
aggggcatttcttttttgggtttattttgcttcagttactcccagcttctctgctctggcctastggctggctccttgggagctggggtggggtattttggtggtagaatggtggctaagagcataggtttaggctgcagagggtcctgggtcatgtcctgactctaccattaaggaccacatgacttgggacctgtgacttaacctctctgagtctcaatgttctcatctgtaaaatgagagagaatgatcacctgcctcaaatgattgttttgaagatggggtgagaatacttatgaagcccttagccctgttcctgtcaccattctatcccctaattttctcagcagacctaagacagccacaggcctgggatgagggtatctgaaggagggtttatgaagccaggtttttctccctagataaacttggaggtcaaggataaagacagcttgttgtagcagaaagatccagtttgaggtttcttaagctggtagaatccaagactcgcaggattagaagagatcctggaaatcctgtaagactgagaagatggcagctttgttgcaggaaggtggaaa

SEQ ID NO: 188280 - DNA, 619 bp, Homo sapiens
gagtagtctgactgatacagggaaacagatgctgaattagaggtgtcctgatactgtgcatagaatatggtggcagtgcgagtgatctccttattgcctctgttctggtggcatgtggaccggtattgctacaccttgatggcaaatgctccaaggaagggagtggaatgaatacatcgacttcctctgccaagcatgggggtaccctgggcttaaggtaaaaccccttggccccatgtcacactgaccctgccaacctcaggcacctcaccaaggttcttctctccacctagatgagcgggaagttgttcagaaaaagaccttcacgaaatgggtgaactcgcacctggctcgagtgtcctgccgcatcaccgatctctacaaggacctgcgggatgggcgcatgctcatcaagctgctggaggtgctctctggagagatgctggtaaagycccttctgtgggccccggggctgctgccatcggcccctcttcagcaaaggcatggtttgggggcatctcaagttctcctggccttcccagttttctctctgctcctttgggaggctctaatacttagaatgggaagcatccgtgtggctgactggtctctctgaatt

SEQ ID NO: 188281 - DNA, 629 bp, Homo sapiens
gaccatcgtgctctaggagatgggtccagatagagtctagcgatgggacgggataatctcaagagctggactttataaaactggaatcacaaagtcttgcatacttaccttgcacttaaaaagaagatcaggcagtgaacactacaggtgaataaatatgttcctctctggttctcttccttttagggatgagcttgaaaacagtctatattattagaatatggctcatctacaactaaatgctctgtcataggaaatgccagtgtttttctttacaataartgaaaaataatgttgttttcaccagagagagtaacaactgttggcacattctggcagcttgagtgagctgatagttctgtttatatatatttttcataccaggtagtactccctggcaacctgccaccactgtggcagtgtttcttcttaagcttctcactgaatgaatggtgtggctcagagtgaataagctctttaagggagtgatctttccagtggttctgtccataggaggtaaaatgggaggtgaatttgagccttgtttgtgctagggaaaatagctagaactcagtaaacattgccagcatctgccccagaagaggattagtgagagtgagtacattgat

SEQ ID NO: 188282 - DNA, 629 bp, Homo sapiens
gaccatcgtgctctaggagatgggtccagatagagtctagcgatgggacgggataatctcaagagctggactttataaaactggaatcacaaagtcttgcatacttaccttgcacttaaaaagaagatcaggcagtgaacactacaggtgaataaatatgttcctctctggttctcttccttttagggatgagcttgaaaacagtctatattattagaatatggctcatctacaactaaatgctctgtcataggaaatgccagtgtttttctttacaataaatgaaaaataatkttgttttcaccagagagagtaacaactgttggcacattctggcagcttgagtgagctgatagttctgtttatatatatttttcataccaggtagtactccctggcaacctgccaccactgtggcagtgtttcttcttaagcttctcactgaatgaatggtgtggctcagagtgaataagctctttaagggagtgatctttccagtggttctgtccataggaggtaaaatgggaggtgaatttgagccttgtttgtgctagggaaaatagctagaactcagtaaacattgccagcatctgccccagaagaggattagtgagagtgagtacattgat

SEQ ID NO: 188283 - DNA, 629 bp, Homo sapiens
gaccatcgtgctctaggagatgggtccagatagagtctagcgatgggacgggataatctcaagagctggactttataaaactggaatcacaaagtcttgcatacttaccttgcacttaaaaagaagatcaggcagtgaacactacaggtgaataaatatgttcctctctggttctcttccttttagggatgagcttgaaaacagtctatattattagaatatggctcatctacaactaaatgctctgtcataggaaatgccagtgtttttctttacaataaatgaaaaataatgttgttttcaccagagagagtaacaactgttggcacattctggcagcttgagtgagctgatagttctgttyatatatatttttcataccaggtagtactccctggcaacctgccaccactgtggcagtgtttcttcttaagcttctcactgaatgaatggtgtggctcagagtgaataagctctttaagggagtgatctttccagtggttctgtccataggaggtaaaatgggaggtgaatttgagccttgtttgtgctagggaaaatagctagaactcagtaaacattgccagcatctgccccagaagaggattagtgagagtgagtacattgat

SEQ ID NO: 188284 - DNA, 629 bp, Homo sapiens
gaccatcgtgctctaggagatgggtccagatagagtctagcgatgggacgggataatctcaagagctggactttataaaactggaatcacaaagtcttgcatacttaccttgcacttaaaaagaagatcaggcagtgaacactacaggtgaataaatatgttcctctctggttctcttccttttagggatgagcttgaaaacagtctatattattagaatatggctcatctacaactaaatgctctgtcataggaaatgccagtgtttttctttacaataaatgaaaaataatgttgttttcaccagagagagtaacaactgttggcacattctggcagcttgagtgagctgatagttctgtttatatatatttttcataccaggtagtactccctggcaacctgccaccactgtggcmgtgtttcttcttaagcttctcactgaatgaatggtgtggctcagagtgaataagctctttaagggagtgatctttccagtggttctgtccataggaggtaaaatgggaggtgaatttgagccttgtttgtgctagggaaaatagctagaactcagtaaacattgccagcatctgccccagaagaggattagtgagagtgagtacattgat

SEQ ID NO: 188285 - DNA, 475 bp, Homo sapiens
actttaaaccaacaacagccaaaaaaggatgaagaagggcattacacaatgataaaggactcacttcgccaagaagacatccctaacctaaatatatacccacccaacactggagcacccacattcaaaaacaaccaagtacttccagacctaccaaaagactcagtcacacaataacagtggggatcttcaacatctcattgatagtgttaaggcaaatcattgagacaaaaaactaacaaagaamttctgggcttaaatttaacacttgactaattggacctaacagacatctacagaatactccaccaaacaactacagaatacacctttttctcatctgcacaaagaacatactccaagatcaacaacatgtttgcccataaagcaagtcatgataaatttttaaaaaatgaaatcacacaacaccattctcttggaccacagtgcaataaaaatagaaatgaataccaag

SEQ ID NO: 188286 - DNA, 425 bp, Homo sapiens
ggcaaatcattgagacaaaaaactaacaaagaaattctgggcttaaatttaacacttgactaattggacctaacagacatctacagaatactccaccaaacaactacagaatacacytttttctcatctgcacaaagaacatactccaagatcaacaacatgtttgcccataaagcaagtcatgataaatttttaaaaaatgaaatcacacaacaccattctcttggaccacagtgcaataaaaatagaaatgaataccaagaagatctctgaaaaccacacaattacatggaaatcaaacaactggctcctaaatgactttgggaaaagaaagaatttaaggcagaaatcaaacaatgatttgtaataagcaaaaagaaacatcataccaaaacttctgggatacagcaaaagcagcataagag

SEQ ID NO: 188287 - DNA, 475 bp, Homo sapiens
actttaaaccaacaacagccaaaaaaggatgaagaagggcattacacaatgataaaggactcacttcgccaagaagacatccctaacctaaatatatacccacccaacactggagcacccacattcaaaaacaaccaagtacttccagacctaccaaaagactcagtcacacaataacagtggggatcttcaacatctcattgatagtgttaaggcaaatcattgagacaaaaaactaacaaagaaattctgggcttaaatttaacacttgactaattggacctaacagacatctacagaatactccaccaaacaactacagaatacacctttttctcatctgcacaaagaacatactccaagatcaacaacatgtttgmccataaagcaagtcatgataaatttttaaaaaatgaaatcacacaacaccattctcttggaccacagtgcaataaaaatagaaatgaataccaag

SEQ ID NO: 188288 - DNA, 417 bp, Homo sapiens
aatgaattctagtgttctgttgcattgtagggtgaatatggttaactaatattttttttttttttgagacggagtcttgctctgtcacccaggcttggcgtgcagtggtgcaatctcagctcactgcaatctcygcctcgggggttcaagccattctcctgcctcagcctcccaaacagctgggattacaggtgtgtgccactacacctggtttggctagctaatatttaaaaagctagaggagaggattttgaaagttcacaacacaaatagtaaatgtttgaggtgatggaatatattaattagcctgatttgaccattatacattgtttacacatatcaaaatatcactgtgtataccataaatatgtacaattatacaggtccacaaaaaatcaaaagaagccaggtgtggtg

SEQ ID NO: 188289 - DNA, 417 bp, Homo sapiens
aatgaattctagtgttctgttgcattgtagggtgaatatggttaactaatattttttttttttttgagacggagtcttgctctgtcacccaggcttggcgtgcagtggtgcaatctcagctcactgcaatctctgcctcsggggttcaagccattctcctgcctcagcctcccaaacagctgggattacaggtgtgtgccactacacctggtttggctagctaatatttaaaaagctagaggagaggattttgaaagttcacaacacaaatagtaaatgtttgaggtgatggaatatattaattagcctgatttgaccattatacattgtttacacatatcaaaatatcactgtgtataccataaatatgtacaattatacaggtccacaaaaaatcaaaagaagccaggtgtggtg

SEQ ID NO: 188290 - DNA, 417 bp, Homo sapiens
aatgaattctagtgttctgttgcattgtagggtgaatatggttaactaatattttttttttttttgagacggagtcttgctctgtcacccaggcttggcgtgcagtggtgcaatctcagctcactgcaatctctgcctcgggggttcaagccattctcctgcctcagcctcccaaacagctgggattacaggtgtgtgccactacacctggyttggctagctaatatttaaaaagctagaggagaggattttgaaagttcacaacacaaatagtaaatgtttgaggtgatggaatatattaattagcctgatttgaccattatacattgtttacacatatcaaaatatcactgtgtataccataaatatgtacaattatacaggtccacaaaaaatcaaaagaagccaggtgtggtg

SEQ ID NO: 188291 - DNA, 439 bp, Homo sapiens
gtagggtgaatatggttaactaatattttttttttttttgagacggagtcttgctctgtcacccaggcttggcgtgcagtggtgcaatctcagctcactgcaatctctgcctcgggggttcaagccattctcctgcctcagcctcccaaacagctgggattacaggtgtgtgccactacacctggtttggctagctaatatttaaaaagctagaggagaggattttgaaagttcacaacacaaatrgtaaatgtttgaggtgatggaatatattaattagcctgatttgaccattatacattgtttacacatatcaaaatatcactgtgtataccataaatatgtacaattatacaggtccacaaaaaatcaaaagaagccaggtgtggtgtcacattcctgtggtctcagctacttggaaggcagaggcaggaagaat

SEQ ID NO: 188292 - DNA, 711 bp, Homo sapiens
aaaataaatgtgtcacagtggaaatataaagcagatgcagaaaagaggtacagttaatatgatttagtgattgttgaatgtaaaaagataggggatagggagaaatctcagatgattctcaggtttctggcttgtgccctagcatttaacctggacacgagggagtaggcagttttcaggtgtatagaggagagcagcaggtcagcagtcacgactaacagttttctctgcattgctgagtttactgaaatgtccatgtgggatattttcagtaggtaattggaaaaatttttatggctggagatggaactctgaggttggagttgcagacttggaataactgaggcaaagttgtagatctgagtgagcttgtccatgatgggaaaggtatagaatgagcagagggccagtgacagaaccctgggaatatcagcatttcccagaggaattaggaaagaagcctgagccgtggctaaagaaaaagaggagaggaatcataaagtgatgttgcaaaaattwacaaaggtgagaatttcaaggagggagtatcaattctaaccagtaagattactaaaaagtaaagtgagttaaccttttaaaagccttcagtggcactgtcttctaaagaacaatcatagagttgtggggttcgctgtttatgtgatcagtacttctgatgttcaaatggggaagaatacacctaccaagatc

SEQ ID NO: 188293 - DNA, 581 bp, Homo sapiens
ttctgatgttcaaatggggaagaatacacctaccaagatcctacctaacttttgtaactgcagcagctccctgtacaggatcagggaaaatggtcaagactggtgagttaatgtaccaccattttcctagaattgtctaaacctaaggtcatatgtgaggaaaagtgtagtctttcttacctgcttttttgtggaaatgcttgtttggtactcaagtccttgataggctcttctgaatgcattcccaaacaaacatctgacarcaacaactggaagccaccaccagatgcacgtatatatcgttcctctgacatggaatcataatacagccatgttgtgacacaatttcaggttttgattagaaatagtttacaggccagcagtttagacaaactgacattttaaaaatattttattgcaggaaactaatataatgtcctggagaaaaatataaagtgaaatgctgaatatagcagttctcagtacttggggttttggtcacatcaggagaaaagtcagtgcctgactccttttgttagtgcagttcccttttcatttaccctcttgtgatatttctgctc

SEQ ID NO: 188294 - DNA, 581 bp, Homo sapiens
ttctgatgttcaaatggggaagaatacacctaccaagatcctacctaacttttgtaactgcagcagctccctgtacaggatcagggaaaatggtcaagactggtgagttaatgtaccaccattttcctagaattgtctaaacctaaggtcatatgtgaggaaaagtgtagtctttcttacctgcttttttgtggaaatgcttgtttggtactcaagtccttgataggctcttctgaatgcattcccaaacaaacatctgacagcaacaactggaagccaccaccagatgcacgtatatatcsttcctctgacatggaatcataatacagccatgttgtgacacaatttcaggttttgattagaaatagtttacaggccagcagtttagacaaactgacattttaaaaatattttattgcaggaaactaatataatgtcctggagaaaaatataaagtgaaatgctgaatatagcagttctcagtacttggggttttggtcacatcaggagaaaagtcagtgcctgactccttttgttagtgcagttcccttttcatttaccctcttgtgatatttctgctc

SEQ ID NO: 188295 - DNA, 581 bp, Homo sapiens
ttctgatgttcaaatggggaagaatacacctaccaagatcctacctaacttttgtaactgcagcagctccctgtacaggatcagggaaaatggtcaagactggtgagttaatgtaccaccattttcctagaattgtctaaacctaaggtcatatgtgaggaaaagtgtagtctttcttacctgcttttttgtggaaatgcttgtttggtactcaagtccttgataggctcttctgaatgcattcccaaacaaacatctgacagcaacaactggaagccaccaccagatgcacgtatatatcgttcctctgacatggaatcataatacagccatgttgtgacacaatttcaggttttgattaraaatagtttacaggccagcagtttagacaaactgacattttaaaaatattttattgcaggaaactaatataatgtcctggagaaaaatataaagtgaaatgctgaatatagcagttctcagtacttggggttttggtcacatcaggagaaaagtcagtgcctgactccttttgttagtgcagttcccttttcatttaccctcttgtgatatttctgctc

SEQ ID NO: 188296 - DNA, 581 bp, Homo sapiens
ttctgatgttcaaatggggaagaatacacctaccaagatcctacctaacttttgtaactgcagcagctccctgtacaggatcagggaaaatggtcaagactggtgagttaatgtaccaccattttcctagaattgtctaaacctaaggtcatatgtgaggaaaagtgtagtctttcttacctgcttttttgtggaaatgcttgtttggtactcaagtccttgataggctcttctgaatgcattcccaaacaaacatctgacagcaacaactggaagccaccaccagatgcacgtatatatcgttcctctgacatggaatcataatacagccatgttgtgacacaatttcaggttttgattagaaatagtttacaggccagcagtttagacaaactgacattttaaaaatattttattgcaggaaactaatataatgtcctggagaaaaatataaagygaaatgctgaatatagcagttctcagtacttggggttttggtcacatcaggagaaaagtcagtgcctgactccttttgttagtgcagttcccttttcatttaccctcttgtgatatttctgctc

SEQ ID NO: 188297 - DNA, 602 bp, Homo sapiens
tttattacatttaatacagcaaaaagacacaaagcaacatttgagaaaggaaaaggtgcatgtgtcaaagtctggaggaagccaggcacaagctacaggagtcatctcctgtgtagctagcaggatatgcttaattcccccagcctcaaattttgacgacacatgtgcaatgttgtctaccttaccagagtttcattagaggctcagcacccatgttttcgatggaggctagtcacataggcmacctctcctctccctcacatgtaacaaaactctagactcccaggaggaaattaattgttcatagtaaaccacatttgcacaaacactttaggcacagtgagccactcccttcttctaagttagggaatgctgggaaccctcccaaattcaaggtcccaaacaccagccaaggactagccttgcaagcaagcctttctaaggatgggtgtctcatgcctgctatatgaaatctttgctgcccagcagctatgcccctgagtaaatttttggtgttatcttaacattttatataatacaatagcaaataatatgatagaccataacatggtactggtttcagctgcatcattcatattaaa

SEQ ID NO: 188298 - DNA, 602 bp, Homo sapiens
tttattacatttaatacagcaaaaagacacaaagcaacatttgagaaaggaaaaggtgcatgtgtcaaagtctggaggaagccaggcacaagctacaggagtcatctcctgtgtagctagcaggatatgcttaattcccccagcctcaaattttgacgacacatgtgcaatgttgtctaccttaccagagtttcattagaggctcagcacccatgttttcgatggaggctagtcacataggccacctctcctctccctcacatgtaacaaaactctagactcccaggaggaaattaaytgttcatagtaaaccacatttgcacaaacactttaggcacagtgagccactcccttcttctaagttagggaatgctgggaaccctcccaaattcaaggtcccaaacaccagccaaggactagccttgcaagcaagcctttctaaggatgggtgtctcatgcctgctatatgaaatctttgctgcccagcagctatgcccctgagtaaatttttggtgttatcttaacattttatataatacaatagcaaataatatgatagaccataacatggtactggtttcagctgcatcattcatattaaa

SEQ ID NO: 188299 - DNA, 602 bp, Homo sapiens
tttattacatttaatacagcaaaaagacacaaagcaacatttgagaaaggaaaaggtgcatgtgtcaaagtctggaggaagccaggcacaagctacaggagtcatctcctgtgtagctagcaggatatgcttaattcccccagcctcaaattttgacgacacatgtgcaatgttgtctaccttaccagagtttcattagaggctcagcacccatgttttcgatggaggctagtcacataggccacctctcctctccctcacatgtaacaaaactctagactcccaggaggaaattaattgttcatagtaaaccacatttgcacaaacastttaggcacagtgagccactcccttcttctaagttagggaatgctgggaaccctcccaaattcaaggtcccaaacaccagccaaggactagccttgcaagcaagcctttctaaggatgggtgtctcatgcctgctatatgaaatctttgctgcccagcagctatgcccctgagtaaatttttggtgttatcttaacattttatataatacaatagcaaataatatgatagaccataacatggtactggtttcagctgcatcattcatattaaa

SEQ ID NO: 188300 - DNA, 535 bp, Homo sapiens
  misc_feature (1)...(535): n = A,T,C or G
nnnnccaacagtatttttaaatgtctgtattctgtaacattagaaaaaaaaagcttagtactaaaagacatttgataattatttgttaagtggacaaatgaataaatgatttccttgaaaattctgttgaaaaaaacacagaaattaaatagagaaagctctrttctatcatgagcacctcaaagaccaaaactatgtctatttcatgtttgtctcccataacgtgcaaaacctaacttagagaagttctttgattaatatgtactaaattaaaggtgtcctcttacagttcagattgtccaatgcattaggcatcacatcttggaagcacagaagcattttttgttattgtgaaacatttttatactttcattataatttgttgagcctagagttgggctatttgaatatttattatgataatcttttggctaatggtaacagcatatcttgttctaacaaaattactgttaacatagcaattaaccagcaggtagaaaaacacatcttgttctaatgaagtaaatatacctca

SEQ ID NO: 188301 - DNA, 535 bp, Homo sapiens
  misc_feature (1)...(535): n = A,T,C or G
nnnnccaacagtatttttaaatgtctgtattctgtaacattagaaaaaaaaagcttagtactaaaagacatttgataattatttgttaagtggacaaatgaataaatgatttccttgaaaattctgttgaaaaaaacacagaaattaaatagagaaagctctgttctatyatgagcacctcaaagaccaaaactatgtctatttcatgtttgtctcccataacgtgcaaaacctaacttagagaagttctttgattaatatgtactaaattaaaggtgtcctcttacagttcagattgtccaatgcattaggcatcacatcttggaagcacagaagcattttttgttattgtgaaacatttttatactttcattataatttgttgagcctagagttgggctatttgaatatttattatgataatcttttggctaatggtaacagcatatcttgttctaacaaaattactgttaacatagcaattaaccagcaggtagaaaaacacatcttgttctaatgaagtaaatatacctca

SEQ ID NO: 188302 - DNA, 546 bp, Homo sapiens
ataaaagaagaggagtgtgggaaagtggttgaaacaaagcaacaacttaaatggaatctgagaagacttgttaaggaattgaggacagtaagaaataacttggatctggtaaattaatctttggtgtaaacttcatttttctaactttatgtttcatcggtattacttataattttttgccttcatgtatatcatttaggtttaaaataaaccaaaactgttatttcctcttaagaatgaactatgacatttatagataaaattatttactgtaaaccttgtcatctaatagatgctcagtctgtgtttttagagtggaggataagttgagtttaatcactaatatagctgttcatttacacattttttatgttaaaatacaggctaaatagctttgaaactataaggacactagttaaatgttttgaaagaaattttatttcacaatgctgtatcttcytgtagttaagaactgtttttcctctttgacagattgagctgtcatgtatgcaattaagatttgagtgattcttgagggataaaagt

SEQ ID NO: 188303 - DNA, 546 bp, Homo sapiens
ataaaagaagaggagtgtgggaaagtggttgaaacaaagcaacaacttaaatggaatctgagaagacttgttaaggaattgaggacagtaagaaataacttggatctggtaaattaatctttggtgtaaacttcatttttctaactttatgtttcatcggtattacttataattttttgccttcatgtatatcatttaggtttaaaataaaccaaaactgttatttcctcttaagaatgaactatgacatttatagataaaattatttactgtaaaccttgtcatctaatagatgctcagtctgtgtttttagagtggaggataagttgagtttaatcactaatatagctgttcatttacacattttttatgttaaaatacaggctaaatagctttgaaactataaggacactagttaaatgttttgaaagaaattttatttcacaatgctgtatcttccygtagttaagaactgtttttcctctttgacagattgagctgtcatgtatgcaattaagatttgagtgattcttgagggataaaagt

SEQ ID NO: 188304 - DNA, 546 bp, Homo sapiens
ataaaagaagaggagtgtgggaaagtggttgaaacaaagcaacaacttaaatggaatctgagaagacttgttaaggaattgaggacagtaagaaataacttggatctggtaaattaatctttggtgtaaacttcatttttctaactttatgtttcatcggtattacttataattttttgccttcatgtatatcatttaggtttaaaataaaccaaaactgttatttcctcttaagaatgaactatgacatttatagataaaattatttactgtaaaccttgtcatctaatagatgctcagtctgtgtttttagagtggaggataagttgagtttaatcactaatatagctgttcatttacacattttttatgttaaaatacaggctaaatagctttgaaactataaggacactagttaaatgttttgaaagaaattttatttcacaatgctgtatcttcctgtagttaagaactgtttttcctctttgacagattkagctgtcatgtatgcaattaagatttgagtgattcttgagggataaaagt

SEQ ID NO: 188305 - DNA, 503 bp, Homo sapiens
agataggaatcttttagaaggatctgagcaggcaattgaatatgcaaggaactctgaggttgatttgagcttctaataaaaaacagrgaaaacattttaccagtgtgggatgtaccaccagcagccccacccacgtatcaaattctttttgagacttcagtaggttgttaagcactgcagatgtttcagggaagagtgagtagtgggctgaatctattgcctaagttaacagaaaaccgatttggcaggaagataacaccttctttgtccttaactaaattcagtaataaacaagaatgtgtgcacatgaggaaaagaaggcgaatcatatatgtgttgatgtttttcaaagtatatgagttagagttaaatcttactaccataatttaataataaggtgatttataaatcagtaacaaaaaataccttcacaggtagttatgagagaattccaacaagaatggaccgatctcctaaaacaacaacctacgtcagaggctacc

SEQ ID NO: 188306 - DNA, 345 bp, Homo sapiens
gaattctcataccatacagtttacccattgaacgtgtacaattcatggtctcttaatatattcacagagttgcataaccatcaccatcatcaattgtaggacattttcatgaccctgamaagaatcagcaatctattttgtttccatagatcagcccattctggacaccacgtatcaattggatcacacaatgtgtggtggtcttttgtgactggcttcttctacttagcataacatttttaaggttcattgtgttgtaacatgtatcagtatttaatttcatcttattgctgagtaattttccactgtatggacataccactaatttatttagccattcatcag

SEQ ID NO: 188307 - DNA, 345 bp, Homo sapiens
gaattctcataccatacagtttacccattgaacgtgtacaattcatggtctcttaatatattcacagagttgcataaccatcaccatcatcaattgtaggacattttcatgaccctgacaagaatcagcaatctattttgtttccatagatyagcccattctggacaccacgtatcaattggatcacacaatgtgtggtggtcttttgtgactggcttcttctacttagcataacatttttaaggttcattgtgttgtaacatgtatcagtatttaatttcatcttattgctgagtaattttccactgtatggacataccactaatttatttagccattcatcag

SEQ ID NO: 188308 - DNA, 345 bp, Homo sapiens
gaattctcataccatacagtttacccattgaacgtgtacaattcatggtctcttaatatattcacagagttgcataaccatcaccatcatcaattgtaggacattttcatgaccctgacaagaatcagcaatctattttgtttccatagatcagcccattctggacaccacgtatcaattggatcacacaatgtgtggtggtcttttgtgactggcttcttctacttagcataacatttttaaggttcattgtgttgtaacatgtatcartatttaatttcatcttattgctgagtaattttccactgtatggacataccactaatttatttagccattcatcag

SEQ ID NO: 188309 - DNA, 480 bp, Homo sapiens
gtattgaaatatatattcacgcttctggtaccagtgccctaattttcccctagctactatgcctggccactttgaatctgtgtagctcaggtagtactgacgccatctctgactcaygggtgggatgtttgtgcgtgcacgtgaatgtgtgtgtgtgtaggtatattctataaagaattacacttaaatttggccaatatctcatccaggaatgggcctaataccccattagagtcaatcccagcacttctgcaagaatgactagaagagaatctgccctttttctctggccttcaacacaggaagatgtaagcctaaactcgttagaggccaacactaggagaaaaacttgtttggccataaaacccatggagagcaaaggtcagtaaaatgaagaattaggttttaacattcttgtttgagccctatatgtagccagacctagatttttcagtttgttagtcaatagttacttctttt

SEQ ID NO: 188310 - DNA, 514 bp, Homo sapiens
gaattctagttattaaatttttgttttttgctgtccatgtgtgagtgctgaaataccagatcctcaaattaatctgaatattgccaagggatggcamatggggattcatgttccgtgtcagcttttcaatatactgggtaaaacttactaaaatacaacagaggatcttagctctactgaaccaagaattggacagctctttttgtaaagagccagttagtaaatattttaggccttgtgaattataaagggcataagtgtggatgcatttcaaggaaatttccttatgaaaacaggcagtgggctggatttgctccacaagcaccgatttgttgatccttgtgctaaaaccaaggtgctgttatgcagtgaatcctctttttaaaggtaccctacatgcatgccattatcctttcttttaaaagataatgtatttcagtaggaaacacaccatatttttcaacagtagcttcatataatttagacaaatttgatttacaaaataagattattt

SEQ ID NO: 188311 - DNA, 514 bp, Homo sapiens
gaattctagttattaaatttttgttttttgctgtccatgtgtgagtgctgaaataccagatcctcaaattaatctgaatattgccaagggatggcacatggggattcatgttccgtgtcagcttttcaatatactgggtaaaacttactaaaatacaacagaggatcttagctctactgaaccaagaattggacagctctttttgtaaagagccagttagtaaatattttaggccttgtgaattataaagggcataagtgtggmtgcatttcaaggaaatttccttatgaaaacaggcagtgggctggatttgctccacaagcaccgatttgttgatccttgtgctaaaaccaaggtgctgttatgcagtgaatcctctttttaaaggtaccctacatgcatgccattatcctttcttttaaaagataatgtatttcagtaggaaacacaccatatttttcaacagtagcttcatataatttagacaaatttgatttacaaaataagattattt

SEQ ID NO: 188312 - DNA, 597 bp, Homo sapiens
cttagacctcattttatttaacctgtcagcaatattggacccaatggaaaactctctcctccataacagtgtcttcacttggctttcaggatctcactcactcacctggcttttcttcctgcctttccagtccatctgtcatagtctgttttgctttcttctcatatcccaccttttacacattgatatgtcccaggactgatatgtcccaggactcagtcctcaatcttctttctcatgacttttactaccttgtgtgtgctaatgatttccaaatgcgtgtctccagcctagatctctctccttaattccagacttcyataccaacctgcctacttgacatctctgtttgattggtcacgaactgttgggtatcacaaacttaccaggtccaagattggggtaccgatattctttctcatacctacccctcacatggtctttcctacttgcattaatggcaactcttgcagttgctctgctagaaactaaggtgtcgtcattgactcccctctctctctgacacctcacatctaatctgtcagcagatcttgtcaggagtacctgaagaatatatccagaagccagtcatatctt

SEQ ID NO: 188313 - DNA, 597 bp, Homo sapiens
cttagacctcattttatttaacctgtcagcaatattggacccaatggaaaactctctcctccataacagtgtcttcacttggctttcaggatctcactcactcacctggcttttcttcctgcctttccagtccatctgtcatagtctgttttgctttcttctcatatcccaccttttacacattgatatgtcccaggactgatatgtcccaggactcagtcctcaatcttctttctcatgacttttactaccttgtgtgtgctaatgatttccaaatgcgtgtctccagcctagatctctctccttaattccagacttccataccaacctgcctacttgacatctctgtttgattggtcacgaactgttgggtatcacaaacttaccaggtccaagattggggtaccgatattctttctcatacctacccctcacatggtctttcctacttgcattaatggcaactcttgcagttgctctgctagaaactaaggtgtcrtcattgactcccctctctctctgacacctcacatctaatctgtcagcagatcttgtcaggagtacctgaagaatatatccagaagccagtcatatctt

SEQ ID NO: 188314 - DNA, 583 bp, Homo sapiens
tgacagagcagctgttgatcttacatagggttgcgggaggagcggacttgaagcattggcagactctcagcggcataggagggttaacatcatctggagaaacatggctatctgagtgaggctgctgtgggttggttaacactcccaggcttgtggattggagcgagtttgtgtttaattggctgtctttccgaagcaagtggcccacattgatattggttggtgagagaggccaatggtcactgatgattgactgtatttacaactggctgtgggtggttgcttgttacaaatatagctactaagtttgagacaactttaaactgcagttttctgtttaaaagttgccttccatcaactatgtttaaaatgaaaatgatttcatattccagaactatagacttaatttggaagtgtgggtcaagaggaattgtttaataattgctctcaggaagatctctttttttgatgcttagtcttaaccagaagaattcgctacatagttaaaaaacaagcaaacaaacaaacaaatraaaagcaattattaattttgtttcagtttttagtattttcagagacttct

SEQ ID NO: 188315 - DNA, 218 bp, Homo sapiens
taaattttcttgccctccgtcctagacgtytatatacagggattccgaatgatttgagtttggaagtgccctgtttttctgaaaaagtgactgccaccaagaactgacttcttagttacccagcgcagaggcaactgatgaagtttccagacagaacacaagttgaatctcatttgtacacttaaactgggaattttaaggtcaaatcagcaaattac

SEQ ID NO: 188316 - DNA, 533 bp, Homo sapiens
tcagatctcctgccactccctctcctagttgggaacactccaactaggcttatattatgctgaggtctctgaatgttccctgaggctacatgtctctgagcttctgtaggcacagtaccctccaccagaatgacctttcccctcttctactactcttccagtctcagccgaaatgtcacctcctctgggaagccttctcagatgtccctaatgcctastactcctctttccctgtacactccccaaatatatcacccatgaccctgaattgcctttatttgcttatgtgtttccgccccacaaaactatgagggatttgcattttattcatatcaaattccacaactttatcagggctgataaggcttggcatgatctggctcccatccacctctccaccctgtcccccaccattctctgccccacctacttcacgcagtcactgtggcctgctgactgtttccaagctcaacaagctctttcctgatcctgttcctgtagtgctgtttgcctggaatgctccccatcgatct

SEQ ID NO: 188317 - DNA, 475 bp, Homo sapiens
tggaggtgtttttattcaattttcagaagtttagctttaaaaaaatttctaaacttcgatatctggtgagtgccagtgtttttatcttattaaaaggtgacagaccacactatattcaactgattttttttttaacaagaatgcaaaatcagyttaaaggaaggatatctttttcaacaaatggtgctagagcaattggacattcacaggtacaaaaactaagactgacctaaatttatactttatataaaatttagctcacataaatcacaggcttaaatgtaaaatgtaatattataaaacttaaagttgtgtatggtagctcgtgcctgtaatcccagctactactcaagtggctgaggtggaaggatcacttcaatccagcagttagtggctgcagtgagcaatgatggcaccactgcactacagcttgggtgaaacctcgtctcaaaaataattaataaataaataaatt

SEQ ID NO: 188318 - DNA, 475 bp, Homo sapiens
tggaggtgtttttattcaattttcagaagtttagctttaaaaaaatttctaaacttcgatatctggtgagtgccagtgtttttatcttattaaaaggtgacagaccacactatattcaactgattttttttttaacaagaatgcaaaatcagcttaaaggaaggatatctttttcaacaaatggtgctagagcaattggacattcacaggtacaaaaactaagactgacctaaatttatactttatataaaatttagctcacataaatcacaggcttaaatgtaaaatgtaatattataaaacttaaagttgtgtatggtagctcgtgcctgtaatcccagctactactcaagtggctgaggtggaagsatcacttcaatccagcagttagtggctgcagtgagcaatgatggcaccactgcactacagcttgggtgaaacctcgtctcaaaaataattaataaataaataaatt

SEQ ID NO: 188319 - DNA, 475 bp, Homo sapiens
tggaggtgtttttattcaattttcagaagtttagctttaaaaaaatttctaaacttcgatatctggtgagtgccagtgtttttatcttattaaaaggtgacagaccacactatattcaactgattttttttttaacaagaatgcaaaatcagcttaaaggaaggatatctttttcaacaaatggtgctagagcaattggacattcacaggtacaaaaactaagactgacctaaatttatactttatataaaatttagctcacataaatcacaggcttaaatgtaaaatgtaatattataaaacttaaagttgtgtatggtagctcgtgcctgtaatcccagctactactcaagtggctgaggtggaaggatcacttcaatccagcagttagtggctgcagtgagcaatgatggcaccactgcactacagcttgggygaaacctcgtctcaaaaataattaataaataaataaatt

SEQ ID NO: 188320 - DNA, 552 bp, Homo sapiens
ccatttcatctcaaaatttcatctcatcatctcatctcatctcatttcatcatttcatctcatcatttcatctcatctcaagtcatcttatcatttcatctaagtgaaatgatgtaatggaatcatgaaatgaaatggataggatgccctcagtgatgttaaatttaaaaattgtttcttttcatgtatgcatttttatatttatatgtatttatatttatatttacttatatttatttttacttatttttatttatatttttacttatttctttatttatagacaaggtcctgttctgtggcctaggctggaatgcagtggtgcattcacagttcactgcarcctcgagcaaacctcccaccttagcctcccaggtagctgggaccccaggtgcgcaccaccacacctggttaatattttattatttgcagagatggagtcttgctattctgcccaggctggtctcaaactcctgggctcaagcaatcctcctgcattggcaacccaaaatgctgggatgacagatatgagccacagtgcccaaactattt

SEQ ID NO: 188321 - DNA, 532 bp, Homo sapiens
gggtagcacagggttaaggtagggcacgaccaaccagggcaggtctatggctggggccggggcagggccagagccagggcacggccaagacagtggcagctccaggrcagggccagggttaggaccacagacatgtccaaggccagtgccagggcaagggcaagggcaggggcagggccagggtcatctaagaattagggacaaagccaggcccagagctgggccaggaccggtacctggcagggctagggtctgagacagggccacggcagggccagggccacaaccaggtctgtgctatggccaggtccaacacagtgcccaggtaaggctagggtgaaggccaaggtagggccagggcagggtcaaagccaggctagggccaaggcagggccagggccggcaaggcagggccaggaaagcatagggccagggcagggcagggccaggccagtgccaagacctgggcaggccagggccagggccatagaaacggcctgggcaggaccagggttggggcaggagcaaaaca

SEQ ID NO: 188322 - DNA, 532 bp, Homo sapiens
gggtagcacagggttaaggtagggcacgaccaaccagggcaggtctatggctggggccggggcagggccagagccagggcacggccaagacagtggcagctccaggacagggccagggttaggaccacrgacatgtccaaggccagtgccagggcaagggcaagggcaggggcagggccagggtcatctaagaattagggacaaagccaggcccagagctgggccaggaccggtacctggcagggctagggtctgagacagggccacggcagggccagggccacaaccaggtctgtgctatggccaggtccaacacagtgcccaggtaaggctagggtgaaggccaaggtagggccagggcagggtcaaagccaggctagggccaaggcagggccagggccggcaaggcagggccaggaaagcatagggccagggcagggcagggccaggccagtgccaagacctgggcaggccagggccagggccatagaaacggcctgggcaggaccagggttggggcaggagcaaaaca

SEQ ID NO: 188323 - DNA, 532 bp, Homo sapiens
gggtagcacagggttaaggtagggcacgaccaaccagggcaggtctatggctggggccggggcagggccagagccagggcacggccaagacagtggcagctccaggacagggccagggttaggaccacagacatgtccaaggccagtgccagggcaagggcaagggcaggggcagggccagggtcatctaagaattagggacaaagccaggcccagagctgggccaggaccggtacctggcagggctagggtctgagacagggccacggcagggccagggccacaaccaggtctgtgctatggccaggtccaacacagtgcccwggtaaggctagggtgaaggccaaggtagggccagggcagggtcaaagccaggctagggccaaggcagggccagggccggcaaggcagggccaggaaagcatagggccagggcagggcagggccaggccagtgccaagacctgggcaggccagggccagggccatagaaacggcctgggcaggaccagggttggggcaggagcaaaaca

SEQ ID NO: 188324 - DNA, 552 bp, Homo sapiens
ccatttcatctcaaaatttcatctcatcatctcatctcatctcatttcatcatttcatctcatcatttcatctcatctcaagtcatcttatcatttcatctaagtgaaatgatgtaatggaatcatgaaatgaaatggataggatgccctcagtgatgttaaatttaaaaattgtttcttttcatgtatgcatttttatatttatatgtatttatatttatatttacttatatttatttttacttatttttatttatatttttacttatttctttatttatagacaaggtcctgttctgtggcctaggctggaatgcagtggtgcattcacagttcactgcagcctcgagcaaacctcccaccttagcctcccaggtagctgggaccccaggtgygcaccaccacacctggttaatattttattatttgcagagatggagtcttgctattctgcccaggctggtctcaaactcctgggctcaagcaatcctcctgcattggcaacccaaaatgctgggatgacagatatgagccacagtgcccaaactattt

SEQ ID NO: 188325 - DNA, 552 bp, Homo sapiens
ccatttcatctcaaaatttcatctcatcatctcatctcatctcatttcatcatttcatctcatcatttcatctcatctcaagtcatcttatcatttcatctaagtgaaatgatgtaatggaatcatgaaatgaaatggataggatgccctcagtgatgttaaatttaaaaattgtttcttttcatgtatgcatttttatatttatatgtatttatatttatatttacttatatttatttttacttatttttatttatatttttacttatttctttatttatagacaaggtcctgttctgtggcctaggctggaatgcagtggtgcattcacagttcactgcagcctcgagcaaacctcccaccttagcctcccaggtagctgggaccccaggtgcgcaccaccacacctggttaatattttattatttgyagagatggagtcttgctattctgcccaggctggtctcaaactcctgggctcaagcaatcctcctgcattggcaacccaaaatgctgggatgacagatatgagccacagtgcccaaactattt

SEQ ID NO: 188326 - DNA, 577 bp, Homo sapiens
aaacccacagctaggcctttggggccctgtgaggctcaaagatgtcaaggcagcataggaaattttagatcttaaaattcarcgaagaccctctccagctctggtaaattattttgcttgaagtctacttcatgagatattaatatattcactcctgcttccttaaaaaattaatgatttcacaggataactttctccattcttttactttcaacctacttaggtccttaagtgagtttgaagtttcttatgaacagtatttagttggaccatgtgtttattataggctctccatcaatctgtcttttggtttatttagaccatttacatttaaggtgcttattgttacataattgcttatgtctgatgtttttattatttgcttgtttcctttttctttccctccatcttgatctatttctgtataatgttgttgcgtgtatctgtttgtatagtcttaaagtgtttgctctggatgttacaatatgtgtattgtaatatagtagtctactggtaccagtatttaccacttcaaagtgtggaaacctgccttggatttatgtctctttaccttttc

SEQ ID NO: 188327 - DNA, 577 bp, Homo sapiens
aaacccacagctaggcctttggggccctgtgaggctcaaagatgtcaaggcagcataggaaattttagatcttaaaattcagcgaagaccctctccagctctggtaaattattttgcttgaagtctacttcatgagatattaatatattcactcctgcttccttaaaaaattaatgatttcacaggatawctttctccattcttttactttcaacctacttaggtccttaagtgagtttgaagtttcttatgaacagtatttagttggaccatgtgtttattataggctctccatcaatctgtcttttggtttatttagaccatttacatttaaggtgcttattgttacataattgcttatgtctgatgtttttattatttgcttgtttcctttttctttccctccatcttgatctatttctgtataatgttgttgcgtgtatctgtttgtatagtcttaaagtgtttgctctggatgttacaatatgtgtattgtaatatagtagtctactggtaccagtatttaccacttcaaagtgtggaaacctgccttggatttatgtctctttaccttttc

SEQ ID NO: 188328 - DNA, 577 bp, Homo sapiens
aaacccacagctaggcctttggggccctgtgaggctcaaagatgtcaaggcagcataggaaattttagatcttaaaattcagcgaagaccctctccagctctggtaaattattttgcttgaagtctacttcatgagatattaatatattcactcctgcttccttaaaaaattaatgatttcacaggataactttctccattcttttactttcaacctacttaggtccttaagtgagtttgaagtttcttatgaacagtatttagttggrccatgtgtttattataggctctccatcaatctgtcttttggtttatttagaccatttacatttaaggtgcttattgttacataattgcttatgtctgatgtttttattatttgcttgtttcctttttctttccctccatcttgatctatttctgtataatgttgttgcgtgtatctgtttgtatagtcttaaagtgtttgctctggatgttacaatatgtgtattgtaatatagtagtctactggtaccagtatttaccacttcaaagtgtggaaacctgccttggatttatgtctctttaccttttc

SEQ ID NO: 188329 - DNA, 577 bp, Homo sapiens
aaacccacagctaggcctttggggccctgtgaggctcaaagatgtcaaggcagcataggaaattttagatcttaaaattcagcgaagaccctctccagctctggtaaattattttgcttgaagtctacttcatgagatattaatatattcactcctgcttccttaaaaaattaatgatttcacaggataactttctccattcttttactttcaacctacttaggtccttaagtgagtttgaagtttcttatgaacagtatttagttggaccatgtgtttattataggctctccatcaatctgtcttttggtttatttagaccatttacatttaaggtgcttattgttacataattgcttatgtctgatgtttttattatttgcttgtttcctttttctttccctccatcttgatctatttctgtataatgttgttgcgtgtatctstttgtatagtcttaaagtgtttgctctggatgttacaatatgtgtattgtaatatagtagtctactggtaccagtatttaccacttcaaagtgtggaaacctgccttggatttatgtctctttaccttttc

SEQ ID NO: 188330 - DNA, 450 bp, Homo sapiens
gctatccaaatatcctcttgcagattttacaaaaagagtgtttctaaactgctctatcaaaagaaaggttcaacactgttagttgagggcgcacatcacaaataagtttctgagaatgcttctgtctagttatcaggggaagatatttcctttttcaccataggcctgaaagcgctccaaatstccacatccagatactacaaaaagagtgtttcaaacctgctctatgaaagggaatgttcaactctgtgacttgaatgcaaacatcacaaaaaagtttctgggaatgctgctgtctgctttttatatgtaatcccgtttccaacgaaatcctcaaagctagacaaatatccacttgcagattccacaaaaagagtgtttcaaaactgctctctcaaaagaaaggttcaactcttttagctgagtagatacatgatgaaaaagtttctg

SEQ ID NO: 188331 - DNA, 215 bp, Homo sapiens
gtgacttgaatgcaaacatcacaaaaaagtttctgggaatgctgctgtctgctttttatatgtaatcccgtttccaacgaaatcctcaaagctagacaaatatccacttgcagattccacaaaaagagtgtttcaaaactgctctctcaaaagaaaggttcaactctkttagctgagtagatacatgatgaaaaagtttctgacattgcttctat

SEQ ID NO: 188332 - DNA, 215 bp, Homo sapiens
gtgacttgaatgcaaacatcacaaaaaagtttctgggaatgctgctgtctgctttttatatgtaatcccgtttccaacgaaatcctcaaagctagacaaatatccacttgcagattccacaaaaagagtgtttcaaaactgctctctcaaaagaaaggttcaactcttttagctgagtagatacatsatgaaaaagtttctgacattgcttctat

SEQ ID NO: 188333 - DNA, 247 bp, Homo sapiens
ttcaaacctgctctatgaaagggaatgttcaactctgtgacttgaatgcaaacatcacaaagaagtttctgggaatgctgctgtctgcttttyttatgtaatcccgtttccaacgaagtcctcaaagctagacaaatatccacttgcagattccacaaaaagagtgtttcaaaactgctgcctcaaaagaaaggttcaactctgttagctgagtagatacatcatgaaaaagtttctgacattgctt

SEQ ID NO: 188334 - DNA, 247 bp, Homo sapiens
ttcaaacctgctctatgaaagggaatgttcaactctgtgacttgaatgcaaacatcacaaagaagtttctgggaatgctgctgtctgcttttcwtatgtaatcccgtttccaacgaagtcctcaaagctagacaaatatccacttgcagattccacaaaaagagtgtttcaaaactgctgcctcaaaagaaaggttcaactctgttagctgagtagatacatcatgaaaaagtttctgacattgctt

SEQ ID NO: 188335 - DNA, 247 bp, Homo sapiens
ttcaaacctgctctatgaaagggaatgttcaactctgtgacttgaatgcaaacatcacaaagaagtttctgggaatgctgctgtctgcttttcttatgtaatcccgtttccaacgaartcctcaaagctagacaaatatccacttgcagattccacaaaaagagtgtttcaaaactgctgcctcaaaagaaaggttcaactctgttagctgagtagatacatcatgaaaaagtttctgacattgctt

SEQ ID NO: 188336 - DNA, 247 bp, Homo sapiens
ttcaaacctgctctatgaaagggaatgttcaactctgtgacttgaatgcaaacatcacaaagaagtttctgggaatgctgctgtctgcttttcttatgtaatcccgtttccaacgaagtcctcaaagctagacaaatatccacttgcagattccacaaaaagagtgtttcaaaactgctgyctcaaaagaaaggttcaactctgttagctgagtagatacatcatgaaaaagtttctgacattgctt

SEQ ID NO: 188337 - DNA, 484 bp, Homo sapiens
catccttttcttgttccagtaaaatctttttcttgttcacagtaaaatctttcaccttttccacactcagtatgatcttagytgtagatttgtcctttatgtcctttgtgttaaggcatatattttctatactaaattgttgagaagttttttgtcatgtaagaatatttaattttgccaaacgcttttattgtgtttattaatttaatcatatggttttcagtatatatccaaaggaaagaaaatcagtatatcaaagagttacctgcacccccatgtttattacagcactattcacaatagccaagatgtggaatcaacaaaagtgtccatcaacagatgaatggataaagaaatgtgacatacatatataatggaatattatttagtcataataaagaacaaaatcctgttatttgtggcaacaagaatgcaagtgggcggcattatgttaggtgaaataagcctggcatagaaatataaa

SEQ ID NO: 188338 - DNA, 484 bp, Homo sapiens
catccttttcttgttccagtaaaatctttttcttgttcacagtaaaatctttcaccttttccacactcagtatgatcttagctgtagatttgtcctttatgtcctttgtgttaaggcatatattttctatactaaattgttgagargttttttgtcatgtaagaatatttaattttgccaaacgcttttattgtgtttattaatttaatcatatggttttcagtatatatccaaaggaaagaaaatcagtatatcaaagagttacctgcacccccatgtttattacagcactattcacaatagccaagatgtggaatcaacaaaagtgtccatcaacagatgaatggataaagaaatgtgacatacatatataatggaatattatttagtcataataaagaacaaaatcctgttatttgtggcaacaagaatgcaagtgggcggcattatgttaggtgaaataagcctggcatagaaatataaa

SEQ ID NO: 188339 - DNA, 537 bp, Homo sapiens
atgtgaaatatgattggtgagaataggcatccttttcttgttccagtaaaatctttttcttgttcacagtaaaatctttcaccttttccacactcagtatgatcttagctgtagatttgtcctttatgtcctttgtgttaaggcatatattttctatactaaattgttgagaagttttttgtcatgtaagaatatttaattttgccaaacgcttttattgtgtttattaatttaatcatatggttttcagtatatatccaaaggaaagaaaatcagtatatcaaagagttacctgcacccccatgtttattacagcactattcacaatagccaagatrtggaatcaacaaaagtgtccatcaacagatgaatggataaagaaatgtgacatacatatataatggaatattatttagtcataataaagaacaaaatcctgttatttgtggcaacaagaatgcaagtgggcggcattatgttaggtgaaataagcctggcatagaaatataaacaccacataactatgtgttctcactt

SEQ ID NO: 188340 - DNA, 537 bp, Homo sapiens
atgtgaaatatgattggtgagaataggcatccttttcttgttccagtaaaatctttttcttgttcacagtaaaatctttcaccttttccacactcagtatgatcttagctgtagatttgtcctttatgtcctttgtgttaaggcatatattttctatactaaattgttgagaagttttttgtcatgtaagaatatttaattttgccaaacgcttttattgtgtttattaatttaatcatatggttttcagtatatatccaaaggaaagaaaatcagtatatcaaagagttacctgcacccccatgtttattacagcactattcacaatagccaagatgtggaatcaacaaaagtgtccatcaacagatgaatggataaagaaatgtgacatacatatataatggaatattatttagtcataataaagaacaaaatcctgttrtttgtggcaacaagaatgcaagtgggcggcattatgttaggtgaaataagcctggcatagaaatataaacaccacataactatgtgttctcactt

SEQ ID NO: 188341 - DNA, 537 bp, Homo sapiens
atgtgaaatatgattggtgagaataggcatccttttcttgttccagtaaaatctttttcttgttcacagtaaaatctttcaccttttccacactcagtatgatcttagctgtagatttgtcctttatgtcctttgtgttaaggcatatattttctatactaaattgttgagaagttttttgtcatgtaagaatatttaattttgccaaacgcttttattgtgtttattaatttaatcatatggttttcagtatatatccaaaggaaagaaaatcagtatatcaaagagttacctgcacccccatgtttattacagcactattcacaatagccaagatgtggaatcaacaaaagtgtccatcaacagatgaatggataaagaaatgtgacatacatatataatggaatattatttagtcataataaagaacaaaatcctgttatttgtggcaacaagaatgcaagtggrcggcattatgttaggtgaaataagcctggcatagaaatataaacaccacataactatgtgttctcactt

SEQ ID NO: 188342 - DNA, 537 bp, Homo sapiens
atgtgaaatatgattggtgagaataggcatccttttcttgttccagtaaaatctttttcttgttcacagtaaaatctttcaccttttccacactcagtatgatcttagctgtagatttgtcctttatgtcctttgtgttaaggcatatattttctatactaaattgttgagaagttttttgtcatgtaagaatatttaattttgccaaacgcttttattgtgtttattaatttaatcatatggttttcagtatatatccaaaggaaagaaaatcagtatatcaaagagttacctgcacccccatgtttattacagcactattcacaatagccaagatgtggaatcaacaaaagtgtccatcaacagatgaatggataaagaaatgtgacatacatatataatggaatattatttagtcataataaagaacaaaatcctgttatttgtggcaacaagaatgcaagtgggsggcattatgttaggtgaaataagcctggcatagaaatataaacaccacataactatgtgttctcactt

SEQ ID NO: 188343 - DNA, 446 bp, Homo sapiens
actcatcatcagtctctctcattttctgtcttatctccattccatctacgtacagtttttgttttcgccaatgtttttaaatamacaactgtacaagcacaacaatgacaacagaaaccttccttcccccagtgttgtagtgagcaaggaatatatttaacttcaaataaaagacaaaaacaaatgctggataaagctgacagaaagaaatgcaactgtaggtgctctggcaatatagaaatgatacaactaagaaaaatggaagaaaaggaaagagaaagtattcctcagaatgattttactgactgctcatctgtaatgcctgggagtcaaaggatattgtttatagaaatgtaagcatacttaatggcaccaggggaaacaaagttaatatgattaaatcaaattgtgggatgaaaaatcacatagggaggacaagaaagaga

SEQ ID NO: 188344 - DNA, 446 bp, Homo sapiens
actcatcatcagtctctctcattttctgtcttatctccattccatctacgtacagtttttgttttcgccaatgtttttaaatacacaactgtacaagcacaacaatgacaacagaaacctyccttcccccagtgttgtagtgagcaaggaatatatttaacttcaaataaaagacaaaaacaaatgctggataaagctgacagaaagaaatgcaactgtaggtgctctggcaatatagaaatgatacaactaagaaaaatggaagaaaaggaaagagaaagtattcctcagaatgattttactgactgctcatctgtaatgcctgggagtcaaaggatattgtttatagaaatgtaagcatacttaatggcaccaggggaaacaaagttaatatgattaaatcaaattgtgggatgaaaaatcacatagggaggacaagaaagaga

SEQ ID NO: 188345 - DNA, 600 bp, Homo sapiens
aaaatattagtagttattagtataaaataatttatgtcttttggacttagcatccagtatttcttttttaataaagaaaataattattctcttgcaatatactatgtttacctgggttttgaaaagtgatgtttcctwatatgagaaagccatttacatttttaaatctacaaaggcaaatggaatggtactaaattatttacataataatgtttagatggtggcccttataacattctttctatacttcctacagagttggggataggcaatcctagaatatttctgggagctaatcctttagcttgatgaatgaaacaagacttttaaataaaattaaactttcaaattatccaggtaatgggcctgtcttttaattcaatggatatggagcataatgaattatcccctgttcattgggtaataagttctcattcttaatttataatactcaaaatgtcctttaatttttaatttttgatagtcatatcattatccctaggtattttagcttctatcttaaattctaaaataattttgaaacaggagaaagtattctttattactatatgtattaaacatcatggttttcgaatttaa

SEQ ID NO: 188346 - DNA, 600 bp, Homo sapiens
aaaatattagtagttattagtataaaataatttatgtcttttggacttagcatccagtatttcttttttaataaagaaaataattattctcttgcaatatactatgtttacctgggttttgaaaagtgatgtttccttatatgagaaagccatttacatttttaaatctacaaaggcaaatggaatggtactaaattatttacataataatgtttagatggtggcccttataacattctttctatacttcctacagagttggggatakgcaatcctagaatatttctgggagctaatcctttagcttgatgaatgaaacaagacttttaaataaaattaaactttcaaattatccaggtaatgggcctgtcttttaattcaatggatatggagcataatgaattatcccctgttcattgggtaataagttctcattcttaatttataatactcaaaatgtcctttaatttttaatttttgatagtcatatcattatccctaggtattttagcttctatcttaaattctaaaataattttgaaacaggagaaagtattctttattactatatgtattaaacatcatggttttcgaatttaa

SEQ ID NO: 188347 - DNA, 600 bp, Homo sapiens
aaaatattagtagttattagtataaaataatttatgtcttttggacttagcatccagtatttcttttttaataaagaaaataattattctcttgcaatatactatgtttacctgggttttgaaaagtgatgtttccttatatgagaaagccatttacatttttaaatctacaaaggcaaatggaatggtactaaattatttacataataatgtttagatggtggcccttataacattctttctatacttcctacagagttggggataggcaatcctrgaatatttctgggagctaatcctttagcttgatgaatgaaacaagacttttaaataaaattaaactttcaaattatccaggtaatgggcctgtcttttaattcaatggatatggagcataatgaattatcccctgttcattgggtaataagttctcattcttaatttataatactcaaaatgtcctttaatttttaatttttgatagtcatatcattatccctaggtattttagcttctatcttaaattctaaaataattttgaaacaggagaaagtattctttattactatatgtattaaacatcatggttttcgaatttaa

SEQ ID NO: 188348 - DNA, 448 bp, Homo sapiens
aagttctcattcttaatttataatactcaaaatgtcctttaatttttaatttttgatagtcatatcattatccctaggtattttagcttctatcttaaattctaaaataattttgaaacaggagaaagtattctttattactatatgtattaaacatcatggttttcraatttaactgcaaatgtatcttttcattgcttcttggtgacgcccttcaccctatccatattgtcactaccaagtggtgattacttttcaggttcacatattctttagaaaaatcttctctgtgccttataaagaatatgattgttggcattcaaaagccagcgaaatatacattattagcctgttgcctaactcatttctttaagaaactacactaattacccacatacttatgtttttatttcctcattatttctggagaaaacaaatattgctaaca

SEQ ID NO: 188349 - DNA, 448 bp, Homo sapiens
aagttctcattcttaatttataatactcaaaatgtcctttaatttttaatttttgatagtcatatcattatccctaggtattttagcttctatcttaaattctaaaataattttgaaacaggagaaagtattctttattactatatgtattaaacatcatggttttcgaatttaactgcaaatgtatcttttcattgcttcttgrtgacgcccttcaccctatccatattgtcactaccaagtggtgattacttttcaggttcacatattctttagaaaaatcttctctgtgccttataaagaatatgattgttggcattcaaaagccagcgaaatatacattattagcctgttgcctaactcatttctttaagaaactacactaattacccacatacttatgtttttatttcctcattatttctggagaaaacaaatattgctaaca

SEQ ID NO: 188350 - DNA, 448 bp, Homo sapiens
aagttctcattcttaatttataatactcaaaatgtcctttaatttttaatttttgatagtcatatcattatccctaggtattttagcttctatcttaaattctaaaataattttgaaacaggagaaagtattctttattactatatgtattaaacatcatggttttcgaatttaactgcaaatgtatcttttcattgcttcttggtgacgcccttcaccctatccatattgtcactaccaagtggygattacttttcaggttcacatattctttagaaaaatcttctctgtgccttataaagaatatgattgttggcattcaaaagccagcgaaatatacattattagcctgttgcctaactcatttctttaagaaactacactaattacccacatacttatgtttttatttcctcattatttctggagaaaacaaatattgctaaca

SEQ ID NO: 188351 - DNA, 423 bp, Homo sapiens
gaatgcattcctgttttcatttcattcctgggggcaatattcaatctggtgtggccctctgtattataaaatgtttcccagattgtgtttatctgaaatacaaatccaagaagaagcatggtgttaattgccgtgtaaaaaagattccagagtcaagagcttgagaagttctrttccttccttcataggttcagttgtttaacccagcatttttcaaacatattttactcctagaacctgtttttcctcagacatatttaagaaaaaagcattttgtagaacacatttggacaaatgatactttatatcattgctttgttttttaaattttagtttgactcaattttacagtttcaggattttgtttctgtttcaggttttaagcttttcttttataaatagttactttcctagtctgaaatc

SEQ ID NO: 188352 - DNA, 423 bp, Homo sapiens
gaatgcattcctgttttcatttcattcctgggggcaatattcaatctggtgtggccctctgtattataaaatgtttcccagattgtgtttatctgaaatacaaatccaagaagaagcatggtgttaattgccgtgtaaaaaagattccagagtcaagagcttgagaagttctgttccttccttcataggttcagttgtttaacccagcatttttcaaacatattttactcctagaacctgtttttcctcagacatatttaagaaaaaagcrttttgtagaacacatttggacaaatgatactttatatcattgctttgttttttaaattttagtttgactcaattttacagtttcaggattttgtttctgtttcaggttttaagcttttcttttataaatagttactttcctagtctgaaatc

SEQ ID NO: 188353 - DNA, 487 bp, Homo sapiens
tggagaccagcttgttcaataaaggaagacctcatctctaacaacaaccacaacagcaaaaaattagccaggcacggtgacacatgcttatagtcccagctactggtgcagcctcraactcctggtctcaagccatcttcccacctcggcctcatgttgtagtgaactttgttatgcagtgtctcctattctacatgtgcaggagtatttttacagtatgtacctggagtggaattgcttggtcattgggcatgtgtgtgttcagctctattgagtggcatcatactgttctccaaagcagttgtaccaatctacaccctcaccagcagtgaatagtcttcccattgctcttcctcaatgaaactagatattcacagccttttaggtttttcctagagtatgaagtggtatctctttggggttttaatgtttatttccctgattagaattgtagttgagcatcttttattatgtttatgggccattt

SEQ ID NO: 188354 - DNA, 397 bp, Homo sapiens
atcaatattgttgtggctattggggaggaaaacattagtaaaaccagtaagttaaagctcttgctttaaactttggctttaatttaacaaatgttctatrgagtgacagtatgtatgtaaccatgctatgcccattcacagatgcagtagagggaagaatttctcaaagacaactgttctaacactcaaattaaaccgtactgggtttgaaaagagaaagtccaggaattaccaaatattttagatatcagataaaagagaatgccaggtatgcgatgataatcagcaatggttgttcacacaatacatcaaatcagtatttgaattagcttttgaattacaaggacaaatggatcaagtctagactctttagtagataaatcttattaggctgaga

SEQ ID NO: 188355 - DNA, 397 bp, Homo sapiens
atcaatattgttgtggctattggggaggaaaacattagtaaaaccagtaagttaaagctcttgctttaaactttggctttaatttaacaaatgttctatggagtgacagtatgtatgtaaccatgctatgcccattcacagatgcagtagagggaagaatttctcaaagacaactgttctaacactcaaattaaaccgtactgggtttgaaaagagawagtccaggaattaccaaatattttagatatcagataaaagagaatgccaggtatgcgatgataatcagcaatggttgttcacacaatacatcaaatcagtatttgaattagcttttgaattacaaggacaaatggatcaagtctagactctttagtagataaatcttattaggctgaga

SEQ ID NO: 188356 - DNA, 397 bp, Homo sapiens
atcaatattgttgtggctattggggaggaaaacattagtaaaaccagtaagttaaagctcttgctttaaactttggctttaatttaacaaatgttctatggagtgacagtatgtatgtaaccatgctatgcccattcacagatgcagtagagggaagaatttctcaaagacaactgttctaacactcaaattaaaccgtactgggtttgaaaagagaaagtccaggaattaccaaatattttagatatcagataaaagagaatgccaggtatgcgatgataatcagcaatggttgttcacacaayacatcaaatcagtatttgaattagcttttgaattacaaggacaaatggatcaagtctagactctttagtagataaatcttattaggctgaga

SEQ ID NO: 188357 - DNA, 511 bp, Homo sapiens
agagcccatttcatggttcatagatggtgccttctttctatgtcctcacataktggaaggcacacaagaactccattgagcttcttttataaaggcactaatccgattcataagggctcggcccccaagacctggtcacctcccaagtgttctgctctccctgatctgtgtcatatacagactctcttggattccttaccaattgcttgagagatcacagtgggtttgtggagaaaaagttttcaagatgatggatctttcccaacttctgcagctgtcagccgtctcccaatctgaccagccccactttgtctttaggaatttattgattattccagctttacttgtcatagtggtgtctatttgcatctgtcctatgtaagtgcatctgtcctctttctccttgcaggtgcttgttttccctcacattttgactcagttcttggcaacctcgttgctataaaaataaagtcatgactttgaggttagtttggttctttcattgttgtca

SEQ ID NO: 188358 - DNA, 461 bp, Homo sapiens
gatgctcacaaattcagtgttgatgagagcccatttcatggttcatagatggtgccttctttctatgtcctcacatagtggaaggcacacaagaactccattgagcttcttttataaaggcactaatccsattcataagggctcggcccccaagacctggtcacctcccaagtgttctgctctccctgatctgtgtcatatacagactctcttggattccttaccaattgcttgagagatcacagtgggtttgtggagaaaaagttttcaagatgatggatctttcccaacttctgcagctgtcagccgtctcccaatctgaccagccccactttgtctttaggaatttattgattattccagctttacttgtcatagtggtgtctatttgcatctgtcctatgtaagtgcatctgtcctctttctccttgcaggtgcttgttttccctcacattttgact

SEQ ID NO: 188359 - DNA, 461 bp, Homo sapiens
gatgctcacaaattcagtgttgatgagagcccatttcatggttcatagatggtgccttctttctatgtcctcacatagtggaaggcacacaagaactccattgagcttcttttataaaggcactaatccgattcataagggctcggcccccaagaccyggtcacctcccaagtgttctgctctccctgatctgtgtcatatacagactctcttggattccttaccaattgcttgagagatcacagtgggtttgtggagaaaaagttttcaagatgatggatctttcccaacttctgcagctgtcagccgtctcccaatctgaccagccccactttgtctttaggaatttattgattattccagctttacttgtcatagtggtgtctatttgcatctgtcctatgtaagtgcatctgtcctctttctccttgcaggtgcttgttttccctcacattttgact

SEQ ID NO: 188360 - DNA, 461 bp, Homo sapiens
gatgctcacaaattcagtgttgatgagagcccatttcatggttcatagatggtgccttctttctatgtcctcacatagtggaaggcacacaagaactccattgagcttcttttataaaggcactaatccgattcataagggctcggcccccaagacctggtcacctcccaagtgttctgctctccctgatctgtgtcatatacagactctcttggattccttaccaattgcttgagagatcacagtgggtttgtggrgaaaaagttttcaagatgatggatctttcccaacttctgcagctgtcagccgtctcccaatctgaccagccccactttgtctttaggaatttattgattattccagctttacttgtcatagtggtgtctatttgcatctgtcctatgtaagtgcatctgtcctctttctccttgcaggtgcttgttttccctcacattttgact

SEQ ID NO: 188361 - DNA, 426 bp, Homo sapiens
ttataaaggcactaatccgattcataagggctcggcccccaagacctggtcacctcccaagtgttctgctctccctgatctgtgtcatatacagactctcttggattccttaccaattgcttgagagatcacagtgggtttgtggagaaaaagttttcaagatgatggatctttcccaacttctgcagctgtcagcsgtctcccaatctgaccagccccactttgtctttaggaatttattgattattccagctttacttgtcatagtggtgtctatttgcatctgtcctatgtaagtgcatctgtcctctttctccttgcaggtgcttgttttccctcacattttgactcagttcttggcaacctcgttgctataaaaataaagtcatgactttgaggttagtttggttctttcattgttgtcag

SEQ ID NO: 188362 - DNA, 426 bp, Homo sapiens
ttataaaggcactaatccgattcataagggctcggcccccaagacctggtcacctcccaagtgttctgctctccctgatctgtgtcatatacagactctcttggattccttaccaattgcttgagagatcacagtgggtttgtggagaaaaagttttcaagatgatggatctttcccaacttctgcagctgtcagccgtctcccaatctsaccagccccactttgtctttaggaatttattgattattccagctttacttgtcatagtggtgtctatttgcatctgtcctatgtaagtgcatctgtcctctttctccttgcaggtgcttgttttccctcacattttgactcagttcttggcaacctcgttgctataaaaataaagtcatgactttgaggttagtttggttctttcattgttgtcag

SEQ ID NO: 188363 - DNA, 461 bp, Homo sapiens
gatgctcacaaattcagtgttgatgagagcccatttcatggttcatagatggtgccttctttctatgtcctcacatagtggaaggcacacaagaactccattgagcttcttttataaaggcactaatccgattcataagggctcggcccccaagacctggtcacctcccaagtgttctgctctccctgatctgtgtcatatacagactctcttggattccttaccaattgcttgagagatcacagtgggtttgtggagaaaaagttttcaagatgatggatctttcccaacttctgcagctgtcagccgtctcccaatctgaccagccccactttgtctttaggaatttattgattattccagctttacttgtcatagtggtgtctatttgcatctgtcctatgtaagtgcatcygtcctctttctccttgcaggtgcttgttttccctcacattttgact

SEQ ID NO: 188364 - DNA, 426 bp, Homo sapiens
ttataaaggcactaatccgattcataagggctcggcccccaagacctggtcacctcccaagtgttctgctctccctgatctgtgtcatatacagactctcttggattccttaccaattgcttgagagatcacagtgggtttgtggagaaaaagttttcaagatgatggatctttcccaacttctgcagctgtcagccgtctcccaatctgaccagccccactttgtctttaggaatttattgattattccagctttacttgtcatagtggtgtctatttgcatctgtcctatgtaagtgcatctgtcctctttctccttgcaggtgcttgttttccctcacattttgactcagttcttggcaacctcgttgctataaaaataaagtsatgactttgaggttagtttggttctttcattgttgtcag

SEQ ID NO: 188365 - DNA, 431 bp, Homo sapiens
ctgactggtctgggggatacctaaaggactcatgaaaggcttttgtttttctgtgttgctagaatacagaacagataaggaatggacattatcgagaaactctgcaaggagacctaacaaaccacagatgcttagggcaaaaattagagtttacacatatagtagatcaccttsagcacaggaagaaaagttggagaagagtatttggaaaactaagacattcaaaatcattcacgtacatgggagagtctagaaagtcacatgtatgcacaggttaagccacatgctgacaaatgtcataagaagaccctacacttttaccttggccgatccctcccctcagtgcaagctctgtgcaagagtgaacttgaacttcactcagtgcaagagtgaacacacactttgtgccggctttaaagaacccagcacaa

SEQ ID NO: 188366 - DNA, 594 bp, Homo sapiens
cagattcacaatgaactcttgtacttgttttgttcagagaagagatggttctgagagaatgacagtgaactaaccccagctggtttagttggtgctttcaactgctgcttctgatcaactcctttagctagaataaattgatgaggattttggcatgtggtattagagatggttattaattttttcctcttatttgcattgttcaatgtagtaaatactarctgtatatggctacttcaattcaaattaattacaatgaaatatacttaaatattgaatttttttagtcactgttggttcattattgaatatcttcagctaagatttcccatctaaatacactaagaggtggcttagttaactggtcgtccacaaatattgaggctgatgttaactcctgatatattctctgcaaatagaatattcatgagcctcctcctgaaatcagcagcctagagatagttttataaattggatacaagttggaaatctatatactctcagtttttgaaatattagcttcccagggaagaaaatcaaattcgtaagatatgttaggacgatttaactcaagatgttcaaaactgaaatgac

SEQ ID NO: 188367 - DNA, 430 bp, Homo sapiens
ataaattgatgaggattttggcatgtggtattagagatggttattaattttttcctcttatttgcattgttcaatgtagtaaatactaactgtatatggctacttcaattcaaattaattacaatgaaatatacttaaatrttgaatttttttagtcactgttggttcattattgaatatcttcagctaagatttcccatctaaatacactaagaggtggcttagttaactggtcgtccacaaatattgaggctgatgttaactcctgatatattctctgcaaatagaatattcatgagcctcctcctgaaatcagcagcctagagatagttttataaattggatacaagttggaaatctatatactctcagtttttgaaatattagcttcccagggaagaaaatcaaattcgtaagatatgttaggacg

SEQ ID NO: 188368 - DNA, 594 bp, Homo sapiens
cagattcacaatgaactcttgtacttgttttgttcagagaagagatggttctgagagaatgacagtgaactaaccccagctggtttagttggtgctttcaactgctgcttctgatcaactcctttagctagaataaattgatgaggattttggcatgtggtattagagatggttattaattttttcctcttatttgcattgttcaatgtagtaaatactaactgtatatggctacttcaattcaaattaattacaatgaaatatacttaaatattgaatttttttagtcactgttggttcattattgaataycttcagctaagatttcccatctaaatacactaagaggtggcttagttaactggtcgtccacaaatattgaggctgatgttaactcctgatatattctctgcaaatagaatattcatgagcctcctcctgaaatcagcagcctagagatagttttataaattggatacaagttggaaatctatatactctcagtttttgaaatattagcttcccagggaagaaaatcaaattcgtaagatatgttaggacgatttaactcaagatgttcaaaactgaaatgac

SEQ ID NO: 188369 - DNA, 430 bp, Homo sapiens
ataaattgatgaggattttggcatgtggtattagagatggttattaattttttcctcttatttgcattgttcaatgtagtaaatactaactgtatatggctacttcaattcaaattaattacaatgaaatatacttaaatattgaatttttttagtcactgttggttcattattgaatatcttcagctaagatttcccatctaaatacactaagaggtggcttagttaactggtcgtccacaaatattgargctgatgttaactcctgatatattctctgcaaatagaatattcatgagcctcctcctgaaatcagcagcctagagatagttttataaattggatacaagttggaaatctatatactctcagtttttgaaatattagcttcccagggaagaaaatcaaattcgtaagatatgttaggacg

SEQ ID NO: 188370 - DNA, 430 bp, Homo sapiens
ataaattgatgaggattttggcatgtggtattagagatggttattaattttttcctcttatttgcattgttcaatgtagtaaatactaactgtatatggctacttcaattcaaattaattacaatgaaatatacttaaatattgaatttttttagtcactgttggttcattattgaatatcttcagctaagatttcccatctaaatacactaagaggtggcttagttaactggtcgtccacaaatattgaggctgwtgttaactcctgatatattctctgcaaatagaatattcatgagcctcctcctgaaatcagcagcctagagatagttttataaattggatacaagttggaaatctatatactctcagtttttgaaatattagcttcccagggaagaaaatcaaattcgtaagatatgttaggacg

SEQ ID NO: 188371 - DNA, 382 bp, Homo sapiens
cacaagtagaaaaagcctataagttgctatgccaaaawcctgcctctagatggcaaacaaaccccacaatacacaaaagagagccaaattcttagaaaccctgggaaaggaagagggctactgtcccattaacaacttggagcccttaaggcaagaatgaggtggaacatctggaacatctgggaggagacaccagggtgcggagtagtggggaacctgctctgtgctctgagactgaaagcccagccttgcctctcaccgctgccttgactgtgtccccatctgctgtgaagtgaatggtgtcttctaaattcatgctgagccctaattgctgaaaagtgtaagacatgcaatggggggattatgtgcatcttcccgacac

SEQ ID NO: 188372 - DNA, 382 bp, Homo sapiens
cacaagtagaaaaagcctataagttgctatgccaaaaacctgcctctagatggcaaacaaaccccacaatacacaaaagagagccaaattcttagaaaccctgggaaaggaagagggctactgtcccattaacaacttggagcccttaaggcaagaatgaggtggaacatctggaacatctgggaggagacascagggtgcggagtagtggggaacctgctctgtgctctgagactgaaagcccagccttgcctctcaccgctgccttgactgtgtccccatctgctgtgaagtgaatggtgtcttctaaattcatgctgagccctaattgctgaaaagtgtaagacatgcaatggggggattatgtgcatcttcccgacac

SEQ ID NO: 188373 - DNA, 382 bp, Homo sapiens
cacaagtagaaaaagcctataagttgctatgccaaaaacctgcctctagatggcaaacaaaccccacaatacacaaaagagagccaaattcttagaaaccctgggaaaggaagagggctactgtcccattaacaacttggagcccttaaggcaagaatgaggtggaacatctggaacatctgggaggagacaccagggtgcrgagtagtggggaacctgctctgtgctctgagactgaaagcccagccttgcctctcaccgctgccttgactgtgtccccatctgctgtgaagtgaatggtgtcttctaaattcatgctgagccctaattgctgaaaagtgtaagacatgcaatggggggattatgtgcatcttcccgacac

SEQ ID NO: 188374 - DNA, 498 bp, Homo sapiens
caaacaaaccccacaatacacaaaagagagccaaattcttagaaaccctgggaaaggaagagggctactgtcccattaacaacttggagcccttaaggcaagaatgaggtggaacatctggaacatctgggaggagacaccagggtgcggagtagtggggaacctgctctgtgctctgagactgaaagcccagccttgcctctcaccgctgccttgactgtgtccccatctgctgtgaagtgaatggtgtcttctaaattcatgctgagccctaattgctgaaaastgtaagacatgcaatggggggattatgtgcatcttcccgacaccaacatgatgctcaggaaggagacttcttgttttctcttaggattcttttactaaccaagattttgcctctactacatatttccctttgctgattgtccctcccttttgacagaagatggcccagggcattcactactaagtctcaacctcttacccaaagccctcagt

SEQ ID NO: 188375 - DNA, 513 bp, Homo sapiens
gcattaaaacatgagaagtggcaataattcaaaccaacgatgccctccaagaatgaggatttttccaatgcattaggttgggtcccctcagtgagaaggatgccaaagattcgcatgcgggcagtatatttacaaagtkcgggaaacaagcaagtgagcaagggaggggaggagggaaagggaaagtgaaaggtgcctcagaaggagccacctctgaggatgacgagagctcaagcccacatagaaacacaggaaaaatgcctctgttattccacatgagaggtgagggagctgcgggatgtgtacacctcccttgtcatcactgattggcagccgtcctaggggatgctaattccaggccgtgaggtctgcctcatttgcagcctgagctgcttccccaggttcagacagagcagtgaaggggagaaagggccatagagagtcagctgaagtataatgactagaatccccaaggcgcagtaacaatgactgctaaaattatgcacaaagaaa

SEQ ID NO: 188376 - DNA, 411 bp, Homo sapiens
gcagcaggtttgtgcacaggctgcactaccttggtctggccactggtagtcrtgcatgagaactactccctggcgtatttctcagtccactgacactgatgtaattggctccacttcccctgctgttgagccaggccgacacgccctgggcaaaggcatctgtgtgaagtattgaggtgcaaatcagtgcttaagatatgtttggaggcaaaatactttttcatctacatgggcagtgtcttggcagaagatggagattctctctaaatggatgtgagacagggtggctggcatctgggtcaggatgatgccctggtgcatggcaagaacatgcattgggcagcagctgccctcgctaaggagagaggttcactgacctggcttttcccccctcacctgctctccagaaag

SEQ ID NO: 188377 - DNA, 411 bp, Homo sapiens
gcagcaggtttgtgcacaggctgcactaccttggtctggccactggtagtcatgcatgagaactactccctggcgtatttctcagtccactgacactgaygtaattggctccacttcccctgctgttgagccaggccgacacgccctgggcaaaggcatctgtgtgaagtattgaggtgcaaatcagtgcttaagatatgtttggaggcaaaatactttttcatctacatgggcagtgtcttggcagaagatggagattctctctaaatggatgtgagacagggtggctggcatctgggtcaggatgatgccctggtgcatggcaagaacatgcattgggcagcagctgccctcgctaaggagagaggttcactgacctggcttttcccccctcacctgctctccagaaag

SEQ ID NO: 188378 - DNA, 411 bp, Homo sapiens
gcagcaggtttgtgcacaggctgcactaccttggtctggccactggtagtcatgcatgagaactactccctggcgtatttctcagtccactgacactgatgtaattggctccacttcccctgctgttgagccaggccgacacgccctgggcaaaggcatctgtgtgaagtattgaggtkcaaatcagtgcttaagatatgtttggaggcaaaatactttttcatctacatgggcagtgtcttggcagaagatggagattctctctaaatggatgtgagacagggtggctggcatctgggtcaggatgatgccctggtgcatggcaagaacatgcattgggcagcagctgccctcgctaaggagagaggttcactgacctggcttttcccccctcacctgctctccagaaag

SEQ ID NO: 188379 - DNA, 553 bp, Homo sapiens
tcttttgttggttttggggtttctggatttggctgctaaatatgattagatcccaaaatgctaaggactctacttttaatagtgtagagaatattgacagttcttggcatgaaaggtttaaagagctatgcaaaacaaattcatttgacactaatgaatcatcsctcgtgagaggcaaggagtttagtgactctgtacctaatacccttgacaaacaccttgcaaaatagatttgtgaggacagcacctgcatctttgaagagccctgtaaaggctcttctctgtatgtcagatctaatggtgagaactgcagtcactcagttacaaaagttaaatacaatttggaataattggatcctgaagtggcaggggccaagtggtagcactcaaccctcaaaggcacggtgggtgtagctaccgtaatgggcagaaaagacaaagcagcaatctgaacagtctgactcatgtagagctctggcattggctaactaatcacagtgttcctagaagtgaaactgacaggaagactaatgcattcctacttaatttatgt

SEQ ID NO: 188380 - DNA, 553 bp, Homo sapiens
tcttttgttggttttggggtttctggatttggctgctaaatatgattagatcccaaaatgctaaggactctacttttaatagtgtagagaatattgacagttcttggcatgaaaggtttaaagagctatgcaaaacaaattcatttgacactaatgaatcatcgctcgtgagaggcaaggagtttagygactctgtacctaatacccttgacaaacaccttgcaaaatagatttgtgaggacagcacctgcatctttgaagagccctgtaaaggctcttctctgtatgtcagatctaatggtgagaactgcagtcactcagttacaaaagttaaatacaatttggaataattggatcctgaagtggcaggggccaagtggtagcactcaaccctcaaaggcacggtgggtgtagctaccgtaatgggcagaaaagacaaagcagcaatctgaacagtctgactcatgtagagctctggcattggctaactaatcacagtgttcctagaagtgaaactgacaggaagactaatgcattcctacttaatttatgt

SEQ ID NO: 188381 - DNA, 432 bp, Homo sapiens
agaactaacaggatatatacatatatatatacatacrcacacacatatatatatgcacacacacacacacacatatatatatttatttacaaaggggagtttattaacttacaggatcataagttacacaatgggctgtctgcaaactgatgagaaaggagagccatggagtccaatgtttgagggcaggaagaaaccagcatgggagaaaaaagatgtaggctgggaggctaggccagtctctccttttcaaatttttctgcctgctttatatttgctggcagcagattagattgtgcccaccagattaagggtgggtctgccttccccagcccactgactcaaatgttaatctctttcggcaacactctcacagacacaccctggatcaatacttcatatccctcaatcctatcaagttgacagtcatta

SEQ ID NO: 188382 - DNA, 479 bp, Homo sapiens
atatatacatatatatatacatacacacacacatatatatatgcacacacacacacacacatatatatatttatttayaaaggggagtttattaacttacaggatcataagttacacaatgggctgtctgcaaactgatgagaaaggagagccatggagtccaatgtttgagggcaggaagaaaccagcatgggagaaaaaagatgtaggctgggaggctaggccagtctctccttttcaaatttttctgcctgctttatatttgctggcagcagattagattgtgcccaccagattaagggtgggtctgccttccccagcccactgactcaaatgttaatctctttcggcaacactctcacagacacaccctggatcaatacttcatatccctcaatcctatcaagttgacagtcattattaaccatctcactccccttcatatatatatgtatatagtcctttaattctgtcactct

SEQ ID NO: 188383 - DNA, 479 bp, Homo sapiens
atatatacatatatatatacatacacacacacatatatatatgcacacacacacacacacatatatatatttatttacaaaggggagtttattaacttacaggatcataagttacacartgggctgtctgcaaactgatgagaaaggagagccatggagtccaatgtttgagggcaggaagaaaccagcatgggagaaaaaagatgtaggctgggaggctaggccagtctctccttttcaaatttttctgcctgctttatatttgctggcagcagattagattgtgcccaccagattaagggtgggtctgccttccccagcccactgactcaaatgttaatctctttcggcaacactctcacagacacaccctggatcaatacttcatatccctcaatcctatcaagttgacagtcattattaaccatctcactccccttcatatatatatgtatatagtcctttaattctgtcactct

SEQ ID NO: 188384 - DNA, 450 bp, Homo sapiens
acatatatatatacatacacacacacatatatatatgcacacacacacacacacatatatatatttatttacaaaggggagtttattaacttacaggatcataagttacacaatgggctgtctgcaaactgatragaaaggagagccatggagtccaatgtttgagggcaggaagaaaccagcatgggagaaaaaagatgtaggctgggaggctaggccagtctctccttttcaaatttttctgcctgctttatatttgctggcagcagattagattgtgcccaccagattaagggtgggtctgccttccccagcccactgactcaaatgttaatctctttcggcaacactctcacagacacaccctggatcaatacttcatatccctcaatcctatcaagttgacagtcattattaaccatctcactccccttcatatatatatgtata

SEQ ID NO: 188385 - DNA, 393 bp, Homo sapiens
atacatatatatatacatacacacacacatatatatatgcacacacacacacacacatatatatatttatttacaaaggggagtttattaacttacaggatcataagttacacaatgggctgtctgcaaactgatgagaaaggagagccatggagtccaatgtttgagggcaggaagaaaccagcatgggagaaaaaagatgtaggctgggagrctaggccagtctctccttttcaaatttttctgcctgctttatatttgctggcagcagattagattgtgcccaccagattaagggtgggtctgccttccccagcccactgactcaaatgttaatctctttcggcaacactctcacagacacaccctggatcaatacttcatatccctcaa

SEQ ID NO: 188386 - DNA, 445 bp, Homo sapiens
acatatatatatacatacacacacacatatatatatgcacacacacacacacacatatatatatttatttacaaaggggagtttattaacttacaggatcataagttacacaatgggctgtctgcaaactgatgagaaaggagagccatggagtccaatgtttgagggcaggaagaaaccagcatgggagaaaaaagatgtaggctgggaggctaggccagtcwctccttttcaaatttttctgcctgctttatatttgctggcagcagattagattgtgcccaccagattaagggtgggtctgccttccccagcccactgactcaaatgttaatctctttcggcaacactctcacagacacaccctggatcaatacttcatatccctcaatcctatcaagttgacagtcattattaaccatctcactccccttcatatatatat

SEQ ID NO: 188387 - DNA, 459 bp, Homo sapiens
gacagaactaacaggatatatacatatatatatacatacacacacacatatatatatgcacacacacacacacacatatatatatttatttacaaaggggagtttattaacttacaggatcataagttacacaatgggctgtctgcaaactgatgagaaaggagagccatggagtccaatgtttgagggcaggaagaaaccagcatgggagaaaaaagatgtaggctgggaggctaggccagtctctccttttcaaatttttctgcctgctttatatttgctggcagcagattagattgtrcccaccagattaagggtgggtctgccttccccagcccactgactcaaatgttaatctctttcggcaacactctcacagacacaccctggatcaatacttcatatccctcaatcctatcaagttgacagtcattattaaccatctcactccccttcata

SEQ ID NO: 188388 - DNA, 445 bp, Homo sapiens
acatatatatatacatacacacacacatatatatatgcacacacacacacacacatatatatatttatttacaaaggggagtttattaacttacaggatcataagttacacaatgggctgtctgcaaactgatgagaaaggagagccatggagtccaatgtttgagggcaggaagaaaccagcatgggagaaaaaagatgtaggctgggaggctaggccagtctctccttttcaaatttttctgcctgctttatatttgctggcagcagattagattgtgcycaccagattaagggtgggtctgccttccccagcccactgactcaaatgttaatctctttcggcaacactctcacagacacaccctggatcaatacttcatatccctcaatcctatcaagttgacagtcattattaaccatctcactccccttcatatatatat

SEQ ID NO: 188389 - DNA, 479 bp, Homo sapiens
atatatacatatatatatacatacacacacacatatatatatgcacacacacacacacacatatatatatttatttacaaaggggagtttattaacttacaggatcataagttacacaatgggctgtctgcaaactgatgagaaaggagagccatggagtccaatgtttgagggcaggaagaaaccagcatgggagaaaaaagatgtaggctgggaggctaggccagtctctccttttcaaatttttctgcctgctttatatttgctggcagcagattagattgtgcccaccagattaagggtgggtctgccttccccagcccactgactcaaatgttaatctctttyggcaacactctcacagacacaccctggatcaatacttcatatccctcaatcctatcaagttgacagtcattattaaccatctcactccccttcatatatatatgtatatagtcctttaattctgtcactct

SEQ ID NO: 188390 - DNA, 459 bp, Homo sapiens
gacagaactaacaggatatatacatatatatatacatacacacacacatatatatatgcacacacacacacacacatatatatatttatttacaaaggggagtttattaacttacaggatcataagttacacaatgggctgtctgcaaactgatgagaaaggagagccatggagtccaatgtttgagggcaggaagaaaccagcatgggagaaaaaagatgtaggctgggaggctaggccagtctctccttttcaaatttttctgcctgctttatatttgctggcagcagattagattgtgcccaccagattaagggtgggtctgccttccccagcccactgactcaaatgttaatctctttcggcaacactctcacagacacaccctggatcaatacttcatatccctcaatcctatcaagttgacastcattattaaccatctcactccccttcata

SEQ ID NO: 188391 - DNA, 477 bp, Homo sapiens
aaaatctgggcaaaaataagcggcatcagtatcacctgggagcagcttcaggtctcactttagatttactctgaatctaaatattatatttttattaaaaaaattaagaacagatgacaarcttcaactacatctaaattctttagatgtactttaaaagaatcaacattttgacacaataccaaagtgaactaaattcgcttttttttttttttttttttttttgagacagagtcttgctctgttgcccaggctggagcgcagtggtgcaatctcggctcactgcaacttccacctctccagttcaagcgattatcttgcctcggcctccaaagtagctgggattacaggcacatgccatcatgcccggctaatttttgtatttttagtagagacagggtttcacaatgttgggtcagctggtctcgaactcctgacctcaagtgatctgcccgcctcggccttccaaagtgctga

SEQ ID NO: 188392 - DNA, 477 bp, Homo sapiens
aaaatctgggcaaaaataagcggcatcagtatcacctgggagcagcttcaggtctcactttagatttactctgaatctaaatattatatttttattaaaaaaattaagaacagatgacaaacttcaactacatctaaattctttagatktactttaaaagaatcaacattttgacacaataccaaagtgaactaaattcgcttttttttttttttttttttttttgagacagagtcttgctctgttgcccaggctggagcgcagtggtgcaatctcggctcactgcaacttccacctctccagttcaagcgattatcttgcctcggcctccaaagtagctgggattacaggcacatgccatcatgcccggctaatttttgtatttttagtagagacagggtttcacaatgttgggtcagctggtctcgaactcctgacctcaagtgatctgcccgcctcggccttccaaagtgctga

SEQ ID NO: 188393 - DNA, 477 bp, Homo sapiens
aaaatctgggcaaaaataagcggcatcagtatcacctgggagcagcttcaggtctcactttagatttactctgaatctaaatattatatttttattaaaaaaattaagaacagatgacaaacttcaactacatctaaattctttagatgtactttmaaagaatcaacattttgacacaataccaaagtgaactaaattcgcttttttttttttttttttttttttgagacagagtcttgctctgttgcccaggctggagcgcagtggtgcaatctcggctcactgcaacttccacctctccagttcaagcgattatcttgcctcggcctccaaagtagctgggattacaggcacatgccatcatgcccggctaatttttgtatttttagtagagacagggtttcacaatgttgggtcagctggtctcgaactcctgacctcaagtgatctgcccgcctcggccttccaaagtgctga

SEQ ID NO: 188394 - DNA, 475 bp, Homo sapiens
gactcttataggcattaattttattcatgaggactccacctttatgacctctcctactcctaattacatcttgaaggccccacctcctaataccattgcactagagattagatctcaacatatgaattttagtgagacacaaacattcagtccataaaattgttctttgaaatgattaataagatagacaaatctcatgcaatttgcatcaagtttgtaaaggaaagaagaaactaacaaataatactaaagtattgagacaaaaattttctgtagcaggactgctttcttctttatcatttgatgcccacctatgtggggccacctttcactttcagacttggagaaaaacagcccacctacggttgggtgcctggatttctgggagattattgagaagctggctgatacaactcagaagtgtggwgttgatagctctccctcctttcttttctatggattcccccatggtagg

SEQ ID NO: 188395 - DNA, 555 bp, Homo sapiens
ttaacaatattaatatcaggatattaacctgatactgaaactgcagctgcagtaaaggtatttgttcatcttggtaacaacagtcttaagagaaagtaaaaagacagtacctaatagagaacaaacacataattcattttgaagtctcaaaaakcaaaatctacatagacagagaacaagagtgcagggagatactgactacaaagcacacacaaatataaattttaggaaggtaatagaactgttctatagtttgacggtagtagctacaaggtacctagcatttggaaaaacacatagaactgtacaccaaaagagtaaattttactaggtgtaattttttaaataaataaacatcaaaaaattacttgagaaattctcagtgtttctaaattaaacaacacacttgacaataaccattgggttaacaaagaaatcataagtgaaatttagaaatattttcaattgaatgataaaatgtgagatatcaaaatctgtgagatgcagctaaagcagtatttagaatatttatttattcgtttgtctatttattta

SEQ ID NO: 188396 - DNA, 496 bp, Homo sapiens
tacttattgttttagattagtgtgggtcaggatttaatgaggtattatatgttttgttgcatactgtaaatatttctttcagcctgtttrtacagttctttagaactgtttgatttacatatgcctaggtcatatatgagaaatgtatttcattaagatatttcaacatgtggcaaattagttgtatgagaaatatgatggattttctttctatctgtgagggaattcagtatactaattgttgagtccattgctgacatgagttagcctctttagtttgttcttgtctgtgtgcactttcaggttgcatattcaatggtagaaggtctgctgtgcactaagtatgtttaccagattgtataatatataataagtccattatccacacacttatggaaattggtagagcagctagtgaaccatgtctctttggtgagtacaaagacttagaatctagaaaaaaaaagtttaaagaaagttgtggcttgagatagat

SEQ ID NO: 188397 - DNA, 434 bp, Homo sapiens
tataggaattaatgccttcacacatttgccactgaatttcttatattacaacactgtcgcagatagttttgggtatctttctcaccttgaaacactggaccagatcctttgggggaaatctttatccaaagtggccatgggggcagtgatcatttatgtccattgggaccaataatcaaggcctacgtttgctgattgtaatggggaggtctcccccgctttaatggtaagcattacctgtaaaggaattgactgagaaatgtgatggcttttgaaataaggtttttcctatagaaatataatttaatgsaaaaagtgcacatatctttgagtgtacagctcgatgatttagacaccgatgattttaactgtggcccagtactaattgatttgtgcagtgtgcatatgagaccggagaagaaaagttacaacaa

SEQ ID NO: 188398 - DNA, 620 bp, Homo sapiens
atgtggaaaggatgccctaagttttgaattgagactgtgcttcagatctaaagtcgttatagaactttgaaagtcatgaggcctagagatttttaatctagggtcagggaagaaatatctctcacaactgaacaaatgttaaagggacacagaagtmaaaaataaagattcacttttattatatcccgtccaccacgcttgattaacttgtgtaggaagaaatcactaggaaaataaataacatcttcgattatgtaattaactagctaaaatatagagacatcagaaggaaagggagcgcagtaagcttggagatgctgagctgcatgcaaccagttaaagctggtggcttcttttttaaatcctccacttcttctgattagtatcttagatgggagtgagatcatatacatgtaaccattcaacaaattgtaaggttgatagagatgtaaattatgttttttttagtattttgtacattggattataccaatggttatctttattatatttttccatatatatttgttttctgatgcagcttttcttccctggaaggattgcatttttacacttataattgctggcttgtatttaagacataacttttttaaaaatag

SEQ ID NO: 188399 - DNA, 620 bp, Homo sapiens
atgtggaaaggatgccctaagttttgaattgagactgtgcttcagatctaaagtcgttatagaactttgaaagtcatgaggcctagagatttttaatctagggtcagggaagaaatatctctcacaactgaacaaatgttaaagggacacagaagtaaaaaataaagattcacttttattatatcccgtccaccacgcttgattaacttgtgtaggaagaaatcactaggaaaataaataacatcttcgattatgtaattaactagctaaaatatagagacatcagaaggaaagggagcscagtaagcttggagatgctgagctgcatgcaaccagttaaagctggtggcttcttttttaaatcctccacttcttctgattagtatcttagatgggagtgagatcatatacatgtaaccattcaacaaattgtaaggttgatagagatgtaaattatgttttttttagtattttgtacattggattataccaatggttatctttattatatttttccatatatatttgttttctgatgcagcttttcttccctggaaggattgcatttttacacttataattgctggcttgtatttaagacataacttttttaaaaatag

SEQ ID NO: 188400 - DNA, 617 bp, Homo sapiens
tttcagtttttcgtcatcgagtatgatctttactgtgggctcttcatatacaacctttgttatgttaaggtaatttccttctattactagttttgttagtgttttatcatgaaagggtgttgaattttgccaaatgctttttcctatcttctttccagcttttccaaccaagaatgtctttctcaaggaccttagagccatctctttgaaatgtaatcatggaggaagaaagcacccygatctcccagtctgtctggaagagcaagagcctaattttgataagtgctaagcagcaaacacaaatgacctaatcacattgaccaaacctctccactaaagttcatcctccactacttctccaatagcatacccagctcttggaaatcctcctgccctttgtttcagctcaatcagagattgattcagttcaatctctctcccttattgcaaaagccttgatacctattgagtgatcttcttgcttctctgtttaagtggcctgctgtaagttttctttgacacgagtgagctagaaagaaagtaaagaggatgtgatagaagccaagtaaataatgagtaccaagggaaagtaattgattgtattagtccatccttgt

SEQ ID NO: 188401 - DNA, 581 bp, Homo sapiens
gagaaacaatacactgagagtccctttcctaccattgagaacgatctgtaaatagtctgttaatttgagctcattgtctggtacatgagaaagattcagctctggctaagcagaggtctgcatcttcccttattcttgcaatcccattggaagtatggccaatctgctgtatagatctgcttgatgggctcctgccttctggttcctactctagttttttcctgggactggatcytaggccatggggttgcctggtactcaacctatttccaagttcctgtcaggttcttctctctgcttcaagcatttattagagagacttgaatatctatcaagtctaatctgactctgcctgccagttgactggacaactcttccattgactggacattcttctgtgctcgttcccctgccccttggaattagatgttggtaatgttgtagcctgaccagacagcatgcaagcatttgcaatgctccagtgagattgctgatctcttcccatagtggcctcaccttatttgtagatttctctcagctcctactctatgctgctcttaaaggctccagattgttaccag

SEQ ID NO: 188402 - DNA, 609 bp, Homo sapiens
acactttttaggaatggtgtactagacctttgattgcaagaaacaaagctagctgagtgaaaagatatttacttaatatataaacatggaaataagctgggtcttgtgagaatgaagttggaaaytggaaagctttaggaatggagacagataatccctctgcttctctctgcgtttctggcttttgcttctctcagcacatctgctttaatcccttgtttcactgtgcactttggctttttctaacttaaacattagttcatacaatggtcaggcaggtcaccccagctccacctctatgtgacctgtcagtggaagttcctgctatctgactctagctttgtaagtcttagttcaaaatgtcagagaaggagctttcctggagacatgtgcccacatactgctcaatcactgtggccataggagcagagtcatatggtaaatatgtggccaccaagctcatccctacagccgatgttgtgctataacaaataatatgataccagctgtgcaagaatccccagacctacctacagaagtgcataggagtgagatccagccttggagcaatccttcttgcccaagtcaagtcaccttgctagctcttcc

SEQ ID NO: 188403 - DNA, 535 bp, Homo sapiens
gaaacaatgtaaaaagggcaaagaagaaatagctcattacggtaaaactgatatatattaatcaatgaatgttaatgttgaaggtcaaacagtatgtagactattttaatcattccattgtcagggacccactgggccaacttcaataagccatttgtcatttaaccattttaggctataagtttttcacttgaaaacaaaaatgtctgttctttactcattatatgtggccaagattgatcagaaaaactcttgaaagtrttttgaagttatggaaaaagacttttcggaagtacactatatgaattacttaaatgctccaactgatattcctagagcttatttttaaataactgtattatcaaaacaatccaccttatctttttgataaaaacaacgacaacaacctaatgacaattttaaccccacagaaaatgtacaggaagattttctttgtaaaatgtagttaatagcagctggttcacatttttcctaccaatgtttgctctgagaaatgctgtacatatatgaattc

SEQ ID NO: 188404 - DNA, 533 bp, Homo sapiens
agaattatgaactcctccacacgtcatttggtagagcagcctctcacagactgtgtcctgagaagagataggcatgctcwcataagcataggaaacactgcctgatgaagtcttcctcttggaggttcacaatgcatattaacacataagaaaagcgtcagtaaatatatctgcttaattttgtttaacagctaaacaaatttacttatataggaatagatttattttatttctctcacacttattcataaaaaaccaaagcaatttgcccttgataccagcaagggctgtaaacagtgtagatatggactaaagatttcatctcttgtcatggagactcaatggcaaattaaatcatgtgctccattaccataaaaatcataggcatattttgaagaagtccagacagatttcttttctggtcaagtacattgctgtttgtatgctaattataacttattggtagtggtcaactggaaattttatctcaccagactttttaaaggccaggtgatcagatggaatgcatgagt

SEQ ID NO: 188405 - DNA, 533 bp, Homo sapiens
agaattatgaactcctccacacgtcatttggtagagcagcctctcacagactgtgtcctgagaagagataggcatgctctcataagcataggaaacactgcctgatgaagtcttcctcttggaggttcacaatgcatattaacacataagmaaagcgtcagtaaatatatctgcttaattttgtttaacagctaaacaaatttacttatataggaatagatttattttatttctctcacacttattcataaaaaaccaaagcaatttgcccttgataccagcaagggctgtaaacagtgtagatatggactaaagatttcatctcttgtcatggagactcaatggcaaattaaatcatgtgctccattaccataaaaatcataggcatattttgaagaagtccagacagatttcttttctggtcaagtacattgctgtttgtatgctaattataacttattggtagtggtcaactggaaattttatctcaccagactttttaaaggccaggtgatcagatggaatgcatgagt

SEQ ID NO: 188406 - DNA, 457 bp, Homo sapiens
tgacctggcttaaatggcagcttataatctatgggatgttgggcaagttacttaatctctctgtgcttcatcttcatccatacaattaagcaaaacctgtagagttgtcataaggattaaatgagatgatgtatacaaagcactcagcccaatacctataccaagcagacagtgaatttttaaaaaattaaaattgatgttttgaagaagaatgaaaattgacccagaagtttaaaggagagattgacacagaaaccagaggaagaaagtagcctcatatgaaagaattctttaggatcaagcataaagcctccagtcaaggttcccccaaagaattactccaactattttaacatgtcttaaacaattttagcccaaaaagtaccttgtactaatcagctcttcacagttatttttyaagtacttttatatgcctacttacacatggtactacact

SEQ ID NO: 188407 - DNA, 540 bp, Homo sapiens
tggacaacgtgaaaagtctggcataaacaggagggtagagagaatagaaagaaaaaaaacataaaaatcagacacaagatgacacaaaacagaaccacatcaggcttctcagcatagaagcaaatggttctataaaacatcaaagtcctaagacagcattaaaatccaacctcctcaggaattcaaggctgcagtgagccatgatcacaccactgcactccagcctggccaaaagagcaagatcctatctttaaaaaaaaaaaaaaatctagtctccctgcctagccacatggccctgggtaagtcacttaacctctctgatcaagaaatgagaattctcatttctgaaattgaattaataataatgcctatcttgtcaggttgttttgaaaattaaataagtgtttgtgtgcaatagacactcacagattrctagttctagtattatctcaatatttggacacattctaataggggaataaaaattcaaccaactatcctaaatgttgtgccatggttgattctctaggagacattaag

SEQ ID NO: 188408 - DNA, 549 bp, Homo sapiens
agttaaaacattctttttcacatcatcattaaatccccaactggcttgttttctctctggttttcatcttgggaaaatacaatgttttatcatactctggactgtatctgaaccygaagatagtttttgcctaggatatacatgatccaaactcacccccagagagtctatttcacttgttttacagtgggaatcaggcatataaatttagaataaaatcctcaagtgatcctgaatcatacatatcattaataatcattgatttgcaagggttccctctgagggaaaactaggaagtagagcagatctgtgaggactacccaccaagattactaattaataaattgcaaactagatctgaaaaccagggtaaagacatggggcatgatcaaggccttgagcattatcatctataacactggtgcttcgcgaactttagtgccatgtgaatcacctgcgcagatgttagtctgcagattatgactcagtaggtcccaggtagagcctgaggttctgcatctcttacaggctcccaagtgagggcagtgc

SEQ ID NO: 188409 - DNA, 377 bp, Homo sapiens
cagagagtctatttcacttgttttacagtgggaatcaggcatataaatttagaataaaatcctcaagtgatcctgaatcatacatatcattaataatcattgatttgcaagggttccctctgagggaaaactaggaagtagagcagatctgtgaggactacccaccaagattactaattaataaattgcaaactagatctgaaaaccagggtaaagacatggggcatgatcaaggccttgagcattatcatcyataacactggtgcttcgcgaactttagtgccatgtgaatcacctgcgcagatgttagtctgcagattatgactcagtaggtcccaggtagagcctgaggttctgcatctcttacaggctcccaa

SEQ ID NO: 188410 - DNA, 538 bp, Homo sapiens
taaatccccaactggcttgttttctctctggttttcatcttgggaaaatacaatgttttatcatactctggactgtatctgaacccgaagatagtttttgcctaggatatacatgatccaaactcacccccagagagtctatttcacttgttttacagtgggaatcaggcatataaatttagaataaaatcctcaagtgatcctgaatcatacatatcattaataatcattgatttgcaagggttccctctgagggaaaactaggaagtagagcagatctgtgaggactacccaccaagattactaattaataaattgcaaactagatctgaaaaccagggtaaagacatggggcatgatcaaggccttgagcattatcatctataacactggtgcttcgcgaactttagtgccatgtgaatcacctgcgcagatgttagtctgcagattaygactcagtaggtcccaggtagagcctgaggttctgcatctcttacaggctcccaagtgagggcagtgctgctagtccatggaccac

SEQ ID NO: 188411 - DNA, 623 bp, Homo sapiens
ctggtggatcgaaaactccacatatacagtgaatttttgcaagtaaaatatttttacaattttcaacccaatggcaaagggatcaaatagcacggttgcagagtaaagctgaacaaggctatagggcttcgaaaagctatttgcctgcattaaaatattccattgtcctgtgtcctctcccctactgtgttcacttcttaaataagagactttgactctccaggcagcctgaatgaggtttatggatgagactgatatttaagactctggcaaagcatgaccttcggctccccaataagcagcaaggacaaattgcagtgcttgggacttgagastttaattcccgccaactgtttctctccagcccattatgcatgagaaatgcaactggctcaacttctgttgccctggtaatcctggggtgcctccgaatcacagacccatagaatgttagtgctggagagggccttagagatcatcaggtaagtccaacctcctcattttacagatgaggaacctctcgttaggtgtatgtgccttgcaggcttggctgctttgctctggcttgctctctccaggtagatccagagcaggaaggctatggagttgatatggtttggctg

SEQ ID NO: 188412 - DNA, 623 bp, Homo sapiens
ctggtggatcgaaaactccacatatacagtgaatttttgcaagtaaaatatttttacaattttcaacccaatggcaaagggatcaaatagcacggttgcagagtaaagctgaacaaggctatagggcttcgaaaagctatttgcctgcattaaaatattccattgtcctgtgtcctctcccctactgtgttcacttcttaaataagagactttgactctccaggcagcctgaatgaggtttatggatgagactgatatttaagactctggcaaagcatgaccttcggctccccaataagcagcaaggacaaattgcagtgcttgggacttgagagtttaattcccgccaactgtttctctccagcccattatgcatgagaaatgcaactggctcaacttctgktgccctggtaatcctggggtgcctccgaatcacagacccatagaatgttagtgctggagagggccttagagatcatcaggtaagtccaacctcctcattttacagatgaggaacctctcgttaggtgtatgtgccttgcaggcttggctgctttgctctggcttgctctctccaggtagatccagagcaggaaggctatggagttgatatggtttggctg

SEQ ID NO: 188413 - DNA, 465 bp, Homo sapiens
gcctacctgtaacaatacctcagaatggttgrtaagcatttgctcctctattctgggtcttttcttctctctcttttttttttttttttattgcattgctgtggagttgaaactggctgaatcagcactgaatcatttagcaggaaatgatgaaaactgtcactttcctctgtctgcatagtaagacacagcagagagagcccaagatgacggaggggccgtctgacaatgcctcaggcctcagattggattgtgaatgggaagagcccatagtctaatcagtagtcattcccccaggtgggtcacagagtgtgaatgtgaggttgtccctgcagcaaggacacctagtttacagacccacagaaacagtgaagtgaggaggcgaaaagacaatctgcgggtccactgggaaatcttgcaccagaagttgaatatcttaaataatagggtaacctggaccccatt

SEQ ID NO: 188414 - DNA, 517 bp, Homo sapiens
taattttctcttcttggacatgtcagaatggcttttattaaaaagatgaaagataacaagtgttggtgaggacgtggagaaaaggggaacccttgtacactgttggtgagaatgcgaattataggaccattatggaaaatagtatggagatggctcaaaaagctaaaaatagaatgaccatatgacccacaatcctacttctgggtatttacccaaaaaatttgaaatgtgtttatccaagaaatgtctgcaccccatktttactatagcactattcacaatagttaagttatggaatcaacctaagtgtccatcagcagatgaatggataaagaaaagggggtatatatgccttaaaaggcggtatataaatattcagccttaaaaaaggaaagtctatcatttgcaacaacatgaatggaactgaaaaacattattgctaagtgaaataagtcaggcacagaaagacaaatactgcatgttctcacatgtggaatctaaaagaatcaaagtcata

SEQ ID NO: 188415 - DNA, 517 bp, Homo sapiens
taattttctcttcttggacatgtcagaatggcttttattaaaaagatgaaagataacaagtgttggtgaggacgtggagaaaaggggaacccttgtacactgttggtgagaatgcgaattataggaccattatggaaaatagtatggagatggctcaaaaagctaaaaatagaatgaccatatgacccacaatcctacttctgggtatttacccaaaaaatttgaaatgtgtttatccaagaaatgtctgcaccccatttttactatagcactattcacaatagttaagttatggaatcaacctaastgtccatcagcagatgaatggataaagaaaagggggtatatatgccttaaaaggcggtatataaatattcagccttaaaaaaggaaagtctatcatttgcaacaacatgaatggaactgaaaaacattattgctaagtgaaataagtcaggcacagaaagacaaatactgcatgttctcacatgtggaatctaaaagaatcaaagtcata

SEQ ID NO: 188416 - DNA, 483 bp, Homo sapiens
tctatgtaccttctttccatgctctgtttcttgcctcatggactgatcctggtgttctgtccctgcttctgcaggatcatattttctgtcccttccatgtcagtatctgtatcctgctgatgcgttatggcagctgtgagataagcaagaaatacaagagtattttgtggatccaaatctgcactttgagttccctcagatyaaattaaggtacatgggaattcattaattaggcaatttattttttatctcttatagtggaggtgaatgttggtccttatccaagcagagtacaactgactttaggtcagcgatacttaactaattagaatttaatttacattaattgattaaattaaattatcttaatttaatcataagttattttaatttctccctaatgagaagaattaattactaaagagtaagaattttgtcaaataggattaagctttggaagactgcaaaccactataaaacaca

SEQ ID NO: 188417 - DNA, 428 bp, Homo sapiens
aagaattttgttctgtaatggctgggcacagtggctcatgcttgtaatcccagcactttgggagtccaaggtgggtggatcactttaggcygggagttcaagaccagtctggccaacatggtgaaacaccgtgtctactaaaaaaatacaaaaattcaaaaattagccaggcatggtggcacaagactgtaatcccagctactggggaggctgaggcacaagaatcacttgaactcaggaggtggaggttccaatgagccaagattgcaccactgcagtccagcctgggcaacagagtgagactacatctcaaaaaaaaaaaaaagaattttgttctgtaactgatagaacacataaattctgagattcaggaggtacactgaattcttaacaggataaaaaataaataggcacttatgaacaccata

SEQ ID NO: 188418 - DNA, 559 bp, Homo sapiens
ccacggcatcactgaagtatcatttaaactaatccaattatctttgctctgattccacaatctccaagcagtattctatttataaatatgttcttgctggtaacttaattctagaaactgggatccctgaatggcagaaacaaatacctgaatgttgaaaggacatattctctggaaattaataacttgtttcttttaataaaatcaggtgtttgctgttattgttgttaatttagttaacatgagccagacctgaagaacctgataaagtctggaagacatggcaaaagaaatcaagatgctttgccttcaaaccagaggcccatgtcccagggtatggaaactccatcaaactactgcttcactgtgaaaatctgtctagctggccagcctacctgcgcccctgacatctctactctgacaatatgtcyttaaaaccaaccattagagtgtgttgtgaatgactcagtttgcagatttccatccctgaaaagatcaacccttagatactctctttctcatgagatagaatgagaagaacctcggcataatattgggt

SEQ ID NO: 188419 - DNA, 479 bp, Homo sapiens
gattcttccttctcagtgaacgcaggaagtctggagaaagctgggggtggggtgggggtcagctggagtttgggaggtccttgttagctctgcggaaatacgtccccatggrtccagccctgccttctctcacagttcctaaggaggaagcccaggaagggtgggaaggaatgccctcgaattgggtgtgtgaccctgggttttctactctttttgtcttggagcccccaagaaagattgcctaagagctccccgctcctcattctcaaaggactttaaataagcactttaaataaggaaagcatctttgtacctctgctttctttcacctctccagcagaggggctgaggcggcgtggctggggacaaaaaaaaaaatgttcccccttctcccagctgtagtctgaatggcccgcaagtgttccataaaaattacagtgttcattttttcagttcctgagctgagggacaggtgcatg

SEQ ID NO: 188420 - DNA, 538 bp, Homo sapiens
aactactgtataagtgcactggatttagtaacactttaagttggcagtgcaggtagaagccaactaccattccattagagaatgactgagtggatgaggagatgaaatggctagattacttcatatcatatagctcatctatacttgtccaaaataacaaaaacaaaatggaaagatgggcgccaaatgcagcagtgctctaggcatgtaacactggcggagtagcatcttctgtgaagtcagcagagatttgctgggcttgcaaatagaaatggttataattcccaaaagaattttctaagaccagctctgtgaaacaaagtgtgccactggatgtccgattaaatgaaacaaagattccctataggcaacyttaggggcatgtaacatttgctctcaatcataagaattgatagtgaaaatccactctacgtggagcatgacacgtcataacacaccattcggctatttggaaaacatgaaatacataatcagtgtccaaatggaagtgtgcaaaacaggcagtaaacggacaaga

SEQ ID NO: 188421 - DNA, 401 bp, Homo sapiens
ttacgcacgctgggtcccaggccctcctgagttgatttgtctcagttctttctttttttcttaggggctggtttccaaccttttagagcaacttctctctttcacttcaccaaaaacaaatctaaggtttcctacatgtctccttttacttctaatgagatgcacatggtgatgtggcatttcctttcaggccagtttcacctctgaaatccgaccatcccagatcaatgtcaccttctctctggtgccttccctgagtcccagagccaaaaattaatagagaaataacccattctttcctcaatcatcaacaagtgtttcctgagcacctcccctgggccaggctatgtgcatctatctgcctatgcagctgctgtggrgacgctgacccctaagctgtg

SEQ ID NO: 188422 - DNA, 328 bp, Homo sapiens
acaaggcttggtccctaccattatgagactaagaatctggaggacagagcaattaagcggggccttacagtacagaggagagagacctcactcrgtattttggaggaaaggattaaagaaggcttcctgggggaggtgatgtccaagatgagacctgaaggacacataagagcaagccaggcaaagggcaggggatggagggcctctgggacaaagggacagcctgtgcaaagaaggaagctgctatgttctggagattcctgaggacctcagtgatgagggaaggggcttggggccagagtgtgaagagctgagccaggccaaagag

SEQ ID NO: 188423 - DNA, 407 bp, Homo sapiens
tcatttcctgctccaggagtgctctccccagtggggtgggagcaagtccaaggagtgagtgcttcgtgggaactctggcttcccggctgtcttcatgcctgtgcgtggccatgacacctggcaggatgccagagcagggagagcagaagcatcctgtgttctagcagagtacagaccatcagaaatgtttcaattccaaagctgggccaggtactgtcacccactggagccaaagtacccttgaacagttcacctctctcaggcttagggtgattatagtgaaaattggawgcttttctaaataaggcaaacaatgatggtacctattttataacctttactggactgcctctttttgccccagtcagaatgtgaagtctggatttagacaaaagattatttggacg

SEQ ID NO: 188424 - DNA, 496 bp, Homo sapiens
  misc_feature (1)...(496): n = A,T,C or G
aggctcttactcagccatggggcttttttgtatttcagggcattccagcagtgctttcttctttaggagctgttaagctgcagaactattcctgttctcctactcctgcagggttaccagcttcctttttctgcagcgtcaatatctgcatcacctctctatcgactctcagtgttttagttacattttccttttagactttttgttataattttcattgctaccctgaggctccatctattcactctatggccatttttttcttactcactgaayatatttataatagttgtgttaaagttttttagctaatttcaaaatctgggcatctcagagtctgtttttaactgtttttctgctcacatgttcatcccatttttgtttcttggaatatctgtcaacttttattatataatgaacatcatgaattatgtatgctanagactctggatacctttgtcttcctctgaatatactgtatttttgtcataatagg

SEQ ID NO: 188425 - DNA, 536 bp, Homo sapiens
ggctccagctctacatttcccttctgcactgccctagcagaggttctttatgagtgccccctccctgaagcaaacttctgcctggacatccagrcatttccatacatattttgatatctaggcgaagtttcctaaatctcaattcttgacttgtgtgcatccataggctcaacaccatagggaagctgccaaggcttggggtttctactctctgaagccacagtctgagctgtatgttggcctcttacagccatggctggagtggctaggacactgagcaccaagtccctaggctgcacacagcacaggacactgggtccggcccatgaaaccactttttcctctgggcctgtaatgggagtggctgccatgaaggtctctgacatggtctgtagacattttccccatggtcttggtgataaactttgggcttcttgctacttatgcaaatttctgcagccagcttgaatttttcctcaaagaatgggtttttcttctctcctccatcatcaggctgtaaatttgccaaagtttta

SEQ ID NO: 188426 - DNA, 637 bp, Homo sapiens
tatacaattttagacttgtttctcaatattacatcataatgcctatagcaactataattaatgatactcataattatgttagaaaaaaatgcaattctactagattgtattacatacaagacaattacaatgtgtattaaaagtgttactttgaataatgtatataaaatcgtatcaattacataatagtgattagcatttcatttttaataacctttattttatttttgaataatttcaaattttcaaaaaagttgcaatatagagagaattcataggtgcctctcatgcagttgcatgactttctcccatagactagggctcagagttggagagttcaatacaaatgtactcaatgaggatgacagaatcctaaaacaagagagaacacgtggtcccgctaagccttcagaaagcagggggacttattctacaaaatggcaaagtcaggagtggataatgaggcaaagaaactaacctgaagayaattaatgtaatcaattgtccctccaaaattgggagacaacaagggtataaatctatttgcaccacaaaaagaagtcaaaggttgatgatcacaaggccaaaaacagttttcccagtaaaaagatattgcccagttttcatcacacagttt

SEQ ID NO: 188427 - DNA, 637 bp, Homo sapiens
tatacaattttagacttgtttctcaatattacatcataatgcctatagcaactataattaatgatactcataattatgttagaaaaaaatgcaattctactagattgtattacatacaagacaattacaatgtgtattaaaagtgttactttgaataatgtatataaaatcgtatcaattacataatagtgattagcatttcatttttaataacctttattttatttttgaataatttcaaattttcaaaaaagttgcaatatagagagaattcataggtgcctctcatgcagttgcatgactttctcccatagactagggctcagagttggagagttcaatacaaatgtactcaatgaggatgacagaatcctaaaacaagagagaacacgtggtcccgctaagccttcagaaagcagggggacttattctacaaaatggcaaagtcaggagtggataatgaggcaaagaaactaacctgaagacaattaatgtaatcaattgtccctccaaaattgggagacaacaagggtataaatctatttgcaccacaaaaagaagtcaaagrttgatgatcacaaggccaaaaacagttttcccagtaaaaagatattgcccagttttcatcacacagttt

SEQ ID NO: 188428 - DNA, 410 bp, Homo sapiens
cagaaaagaagaaataaaattaactcagaaataaactcagaaattaacgcagaaatgactcagaaataactcagaaataaaattaactcagaaaagaagaaataaaattatctttgtttgcagttracataataatatatgcagaaaaccttaaagactaaacagaaattttattagaactaaggaaaattcagtaaagttccaggatacaaaatcaggatacaaaaatcagtagcatttctttctttttctttttgaaacagtctcactctgtcacccaagctggagtacagtggttcagtggcacgattatggctcactgcaacctctgcctcctgggttctagcaattctcctgcctcagcccccccaagtagctaggactacaagcgtgtgccaacatgctcaagt

SEQ ID NO: 188429 - DNA, 559 bp, Homo sapiens
tttgctcagtttctaggaatgatactcactgttgggagatttattctcagccaattactgcagatctgcataaacaccataattattagtgaccttacttctgatttctttctttctgtaaatctaatagccactttacttttaaacctttgtttagatgaggcataatttttggatacctaaaagctaaacattggttacactagaaaaattattaaacactagccttctgattaagagaaagttgctattaaagtgacattacagtttttattttaataagttatgctcacgtctttacaatatattatttcagaaagtgctgaaaattcagagctagattatatagcctaccagttgagtctatttcaaatcagatcttatacattcttttctttattgcagtaagatatatttaacataaaatttaccactctgacactttttaaagtgcacaattcagtggcattaaatacattcacattgttgtgcaactgtcaccaccrtccatctccagaacattttttgtcttcccaaactgaaattctgtacccatact

SEQ ID NO: 188430 - DNA, 498 bp, Homo sapiens
tagtacaatgaagttacttgggtattttgggccgagagtttccaggacatgggaaatggcagctgggtcccaggaaaggagagtgcagctggacaaagggacttcagagactcgctggaataaatggaaggaagggagttgaagttggggcctatgyccagcttttgtgtgttttttcttcacaaatttatggtgtggaatgtgtcatgtcctgcctggaaccctatttgtccagcctctgatacagggagccaatacaaaggagatagctactcaggaaaaagggacagggaagaggcccctcattagtttggctgcttccccaaacaggagactgtcagaaacttccctcctttgggtctccccccaggccctggtggaatgggagtgtggcaggaagtgggagcccatgatctgggccgaggtctcccaggccacagaggagaaaagggagggagtcagttctgttctgtgcgatctggcaggaagggtcaggga

SEQ ID NO: 188431 - DNA, 420 bp, Homo sapiens
ggtgaggttgggagagaggcctgcgatgagatggagaggaggaccctgccggccctgacaggagtctggactcttttaagtgaaatggaagccactgaaatgtttcaggcggggaggctcctgtccagatgtgcattctaaaaactcttattctgctgtgatccaaaaaatacgttgaaggtaggatcaaagatcttggatgcgaatggaaagagggaggaaaagggtgaaatcaagtgtgactcttcagtttctggctcaagtgacagtagaaaatactgcarttactgatatggatatgacctaaatggataggtacaagttttggggcagagatgggataacatgttatacacccttttcatggctggcacatatgtgaacacactcaatatgggaattattactactatctggaca

SEQ ID NO: 188432 - DNA, 420 bp, Homo sapiens
ggtgaggttgggagagaggcctgcgatgagatggagaggaggaccctgccggccctgacaggagtctggactcttttaagtgaaatggaagccactgaaatgtttcaggcggggaggctcctgtccagatgtgcattctaaaaactcttattctgctgtgatccaaaaaatacgttgaaggtaggatcaaagatcttggatgcgaatggaaagagggaggaaaagggtgaaatcaagtgtgactcttcagtttctggctcaagtgacagtagaaaatactgcaattactgatatggatatgacctaaatggataggtacaagttttggggcagagatgggataacatgttatayacccttttcatggctggcacatatgtgaacacactcaatatgggaattattactactatctggaca

SEQ ID NO: 188433 - DNA, 379 bp, Homo sapiens
ggaattctcccttatagacctggaaaaacaaagcaggcgtgagtttaaggcaacaggtccagtccccatcattgcaggacatgtgccatgcctgaccgtggccgggtttactgctccactgctggtgagtttagaatgagaaagaagcctgtcagttcaagagcagccagtgggcagsactgagggaaatccccattcactgtaattccctcctgctctgtgtttaccgagtgctcacaaatgtgggctggctaggagagggctcagggtaccctaaaaacaaaagcaccctgactgccaaatcccaatcactttagctgagagaggaagcaagccctaggcaatctctctcaagcaaccaacacagaactcacgcagt

SEQ ID NO: 188434 - DNA, 472 bp, Homo sapiens
aagttggacaagatggattggaatgtgaattgagttgggaatgtgtcgtgactgtgaaataggaacctcttactcttacagaaagtagtacagaggaaatttagcattaaggcattgatttcctggtggggggaagtttagtgtgcagaatgattaggaaatcatwttatttgaccacaggacatttatcaggcaggaatgctattatttctgttcaaaggaaatagtcccaaatcaagttttcagagacactgaaagacagttaatatatacaagtaaagtcaacagtaatttcatcaatttcctttcactggagtccttttcccctcttttctcaaactggggaacttttacttatcctttaaacatgagaatacagtagcgccatctctgagctcacagggcattctgaatgccctgttcttacggcagttatactgaattaccattaattgtaaatctatcttcttca

SEQ ID NO: 188435 - DNA, 385 bp, Homo sapiens
gcaacatagcaagacccctcactctrcaaaaaaaatttaaaaaatagccaggtatggtggcactcaactgtggtaccagccagtggggagctgaggcaggaagatggcttaaattcagaaggtcgaggcttcagtgagctataagtgcacaagtgctctccagcctgggcgacagagcaggaccctgtcacaatacaaattaagtaatgaaatcataagttagagcctttagcgtttgtagcccttgcaaccccggagccgtgcagtgggatttgcattgctgggaatgaagagacccctgcccagtattgctgcctgactaatcagtgttttaaaaaatatatgaatctgttgggaggccgaggcgggcggatcacgaggtcag

SEQ ID NO: 188436 - DNA, 375 bp, Homo sapiens
agatcttttgaggtcaggtgtttgaggccagcttgggcaacatagcaagacccctcactctacaaaaaaaatttaaaaaatagccaggtatggtggcactcaactgtggtaccagccagtggggagctgaggcaggaagatggcttaaattcagaaggtcgaggcttcagtgagctataagtgcacaagtgctctccagcctgggcgacagagcaggaccstgtcacaatacaaattaagtaatgaaatcataagttagagcctttagcgtttgtagcccttgcaaccccggagccgtgcagtgggatttgcattgctgggaatgaagagacccctgcccagtattgctgcctgactaatcagtgttttaaaaaa

SEQ ID NO: 188437 - DNA, 559 bp, Homo sapiens
caattattcttataatttgtcagttttcactttttgtttcagcatcaatgtgcctgttttaagattattaattgtatgttattgttatgtaattayactcttcaccttaatgttaacgttttttgtattaaaatctattttgtctgatattaataaattcactagttttattctgattagtatttttctagtatttctttttcacatccttttactttcaacattttatgccctcgtgttaaaatattctcttaaaaatgacatacagctgacttatttatctatttaattacttatttatgtagtcaatctctgtctgaataagtaagcttattttaattcctgagttgattgattgagtttttctgccagagtataagtccctgagacatggaaatctctgtctgttcaccataggcttaaatagtgcctgacaaatagtaagtgctaaatagatctttgtcgatttctgtgttatgtttggttatttctgccatattataggctttagtccacatgcttttcccccctcctaacctgccttctctcatattcttca

SEQ ID NO: 188438 - DNA, 559 bp, Homo sapiens
caattattcttataatttgtcagttttcactttttgtttcagcatcaatgtgcctgttttaagattattaattgtatgttattgttatgtaattacactcttcaccttaatgttaacgttttttgtattaaaatctattttgtctgatattaataaattcactakttttattctgattagtatttttctagtatttctttttcacatccttttactttcaacattttatgccctcgtgttaaaatattctcttaaaaatgacatacagctgacttatttatctatttaattacttatttatgtagtcaatctctgtctgaataagtaagcttattttaattcctgagttgattgattgagtttttctgccagagtataagtccctgagacatggaaatctctgtctgttcaccataggcttaaatagtgcctgacaaatagtaagtgctaaatagatctttgtcgatttctgtgttatgtttggttatttctgccatattataggctttagtccacatgcttttcccccctcctaacctgccttctctcatattcttca

SEQ ID NO: 188439 - DNA, 559 bp, Homo sapiens
caattattcttataatttgtcagttttcactttttgtttcagcatcaatgtgcctgttttaagattattaattgtatgttattgttatgtaattacactcttcaccttaatgttaacgttttttgtattaaaatctattttgtctgatattaataaattcactagttttattctgattagtatttttctagtatttctttttcacatccttttactttcaacattttatgccctcgtgttaaaatattctcttaaaaatgacatacagctgacttatttatytatttaattacttatttatgtagtcaatctctgtctgaataagtaagcttattttaattcctgagttgattgattgagtttttctgccagagtataagtccctgagacatggaaatctctgtctgttcaccataggcttaaatagtgcctgacaaatagtaagtgctaaatagatctttgtcgatttctgtgttatgtttggttatttctgccatattataggctttagtccacatgcttttcccccctcctaacctgccttctctcatattcttca

SEQ ID NO: 188440 - DNA, 559 bp, Homo sapiens
caattattcttataatttgtcagttttcactttttgtttcagcatcaatgtgcctgttttaagattattaattgtatgttattgttatgtaattacactcttcaccttaatgttaacgttttttgtattaaaatctattttgtctgatattaataaattcactagttttattctgattagtatttttctagtatttctttttcacatccttttactttcaacattttatgccctcgtgttaaaatattctcttaaaaatgacatacagctgacttatttatctatttaattrcttatttatgtagtcaatctctgtctgaataagtaagcttattttaattcctgagttgattgattgagtttttctgccagagtataagtccctgagacatggaaatctctgtctgttcaccataggcttaaatagtgcctgacaaatagtaagtgctaaatagatctttgtcgatttctgtgttatgtttggttatttctgccatattataggctttagtccacatgcttttcccccctcctaacctgccttctctcatattcttca

SEQ ID NO: 188441 - DNA, 494 bp, Homo sapiens
ttcctttgtagataatcttcttttatctctgatgcttttaagatcatgtcttcatttgaagttctacagtytaactacagatgtgtccaggaataatttttttttcttaacctgcttggtcactgtgttcacaatctaaggggtcaagtctttcataaattctgaaaaactgcaatccgtttcctttttaatactttagtccctgattctttctattctctcattcaagaattttaactggacatttgttacttttatttattctaccctccagatcattgaggctgcttattaaattgtccatgttctccatgtctttgtctgcttcattttgaaattttctcagatctgcattctcatccttcctttagctctgtctagatcactccttaatagattcaagattttcattccagtaattgtttttccactcctagaagttctcttgagatcttttttttatgtaatttgcttattttatttttatttttatc

SEQ ID NO: 188442 - DNA, 494 bp, Homo sapiens
ttcctttgtagataatcttcttttatctctgatgcttttaagatcatgtcttcatttgaagttctacagtttaactacagatgtgtccaggaataatttttttttcttaacctgcttggtyactgtgttcacaatctaaggggtcaagtctttcataaattctgaaaaactgcaatccgtttcctttttaatactttagtccctgattctttctattctctcattcaagaattttaactggacatttgttacttttatttattctaccctccagatcattgaggctgcttattaaattgtccatgttctccatgtctttgtctgcttcattttgaaattttctcagatctgcattctcatccttcctttagctctgtctagatcactccttaatagattcaagattttcattccagtaattgtttttccactcctagaagttctcttgagatcttttttttatgtaatttgcttattttatttttatttttatc

SEQ ID NO: 188443 - DNA, 595 bp, Homo sapiens
tccactcctagaagttctcttgagatcttttttttatgtaatttgcttattttatttttatttttatcttttgagatggagtctctctctgtcacccaggctggagtgctgtggcatgatctcggctcactgcaacctccgcctcccgggttcaagcaattctcctgcctcagcctcccgagtagctgtgattacaggcacgtgccaccacgcccagctaattttttgtatgctagtagagacaaggtttcwccatgttgcccaggctggtctgtcctgagctcagacaatccgcctgcctcagcctcccaaagtgctaagattagcaggcataagccactgcacccagcccttttgttaaatttaacatttattttaagttcagaggtacatgttcaagttatataggtaaacttgtcttatggggccccagtgtgtgtttttcccttctatgtgtccatgtgtttaaaatctttttcaaggcaacttttaaaaacctagttttattcttgtgatttttattatatttagtactttacacacgttttatattttgtatctaatagtgctatttctcaagatttcggaaagctaa

SEQ ID NO: 188444 - DNA, 595 bp, Homo sapiens
tccactcctagaagttctcttgagatcttttttttatgtaatttgcttattttatttttatttttatcttttgagatggagtctctctctgtcacccaggctggagtgctgtggcatgatctcggctcactgcaacctccgcctcccgggttcaagcaattctcctgcctcagcctcccgagtagctgtgattacaggcacgtgccaccacgcccagctaattttttgtatgctagtagagacaaggtttctccatgttgcccaggctggtctgtcctgagctcagacaatccgcctgcctcagcctcccaaagtgctaagattagcaggcataagccactgcacccagcccttttgttaaatttaacatttattttaagttcagaggtacatgttcaagttatataggtaaacttgtcttatggggccccagtgtgtgtttttcccttctatgtgtccatgtgtttaaaatctttttcaaggcaacttttaawaacctagttttattcttgtgatttttattatatttagtactttacacacgttttatattttgtatctaatagtgctatttctcaagatttcggaaagctaa

SEQ ID NO: 188445 - DNA, 540 bp, Homo sapiens
gcctgtctattgccccaaatgactacagaccaggtttctcattgtaatatttgccttccagctttttaaaatccccacacttttatgaaccaaactggggttcacttgcttggtacattatgaccagatatttacatcaaggtttatagtaggagaaagaaaggctttatttgcagggcaccaagcaagaaggatcaggcagctaacgcgtaagttccaaactccccgacgtattgcaggcaacagtttttaaaggcaagggtaaattttaggaaggcagaagttataagcaaaatcataatgcatggagagtatacattggttttggcctaaaagggcaggatatcttgaagcgggggctcccgggtcataagtagatttaaagactttttaatttctaattggttaacaaatagaagctttcttttaaaatttgaggtcagcagaaaagaatgttagctctggcatgtgggtgtgacttcctccagrcccctcaggaagacatttagaaccaagaatcatggttagagttcagtcctc

SEQ ID NO: 188446 - DNA, 641 bp, Homo sapiens
aatgagtgtatctggaatctagtaagagggatgactgtgctgtggaaatattactcacagtttgttctggtcttctcttgcctccccgtaatttcttttcttacataagtttcagctttgcctggcaatcagacaccttatatttttctttattatttattattttttttttgagatggagtctcgctctgtcaccaggctggagtgcaatggcgcgatctcggctcactacaacccccacctcctgggttcaagcgattgtctaatttttgtatttttagtagagatggggtttcaccatgttggccaggatggtctcgatctcttgaccttgtgatccgcccgcctaggcctcycaaagtgttgggattacaggcgtgagccactgcgcccggccttttctttattatttctttaatttgtctgcaattaatgtcttccaggttgtggcctctcccagaagactttatattttaaaaagaacagatcacagaaggataattttatggggcaggtggcctcctatacatgacttcccatgctttcatcctaacatcaaaatgtctcagaggggaaataattgcacctgtgagaaatgcaatggacttgtcaaaatacatgtataatatatagatccacat

SEQ ID NO: 188447 - DNA, 623 bp, Homo sapiens
atccccattacctaacacaattttcagggctctactttgctataggtctataaaaagccgatcaagatgaaatctgattcatgaaagctgacctcctgtctacattttgttttctttgaagtttctctcagagcccagaaagagacagaatgaaacaaatgtattttctcttgattcaccagaatggaaatatattctttacagagttttcagaaagtggttgtggttttggtttggctttgcagagtatttcctaacaattaactcaagaaagatagatgtctgtaggtttagctatgcaaatacaaaatgaccaggttatgattttttttwaaaaaaaggtaaatttttatgtgttggaaagtccgctgccacagcatatttaattaaggatagaacatttgcttagttttattatatgactaaaacacctgaggaaacatactcttttgaacatcccacaaatcctgttgacacattgctcatttatgcactcatcacacatttactggatacctcctctgtgtcagtcatcattctagacactggagaaacagccatgaacaagcagtgccctcataatgtctgcactctactgaagtaggcaaacactacctaaagaa

SEQ ID NO: 188448 - DNA, 480 bp, Homo sapiens
ttgactgtatcaatgtcagtatcctggctgtagaattctacagttttgcaagatattaccattgacggacactgggtaaaaaatatgctgagtcttgctgaagtttctttttactgatgtgtgtgaatctcaattatcccaacacaaaagtttaatttaataatatatattcaaaccttcagataaatcttaccaaaattaatttttttttaactatgatacatggtaccttagcctgttcaggctgttataacaaaatgccatagcctgggtagcttatgaacaacagaaatgtatttctcatcattccagaggctggaaaatcaaggcagtggcagactcagtgtccactgaaggccccttttctggttcatagttggtgcaytctagctgtgtcttcacatggtggacagagcaaacaagttcccttgggcctcttttcataagggcactaatgccattcacgagagttccattctt

SEQ ID NO: 188449 - DNA, 440 bp, Homo sapiens
taatttgctgtgcatctttggaaaagctatgtgtcttctctggttattgttttcttgttcctaaatgggaagcaccttacctcattgattatgggaatatcaagagataatgaatgtagagtgtctggcaccttaatagtgatcaataatggagtacattattaacattataattcagtgactcagccgcaaaactctgagagaagggatgaaggggcctgaatagaaggatgtgatatcaggtgtatgcatttagagattttcttaacacggaagtcattgttgagtasctcctaatttaatgccaaaaaaatcctcctcttaaaccaaaataatgcttgatgcacagtaggtagtacaaaatattttttgcatgagaatgagaacaagtgatttccaaagatgaaaaaggggaaaaaacctaataccagttgttgtgt

SEQ ID NO: 188450 - DNA, 440 bp, Homo sapiens
taatttgctgtgcatctttggaaaagctatgtgtcttctctggttattgttttcttgttcctaaatgggaagcaccttacctcattgattatgggaatatcaagagataatgaatgtagagtgtctggcaccttaatagtgatcaataatggagtacattattaacattataattcagtgactcagccgcaaaactctgagagaagggatgaaggggcctgaatagaaggatgtgatatcaggtgtatgcatttagagattttcttaacacggaagtcattgttgagtagctcctaatttaatgccaaaaaaatcctcctcttaaaccaaaataatgcttgatgcacagtaggtagtacaaaatattttttgcatgagaaygagaacaagtgatttccaaagatgaaaaaggggaaaaaacctaataccagttgttgtgt

SEQ ID NO: 188451 - DNA, 375 bp, Homo sapiens
gaattcagcccataagtttgagatttcaactccatgtgaatattttcttgagttttgaaagtttcgactcggattactgaacaccatttaactgtaatactctccaggagatctaaactcttggctaattacataagaaaagcggggaagagacattaatacaacaacagagaatacaagtaatttaagattgtcattggctatatttttgatttcatatagtagttttattgcataattttcttctacctctgctaattgatartgatgaaaactagtattctttaagcactgtatgatcaggcattgatgactgcggtgggtggggtaagatgattagatgattagagtgaggggggtgggcattccaggatt

SEQ ID NO: 188452 - DNA, 498 bp, Homo sapiens
tttttgttgaaattggtttataagtactataacttttcatgtaataagctgaattattaatgataatttaaaaacaaagaattatgtacaaaattattattactcatgaattatcatgattcataagcaaataatcttatcagaaatttcctgtagttaacatatataccaattttgaaagtcagcaaggctttsacttagaatttgagatgagatgcttctttatatatggaaatctaaaagaagagacaccttgatatatagatattagatattgctatccactctttactattagtagttagtttggttgtgatgaaacaacttttaatctgttttattcctgttaacctcagaaacaaaataactgtttttgaccactattattattatctacggctttggaactttaggacaaagtaataagacctgaaataaaaatgagagatataaacattggaagtaaagagaccaccgtattattacttaataatagat

SEQ ID NO: 188453 - DNA, 584 bp, Homo sapiens
aaagcccattaagtatgaaataattatgtagttgatattttgtacagtatatttatgcaaaaatccttggaagtgttactatgcaggtgcataggaaggtttaaacaggttcacgcctgtaatcccagcactttgggaggccaaggtgagcagatcacgaggtcaagagatggagrccatcctggacaacatgttgaaaccctgtctctactaaaaataaaaatttttgtaaaaatacaaaaattagctgggcgtggtggcgcatgcctgtagtcccagctactcaggaggctgaagcaggagaatcgcttgaacatgggagaattgcttgaaccagggaggcggaagttgcagtgaaccaagattgagccactgtactccagcctggtgatagagcaagactctgtcttaaaaaaaaaagaaaaaagaaattatctgatctcctgtgtgggccaacaaagtgcaagccgaacaaatcacacctatgttccacatgtggcttgttttcaacttctgacctttccaagggcagtcaatgtgtgaatgttccagtgacctctgacctatgagacagctgtcacaaa

SEQ ID NO: 188454 - DNA, 529 bp, Homo sapiens
tgggttccctggtgccttatgtagattgtttggtgaggtcatgtttccctggatgttctcgatgtttgtagatgtttatcaatgtctrggcataaagagtttatttgaagagttattaaagaagtgtttattgttgtctttgcagtctaggcttgtttgtacctatcctttctgggaaagttttccaagtatttaaagagaattgagtgttgtgatctaaatctttgatccctgcagccatctctgcattagggggcacctaaagtcctgtaacactgtgactctggcagactcattagaggtaccaccttggtggtcttgggtaaaatccaggagcattccctggactaccaggtagagactctaattctctctctttcctttcccctaacaagtggagtctctctctctgcgctgagctgcctgaagcttcaggagaggtgatacaagcactcctatggccatgacaactgggactatgctggataagatgcaaagactgcaaagcactgggtccctcccaagaccc

SEQ ID NO: 188455 - DNA, 410 bp, Homo sapiens
tttcaatttgatactgagtggtactagaaattattattttcccatggtctagggaagacagcaatagaaattatatrtagtttaaaggcctaaaaatatatatacatatatttttacgaagagtagttcacttctgtgttgagttttagtaacaccattaagtttcattttgaaaaacaaaaaagccaccatttgggtacatgtacataaggatgaccctcctaatgaagttcctccactatggcaaatgcatctgataggtttctaagctggctgtaggggacgaaaagcaaacatttgctaaccggttgcctaaggctggagtggtttgttgtcacagggaagaataaagtactctggttcactggggtatttaattcctgcttttcttaggggttctaacctgctga

SEQ ID NO: 188456 - DNA, 410 bp, Homo sapiens
tttcaatttgatactgagtggtactagaaattattattttcccatggtctagggaagacagcaatagaaattatatatagtttaaaggcctaaaaatatatatacatatatttttacraagagtagttcacttctgtgttgagttttagtaacaccattaagtttcattttgaaaaacaaaaaagccaccatttgggtacatgtacataaggatgaccctcctaatgaagttcctccactatggcaaatgcatctgataggtttctaagctggctgtaggggacgaaaagcaaacatttgctaaccggttgcctaaggctggagtggtttgttgtcacagggaagaataaagtactctggttcactggggtatttaattcctgcttttcttaggggttctaacctgctga

SEQ ID NO: 188457 - DNA, 423 bp, Homo sapiens
ctttatttcttcatattcctcctcttcccccaacccctatgcatcacaatcgataaattgacccaaactgaggaatamattgggcttaactgaggctctatgcaaagtctctcctaaacattacttcattcagttctaactctggccccactgcaagcacataaaaaggaaaggtgaggagtttatccggggatcacacagctgggccccaatgaaggattttctttctttcctgttcctttttgagacagaatgtcattctgccatccaggctggagtgcagtagcatgatctcagctcactgcaaactctacttcccgggttcaaccaattctcctgcctcagcctcctgagtatctgcgattacaggcgcccaccaccatgccggctaatttttgtgtttttatagagacagggttttgc

SEQ ID NO: 188458 - DNA, 586 bp, Homo sapiens
gtttataaccttctaaaaataattctttgtagctcaaggttcagaaagcttaatttgcattaatacatgatgtgctgtgaatgtgaatatcagggctttttatctgtgcctcagagagaagcatagacaataaccaaaccttgtagctctttcaaaagacagacaggtaaggtgttcatttctattccctcttgctgcagggcgagggtggagaagactgaggcataacttggttattactttgctacttaggaagataaacaacagggtacccaaggagggcagcacattttggaaagcagaccaacgctggatgatctgagcttcagctggctctgagttctgtgaggtcttccatgggggcacttgtttcataggcagcagggagcttgggagattaaagagactctcaactytcagcccaactttcatactcttaaccctggggaaacagattatgtcattcttgtgcatttatctcactggtgacctcttccaacttacacagagaatatgacctttcttatatgagtaagtataagttggggattttacccaaaacaagccctcagaataaaaggtacag

SEQ ID NO: 188459 - DNA, 573 bp, Homo sapiens
acaggcctcttttatgtatgctatgttttgttcatttacaggtaggggaataaagcaactattccttcactagcaccagtctttactgaggacttttacacatggttttcactgtcttggaagtctttcccctctagtggaagctgccaaaaccctacttgtcttttagggctcagctaaaatgtcacctaaacatacagcgttccctgaattctctcagctgaacttcattagaacatatgctgtgttttcccctttgtgactaactctgacaaatagaggctgaagaattgttctaaggagctgtgttcctatataacttttctagcaagactgagcatgttgtcatttttttttaataaaatrgtggccagattagtaatggaccaccttgtatttactctctttccttcctggcgcactgcatttttttctctcactcttgcagccctggattacatctcctattaatccttagtatatttgaaacaagagagggacctgggtgtgggggaatttgccttctgtgctccaattcaaccctgagcattgtgtcactttttatagttactg

SEQ ID NO: 188460 - DNA, 643 bp, Homo sapiens
catcaagaaaaaatagctttggaattgtcaaaagtgtcacaaactctctatacaaaaacaccatagcagagactgataatctatccatcaaatccattcttttttccctggacactgaattagacatttcccaggcttcctggcagttagatgtgaccacgcgactgagtcctaaccaataggattacgagtgatgtatggcacttcctgatctggtccataaaacctcccaccgttatttatctatctstttcttcttcctctgggtggatacagatgacatcaagataccaggtgatagaggaaacccaagatggaaaaagcccggatagctgaatcatcctttgaaagataactacctggtgacctcaaccctaacctggactcttctgtatgagacataaacttctattatgactgagccatttcatatttgagtatacagtagtcccctcttatccatgatttttttcccatggtttcagtcacccacgatcaaccatcgtccaaaatgttaaatgaaaaattccagaaataagcaatctataattttcagttgtggactgagtagtatgtggaaatcttgtgccatcttgcccgagacatgaatcattcctttgtccagtgtatccatgctgtagat

SEQ ID NO: 188461 - DNA, 604 bp, Homo sapiens
atgtgtgtatgtatatatatatattcaacttcataagaactgtctaacctttttacggagtggttttaccattttacaatactgtctgtgatgaataagagctttggttgcttcatattctcaccaacgtgcattattgtgattcttcgtaattgtagccatgtttttggtataaagcagtatctcatttttcctttaatcaggatatctttgctaactaatgaagctgaccattttttcccatggcttttattcayatttcttcttttctgaaattgctatataaatctacctatttttgtttgacttctattgaattccagagtttatacattctagatataaatattttgagatatagtttgcctatggatatcttgcccattttgttgatgttttttgagaaatagaagttttttaatttaatgaatttattaatcttaactggttagtgctttttctattctaagaaatctttgcttactcaaaggatacaaaaatatttttgtgttgctttcaagaagctgtaagattttatctttttatctcgggatctttaattcactctaacttttgtgtggtataaagctgggatgtaagttcg

SEQ ID NO: 188462 - DNA, 431 bp, Homo sapiens
gaattctttattctaggtattaaagccttatcaggtatgttttgcaatttttttctacttttaaggttttttaaaaactgcacaaagttcttaattttgatgaaatccaatatacctatttttactttcattgcttgtgcttgtagttattaatttttwaaaaacttttgattttgttgatgtttctgtattttgcttgcctttttattaatttctgatctgatctcttttactttattatcttcttctatgcatactgtgggtttaatttgctcttctttgctctctcatggtgaaaatttagatcattagaccagttttcctatgagcactgtcttagctgcatctcacaagattgggtacattgagttctattataatttaattcaaaatatttttaaattatccttctgtgagttatttagaaatat

SEQ ID NO: 188463 - DNA, 431 bp, Homo sapiens
gaattctttattctaggtattaaagccttatcaggtatgttttgcaatttttttctacttttaaggttttttaaaaactgcacaaagttcttaattttgatgaaatccaatatacctatttttactttcattgcttgtgcttgtagttattaatttttaaaaaacttttgattttgttgatgtttctgtattttgcttgcctttttattaatttctgatctgatctcttttactttattatcttcttctatgcatactgtgggtttaatttgctcttctttgctctctcatggtgaaaatttagatcattagaccarttttcctatgagcactgtcttagctgcatctcacaagattgggtacattgagttctattataatttaattcaaaatatttttaaattatccttctgtgagttatttagaaatat

SEQ ID NO: 188464 - DNA, 604 bp, Homo sapiens
ctctattttatttccatttttagcatcgtgcttgattttagatagcttcctgtcattcttcaacctctctgatctcttttggcatttgaagtctgctaatgttcatccagtgatttttttttttccagacagtatttttcatttctagaattttcatttggctctcttatagtttgtatttgtctgttggggtttgccatttgttaactcattatgtccatcttttatttaaactattgaatatatttacaataacttttgaaatcattgttcactaattctaacgtttctgtcatgtctgggtttctgtattctgttttgtttctcatgattattttttcaagattttgttttccagtaattactgagtgtgtgctaggcatagtaaatgctatgttgttgggactctgggttgtattatcatcctttaaagatgactgcgttttgttctggagttttatttgttttgcaactggactttcaacttggttttaggctttgttgggacaaatctaaagtagctttattttagggttagagttgccwtactctttaagatatggcctttataaggtttcaactagatgccctgggtattcagcaa

SEQ ID NO: 188465 - DNA, 491 bp, Homo sapiens
acataataatagcccttccccccaaactagagcacatttttaaagctaatgagagaccaccaggctaggaagatgagatgagcctgaattctgcttacatgtagacataaacaattacctgccattattctggaggtcacaggtttgcaacttcctcagttactcctgcagataatatccttgttgtagaatctaagattggcctttcaagatgtctttacggggtttttttttgcatgtctcatgatgaccatagctccacctggactgcagaccactcctgtggcccagccagaagtgactaagctcacatgaggacgatttcccacacccctatgattgcacacccaaccaattggcaacaagcacccattgcctagccacccctttctctttgctcaaactatccttgaaaaatgctagcctccaaattttcagggagactgatttgagtcataataaaacacatatayacacaaaacaaaatacca

SEQ ID NO: 188466 - DNA, 486 bp, Homo sapiens
ccgggtctcatttcaagtgggggccaccgtgttcggactcaaggacacagagccattcccagaagccctgctcagtyaaggccaacgagtgacagggcacacccagtgacagggcagagggcaggggccaaagggttcacctcaggacacagatgacacatggccagcaagacgaagctgcaggcacacagtcagcagcagggcagcagaggagcagcaagtggggattctcctggcatagagcagcgaatggcaaattgcccacagctgcttctagatcaggtcctgttttgaggccgacgtgagattctctcaggcctaagacccactcaccctattgtgaaaagccaggtaacacacggcaagagccaggctctgacacctggcaggcctcatccaaaacctccttttttctcttctttttttttttttttttgagatggagtctcactctttcacccaagctggaatgcagtggtgagatct

SEQ ID NO: 188467 - DNA, 558 bp, Homo sapiens
accaaatcctaggccagtcattcgcttggcttgggaggattccataatatgtagcatggaaactgttgtacaaggagttgcctaccaccgcttttctcaaaaacaagcaatggtccaagcagacctttagtccaatacatttataccttacgtttgggaatatacatgaaaagaccttaggtgaagcctgacttcagcatgtgtgtgcattgctagcagatgtaacaactttgggttgagcattgactccctaaaaacccctatttacattactactctcatagtttatagaagtaaaatctcagtgttttatacattgtaatatatgtgcatttctgcctattattttttctgaaagtcatatttgaactctgtttctttagcagatggaatcttacatatttctttttaaaatggcctaaaaagaaatacagggacattctttctaagcttcttaaaaaaaattttactgtatyaaatgacccctcctgatgcagaggaagctatttagatttcatcctccctcactcggtggtctaagactcctttgactgcatt

SEQ ID NO: 188468 - DNA, 607 bp, Homo sapiens
accttgaactcctgagcacaaaaatcctccttcagccttccaaatagctgggattacaggtgtgtgccaccatgctggactagtttttctttttatttttgggggagagatgaggtctcactgtgtttcccaggctattcttgaacttytggcttcaagcagtactccttccttggcttcccaaagtgcaagaattacaggtgtgagtcaccatgccctggccctagagtgtaattacatatttttcatcacacattctctctaaacacaaagaacacatgctcttaaacaagatccagaaacagacaattctactggctgtatctgtatttactttgaacacattatctcattatacggcagattcttcattgtaacaaacatccctaaagtggaatgaagaaaatgaatgcatgcgtactccacagggtattttctaggggagaaataactttatattctagcttggaaacatttctattctacaattttggagagaagataattgatatctttgcacacatatctttttgtctgataatgagatacatattttataaatattcatgttgctataaaccaggttggtcttagatgggataggcaa

SEQ ID NO: 188469 - DNA, 382 bp, Homo sapiens
gaaggtgcactctgaggaaggcattgatggtaccagcatcaagtgcagatcaacagagattcacttcctctgccaattctctattcttgtgtaaaaagagaaaacatacatgaatgggtgcaacatctgttgaactgtttttaatgtgccaaagtagaatgggattttcagtttaaraaacagggtttaaaaaagaagtaaggagaaaaatgtggtgcaaaattaggaaagaaaatatttatgtaaagaaatcttcatgagaaataatatgaatatcccactgaagataggttgacaggcagcttgatgggatagctgattgagacagagaagagattctggatttaaaaaatacagtgacaattaaatgcaacagaaattt

SEQ ID NO: 188470 - DNA, 475 bp, Homo sapiens
gtgagtctcagggaggcttaaattcatggatgtttctgtgccatttctgaacatgattaaaggttagttacttaagtgccgcataacaatattagtactgttctgatctccattcacatgtatgaatccatcaaaacacaaaatgagtctttccagtggtgtatttaagcatttgatccagtggtatatttaagcatttgagtgaaatggtgttgggatgattattaaatgtgaaaaagaatgaattcttagcatgagaaaattaataatcagtaaatattttaaggcgtgtcttgtcctcttattcaaggcaatgggatttttgtatgcactttacgaacagtaaggggatggtccttagggtctagtaaatgtgarccatttttggagagtttctaagaagctttcacaaagcaaccaaaattattcaaaattgattttctgcactgtagcatggacatctatgagaataaga

SEQ ID NO: 188471 - DNA, 438 bp, Homo sapiens
ggggctcttcccccttcatgcactttctttctctctctccggccactttgtgaagaaggtgcctgcttccccttctcccatgattgtaagtttcctgaggcctccccattcatgtggaactgtgagtcaattaaacctctttcctttataaattacccagtctcagacaagtccttgatagcagtgtgaaaacagactaatacaatgaataattatttgaataaatgaatgaatattttatgtaaaaaataatataatgaaagagcaggaacaaaaataaaacagttgctttaagcataagttatctaaacaaatcggcaattgtcagcaaatactcgagggcatagatgtggcagagacaacatcgtatgccctccgcattatttcctctttctgagcacayatttctagcttccctagtaattgggggactaagtt

SEQ ID NO: 188472 - DNA, 557 bp, Homo sapiens
tcagcaatctctgccagctcctcaagaatagaaaggaggcctgggtgttgggtactcaaaaaaattccaatgtctaccaaagttttggccccattctactgcaattatatgggtattgtccctctttctcataagctctgaactactccacccagacacttgcttttctttgtattctccatatcatatggcacattgcctgactcaaaataggtgatcaagaaatgtgttggrttgttgttgtttgttttgtttttaatacaagagctcatagagctcttgagagccatagaccagagggttaaactaagtaactaaacatattatatatatatataaacaagatcaataatagttaaaacaccctggacccagcagcagggtcatcctgaattcacaggggatgaaaggccaggtagctaagaatagcagtcattctgacctgggttgcacaaaggaaagggatccaggaagaggtacccagaaactgctgaccaagaaaacctgtgaataagttgggatcaaaatctagactctataaattaaagaatttttta

SEQ ID NO: 188473 - DNA, 577 bp, Homo sapiens
catgtatagaaaaacttaatattgtaagggtattagtttccttctaggtgaacagatgtaaatttattgcaattccaaccacaatctcagcaggactgccacagactaggagaaaatatttgtaattcaaatatccaacaaaaatgattgtccagaatatataaaaaataccacaggacaaattttttttaaacacaargggatcatcaatatataggtgattgtttttaaaatgtcaacaaattctgtctatattcccttcaaaaagcagagctaattctcctctccttgagtatgatctggatttagtaacaatttgaacaagtagaataagatggaaataggataatatgtgtgacttctaataagtcatataagggatcatggcttcctccttgctcactcttgaattacttacactggagtaagctaaccactatgtcatgaggacactcaagcagccctatgggttggtccatgttacaaggagctgagaccttcaaccaatagccatatgagtcagccatcttggaagcagattccatgccccagtcaagccttcagatgacccagctga

SEQ ID NO: 188474 - DNA, 590 bp, Homo sapiens
tatagaaaaacttaatattgtaagggtattagtttccttctaggtgaacagatgtaaatttattgcaattccaaccacaatctcagcaggactgccacagactaggagaaaatatttgtaattcaaatatccaacaaaaatgattgtccagaatatataaaaaataccacaggacaaattttttttaaacacaaagggatcatcaatatataggtgattgtttttaaaatgtcaacaaattctgtctatattcccttcaaaaarcagagctaattctcctctccttgagtatgatctggatttagtaacaatttgaacaagtagaataagatggaaataggataatatgtgtgacttctaataagtcatataagggatcatggcttcctccttgctcactcttgaattacttacactggagtaagctaaccactatgtcatgaggacactcaagcagccctatgggttggtccatgttacaaggagctgagaccttcaaccaatagccatatgagtcagccatcttggaagcagattccatgccccagtcaagccttcagatgacccagctgacatcttgactttatttt

SEQ ID NO: 188475 - DNA, 577 bp, Homo sapiens
catgtatagaaaaacttaatattgtaagggtattagtttccttctaggtgaacagatgtaaatttattgcaattccaaccacaatctcagcaggactgccacagactaggagaaaatatttgtaattcaaatatccaacaaaaatgattgtccagaatatataaaaaataccacaggacaaattttttttaaacacaaagggatcatcaatatataggtgattgtttttaaaatgtcaacaaattctgtctatattcccttcaaaaagcagagctaattctcctctccttgagtatgatctggatttagtaacaatttgaacaagtagaataagatggaaatargataatatgtgtgacttctaataagtcatataagggatcatggcttcctccttgctcactcttgaattacttacactggagtaagctaaccactatgtcatgaggacactcaagcagccctatgggttggtccatgttacaaggagctgagaccttcaaccaatagccatatgagtcagccatcttggaagcagattccatgccccagtcaagccttcagatgacccagctga

SEQ ID NO: 188476 - DNA, 590 bp, Homo sapiens
ttcaacggtgacatggaatcttcagttacagtatgtgaggtgggtagttgtggaagcaaaaacaagctcctactgtgagagcaagaaagatgctgcctgtattacaactgagccacctggcctgggaaatacagtgacaacttaattgaacaattggttctgcaactggtggacttttacattttctgaacaagaccatcaattaccataaaaacagaacatagcatgtttcttgcagttgaagcaatacataacaattaagggatggaatctattgtgtatagaacccccccccccmaaaaaagatgaaacccaaattctgactgagtctgtggaaattcagttcattttcttaccagaatccttcttgtgaaaactgatcagagcttaccttgctgcttttctgtgccacttacggaatttgaggtgatgactttggccctgacatcctcttgccaaattctcccttgttctacttgccacacctatttttggctagcctctgagatatcccacctggaggctgctaaccaaagctacaggcaagatgttgcctacagatctggcatgatgtggaggtggatgagcag

SEQ ID NO: 188477 - DNA, 402 bp, Homo sapiens
ggtgtctgaaatggatgagtgacaggaagaggagtcagagagggaatggttgggggaagggacagatcatgcagagcctcattggtcttaatgagggccttggtctactttgagagtaatggggagaatcaaccttggaggacaaggatggaagcttgaagaccagctaaaaggcaactgcaagaatccatgcaagggatgtttgtggatcagaccaaagtggttgcagtggagatagtaagaagtggtaacgagattccagatattagggttttttgaaaggttagatgtggaatgtgagcaaaagagaggagtcagggatgcttccaagrcaattggctcgggcacttaaacacatgaagctgtccttaactgagatgtgaaagaaggcaaggaaagcca

SEQ ID NO: 188478 - DNA, 532 bp, Homo sapiens
ggaaaggtgaatttgctctctgcttgagctgggacatctatcttctgcccttgggcaacagcactcctggttctgatgccctcacactcaggctggaattactccatcagctttcctgggccttcagcttgcagatgcagattgtgagacttctcagcctccataatctcatggaccaaamtttcataataaatctctttttatatgtctctctaagtatcttactaggtctatttctctggagaacctgactaatacaccatcttcaggtaatgccctttgtaatttattgtctgccagtatgttgggagtatactggtctccattaaaagctgtctaacaactttggaagaggattacaagggagctttatcaatagatggctgtggtgttcgctttggcagcatgtgtattaagattgcaccaatacagagaagattaggatggccccagtgccaggatgacacacaaatttgtgaagtgtttaatttaaaaaataaaaacaaaaaagagatagtttttatggtagata

SEQ ID NO: 188479 - DNA, 604 bp, Homo sapiens
aacaaatgttatcttccaatctagggttctcactagttctagaaataatcattatctattttaagcagcaggaaagaccctcattcttctctgatccaagagactccataagctttggccctagaagcrctaactcagtctcagacacctagacatctgaccttgaaaatatagccccctccctctccctcagaacacaaaagcaaaattatttccctcaaaattcacttgacatgatgggtcctgggctgctctcctaatttataggtgtttagacttagaaggaagacccagtattgcctagtccaatccatctcattttgtagtgggggaaaatgaggtcttgagaaaggaagggattttcttaacaaggtcagttgcagacccagactccttgactctcgaaataatgcttttcttcaatgaccgagttcattcattgatttgttcattcaaacatttgatgagcatctactacacgccagggctataatagcaaacaaaaccagacatggtccctgacctcagagagttcacagcctagtaagccatcacagatttttttccaaatttccattgaaacatcactagaccaggattcagg

SEQ ID NO: 188480 - DNA, 588 bp, Homo sapiens
cctcagcggggcagtttattctgtttttaaaactgtagtcagtttctcttcaaccattatgcaagaggatatgggagaagccacacatcaagaggcaccttttggaaatctaccagcaaggttgatggagcaacctggaaatayaaggctaacagcagacaagggttccaaaaggcctcactcagacctgtctttctgcttctctcatgcggaggttcacagctaccttactgctcaaaaagggactttcttctcagatgagacctcctgactacctccccaatctggcagtttgacaaaattccgtagattttaaggtgctcatggtgtgaaagtgttgggaaccttccagactgagtctctttcagttcttcaagagttacacgcttgttatctgcaggcctttgcccatgtggtcatctcaccttggaacactctccctattgttccccactccatttgcctaaatcctggagagcacaactttctccaggaagaaaaccatctggaggtagctgagatgaaacttcctccagatggttttcctcaagcctcccccatcaccttaaagaatcaggttgccctccc

SEQ ID NO: 188481 - DNA, 588 bp, Homo sapiens
cctcagcggggcagtttattctgtttttaaaactgtagtcagtttctcttcaaccattatgcaagaggatatgggagaagccacacatcaagaggcaccttttggaaatctaccagcaaggttgatggagcaacctggaaatacaaggctaacagcagacaagggttccaaaaggcctcactcagacctgtctttctgcttctctcatgcggaggttcacagctaccttactgctcaaaaagggactttcttctcagatgagacctcctgactacctccccaatctggcagtttgacaaaattccrtagattttaaggtgctcatggtgtgaaagtgttgggaaccttccagactgagtctctttcagttcttcaagagttacacgcttgttatctgcaggcctttgcccatgtggtcatctcaccttggaacactctccctattgttccccactccatttgcctaaatcctggagagcacaactttctccaggaagaaaaccatctggaggtagctgagatgaaacttcctccagatggttttcctcaagcctcccccatcaccttaaagaatcaggttgccctccc

SEQ ID NO: 188482 - DNA, 626 bp, Homo sapiens
tttggatgtttcttgttattttttgcttttatcttaccagctgctggtttcaccaaagagacaaagagacaccagcaagatggaaatatcaggctcccattattctttttattttgctcctttccagttgtgtgacagctggttggctacctctggaaatgtattatggcctctgagatttggtgaatcggagaagtatgagcagacacacacatctattgccttcaggccaggagaaataatattatctcccttgtgggaacagtttattctcagagtgctttgatttaagcttacaaggagaaatgcccagttatggagcaatttcccggaatattctgttttagctgcctggcagtcctttgtgctaaatgataatggcccacatctggagaagcctggtgggggtctccctggatgmcttggctttctggtttcaatcaaagtgtcttatcattctctcacaggtgcttggaaatgtaatgaacttgtggagagcacaatgaatatgcagcgctgaaagggatattttgatccaagccctttattctgtagataaggaaagggagccctagagaggtgaagtggcttgccaaagtcacccagcagattatggccaggattat

SEQ ID NO: 188483 - DNA, 544 bp, Homo sapiens
aaagagactaaaaatagtttaaatgtaaaaatgtcatgttcacctaactcagatttagaaagcccaccacaaatcttggtgggaaattctgcctcccataatgagaactgtcactttaaggcctgtaattttactggatttgcacaaggggagctttgaaccacaatcttcatttatttattgtcttcatttattattcaagttttctctttcctgtctgggcatccacattggtggaaaattcttagagtcatgcttaagattaatmaaatgaacggagatgctctttacaccttgcttctagaggccagtgtggagagcatcaaagagacccaacatgttccaggtctgttccttattgttgaccatactcaggacactaccttgacattggcactgcacactcatgacagggtggagtatcttgttcaactggagccatctcatgcatttatcttggcttttccttgacaaaacttgattagattctgttctgtggctatttcaactttgaatggagatgtaatctcttggattttttttt

SEQ ID NO: 188484 - DNA, 544 bp, Homo sapiens
aaagagactaaaaatagtttaaatgtaaaaatgtcatgttcacctaactcagatttagaaagcccaccacaaatcttggtgggaaattctgcctcccataatgagaactgtcactttaaggcctgtaattttactggatttgcacaaggggagctttgaaccacaatcttcatttatttattgtcttcatttattattcaagttttctctttcctgtctgggcatccacattggtggaaaattcttagagtcatgcttaagattaatcaaatgaacggagatgctctttacaccttgcttctagaggccagtgtggagagcatcaaagagacccaacatgttccaggtctgttccttattgttgaccatactcaggrcactaccttgacattggcactgcacactcatgacagggtggagtatcttgttcaactggagccatctcatgcatttatcttggcttttccttgacaaaacttgattagattctgttctgtggctatttcaactttgaatggagatgtaatctcttggattttttttt

SEQ ID NO: 188485 - DNA, 428 bp, Homo sapiens
caacattatgtggaagctgccaaggctaggggcttacrccctctgaggcaacagtctgagctgtaccctggcctcttttagccaagcctggagcggctgggatgcagggcaccaaatcccagggctgcacataggaggggggccctggacccagcccatgaaaaattttttgcctaagcctctgggcctgtgatgggaggggcggccatgaagttttctgacatgccttgaagacattttccccattgtcttgacgattaacatttggctcctcattacttttacaaatttctgcagtagcttccatttctccccagaaaattgtttttgcttttctatcacatcactaggctgcaaactttccaaacatttatgctctgcttcttcttgaactctttgccacttagaaatttattctgccagatatc

SEQ ID NO: 188486 - DNA, 415 bp, Homo sapiens
ttaatgatatatctgacacatctggttctcacaaagtgtgatttggatccagaagaaacggaacctaaaattaccacgaatgcagtgatacagctttgtgagacaggtgtttcagtggcaacatttctgtacatgctcatcaacaagtccctgtatactgtttaagaacaatttaayagtataactatgtagctaaaaaactagagataattttaaaatgatttgaatttttcttgctatatctcaattttagattaattttgtatctttttttcagaattattgattatacatgaaatcaagttttatgagacagaactatttcagtggaagccaaaagggtaaactgaaaaaaaaagaatactggctgaaactttaaatgtcaaagctctcttattatatcacaaaaataact

SEQ ID NO: 188487 - DNA, 415 bp, Homo sapiens
ttaatgatatatctgacacatctggttctcacaaagtgtgatttggatccagaagaaacggaacctaaaattaccacgaatgcagtgatacagctttgtgagacaggtgtttcagtggcaacatttctgtacatgctcatcaacaagtccctgtatactgtttaagaacaatttaatagtataactatgtagctaaaaaactagagataattttaaaatgatttgaatttttcttgctatatctcaattttagattaattttgtatctttttttcagaattattgattatacatgaaatcaagttttatgagacagaactatttcagtggaagccaaaagggtaaactgaaaaaaaaagaatactggctgaaackttaaatgtcaaagctctcttattatatcacaaaaataact

SEQ ID NO: 188488 - DNA, 598 bp, Homo sapiens
agagcacattgtcaaactaaataacgagaaagagagagaggtactcctatttaaaaaaaaaaaaaagatatttattcattcaggagcatggcattgcaacaggaatatgcatgccatagtaaactatrtgcatattcatggaggtaaaaaaagactaaggtttccaaaggaaaaatgaggaggattacacatcattatcttcggctacaaagatcaataataagggtgatgccagtccaagtctggacagacagttgttgggcagatgtcctcgcagaagcattttttatgtaaggctgtgatggcctttgtgtaaagttgcagtttctgtagagtctgagatagttttgttattaagcatacaagcataagaactctatagccttttccggctctatttgtcagggattttttataacactagtgactcagttttgattttgacaacattcaggcatgaaggaggcacatatgccatcttaacaccttcctggtaggacccatgtcacttctactcatactccactagagagaacttattctcatggccacatataatgccaagatggggctgggaaatgtagaccctggtttggaa

SEQ ID NO: 188489 - DNA, 422 bp, Homo sapiens
cttatccctcactgtatttgctccttcttgtttctttttaacttctctcatgttttcgtctagcttttgcttttctctttgtttctcttctgcctctttcctggtctctgtgttgctgtatctatccccctctctctctgactctccttacatcatatttatgcctttttgcacaaagtgagggcatgcaaaggcctcttgagcttctgttcttcacccaaatctgtgggaaggacagtgaggccatgccatttgttaggcagatttcataatattttcctcagatgatgatwtggtgacgtaaggatattttggtcccactgagaagaagctagggatctcactgggcttgtggattagacaagcaggggccagatttttttcaggttgtaaagagatttgccctggttttaatataagtg

SEQ ID NO: 188490 - DNA, 445 bp, Homo sapiens
cagggtagaagtcagatggataaaacagacattgagtgcctaccgtagatcagggtatctggtaagagccagagaaatagaggtaactgactttctttcaggaacacgtagtctagtagtgagagcttcctgggtaagagagaggattgtttacttgtctaagtgttaacaacaaagagaagtatacggtactacgagagtaagttattaggcctatgacaatcagggaaggctccatggagatggtgatatttgatatggaccttgaagcacaatacaagctttccaggtagaaaagcgtgaagaartttctttgtgaaggaaatagcacaggagcataaagcagtctgggattattgagaacataacgtgtatggggataaggttggaaaattatgttggggcccagacctgagagctttgaatactgggatgagaaatttgg

SEQ ID NO: 188491 - DNA, 499 bp, Homo sapiens
ctgggtgggaccagtggtatatggcagaagtgatgatatgtcacttctaatattaggttataaatactacttttctgtgttggtgcctcttgctttctcttgatcacctgccctgggggaagccagctgccatgttgtggggctgtggccaggaactgaggcctcccaccaacagccatgtgtgtcagccattgagaaagcagatctttcagctgttgtcaaacttttgggtaactgcaacctcatgagagaccctgaamcagaaccatccagcctagctgctcctagattctggatgcatcagtaccatgtgagataatgagtactgttccaagttgctaaattttggactaatttgttattcagcaatagataactaatacatgaggcttggaaaagttaaaggcacacagattgtaaggagcaaagatagaaatggatacctgaatttttggctccctcgtccttgctaacacactgtaaggtaaggggatgtgct

SEQ ID NO: 188492 - DNA, 597 bp, Homo sapiens
gccagaagagcagtgacttatggcctccaaggaaataatcctgcttcttctccctttcctttcccaggtatcagatcagcatctcagtctgaaggctttccctgcccaattctgacttctctcccttttcaattttacaaacattgccctcaatataccactggtattctgaactcatctcggtgtctgcttcccagaggacccaatggccatgaatattgcctccagtttaacacagtatctaacacatagcaagggcacagtaaatggtaggcacaatagcrttggcagtcatactgttattgctgttgttattattatttctcctgactaagagaaacttgcagcccttctggtcaagggaaaccaaagtgacaaatacacaggaaatctgttctcaatctgaccagaaattcgcagaaggaacaaatattctgcagggctggcagtgaacgtgaagcgtagatctggccctcagcgtacgtcaggaagatcattgttttatacatgctcgcatcatttgtgattgttcttctcacaaaaaggacatggcattcatttggagtctgcaagcacctcaggtttccagaaaaatga

SEQ ID NO: 188493 - DNA, 604 bp, Homo sapiens
cccaatatattgtgaacatttatatactgggcccataataaaggtgtcatattgtgtatattatcttgagacttgtttttcctattgagtattatgtttttgagatttatctacatggatacatgaagccatagttcattcattttcactgctgcacagtgttttatagcatcaattcctactctatccatttcctgtgacaaacatttgtactatttctgatattttaaaattataaacaatgctgtcctgaatcttcktaggaacatctcttgccacaaaagtttaataatttctaataccttgttccttatttccatctgagatctcatcaaaatggtctttactatctgtacttttatcagcattctggttatgagcacttaagtaatctctcaaaaaattcaagctttccctgcagactttttctgagccttcaccagaattgcccttaatattcatcagttcatggcaatacaggctatttctagcctgtccttccaaattattccatccactacccattacccagttccaaagctgcttccacattttcagctatttgttgtagcaacaaagccactcctggtaccaatttccagtc

SEQ ID NO: 188494 - DNA, 532 bp, Homo sapiens
atctaggtacaaatctttttaagtttcataaaaacttcctgttggaattttggttgaaacaatttgatactatagattacattcaggaaaatgacatctctatgatattgacttttcctatccatgaacatagtaaacatttacatttattagttttttctgaattgttttacacttttctccctagaggtcttgtatgtatgtacacacatctccccccaacatataatatatactttatgcattttatgtttgaatagwtgctaccttttcaaaggttacttatttcaagtgcctcttcaatcttaatttgtaattcacttttgcatattgatgttatatcaatcactttagtctcttattataataattggcatattttttcagtttctgacaattgaaaattaccaaatacactatgagttttccttttcttatcgtttttatttcttttcttgacttactgcattggttaggaccaatattgaatagggaattattgttttgttcttttctcctagcaaattgtttc

SEQ ID NO: 188495 - DNA, 535 bp, Homo sapiens
taaatatttgtatttactatgacaggcactgagataagaatcttacatgcattaatttatttaattcttagagtcttttgaagggtgtcttactataatttccattttacagatgatgaaactgaagtttagggaggataagctagctacctgctccaaatcacatagcaaatgtggtagagccgggatctgaaagcaggtctaaatgtgccaaagcccatgctttttagcattacttyatgcttgctttacacaaggatcacagtgtgctttgttttaagcccaatgcctctcctgctttcaaatgactgtgttaaaaaatcacatagtttcccatgccctgctcctccttctatagccaggtcatgctggatcctggaggtgcctgttgactgctctcaataaatgctgccaagaggcattaccaaaatgtgaaatgattttcatttggagaggaaaaaacgtgagtaataagaagtagattccaaaagcaacaagcactggactattttttttcttcaagaaatgttaaact

SEQ ID NO: 188496 - DNA, 535 bp, Homo sapiens
taaatatttgtatttactatgacaggcactgagataagaatcttacatgcattaatttatttaattcttagagtcttttgaagggtgtcttactataatttccattttacagatgatgaaactgaagtttagggaggataagctagctacctgctccaaatcacatagcaaatgtggtagagccgggatctgaaagcaggtctaaatgtgccaaagcccatgctttttagcattactttatgcttgctttacacaaggatcacagtgtgctttgttttaagcccaatgcctctcctgctttcaaatgactgtgttaaaaaatcacatagtttcccatgccctgctcctccttctatagccaggtcatgctggatcctggaggtgcctgttgactgctctcaataaatgctgccaagrggcattaccaaaatgtgaaatgattttcatttggagaggaaaaaacgtgagtaataagaagtagattccaaaagcaacaagcactggactattttttttcttcaagaaatgttaaact

SEQ ID NO: 188497 - DNA, 521 bp, Homo sapiens
cactgagataagaatcttacatgcattaatttatttaattcttagagtcttttgaagggtgtcttactataatttccattttacagatgatgaaactgaagtttagggaggataagctagctacctgctccaaatcacatagcaaatgtggtagagccgggatctgaaagcaggtctaaatgtgccaaagcccatgctttttagcattactttatgcttgctttacacaaggatcacagtgtgctttgttttaagcccaatgcctctcctgctttcaaatgactgtgttaaaaaatcacatagtttcccatgccctgctcctccttctatagccaggtcatgctggatcctggaggtgcctgttgactgctctcaataaatgctgccaagaggcattaccaaaatgtgaaatgattttcatttggagaggaaaaaacrtgagtaataagaagtagattccaaaagcaacaagcactggactattttttttcttcaagaaatgttaaacttgaaaaggcaag

SEQ ID NO: 188498 - DNA, 595 bp, Homo sapiens
ggaaggaaaagagagaggtagggagacagggggaaaggaaaaacaagatatttgtaaactgtaaagtgctatatacatgaaaagacaaaacaactatcattcccccatggtgggataccaagcttgaacttccaytgaatatgtaaagaatcacttacattagagtttccatattgctttcctgttttctagccttctgtggaacaggaagagataaggatatgggaggtagtgtctcatagaagataccaaccctatattctgttgcctgccaaataaaagtctttatatgtcaactgctaacatgaacgaattattcaaactttccaactgttacagtttgcaagaattggacaataactgagattattgtcagcattaaataaaacaacacatatacagcctgacacatactgggtgcttaggaaatagaaagacattccctcccctttctttacttcccttttcctccctctggagaggtcttcatttcacaagaagatgaatcagcattctaggaacctggcaggagttgctgtgagaggtgcaccctgcccagtcagtatgtggccttggtcttggctccaagacttaa

SEQ ID NO: 188499 - DNA, 476 bp, Homo sapiens
cttactgtaagtgctattttttccttttctatgctaagaacaattaaattattcctggctcgagattcaggagttttacatttctctgcccttttcctcacatacatgttgtaatggagcacagaagatggatgttgcatatccagggggggcctggggtattatctgcttgttagttttactatcgatgccaagaggagagctgcttgttttctgcttccagtatgtattctagcctggtggtgtcctatgtagtagccacgagccacataatcacgtattgagcacrtgaaatgtggtgagtccaaattgaggtgtgctgtaagtataaaatacactctggatttcaaagatctattatgaaaaaagaatgtaaaatgttaataattttacgttaatcacatttgttgttgttagagacgaggtgatatttgttttttgagacagagtcttggtctgtcacccaggctggaatg

SEQ ID NO: 188500 - DNA, 331 bp, Homo sapiens
gtgccttcctttgatactctgacagagtcttagtattttaggtggcatctgtggttagggacccccatttctgtgtgtctggtygtgaacctctcccaagctccatactgtttttttctaaatgctcactggccacagtggcttgacgtaccatctagaaatgtctaaaagtcatgcaaagcttagcagacatcgagatgtctagctagagtgcccagcactttcctccttcacaaagaggaaccaaaatgacaagtaggtaagcacatgtcaagtgcagtgtctaggggagaacactgtactgaagcaacagagtaaagaagaccctcta

SEQ ID NO: 188501 - DNA, 590 bp, Homo sapiens
aagaacaaaatttaaacataattttttttttgagacggagtctcactctgttgcccaggttggagtgcagtggcggtggtgatctcaggtcactgcaacctccacctcccaggttcaagtgattctcctgcctcagcttcccgagtagctggggctataggcacacgccaccatgccaggctaatttttgtatttttagtrgagacagggtttcactctgtttgccaagctggtctcgaattcctgacctcatgacccaccctcctcggcctcccaaagtgctgggaaatgaaaatagaaatacaacataccaaaacctatgagatatagtaaaagcagtgctaagagggtagtttatagcattaaacacctatatcaaaaaagtagaaagatttcaaataaacactcctagctctgtggcctggaggagttgatgttcagtgagttcttgtaggttgaggccagtgcttccctccacgagcaagccacatggtgtctgccctcaatccttacagggagctctgcagggcaggcagaacagcaaaccaaccaaaactgccaacacagggaatgttatgaaggggataggc

SEQ ID NO: 188502 - DNA, 590 bp, Homo sapiens
aagaacaaaatttaaacataattttttttttgagacggagtctcactctgttgcccaggttggagtgcagtggcggtggtgatctcaggtcactgcaacctccacctcccaggttcaagtgattctcctgcctcagcttcccgagtagctggggctataggcacacgccaccatgccaggctaatttttgtatttttagtggagacagggtttcactctgtttgccaagctggtctcgaattcctgacctcatgacccaccctcctcggcctcccaaagtgctgggaaatgaaaatagaaatacaacataccaaaacctatgagatatagtaaaagcagtgctaaragggtagtttatagcattaaacacctatatcaaaaaagtagaaagatttcaaataaacactcctagctctgtggcctggaggagttgatgttcagtgagttcttgtaggttgaggccagtgcttccctccacgagcaagccacatggtgtctgccctcaatccttacagggagctctgcagggcaggcagaacagcaaaccaaccaaaactgccaacacagggaatgttatgaaggggataggc

SEQ ID NO: 188503 - DNA, 590 bp, Homo sapiens
aagaacaaaatttaaacataattttttttttgagacggagtctcactctgttgcccaggttggagtgcagtggcggtggtgatctcaggtcactgcaacctccacctcccaggttcaagtgattctcctgcctcagcttcccgagtagctggggctataggcacacgccaccatgccaggctaatttttgtatttttagtggagacagggtttcactctgtttgccaagctggtctcgaattcctgacctcatgacccaccctcctcggcctcccaaagtgctgggaaatgaaaatagaaatacaacataccaaaacctatgagatatagtaaaagcagtgctaagagggtagtttatagcattaaacacctatatcaaaaaagtagaaagatttcaaataaacactcctagctctgtggcctggaggagttgatgttcagtgagttcttgtaggttgaggccagtgcttccctccacgagcaagccacatggtgtctgccctcaatccttacagggagctctgcagggcaggcagaacagcaaaccaaccaaaactgycaacacagggaatgttatgaaggggataggc

SEQ ID NO: 188504 - DNA, 603 bp, Homo sapiens
agccaactgttctgtatattcccttaaaaatcgatggacccagaagaggactccaccagggacacgactccttcattcgtcgaatcttggacattttgcaagagaacacctccctctagcttatcttcctgctggcccattccaactattactaataagcataattgaaatcatgttgctggaccacaacttattataataatgatgagaataacactagtaatgtcctagctaacttttatgtatcttttacgcaccatgcactgtgttaaatgcataatacattttaccttatttgatctttactataatcctgggaatttgggtctaataatatcattgctttatcaktgatgaagctgaagttttgataggttaaaggatttaccccagttcacaaacctagtgtacattgaggcagggattccaactcagtgatgtgatactgctccaggatcttgagtctttatcgcctgtggacctaccatgctttttacctggttccctttgacagtcttttgcatctgacactcacgctctcaccgcattctttcacttctataagcagctgtgaagtgaatatctttgtatgtagacattggc

SEQ ID NO: 188505 - DNA, 603 bp, Homo sapiens
agccaactgttctgtatattcccttaaaaatcgatggacccagaagaggactccaccagggacacgactccttcattcgtcgaatcttggacattttgcaagagaacacctccctctagcttatcttcctgctggcccattccaactattactaataagcataattgaaatcatgttgctggaccacaacttattataataatgatgagaataacactagtaatgtcctagctaacttttatgtatcttttacgcaccatgcactgtgttaaatgcataatacattttaccttatttgatctttactataatcctgggaatttgggtctaataatatcattgctttatcattgatgaagctgaagttttgataggttaaaggatttaccccagttcacaaacctagtgtacattgaggcagggattccaactcagtgatgtgatactgctccaggatcttgagtctttatcgcctgtggacctaccatgctttttacctggttccctttgacagtctttygcatctgacactcacgctctcaccgcattctttcacttctataagcagctgtgaagtgaatatctttgtatgtagacattggc

SEQ ID NO: 188506 - DNA, 603 bp, Homo sapiens
agccaactgttctgtatattcccttaaaaatcgatggacccagaagaggactccaccagggacacgactccttcattcgtcgaatcttggacattttgcaagagaacacctccctctagcttatcttcctgctggcccattccaactattactaataagcataattgaaatcatgttgctggaccacaacttattataataatgatgagaataacactagtaatgtcctagctaacttttatgtatcttttacgcaccatgcactgtgttaaatgcataatacattttaccttatttgatctttactataatcctgggaatttgggtctaataatatcattgctttatcattgatgaagctgaagttttgataggttaaaggatttaccccagttcacaaacctagtgtacattgaggcagggattccaactcagtgatgtgatactgctccaggatcttgagtctttatcgcctgtggacctaccatgctttttacctggttccctttgacagtcttttgcatctgacactcacgctctcaccscattctttcacttctataagcagctgtgaagtgaatatctttgtatgtagacattggc

SEQ ID NO: 188507 - DNA, 513 bp, Homo sapiens
gtagcctctgcctaaccagatgtgtggattaacaaatcaggatactggttctttcttagggctggattaatccatttttgctgaatctacttcttgctcccagacactgcctggcatggctgagacgtcatttctccctgttgttttcygctgatcctgagtcaaagggtatcattctctttttattaaaagactgctgaagagccattaaaaagcagacactatgcacagacgtgtgtatttgtgtgtgtatctttatatatctttaatgttatcacagagttaatcactaaacatgtagtgccttgggggaaagcataaacaattgatgttggtaataaagatataaagatattgacttaaatacattttcggttttaaaaaaatcagaaaacatgattagaaatcaaaccaaatagaaataagattcttaaaactctggaatcacatgatcccaattatttttctgtatattatctttcacataatggcactgcctttgagcctgaatgc

SEQ ID NO: 188508 - DNA, 589 bp, Homo sapiens
gaattctggagctcattctatagtagcttgctctctttctctttctctctctctcctctttctctggctgtasagcactccacagagtagatggagaggccacagtttattcaatcagtcttccaacccatctattgatgagctctttccagttctttgctataagaaatagtctgacatgaatagccttgtgcgtgtatcctctcacatttttttgcagcagaaggtgacacgtggtgtgcagtgtacactgctcactagtggatgtctgctagaaaaggcatcataagtacaaatgcaagtccatggccttgatttgataattagtcacatatacaaactcatattcattgtaattatcattttaaacagaaatatgcaagttcctatagaaagaggacaattttaatgatttaaattaataaaaccatgtttaaagaaaaattgacagcaattctacacatactcagaaaatagatgggggaatacttcacaagtaatgtgtgaagttataatattctgaggccaaaaccaggtacagacataacaaaaaaaaaatctatgtactaatatctctcataaatataga

SEQ ID NO: 188509 - DNA, 589 bp, Homo sapiens
gaattctggagctcattctatagtagcttgctctctttctctttctctctctctcctctttctctggctgtacagcactccacagagtagatggagaggccacagtttattcaatcagtcttccaacccatctattgatgagctctttccagttctttgctataagaaatagtctgacatgaatagccttgtgcgtgtatcctctcacatttttttgcagcagaaggtgacacgtggtgtgcagtgtacactgctcactagtggatgtctgctagaaaaggcatcataagtacaaatgcaagtccatggccttgatttgataattagtcacatatacaaactcatattyattgtaattatcattttaaacagaaatatgcaagttcctatagaaagaggacaattttaatgatttaaattaataaaaccatgtttaaagaaaaattgacagcaattctacacatactcagaaaatagatgggggaatacttcacaagtaatgtgtgaagttataatattctgaggccaaaaccaggtacagacataacaaaaaaaaaatctatgtactaatatctctcataaatataga

SEQ ID NO: 188510 - DNA, 431 bp, Homo sapiens
gaattctaatgataaaaaatagttggattcttttttctatgtgtwtttgttttgttttgttttgtcccacaggcctctgaagctttattcgtttttccttttaattttttatttttgagacagagtctttctccattgctccagggggctggagtgcagtggcacgatctgtgctcaatgcatcctccgcctcctgggttcaagcaattcttctgcctcaacctcctgagtagtagggactacaggtgtgtgccaccacacccagctaatttttttttgtattttaataaagatggggtttcaccgtgttgcccaggctggtcttgaactcctgagctcaggcaatccatccacctaggcctcccaaagtgctgagattacagatgtgagtcaccactcccggccccttttccatttgtagtctgttttgt

SEQ ID NO: 188511 - DNA, 431 bp, Homo sapiens
gaattctaatgataaaaaatagttggattcttttttctatgtgtatttgttttgttttgttttgtcccacaggcctctgaagctttattcgtttttccttttaattttttatttttgagacagagtctttctccattgctccagggggctggagtgcagtggcacgatctstgctcaatgcatcctccgcctcctgggttcaagcaattcttctgcctcaacctcctgagtagtagggactacaggtgtgtgccaccacacccagctaatttttttttgtattttaataaagatggggtttcaccgtgttgcccaggctggtcttgaactcctgagctcaggcaatccatccacctaggcctcccaaagtgctgagattacagatgtgagtcaccactcccggccccttttccatttgtagtctgttttgt

SEQ ID NO: 188512 - DNA, 429 bp, Homo sapiens
tcttttttctatgtgtatttgttttgttttgttttgtcccacaggcctctgaagctttattcgtttttccttttaattttttatttttgagacagagtctttctccattgctccagggggctggagtgcagtggcacgatctgtgctcartgcatcctccgcctcctgggttcaagcaattcttctgcctcaacctcctgagtagtagggactacaggtgtgtgccaccacacccagctaatttttttttgtattttaataaagatggggtttcaccgtgttgcccaggctggtcttgaactcctgagctcaggcaatccatccacctaggcctcccaaagtgctgagattacagatgtgagtcaccactcccggccccttttccatttgtagtctgttttgtctctgttgtttagtgtaggagaattc

SEQ ID NO: 188513 - DNA, 431 bp, Homo sapiens
gaattctaatgataaaaaatagttggattcttttttctatgtgtatttgttttgttttgttttgtcccacaggcctctgaagctttattcgtttttccttttaattttttatttttgagacagagtctttctccattgctccagggggctggagtgcagtggcacgatctgtgctcaatgcatcctccgcctcctgggttcaagcaattcttctgcctcaacctcctgagtagtagggactacaggtgtgtgccaccacacccagctaatttttttttgtattttaataaagatggggtttcaccgtgttgcccaggctggtcttgaactsctgagctcaggcaatccatccacctaggcctcccaaagtgctgagattacagatgtgagtcaccactcccggccccttttccatttgtagtctgttttgt

SEQ ID NO: 188514 - DNA, 429 bp, Homo sapiens
tcttttttctatgtgtatttgttttgttttgttttgtcccacaggcctctgaagctttattcgtttttccttttaattttttatttttgagacagagtctttctccattgctccagggggctggagtgcagtggcacgatctgtgctcaatgcatcctccgcctcctgggttcaagcaattcttctgcctcaacctcctgagtagtagggactacaggtgtgtgccaccacacccagctaatttttttttgtattttaataaagatggggtttcaccgtgttgcccaggctggtcttgaactcctgagctcaggcaatccatccacctaggcctcccaaagtgctgagattacagatgtgagtcaccactccyggccccttttccatttgtagtctgttttgtctctgttgtttagtgtaggagaattc

SEQ ID NO: 188515 - DNA, 539 bp, Homo sapiens
aaattgaccagtgtgtttgctccttgtctatccaccagtgtccacaagttgagagagtgtctccccatcatcatttaagaacagacttaagtatgccctgacaggagatgaagtaaagatttgcatgcagccgttcattaagatcgatggcaaggtcagaactgatataacctaccctgctggattcatggatgtcatcagcattggcaagacaggagggaatttctgtctgatctatgacaccaagggttgctttgctgtacatcatattacacctgaggaggccaagtacaagtggtgcaaagtgagaaaaatctttgtggacaccaarggaatccctcatctggggactcatgatgctcgcaccatctgctaccctgatcccctcatcaaggtgaatgataccattcagattgatttggagactggcaagattactgatttcatcaagttcaacactggtaaactgtgtatggtgactggaggtgctaacctgtgtatgaagaattggtgtgatcaccaacagagagaggcaccct

SEQ ID NO: 188516 - DNA, 591 bp, Homo sapiens
ggcaacttgggtgactcataataatagacggtgataaatggtataatgtatatcttcagaggaggttaggtttaagacagcgatgcaattgccactgyatttcctgtaacactggcacttggagccctgagtaggcctgtgagtagttaataccatgctgtgagtaacagcttagaagaggccaaatgtaggcatttagatttgcattagctctagtctaatagttctatcatcccagatgccagacagatgagtgaatgagtcttcatatgtttctggccccaccaactatcgtatgcccagcctttgagtttgcccacctaaaattcagatttcacagagcagagacaagtctcctcaactgtgtcctgtccaaattactgacccactgcacccatgagcataataaaatacagccatccctcagtgaatgtaggggattggttccaggacctctgctgtataccataatccaggcatactcaaatccctcagttgactctgtgcaacccaatatgcaaaatataaaaagttgatcttctgcataatcagctttcacatccctcacatcacaaaaataatacagtattt

SEQ ID NO: 188517 - DNA, 591 bp, Homo sapiens
ggcaacttgggtgactcataataatagacggtgataaatggtataatgtatatcttcagaggaggttaggtttaagacagcgatgcaattgccactgtatttcctgtaacactggcacttggagccctgagtaggcctgtgagtagttaataccatgctgtgagtaacagcttagaagaggccaaatgtaggcatttagatttgcattagctctagtctaatagttctatcatcccagatgccagacagatgagtgaatgagtcttcatatgtttctggccccaccaactmtcgtatgcccagcctttgagtttgcccacctaaaattcagatttcacagagcagagacaagtctcctcaactgtgtcctgtccaaattactgacccactgcacccatgagcataataaaatacagccatccctcagtgaatgtaggggattggttccaggacctctgctgtataccataatccaggcatactcaaatccctcagttgactctgtgcaacccaatatgcaaaatataaaaagttgatcttctgcataatcagctttcacatccctcacatcacaaaaataatacagtattt

SEQ ID NO: 188518 - DNA, 591 bp, Homo sapiens
ggcaacttgggtgactcataataatagacggtgataaatggtataatgtatatcttcagaggaggttaggtttaagacagcgatgcaattgccactgtatttcctgtaacactggcacttggagccctgagtaggcctgtgagtagttaataccatgctgtgagtaacagcttagaagaggccaaatgtaggcatttagatttgcattagctctagtctaatagttctatcatcccagatgccagacagatgagtgaatgagtcttcatatgtttctggccccaccaactatcgtatgcccagccttygagtttgcccacctaaaattcagatttcacagagcagagacaagtctcctcaactgtgtcctgtccaaattactgacccactgcacccatgagcataataaaatacagccatccctcagtgaatgtaggggattggttccaggacctctgctgtataccataatccaggcatactcaaatccctcagttgactctgtgcaacccaatatgcaaaatataaaaagttgatcttctgcataatcagctttcacatccctcacatcacaaaaataatacagtattt

SEQ ID NO: 188519 - DNA, 591 bp, Homo sapiens
ggcaacttgggtgactcataataatagacggtgataaatggtataatgtatatcttcagaggaggttaggtttaagacagcgatgcaattgccactgtatttcctgtaacactggcacttggagccctgagtaggcctgtgagtagttaataccatgctgtgagtaacagcttagaagaggccaaatgtaggcatttagatttgcattagctctagtctaatagttctatcatcccagatgccagacagatgagtgaatgagtcttcatatgtttctggccccaccaactatcgtatgcccagcctttgagtttgcccacctaaaattcagatttcacagagcagagacaagtctcctcaactrtgtcctgtccaaattactgacccactgcacccatgagcataataaaatacagccatccctcagtgaatgtaggggattggttccaggacctctgctgtataccataatccaggcatactcaaatccctcagttgactctgtgcaacccaatatgcaaaatataaaaagttgatcttctgcataatcagctttcacatccctcacatcacaaaaataatacagtattt

SEQ ID NO: 188520 - DNA, 518 bp, Homo sapiens
acaacacacttaagtacacagaccagtaacattaaaaagcaaccacacaaacaagtctgcataayaaccagctaataagacaatggcagaattaaatccatacatatcaatactaaccttgaatgtaaataggttaaaaaccccaattaaataagacagagtagcaagttggataagaagcaaggtccagtagtatgctgccttcatgagatccatctcacatgccatgacacacatagattcaaaataaaaggatggagaaacatctaccaagtatattagtctgttttcatactgctatatgctagaaagaaatacctgagactgggcagtttatggagaaaagagattgaattaactcacagtttggcaggctgtataagaggcatggctggtgagaccttaggaaacatataatcatgacgaaaggtgaagtggaaccaggtacaatattcacatggtagagcagaagaaagacagtgaggggggggggggtttacacacttccaaataatcag

SEQ ID NO: 188521 - DNA, 518 bp, Homo sapiens
acaacacacttaagtacacagaccagtaacattaaaaagcaaccacacaaacaagtctgcataataaccagctaataagacaatggcagaattaaatccatacatatcaatactaaccttgaatgtaaataggttaaaaaccccaattaaataagacagagtagcaagttggataagaagcaaggtccagtagtatgctgccttcatgagatccatctcacatgccatgacacacatagattcaaaataaaaggatggagaaacatctaccaagtatattagtctgttttcatactgctatatgctagaaagaaatacctgagactgggcagtttatggagaaaagagattgaattaactcacagtttggcaggctgtataagaggcatggctggtgagaccttaggaaacatayaatcatgacgaaaggtgaagtggaaccaggtacaatattcacatggtagagcagaagaaagacagtgaggggggggggggtttacacacttccaaataatcag

SEQ ID NO: 188522 - DNA, 518 bp, Homo sapiens
acaacacacttaagtacacagaccagtaacattaaaaagcaaccacacaaacaagtctgcataataaccagctaataagacaatggcagaattaaatccatacatatcaatactaaccttgaatgtaaataggttaaaaaccccaattaaataagacagagtagcaagttggataagaagcaaggtccagtagtatgctgccttcatgagatccatctcacatgccatgacacacatagattcaaaataaaaggatggagaaacatctaccaagtatattagtctgttttcatactgctatatgctagaaagaaatacctgagactgggcagtttatggagaaaagagattgaattaactcacagtttggcaggctgtataagaggcatggctggtgagaccttaggaaacatataatcatgacraaaggtgaagtggaaccaggtacaatattcacatggtagagcagaagaaagacagtgaggggggggggggtttacacacttccaaataatcag

SEQ ID NO: 188523 - DNA, 581 bp, Homo sapiens
gtgaagtggaaccaggtacaatattcacatggtagagcagaagaaagacagtgaggggggggggggtttacacacttccaaataatcagatcttgtgagaactctatcatgaaaacagcaaagggggaagtccacccccatgattcagtcaccttccaccaggcctctcctttaacacttggaacaattcaacatgagatgtggttggggacacagagccaaagcatatcacccaacaaatgaaaaagagaaaaaagctatggttgctatcctaatttcagacaacatagactttaaaccagcaggtataaaaaagacaaagaagggcattacataacagtaaggggttcaattcaacaaaagatctaactattataaatatacatgcaccraacacaggagcaccaagatttataaagaaacttctgaaagacctatgaagagagttagattcccaaacaaaaatagtgggagatttcaacaccctactgacagtattacacagatcatcaggcaaaaaaattaaaaaaaaaaaaaattcatgagctgaactcaatacttgaccacatggacaaaatgaa

SEQ ID NO: 188524 - DNA, 375 bp, Homo sapiens
gacttctccaccgcccgcttccggacccrctccggcgccgcttccggacccactcctcggcgagcgcaggaactcgctctcccagcaggccccgcgcggctctcggcgcgttccgggtcctatgacagctcggctcgcatgcgccacctacggccccacccgcggccccaccccctggctcccggctccttccccgactcccgcgagttccagtcccagcttccagctccccagccccgccctcagccgcgcgcgctctcccctccccgccctcgcttcttcgcgtgcggcccccacagccaatgaggttcagggccgcgtgcgcagattcaaacggcggctcttgagggaggctgggcgcgagattcggcggtg

SEQ ID NO: 188525 - DNA, 460 bp, Homo sapiens
tcaagtggacaaatatttacagtmtgaaagttatttttttttcttatggggtagatcaagagccttgctgccggaacttacctttaatttcatctctgataattatatttgatgacaattaagtggctgataatgatcatggtatacgtatgtgtgtgtgtatgtgtggagtgtagcctagtgtaacttacagccctaggataggatgatttgagacaaagacttggaaatatcatactcacatgttagctgtaagctaatatccaaaccaagatatatccattcaatttaggcattacactggtgtaacttaaataatgtaaaacattttgtttgccttgccccctatttatttaaagcccagtccatatgcagtgattttactctttgtataaataagtaaatacctcccattgtaaacctctttagcacggcatccaaatctcgcagcatcatattg

SEQ ID NO: 188526 - DNA, 360 bp, Homo sapiens
cagcaaatttttatatgtagactcattttgacagaatatttacaatcgaattattttttgtttataatatgtacttataagctagcaataaataggacagtataaagtttactataaatgaaatatcaaagctagaaaagttgtaatcctaataatatgatggttttaaagactcagagcaaagtacattctaagttttaaaaaatatgcttagcaacaataagaatgcttcacaattcattgattattgaaaataagcaggctttaaaattgtatgtacgcgaygttcccaaatttgttttagaagacacaggtatttgtctatatactttgttgaatgagcatacagataaaataatc

SEQ ID NO: 188527 - DNA, 586 bp, Homo sapiens
aaatttaaacaagaacaaaaatgcaatacagtaagataaattgagaaataggaagaaatatttaakgtatgcatcttttgttttattgatttaactaacgcatctaataacaatttcattttcttgtaacactctcagagctcgcctgtaatataaatgttcattttctgctggtggtactgcctgtgcccaggcaaagatatacatgttatcctaatccattagtttatgtggtgtactaatcagatttggctaggttataactgcataacaaacaacttccaaatcttaggggtttacaagaagtaggatgtatttttcacctacactacatgtttattacaactcaattgcatgtcgtcttcactcataaacccatgctgatgggatagcatctatttagatcatttaccaagatcaaatagaaagaagaagcgttcatgcaaactgttccctggctcttaaaagtttctgctctggagtgccacatttctgctcacttgtaatcggccaaagtaagttatatgcaatcctaaaatcaccgtagtggggaagcataaatcttccccagagaggaacactgaat

SEQ ID NO: 188528 - DNA, 455 bp, Homo sapiens
ttgtgtaccatcacatcttacactgtagaattcaaaagtttcagaaaagctttttatgataatctttttaagataagcccattttcctattttctttaaatctttgcctcatgtgaactgtgaaagagaggaaatcaatctaaaattaaaataatatataaatataccatgcaaaaattccatttatttttaatctcatctttctttattcagacttacccaattccttaaaatttttaaaactatacaaaagtatgtgtgtgtacatatatatatacacacacacacacacatatgtacacatacatatacacacacacagaacttcctwctttgttaaagttccgtaacgttttattttctttggtggaggtggagcaatcaatatgcacatatgagctaattccaattaaggaaatattcctgtgaagtaaatacatatacatcattttaaa

SEQ ID NO: 188529 - DNA, 496 bp, Homo sapiens
cattagggttcactcagtatatattctgtgagttttgagaaatatgtaactacrtgtatccacagttatagtatcatatagagagattttactgtacaaaatcctctgtgctctgacaattcatacctcccttactccaagccctggcaattactgatcttttcactctctccctagttctgccttttccacaatgtcccatagttggaatgcagtatgcagcttttttgattggctattttttacttagtaatattcatttaaattttctccattctctacttcttagaggtgaatactttttcattctagatgtaccagaaattaatttttaagaaacagtatatagatattgccattaatatagaatttaatttagaatttgtttaaaattttaatttgaaacttaaattttgtatggcatatttatgtaatgatatttgcttaaaattgtgaacgaaggataagattcaaataaacttggaaaaatacattt

SEQ ID NO: 188530 - DNA, 496 bp, Homo sapiens
cattagggttcactcagtatatattctgtgagttttgagaaatatgtaactacatgtatccacagttatagtatcatatagagagattttactgtacaaaatcctctgtgctctgacaattcatacctcccttactccaagccctggcaattactgatcttttcactctctccmtagttctgccttttccacaatgtcccatagttggaatgcagtatgcagcttttttgattggctattttttacttagtaatattcatttaaattttctccattctctacttcttagaggtgaatactttttcattctagatgtaccagaaattaatttttaagaaacagtatatagatattgccattaatatagaatttaatttagaatttgtttaaaattttaatttgaaacttaaattttgtatggcatatttatgtaatgatatttgcttaaaattgtgaacgaaggataagattcaaataaacttggaaaaatacattt

SEQ ID NO: 188531 - DNA, 496 bp, Homo sapiens
cattagggttcactcagtatatattctgtgagttttgagaaatatgtaactacatgtatccacagttatagtatcatatagagagattttactgtacaaaatcctctgtgctctgacaattcatacctcccttactccaagccctggcaattactgatcttttcactctctccctagttctgccttttccacaatgtcccatagttggaatgcagtatgcagcttttttgattggctattttttacttagtaatattcatttaaattttctccattctctacttcttagaggtgaatactttttcattctagatgtrccagaaattaatttttaagaaacagtatatagatattgccattaatatagaatttaatttagaatttgtttaaaattttaatttgaaacttaaattttgtatggcatatttatgtaatgatatttgcttaaaattgtgaacgaaggataagattcaaataaacttggaaaaatacattt

SEQ ID NO: 188532 - DNA, 494 bp, Homo sapiens
acattagggttcactcagtatatattctgtgagttttgagaaatatgtaactacatgtatccacagttatagtatcatatagagagattttactgtacaaaatcctctgtgctctgacaattcatacctcccttactccaagccctggcaattactgatcttttcactctctccctagttctgccttttccacaatgtcccatagttggaatgcagtatgcagcttttttgattggctattttttacttagtaatattcatttaaattttctccattctctacttcttagaggtgaatactttttcattctagatgtaccagaaattaatttttaagaaacagtatatagatattgccattaatatakaatttaatttagaatttgtttaaaattttaatttgaaacttaaattttgtatggcatatttatgtaatgatatttgcttaaaattgtgaacgaaggataagattcaaataaacttggaaaaataca

SEQ ID NO: 188533 - DNA, 494 bp, Homo sapiens
acattagggttcactcagtatatattctgtgagttttgagaaatatgtaactacatgtatccacagttatagtatcatatagagagattttactgtacaaaatcctctgtgctctgacaattcatacctcccttactccaagccctggcaattactgatcttttcactctctccctagttctgccttttccacaatgtcccatagttggaatgcagtatgcagcttttttgattggctattttttacttagtaatattcatttaaattttctccattctctacttcttagaggtgaatactttttcattctagatgtaccagaaattaatttttaagaaacagtatatagatattgccattaatatagaatttaatttagaatttgtttaaaattttaatttgaaacttaaattttgtatggcatatttatgtaatgatatttgcttaaaattgtgaacraaggataagattcaaataaacttggaaaaataca

SEQ ID NO: 188534 - DNA, 554 bp, Homo sapiens
cttttgttctgtttacttatacctggaaaaatctcctgcccaaataaatctaggttctaagaagaatgaaattccttaaatttatgtggtagatacactcattttaagctagttctggttaggtactttttttcccatcatacctttgccagagattaaatattggacactgctggaaagttccttcattaggtaaggacaataaaatgtatttaattattcaactggagactcttcttgggcatcttttgatttattgggtaactctcttctctaattgttttcagttccattaccttcaggcctaaattgagtcatygatccttaattctctcctcttgattagatattgtatgagttttttgcaccaaatcttgatttcttttacataaggagtctatttcatgcaaggctagccatgtcaggactagcgtctagtttttcagaagtggctggatgaggtcactttttaaagaattttataattctttaaaaaggagcagcatcagcgttccttcacggcttgtaaagaagaataaatacctactgtatgt

SEQ ID NO: 188535 - DNA, 554 bp, Homo sapiens
cttttgttctgtttacttatacctggaaaaatctcctgcccaaataaatctaggttctaagaagaatgaaattccttaaatttatgtggtagatacactcattttaagctagttctggttaggtactttttttcccatcatacctttgccagagattaaatattggacactgctggaaagttccttcattaggtaaggacaataaaatgtatttaattattcaactggagactcttcttgggcatcttttgatttattgggtaactctcttctctaattgttttcagttccattaccttcaggcctaaattgagtcattgatccttaattctctcctcttgattagatattgtatgagttttttgcaccaaatcttgatttcttttacataaggrgtctatttcatgcaaggctagccatgtcaggactagcgtctagtttttcagaagtggctggatgaggtcactttttaaagaattttataattctttaaaaaggagcagcatcagcgttccttcacggcttgtaaagaagaataaatacctactgtatgt

SEQ ID NO: 188536 - DNA, 529 bp, Homo sapiens
gaatattatataaaacttagttgataaagcagcagtatgttttgagagaattaacaccaattttgaaagaatttctactgtgagtaaagtattaactgatgcagcaaactttattgttgtcttattttaagcagttgccacagccgcttcaaccttctgcaaccagcaagtcaatagtcatcaacatggtggccagaccatctaccaacaaaaagatcacaatttgctgaaggctccagtaagtgttagaattgcttggcaataacgtgtttttaaattcagttttgatcattgctttttaagacacaatgctattgcrcacaatagattacattattgtgtaaacacaacttttatatgcacttggacaccaacaaattcattttattgcagtggtctgaaatcaagctcacaatgtatcccaggtatgcttatacaagatttactattgcattttctggcctatcacccatacaattcctgttgagtttctttgtgtttataaagtattggacttgttcacataaaa

SEQ ID NO: 188537 - DNA, 375 bp, Homo sapiens
attattatgggtatgtgagtgtgtgtatgtgtgtgtgtatatatatatatattctctatctgtaggataggtctgttggaggscctcaagacaacctccatgttcggagatcctgtagaacaaagtatactcaacatataattgtactcacagctaagatttattgcagtgataaagtaataatatacctggatcatgaaggaaaaagacacaagtgcagtctggaggagtccaggggcagatttcctcgtgctttctcgcttccacataaagctttcttttgtcccacagagctttcttttgtgttgctgcacaaaagtgcatcaacatgtgtgttatggttgtgtccggagtagcttactcagtgctcaaggt

SEQ ID NO: 188538 - DNA, 427 bp, Homo sapiens
agaggagacagtaccactgcactctagcctgggcaacagagcaagactccatcaaaaaaaaaaaaaaaaaaaagagaataggctgacttttgtgagtaaatggatcttaaggtatcatcccaattaaaagaatgagattaaaagttaaaatgattgacatgtttaacccactttagggagtacttttattccaaataatgagttttctaaytaaatagcataatactaggggctaccctaggagggatggctcttatgtagactcctctagtgttctggcccagcccaaagaactggccccatttttctctactggtatttcacagcaactcatttctaggactatgaatacatgaaatcagttgcccaagcaacaaactgctggaaaccctgtgttatcagctttgtaaatgattctaatcttaca

SEQ ID NO: 188539 - DNA, 320 bp, Homo sapiens
tttctctacccctgattctaagccaaagccttctcctagaatctcctttctattccctcttattcaaagtggaaatgaatcacagcatkcaaaagaggcacatttcttatcattttctttgggtgtggcaggcaactgctttatgcagtagagaagaggggcaatcttttatgaagggcatgaactataaagtcctacagacctatgtttagtgcccagtacttctgcttacctgatgctaatacttgagcaagttacttagcatcatgaagcatcaaaatccttacctacaaagcaggataataataggcctgcttggg

SEQ ID NO: 188540 - DNA, 579 bp, Homo sapiens
tgaagaaagaggataaaatgagattatgtctgagaatggctgccaaaataaaatggtgcaaaagtcaagtttttctattgaattttattcttcagcttgggaattggctcacttaattatggaggccaagaagtcccatgatctgccatccccaagtggagaaccaggaaagccactgccataattcagcctaagtccaaaggtccaaaaaccaggggagctaatgttgtaaaccctgctggtttggcttcaaaggcctgagaaccaggagcaccagtgtccccaagctggaggagacagagtgtccgagtcaaacagaaagagtaaatttgctgtggtttcttttgttgttgttgttgttgtygtcgtcctattctagccctcaagggattagatgatggtcacccacattggtgaaggtggatcttctgtgctctgtctagtcattcaaatgctaacgtcttccagaaacactctcacaaacataaccagaaacaatgttttaccagctatctagacatccctttgccctgtcaagttgatacacaaaaaaccatcataagtaggaatacttgtgaa

SEQ ID NO: 188541 - DNA, 616 bp, Homo sapiens
ctggtttgctatgctgggtagattggatgaggagattaaggctggtgaggatataagtcttactccatatcacttgttcattctgattctatcaggagagagttsggtgcagctgtggctgggggcatagcatgaggaggggagaagcatactttgggctaggccagggctggagttaattagacaatcagtgtaataggagaccactagttgctttctctgaagctgcacctgtgatttattgaaacttggctttgaaccccaaacgtatctttccagcatgttggctcatttctgagttttctctactagcacctccatttaacatttgagtagtatttttcatcctttttcattatgcctaaaaggaaacatcacagtcagaacttgaaatgttactgtagttccactgaaccaatagctttcccctccctcccttttcttcctagtttccttttcactcttttctctttttgtcttaaaaaaaaattggtggatacatgaggaaacagaagttcatagacatcaatctgttagcaacagaatgaggattataatgcagatctcagctttgtgttccttgacactgtgtggacagttgctctgttcactattc

SEQ ID NO: 188542 - DNA, 616 bp, Homo sapiens
ctggtttgctatgctgggtagattggatgaggagattaaggctggtgaggatataagtcttactccatatcacttgttcattctgattctatcaggagagagttcggtgcagctgtggctgggggcatagcatgaggaggggagaagcatactttgggctaggccagggctggagttaattagacaatcagtgtaataggagaccactagttgctttctctgaagctgcacctgtgatttattgaaacttggctttgaaccccaaacgtatctttccagcatgttggctcatttctgagttttctctactagcacctccatttaacatttgagtagtatttttcatcctttttcattatgcctaaaaggaaacatcacagtcagaacttgaaatgttactgtagttccactgaaccaatagctttcccctccctcccttttcttcctagtttccttttcactcttttctctttttgtcttaaaaaaaaattggtggatacrtgaggaaacagaagttcatagacatcaatctgttagcaacagaatgaggattataatgcagatctcagctttgtgttccttgacactgtgtggacagttgctctgttcactattc

SEQ ID NO: 188543 - DNA, 389 bp, Homo sapiens
ttatttgtggttttgctcctccaggcatgttcccatctccttttcactcttgtagtcctttctactccattgtaaccagtttcctgaattaaattccatctgtttgaaatacctagaattgtggataggcctgtgactgataggatgggaagagttctagctttgagtctataaacagcaactttgtgggggcttagggactcctcagactgggccaccatatgacaagaggaccaccataagacaagggaccagaatgcaaacagaagccaaagaaccaacaggtttcatcaatacaaggactttacagatgcagaatctgaggcttggagaggttaaaatgactygttcaaatcaggaaactagtaagtttgaagtcagtaccccaa

SEQ ID NO: 188544 - DNA, 435 bp, Homo sapiens
cagcccctgaccctactacccatttttattctctctctgcatatatttgaccrtttttgaagattccaaatataagtgagatcattatgcaatatttttctttctgtgtctggcttacttcacttaacacaaaatatgcttataaagtaagaaggaaaaataataatacataattatgttttctatgaaaccttaattttcttaaaatcaaacaaatatgtatgtttttatatgtgtttgtgcatttatacacacagataaaaagcctagacatatattcacaagtatataaatagaaatgtcttggaggtgaaatcatagtggatatttctcttcttcacatttttgttttctatattttgtacgttacatatggtactgctttagctgttctaagcattaacattgaaactgtaaaatgtaaaacaatgtttt

SEQ ID NO: 188545 - DNA, 341 bp, Homo sapiens
ctttatttaaattacactttttttctgtgcctttatgtaaagcacctgaaagcattttcagaagaaatattgtgaagaaagaagaaagaaagagagggcagaaatacggaaggaatgaagcaagacaagaaagaaaagcacggaatatgttaataaacagacaaaagccaacaaataaataataaactaataarcccttcaaggtaagtatcatgtagaaactgtgtctactaaagtcatatatgtggcagagctgtaataaaaatattttgattataatcgatcaagaattaggaaatagatattcaagaaagacattatttgcggaatgtaagggtcat

SEQ ID NO: 188546 - DNA, 456 bp, Homo sapiens
catcaaaaccctgtagtctctgccctcatggagcttacattctaatggaaattatgaaaaaatatggtggttgttttgcgtgtgtgcttgcacatgtgtttagtttattgcttctgtctgctacctactactctatttcctgcacctacagtctttgactggctcattctcttagtgatagacatccaggctgcctctcrcttgttgttaccacaaaggaggctgcaaagaacatccctatacccccttacaatcctattcaagcattcttgtgttttagactcaggaaggaatacccatggctaggttcagtgaacacagcagactaatccccagaagacccaccctagtctacactctctcaggagatttgatgtgccacgtgctgctgtctaatgtttgccagtatgagaaatgtaaagtcattttaatttgtgtttctctaattgctagtga

SEQ ID NO: 188547 - DNA, 535 bp, Homo sapiens
gcagaaaactggtcataccacagcatgtgtcccagcaactggcctggccctgcctggggctcattcagggagggaggaggaaggagctgatgtcctgcacttggtacactgagtgacaggtagaatgacttgagtaggaatacataggaggctatcatgaaacaatcccctgtcgtccagcctggaaagactcagaaccatcaagattaaggaattatcaggcttcccaagggcagggaccatggccatcttgttcactgtgtcctccattcctaaaagttcttggtacctggtaacaataggcatttaatacatgtctggtggatggatggatcactgtctgccaatggtactaggtttgtgctcaccagctgccaagacctggaacatytgggttacacacatgttatttctaatgattgaatcaatgactatgcccttatttcacatttatgtctcacaatatcaaaatactggtattaagaatatttataactttaagaattcaaaggttaaaatttaaaattagtgaccc

SEQ ID NO: 188548 - DNA, 535 bp, Homo sapiens
gcagaaaactggtcataccacagcatgtgtcccagcaactggcctggccctgcctggggctcattcagggagggaggaggaaggagctgatgtcctgcacttggtacactgagtgacaggtagaatgacttgagtaggaatacataggaggctatcatgaaacaatcccctgtcgtccagcctggaaagactcagaaccatcaagattaaggaattatcaggcttcccaagggcagggaccatggccatcttgttcactgtgtcctccattcctaaaagttcttggtacctggtaacaataggcatttaatacatgtctggtggatggatggatcactgtctgccaatggtactaggtttgtgctcaccagctgccaagacctggaacatctgggtyacacacatgttatttctaatgattgaatcaatgactatgcccttatttcacatttatgtctcacaatatcaaaatactggtattaagaatatttataactttaagaattcaaaggttaaaatttaaaattagtgaccc

SEQ ID NO: 188549 - DNA, 535 bp, Homo sapiens
gcagaaaactggtcataccacagcatgtgtcccagcaactggcctggccctgcctggggctcattcagggagggaggaggaaggagctgatgtcctgcacttggtacactgagtgacaggtagaatgacttgagtaggaatacataggaggctatcatgaaacaatcccctgtcgtccagcctggaaagactcagaaccatcaagattaaggaattatcaggcttcccaagggcagggaccatggccatcttgttcactgtgtcctccattcctaaaagttcttggtacctggtaacaataggcatttaatacatgtctggtggatggatggatcactgtctgccaatggtactaggtttgtgctcaccagctgccaagacctggaacatctgggttacacacatgttatttctaatgattgaatcaatgactatgcccttatttcacatttatgtctcacaatatcaaaatamtggtattaagaatatttataactttaagaattcaaaggttaaaatttaaaattagtgaccc

SEQ ID NO: 188550 - DNA, 332 bp, Homo sapiens
gttcaaacagtgtctctatatsatgtggcagaagccagcatcatgaaaatgctgaggaactgcaccagttttaattataacagggaaggagaagctgaccttgtctattacctgttaactataactgttccaattatcttcaaaatttaccccaggactcaggcaggaggaactgtaaacaactttagaatccaaccttatatctttgtagtgtgcaatctatcagtccttactgccataacccttgctcggagaaatataaagttggtaccccctcttcaccatcccaaacatgaatatctagtaaggaaggcgtgagtgagtgggcagct

SEQ ID NO: 188551 - DNA, 575 bp, Homo sapiens
tgccccagtcccctccccgtccactgtggcccaggcctcctccaggctgctagaacttgtctgcctcagcttamcaccacgtcctctaggcttctcaatggcctccagttccctccctcatctaaatcaaatctctgttagggtaatctagggaatgcccctaatctctgcaatctctgtaggagaatctgagtagtttatcctatggttgataggccatgctcagccatagaagcatgtaggctgaatttgtgtcctaaattgcaaagccttattttctacctccaaaatgacggatatacatattccttctttgaactcagccattgcctttaggccctcatcacttcctactggacgcctctaacggtattttagctagttccctttcctgtatacgccatcaaaccttaccactagaactgtattactgaagtgaagctacttacagtcctaacatatcattaacttggccacaaatgtgtagaaagttctatatcacacaagaatcatacaagttgacatggaaagtggtaaggctccggtatggaaatgctaaggatatttgtggtgtg

SEQ ID NO: 188552 - DNA, 575 bp, Homo sapiens
tgccccagtcccctccccgtccactgtggcccaggcctcctccaggctgctagaacttgtctgcctcagcttaccaccacgtcctctaggcttctcaatggcctccagttccctccctcatctaaatcaaatctctgttagggtaatctagggaatgcccctaatctctgcaatctctgtaggagaatctgagtagtttatcctatggttgataggccatrctcagccatagaagcatgtaggctgaatttgtgtcctaaattgcaaagccttattttctacctccaaaatgacggatatacatattccttctttgaactcagccattgcctttaggccctcatcacttcctactggacgcctctaacggtattttagctagttccctttcctgtatacgccatcaaaccttaccactagaactgtattactgaagtgaagctacttacagtcctaacatatcattaacttggccacaaatgtgtagaaagttctatatcacacaagaatcatacaagttgacatggaaagtggtaaggctccggtatggaaatgctaaggatatttgtggtgtg

SEQ ID NO: 188553 - DNA, 575 bp, Homo sapiens
tgccccagtcccctccccgtccactgtggcccaggcctcctccaggctgctagaacttgtctgcctcagcttaccaccacgtcctctaggcttctcaatggcctccagttccctccctcatctaaatcaaatctctgttagggtaatctagggaatgcccctaatctctgcaatctctgtaggagaatctgagtagtttatcctatggttgataggccatgctcagccatagaagcatgtaggctgaatttgtgtcctaaattgcaaagccttattttctacctccaaaatgacggatatacatattccttctttgaactcagccattgcctttaggccctcatcacttcctactggacrcctctaacggtattttagctagttccctttcctgtatacgccatcaaaccttaccactagaactgtattactgaagtgaagctacttacagtcctaacatatcattaacttggccacaaatgtgtagaaagttctatatcacacaagaatcatacaagttgacatggaaagtggtaaggctccggtatggaaatgctaaggatatttgtggtgtg

SEQ ID NO: 188554 - DNA, 476 bp, Homo sapiens
gataagcacaggatatgcctggataaattagatctatgcaaattctccaaagcattcaataacatatagtgaattttcaccttcttcagaactcttaaacatttctaatgtcttctgacctcaatttctggagtggatcagmtgggtgtccagttatttagtgaagtctccatgaatatttgttgaataaatgagttgattaaacgactaaagaagataaaacagggtctaaaggaaggagaagagaagaatcaaggaggttacaggggatgaggagggagaataatttaaaaaataataatcaacctctcagtgatggaagttagctgagccttcctctattaggaaagtttttctctactttcctaactgggcatccatatcttacagccttcaaacaccaggtctgaagaaagttaaactcaaatggatacatcagtatgtgaaattgagcatgatttttaggtgtgctggtg

SEQ ID NO: 188555 - DNA, 407 bp, Homo sapiens
ctccatactccagccagaatctaggaacaatgtacctgtgatttatgttgcaatatttctctctaaaagtaaatagttaactcaaaaaggaggttttctcccggtacacacacttttcttttgctataaaattttcatgccaygtatttcagctgtgttgattgaaactcaaattatgagcctcagggcaaatgtaatatgagatttccaagagccttcctgaaattattaccagtttccccaaattaacttccatgaatttatctcagtgcaagagttgatcatacaaaacatgaaataaaatgataaaatatgttcccagatttttttgctttcagatttaatggagtcagtgccacagatgccaggaaagatgctcagctactctgacttctcatgttctatgt

SEQ ID NO: 188556 - DNA, 632 bp, Homo sapiens
atggtagtctatccaatgagatctgaagccatagcagagctccagyggcttagctacctatggagaaaggtgtagagatgcctcctttccttctgcccaccaatctcccactaacgattcccattggcaaaacccagatggaagccaactgataagggagcctgagaaatgcatcctagagtttagccttctggcaaaatgtaacagagatgtgtggaaaagagaggggacttctctcagggcaaagaaccagcagaacactcaacaaaaaatgtaaaaagagccaggcgccacggctcacacctgtaatcccagcagtttgggagaccaaggtgggtggatcacctgaggtcaggagcttgagaccagtttggccaatatggcgaaatccctcctctactaaaaatatgaaaattagccaggcgtggttgcaggtgactgtaatcccagctactcaggaggtgacgcaggacaattgcttgaacccagaaggcagagtttgcaatgagccgagatcgcaccactgcactccagcctgggcaacagagtgagactccatctcaagaaaaaaaaaaaaaaaggaagaagagtgttctttatcttctcattataggaaattctcagaagatatc

SEQ ID NO: 188557 - DNA, 581 bp, Homo sapiens
gaccatagctagataagcctttgtaagtgggagtccaggttatttgagccatgcaaatccttcatcattgctgctgtcatttatgtatccatttggccagcactggtgtggctgatgacaggccggctgatgttggctgggtaggtcactttgtctaatcggttgtgtcacttccgtgacatatgctatctggtgggcactaatatgtgatacaaagatcatcacaatttctatccattcacgtatgtctatccacatgcctctacttcactttctagtcaccagtgttccattctttctccctccaggttcatgaccaggtgggcaggccattcatcactgtccatgagtttgtatgaatttaacctcaagttagctctccttctatgaaaggaaataagcaggtccatctctctgccttgggagtttttcctggtctttcraagccatctctgaatgagattgattgaatgagatttgaatacctgccattcattttgacttgtacccaaatactaagccaacctatctatacgccaaactcagggtttttgtactcctttacctggtgtagtaaattc

SEQ ID NO: 188558 - DNA, 529 bp, Homo sapiens
aaagctacataatgatacctgaaattctcaaaaaaattttattctgtataatcctctattgattaagctacacaggaggtcattagtaaatttcttggtcattgttagtttttgtttagtttagacaaaaactcaaagaaggaaaaaaatggaaacaaagcctcagagtgttagaaaggtacaaaggggtagatgttttaacttatatgaaaaaatgatattccagaagtgagttagaattttgggtgccattagaaaacataataataaacyacgacataatcaaacagaaggaagtttgacagtagcagagaactctgggaaggaaaaacttcactttgtgtggcatgacctgagagtattgtctgtggtcttctggggctttaagttcctacccactgagagataccttcagatgtgagacatggctgcagagattcccaagaagttgccaagcgattatcagggaggaaccctgtgctcaaaccatcaaaatggatgtctcagcaccaatggccatcctttcttt

SEQ ID NO: 188559 - DNA, 418 bp, Homo sapiens
atacgagttagtgttctttyttttttaaatatcatgtttaagctcacagatacagttcttgctagtaaaattcaaaactgtatagcaatgctgcaagttaaacataataaaagatgattcatatttgtatataactcttccaacataataaatttaaggtacataacagactgcataaaatagtaatttcatcaatttcacctagtctaagcaattaaatgatttcacaactatgagcttcatattttatgcttatatgaatcctgtccttgcatgttttaaattctaacatgcttatttgtctcattttgcctaacattctaattcatgaagatataagatcaataaattggatagttatacatatagttatgagtatgcaactactagaaaatgtaatttatatacagcatataaa

SEQ ID NO: 188560 - DNA, 397 bp, Homo sapiens
ctctttaattgatgaaataaatatttttttaagcccgtgtttgttctrtttcatataagtcatgttttcaatttgttgaaaattataccttgacaaatagaagtcaatccaaggggccacatagaaggagcatgtaatccagaactgacgacccccaggtaggcttcctagagaaaggagtagccaagcagatacatgtacaagaagttctcaagtgatctcaacaaaacagattcaggcccctaaatcagtatttaggtcaaattcattgttgaaaaataaggctgatatgagcttaactgataaggaagaaaattggaactacttagctaaaaatctggattggtttaaactgcttcagtgttgcttttataattttcaaaaacggcagctcact

SEQ ID NO: 188561 - DNA, 455 bp, Homo sapiens
cttgaggccaggagcttgaggccaggagttcgaggctacagtgagctgtaatgatgcccctggcctccagcatgggtgacagagctatamcctatctcttaaataaataaataaataaataaataataaatctcagagccaagaggagaagacagactcataaacagattactctgtaacagtggtcagtgctgtgataggagtttgtatggtgcattgcagacaccaataagagaaggactccactcatccagcctgggagacagtgtgcaggggagccagaggcagtaaagcatagtggttcggggcatggtttcctacaatgttgcccatgttggaatctggctctgatactagttatctgacctgggtcaagtcacttgacctctctgtgcctcagttccttcatctttaatttgtggatgttaaaaatagtagtgcctacttatagtgtt

SEQ ID NO: 188562 - DNA, 561 bp, Homo sapiens
ctttcattgaaggatatcagtcccttccatgtttttgaatatcacatctatgtatgactatgtatacatatgtatatgtatacatgtatggctatgtatgactcccagagccataatttcaaagctctcaatctgagctttygactaaaatatccatctgcctgttacatagcttcacttattatctaagttggcatctcaaattcaatacgtccaaaattaacttactttcccacacaacttgttccaccttagcagttttttgtatttgctaatgacaccattgtcctttcagggactgctgttaaaaacatcctacatggccactctcttctaaaataaatcactgcgtagacctctgcattcctctttcctaaaattctttttgtcgttccataggcttacagtctccatcaaactgcttgtgactctaattagcacttacttcattctgacttgcatgctatatttccatctctgttccacatttcaagatttctgtagatagacagcaggtgctcaacaactccttgtagaatggctgcatgaaggttgggatgt

SEQ ID NO: 188563 - DNA, 593 bp, Homo sapiens
aatatgtatagcatgactttattttgttaaagatagctatataagtaaaatatgtgcatgaaaagatgcatcacatgatagcagatatacatcaccattctgttgttttttttcttttttacctcctaaataattactgaatccttaatgtttaattctgccatgctagtcaagctattatgttttcactttcactcctgcaggatcttcctaattggccttactgttgcaacccacgtggtccttgtttcagtttcttaaatgtgtgtttccacctaccattggactttgtacatgtccttccctctttctgggacttatcttcacctgagatccttcagatctcagctcaaacataaccttagccttctctgacctctttaagtgaaacttagtatgctaatagtatgatacgcccttttgctgtagcagttaccatagttacagataagtatatattgttgtgatgatctgatttcctggttcccccacccctgcaaaacaacarcaaaaacctttaccaggctctataacagggggaccaaacttgtttttgctcatcattgcctcacaaggtacctggcaccagtgag

SEQ ID NO: 188564 - DNA, 381 bp, Homo sapiens
tcattgatgaaggtggctacactaaatcacattgtcagtgtagacaaagcagccttttattgtaagaaaatgtaatttarcacttttataactagagaggggaagtcactgcctgggttaaaagcttcaaaggacaggctgactctcttattaggggctaatgcagctggtgacttaaagttgaagccagtgctcatttaccattccaaaaattttaggaccattaagaatttatgctaaatcaactctgcctgtgctctataaatggaacaacaaagcctggatgacagcatatctgtttacagcatggtttactgaatattttaagcccactgttgagacctgctcaataaaatgatttttttcaaaatattactgctc

SEQ ID NO: 188565 - DNA, 453 bp, Homo sapiens
gagctgattatgcaactaagagtgtggtaaatrtaagaattattataggatcaccatttttacacgtgacagctctggttgtttgtggagtaacaaagggaatatgaaaaaaaaaaaagttcgggcctgccctggattcaagtttatcattcctacacttgattaaaacacctaaatttaatccattttacaaatagccatgggtcctcagtccagatataaaaggaaattagatttcaatttaaaacaagctacaaacagtggaaaaccagaaaacactaaaataagacactggctaaataactacaacaaaatctcacttcttaaaaatccacgcctaaaaaaaaaaatccactagacaggaatgtgtggcagtgcagaaaggcagaagactgaagcgcacatttgatctaattgtgtaagagcttgctaaatcagttactacttgaaagt

SEQ ID NO: 188566 - DNA, 442 bp, Homo sapiens
gcgagctgattatgcaactaagagtgtggtaaatataagaattattataggatcaccatttttacacgtgacagctctggttgtttgtggagtaacaaagggaatatgaaaaaaaaaaaagttcgggcctgccctggattcaagtttatcattcctacacttgattaaaacacctaaatttaatccattttacaaatagccatgggtcctcagtccagatataaaaggaaattagatttcaatttaaaacaagctacaaacagtggaaaaccagaaaacactaaaataagacactggctaaataactacaacaaaatctcacttcttaaaaatccacgcctaaaaaaaaaaatccactagacaggaatgtgtggcagtgcagaaaggcagaagactgaagcgcacrtttgatctaattgtgtaagagcttgctaaatcagtt

SEQ ID NO: 188567 - DNA, 484 bp, Homo sapiens
ggcacaggattagcagtaaggaggtcctcctgggacagggttaggggagctctgaatttgtggaaagggatggaaggatgaaatacatccagacgtagtttttgcaccaaaagaaaatacactgaatgcaaatgagaggaagcattacatttgcaataaaagccccctgaaaaggtgaggcaataaggcataaattgttctttccccaggaactaccactaggkgcaatcttcctgtgtcatcatacacagatatctaaccacctctcttaaaaatacaagactatactttcctaagtgtcttattgagcacatcaggtaaaatgaaatccaacctcaatcaagcgggatgccatttgaagttcaacttccacccattggttattgatgctgaactccagtcttcctccacctctcatgtacccacacttcccagagctcttttccttcctgagtgtctgcagccagcactgggctagactaca

SEQ ID NO: 188568 - DNA, 599 bp, Homo sapiens
aatgacaagtgcactgaggaggctcatcggcaaccccaaagtctagtggttttcacatgaaaggggcatatgatgtaaggttactgaaacatactctttaaaaatctatatatatataggatatgataccgttcaattagtttagtgattggcacctagataatcaagttcataaatattttcaacagacagatattgaatctcaatgaaaaggaaaatcattatattaaaaaacttaagggaasgagcagcgactttaactaagagccaaacagagcccagtgactgagatgccttctccttgatgttaagtaggcaatgatatcatagcagaacgttttcttttgtgtattaatcaattactataatcaatatcattgtgctaagtgcaaagatcatctaggaaatcacagaatcttctatttgcctctttgcagtgatctagggtatggcaaccccctggggattcacagctgttatttgtttggaggaagatgttcttttaataaatgtgcctaatcaatgtccagccatcacattccacatatactgtacacatgcctaatttggcatcattatttctggggactttctaacca

SEQ ID NO: 188569 - DNA, 599 bp, Homo sapiens
aatgacaagtgcactgaggaggctcatcggcaaccccaaagtctagtggttttcacatgaaaggggcatatgatgtaaggttactgaaacatactctttaaaaatctatatatatataggatatgataccgttcaattagtttagtgattggcacctagataatcaagttcataaatattttcaacagacagatattgaatctcaatgaaaaggaaaatcattatattaaaaaacttaagggaacgagcagcgactttaactaagagccaaacagagcccagtgactgagatgccttctccttgatgttaagtaggcaatgatatcatagcagaaygttttcttttgtgtattaatcaattactataatcaatatcattgtgctaagtgcaaagatcatctaggaaatcacagaatcttctatttgcctctttgcagtgatctagggtatggcaaccccctggggattcacagctgttatttgtttggaggaagatgttcttttaataaatgtgcctaatcaatgtccagccatcacattccacatatactgtacacatgcctaatttggcatcattatttctggggactttctaacca

SEQ ID NO: 188570 - DNA, 580 bp, Homo sapiens
actattaaaataaatttatattacttggaaaggagggaatatcattttttctctcatatttgtttattaatatgtattcattttctagattaactagttattatcataaacagactatctgggccctaagatgagtggggagatgggagaaaggtcagttgctatgggaaatgatggggggaaagtacgaaacacaatctcaggagtcatcagtcttccttattagagaggttggggtaaggtcattggttgtcccagttgggcaattctatgtaggcaagagtgagccacaaagatttttttttctcctatatacttagtccatggagctataatttgtgtattgattgtgctttcttttgtggaagaaatctattataaaagatagaaaagaaacagaagtgtaggtgttttccaaaattatggcataaattcagaatgttttagattactgcatttgtcatctaaaacatttgtgtcaatttgtgtttgcacatkaatctattacttctacctatgctttgtataatgctcagtttattaagtataaagaactactaagatgttttctctaaacatt

SEQ ID NO: 188571 - DNA, 465 bp, Homo sapiens
tttttgctggtagaggatcttgcctcaatgttgatggctgctgactgattagggtggtgattgctmaagggttggggtggcagttgtaatttcttaaaataagacaaaaatgaagtttgccacattgattgactcttcctttctccaaagagttctcttagcatgcaacggtgttgcctagcattttacctacagtagaacttctttccaaagtggagtcaatcctctcaaactctgccactgttttagcaattaaggttatgtaatatttgaaatcctttgttgttattttaacaatatttacagcatcttcaccaggagcagattccatctcaagagacccctttctttgctcatccacaagaagcaactccttagctcttcaaatttgattatgagactgaagcaattcagtcacatctttaggcttcacttctaattccagttcttttgttatttccacaa

SEQ ID NO: 188572 - DNA, 493 bp, Homo sapiens
tcttcaaatttgattatgagactgaagcaattcagtcacatctttaggcttcacttctaattccagttcttttgttatttccacaacatctgmagttacttcctccactgaagtctttaacctctcaaagtcatctgtgagggttggaatcaatttcttccacatgcttgttgaccttgatattttgacctcctcccatgaatcatgaacattcttaatgcatctcgaatgtgagtccttctcagacggatttcaatttgctttgcccagatccatcagagcaatcactattcatggcatcttacagaatgtatttcttaaataataaggcttgaaagtcaaaattactccttgacccataaggtgtaaaatggagggattagcaggcgtgtaaacaacattaatctccttgtacatctccatcagagcccttaagtgaccaggtgccttgtcaagaagcagtaatattttgagaagcatctatttctgagca

SEQ ID NO: 188573 - DNA, 493 bp, Homo sapiens
tcttcaaatttgattatgagactgaagcaattcagtcacatctttaggcttcacttctaattccagttcttttgttatttccacaacatctgcagttacttcctccactgaagtctttaacctctcaaagtcatctgtgagggttggaatcaatttcttccacatgcttgttgaccttgatattttgacctcctcccatgaatcatgaacattcttaatgcatctcgaatgtgagtccttctcagacggatttcaatttgctttgcccagatccatcagagcaatcactattcatggcatcttacagaatgtatttcttaaataataaggcttgaaagtcaaaattactccttgacccataaggtgtaaaatggagggwttagcaggcgtgtaaacaacattaatctccttgtacatctccatcagagcccttaagtgaccaggtgccttgtcaagaagcagtaatattttgagaagcatctatttctgagca

SEQ ID NO: 188574 - DNA, 576 bp, Homo sapiens
cattgccagtaatgctggacttcagttcaagtgtatgttatgctttgagacattaccaattgaactacatgtagccaatctataaatacatggggaagtgcagctcaatggtttttttactgataatacctgaccaaaaagtgtgatgtaaaagaccttgacccagctcatcttagggcactttccataattcaraagacactggcaggtattgaatggctagatccagataatcctcgggaaatgtttgagcctctgaagtttcaccttcctgctcctctgtttgagcctccagcgctgtactagcacagccctaattacctttgtaaacacaggcaaaatcattttcagctgcctgggactctgcctggcaggttttgcttttcaccaaattcactgttgtgcatcaggcgaggttggaatgatttggtcttgatttggattcagaagctccattcacttactgctgtaagcaaagtttaatccaaatatttacttcaataaatttggtccaaaacttttctcaaattaactaaggcaaactgttcagccaggttactgtagagagccctagag

SEQ ID NO: 188575 - DNA, 576 bp, Homo sapiens
cattgccagtaatgctggacttcagttcaagtgtatgttatgctttgagacattaccaattgaactacatgtagccaatctataaatacatggggaagtgcagctcaatggtttttttactgataatacctgaccaaaaagtgtgatgtaaaagaccttgacccagctcatcttagggcactttccataattcagaaracactggcaggtattgaatggctagatccagataatcctcgggaaatgtttgagcctctgaagtttcaccttcctgctcctctgtttgagcctccagcgctgtactagcacagccctaattacctttgtaaacacaggcaaaatcattttcagctgcctgggactctgcctggcaggttttgcttttcaccaaattcactgttgtgcatcaggcgaggttggaatgatttggtcttgatttggattcagaagctccattcacttactgctgtaagcaaagtttaatccaaatatttacttcaataaatttggtccaaaacttttctcaaattaactaaggcaaactgttcagccaggttactgtagagagccctagag

SEQ ID NO: 188576 - DNA, 623 bp, Homo sapiens
tggtgtctggtgagagcccatttcctagttcatagatggctatatcactgtgtcctcacatagtggaaagagggcaagagagctctctggggtctctttataaggtcactaattccattcatgagggctccaccctcataaactaattacctcccaaaggtcccacttactaatgccatcacactggtgattaagatttcaacatacaaattttgaggggacacacacatgcacacattcagtccattgcgacggtgttttctggggtagtaaaaatagatttccatgccccaacactgaaagcagggaaagcttagagccacctgttatccttactgcttcctctatatcatattaatatgatataatttaaaatgacagtttgccacagcttttgagcagataatgcacttaattttgtagtgtagaaacatgagtctctttttaatgccatatatttgatttttagtagctggtgaaagcattttcctccaggatgaatcygttctatgctgaaccaggttgtcttggatgaaggacctctctcccacaccagctgggtgtgcctgcagtccactttctcatctatactcacccaccctccttaaccaacacaattattt

SEQ ID NO: 188577 - DNA, 604 bp, Homo sapiens
actggtttggaacaacagtggtataaaaaatcagtacagggtaaagaaaaatactggtagtggataaaagaaccagataccttaccagacatttatagagctcaagtccaagattccaagataggagataatcaaataaatagctgcctcttctgtaattgcattttaaaatctcattctatccacacaaattttccccctactgtctgatgcatgcttgggttgatacttttttttattaagacagatttattggtcaaagwtttaattttaattcccaggtttgtttaaaagaaggcagtttcacaacccagttgttctggatatttatggaagacgaccaaagaagctgagatagccagaagaaaaaaaaaaacaaaaaacaaaaaactctgcagtttagcattcttgtccctgtaggatccttccttatattatggaaatttctgcagaccttaggccatgagtattgaacagatctcaccttccacagtttctcattgacctacagcacaatatagggttttttgaacataaaagaatcattgacaacctctctattactctaagaaattgtttacccatgtgataaagaagcctctca

SEQ ID NO: 188578 - DNA, 597 bp, Homo sapiens
cacttactcaacatttaatgaaatgacttctgtactagaaattatgctgcataggggtgggggattcacaatgaggaatgtataatccctgaacctcaagagctcagtctagagagtttgtgtatattagtttcctagtgctgctgtaagaaaacagcataaactatgtggctcaaaaaatagaaatgtattcacacagagttctggagaatagaagtcttaaatcaaggtgtggataggcttggcttattcttgggggctcagagggaaatctgttcttctagattctggtggttgctgacagtcyttgcaaactttggcttgtagcagcaaaactccaatctctgcctctgtcattacatggccttcttcactgcatgtgtttgtgtccaaattttcctcttcttatgaggatactgatcatcatatttaggaatcaccctaatctagtatgactttttctcaaattcattttatctgcaaataccctatttccgaataaggtcacattctgaggtactgaagttacaaattcaacatagctttctaggagcagacacaattccacccataacactatccaacaagaccctacat

SEQ ID NO: 188579 - DNA, 556 bp, Homo sapiens
tatcctacaaactgggtaggcaaggcagtcatgaggaaagaataaagttgctttcagttgtacctgacagaacccagcttgttcctcacatggcttaaaacaaaaatgggtgtttgggtaaagaggctgtgatgtagcctgtgttaaaagaatcaaccattaggccgagacaactccagtgccttgggttcctacataagcaaaccaaaacccatctcaatagaaacaataaaattaatttaagcctaaccaatcagaaacctccaactagagactttaccaatcagmaactgacagctaacctctaactagggtctttccaccaggtcatacccaaataaggcaaatgcctagttatagccagtcaagtactacagtctctcctcatttgtaggagattcgttttaggacccccactgatatcaaaatccaaggattctcaagtatcttgcataatttatttgcacctgacctatgcatatcctcctatatactcaaattatcagtagattacttataatacctaatacaatgtctacacatcacttcatctgag

SEQ ID NO: 188580 - DNA, 577 bp, Homo sapiens
tgtttgggtaaagaggctgtgatgtagcctgtgttaaaagaatcaaccattaggccgagacaactccagtgccttgggttcctacataagcaaaccaaaacccatctcaatagaaacaataaaattaatttaagcctaaccaatcagaaacctccaactagagactttaccaatcagaaactgacagctaacctctaactagggtctttccaccaggtcatacccaaataaggcaaatgcctagttatagccartcaagtactacagtctctcctcatttgtaggagattcgttttaggacccccactgatatcaaaatccaaggattctcaagtatcttgcataatttatttgcacctgacctatgcatatcctcctatatactcaaattatcagtagattacttataatacctaatacaatgtctacacatcacttcatctgagtggattcaatgtaatactccgtgcataacaaattcaagctttgctttttggaactttgtgcaattttcttttcctggatatctgtggttggttgaatttgcaatgcgaagcccatgaatacaaatggctgc

SEQ ID NO: 188581 - DNA, 556 bp, Homo sapiens
tatcctacaaactgggtaggcaaggcagtcatgaggaaagaataaagttgctttcagttgtacctgacagaacccagcttgttcctcacatggcttaaaacaaaaatgggtgtttgggtaaagaggctgtgatgtagcctgtgttaaaagaatcaaccattaggccgagacaactccagtgccttgggttcctacataagcaaaccaaaacccatctcaatagaaacaataaaattaatttaagcctaaccaatcagaaacctccaactagagactttaccaatcagaaactgacagctaacctctaactagggtctttccaccaggtcatacccaaataaggcaaatgcctagttatagccagtcaagtactacagtctctcctcattkgtaggagattcgttttaggacccccactgatatcaaaatccaaggattctcaagtatcttgcataatttatttgcacctgacctatgcatatcctcctatatactcaaattatcagtagattacttataatacctaatacaatgtctacacatcacttcatctgag

SEQ ID NO: 188582 - DNA, 600 bp, Homo sapiens
aatgcctgtgaaggaacaagcaaatgaaagacttcctagaattttaatgagccctcaaataaaggcttttgaggaggtcatttcatctctcacaaattagcaagaagaaaaacaaacacaatggtgaaaagcactaaagattcagattaagcagctggatttaaacatgctgagacacaagacagkcagggctttgaattgctattggctctgaagcaagaactttctctcatctgtgctgaacaaacatcacccaggatgcggggagctggagccagttgtgtgatcatgggaataaccccagaatgccaatggcaacctgactgtaagggtaggcaatgaggcatgtgtaatccaggcaacaatacttcggtacactgacatggcccagaatctccaaggcttattggacctcacttcttgcctgctgttcttgaaaggattttgataaagtttcagcaacttgataaaggattatccaaaaacctgtggaagctttctttgtatttaagtcagattggataaattttttattaaaataaaacaatttttttgaagaactattgatagatcattttaggaatctgtaaacaagttttg

SEQ ID NO: 188583 - DNA, 582 bp, Homo sapiens
acatttaagtctaaagaagtcacatttctggggagcagtagaagagagccctatctggagcccagatctcttggccacctctgtggggtctctttccaccccattaccctgtctgaaatccaactagtgaattaggtcagaaggatcttgggatttaacattgtttgagctgatgattctgatcactactctatgagaggaaatgtgggagtgggactctcttgaatgcagcagtttgtaactttggcagtttataagatctacttgctgaactttaaaaaaattccaatgtccaggccacatcccaggccaattaaatgagaacacaggaggtgggactcaggcactattatttttaaaagctcgccaggtgattttaatgtgcagccaagtagagaagaactgcccttacatttttctcagtaaagacagatgcaaaggttttgattaagaatcaccgtaacctcagccacccagagggcaattaggaagcacttcaaattaacttgactccctmtagcacaatgccttatgcatagaggtgatcaataaatatttgttgctgtaggaagatatgacact

SEQ ID NO: 188584 - DNA, 517 bp, Homo sapiens
atacaggctaaggaatatttagtgataacaggagttcttccattgaacaaacacatgaagaagactcaaaaacatgtaaacacttctacaggactttgagttccaaaagactggctttccttgaggatttctaatgtgaaatgtgattggtatgtacatccagcagaaatacccactgtgctttgtgcccaagacagctcagaaatggggtaggttccaattgcctggattggtagcactagtgatttgtgtctgagatcttctgggtgtttatgctaagagccctaaaatgaaatgagccatcattattatttggattctttccactggggcaagaggcctttgctgarccatctttaagatgaacacatttgctgctctgtggttggaggggatgagctaagattggaaaagatgcatttgtgatgttgcattgcatcttgtgtgagaacctggaggtgaggcagcatttctcagtgagcaattctaatcaaggagaattaaccctaactattgg

SEQ ID NO: 188585 - DNA, 614 bp, Homo sapiens
tgttgctccttttcctttttccatctgccagccttatacaattctcaaaatattttaaagacaaatgcttttgaataatagyggtagctaacactttctgacagcttccaatgtgacaggatgagaaatgagccctctgcaaggactgcttatgtcaccttcacctccatcagtgaggtaggtgttttattagccacgttggacagaattggacactgaagtcaagtgcacagtcacaaagtgtagaacctggtaagaaaaagccccaagtgcctgatatagagtatgtgtatgagttagaattgtgtttggctgcaagtaatagaaaggaaaggaaaaaacctcactccaattttaaaaaaaagttttatttttaattacaaacaattatatatattttatggggtaccaactccaatattttaaatggggatatagttttaccacattgcaagagatccagagttaggtagatacctagattggttcagcaaatcaactgtgctaggacagatgtctttcaagatggctgtacagctctagtgccacatccgctttcacagccagaagaaacaggacctccttcttagacattttgcttattaaagaaggaa

SEQ ID NO: 188586 - DNA, 499 bp, Homo sapiens
ggtggcaggataacaattagcctgcaaatccatccatttaaattaaaaacaaaatgcaacgggattgcaggcagaatgtgttcaaattcccttcctatggattcaaggtgggcccagccctcctcctggaccaaggatacctggagactggactctgggggttggtgacagaggggagaaggcaagacacagtcccggcccattggcttcagctgtgaaccatcgttgtggaggcaaatctgcagctgaaaactaggctggcaggccagctggttgcccatctgaagaagctaagcactagcagaggtgcaggtccagggtaaggcaaatgggtggaaaattgagagcaggacacccagcaagacgttctgaacaaaaggccagaggtagagcctcccagsactgcaggctcatatcttcagatgcctctgacatcactgagaggagaggagtagaaggggggaaggaagaggttttaggggtcctcaggaagccagga

SEQ ID NO: 188587 - DNA, 580 bp, Homo sapiens
ttttcctcaccaacctgtcccacagccaccctgaatttccctggtgtaaatggacatggtcatttcatgctaacctcatggaatactctgaatactagtgaaacaggtccttggtccagccctgtgtagtcatttattggaagtaattttgttttgttaatgtccttctcaggatttttagctcttatatgaaagtattccaatgctactctcaagaacccagaaaggtcagatattttagtttaagcccatctctaattaattgtagtatttatgtttaaatagatcaatagctgagtttgacctcaatgtacaatgtgagctttacaatatcattgcaatatgaaggaagctgtgatgtgtgggccaggcagaccacttatatcgaactcagcaatatggacgagaagcttttgttctaatgaacattgtatttcaatgttaaaaatgggaaagccacacttgggttccatccacagctgagctctgaacctgatttttttttggaggattctgggggaaagaattatagyctccttttagcagtaagacaaacccagctggctggaaaccacagcca

SEQ ID NO: 188588 - DNA, 541 bp, Homo sapiens
acacttcactgggataacattcagtgttcttattaactttcctcccaaattcaaattcaagctctgttgctgggatatgggaacctacatctcatagtcrtactatctcctttttcctagggtcctacaagtctaggattctaggtcatctcatggccttgcccctccatgcctggtgccactactcctgccacaagggtctccctgccattcttccatcactggctgggcacctctggtttttctcctccctctgccaaggcgcttttctccccatctccctggaatgctacccataattcacaatagacctaatgctctgtttttcaaaccttcccattccccatagtctctaggtcctttgggcccccatggcagtaatctcagtaatcacattctgccatatttcataggtcagttgtatatccttccggttcacctcttggattgtaagttttttgaggttctgggcaatgagttgtgcacattcgtggtccttataggatctaactactactaataatattaatatttacatagc

SEQ ID NO: 188589 - DNA, 450 bp, Homo sapiens
ctttgctgtgcagaagctgcctagtttaattagttctcacttgtccatttttgttttggtgccattgttttagaggacttagttataaattcttctccaaggtggagtccagaatgatgtttcctaggctttcttctaggatttttatagtctgaagtcttacatttaaacatttaatctatctcgagttaatttttgtatatggtgagatgtagrggtcaagtttcatttttctgcatgtagctagccagttttctcagaattatttattgaataggaagtcttttccccattgcttattcttgtcaattttattgaaaatcagatggctgtacacgtgtgcctttatttctgggttctctgttctgttccatcgttctatgtgtctgtttttataccagtatcatcctattttggttattttaactttatagaataatttgaatttgg

SEQ ID NO: 188590 - DNA, 567 bp, Homo sapiens
aatgaaagatgttctaattattttattccatgttattgtttctcttcagggtaaatgtcttgttgaaatattaagcttttttcctgctaaattaaaagtcagacaagtttacatgtgtctgatattttaaacaaaattcaagtatttaaaatctaaaaatctcctcaataaagttgatgataaacttgagtgctataggaatgagatataccaaagccttttctaaactagaaaattatgtaatttgggcttagaagagacaattcatgaatagcatcatcttgaaaagtttacattacttatactttgaatagtgagccaattcaagtctgagaataagaaatgaaaagaataaatacatgtaattttgagttttttagaattcattttaaagccacyaactttattattactaagatgcaagcaaggcttcagcagctatagggcacctgatttattttgagtaagaaaaacatgataggtaattcattaataaatttatttacaaatttcttcataaggaagggcttagagatgagagaatctctcttttaataatatagtcat

SEQ ID NO: 188591 - DNA, 571 bp, Homo sapiens
attgtttattgccctcacaaaagtaaataaagggaacagatataaagtctgatccatggttgcattctgaatatcatctttatgttatttctaaatataattttcctctgaaacttctgcaagatttgcctggagtatttgggccagtttagtaagagctggtacttgtttccatcatttccatgaagtcataggggttcagaatataccacctcaaaatatgacactttggcatgaaaactcttatgagctrgaggcaaaagaaaatccacacatgcagaaataagccttctcagagcttccattatataaccagaggcagaagcttctgagaaatgaagactgccataaatcccctctttccagcaagttttatggtcctgaagaagatagaaatttggctaccagacggttctgcataaacaaatcttgctaagatactccttaccttacatctgtttcccccgtatatttaccttcccaaagtttgcaacctcaggaagcctaaaaacttgttgtttttttgtcttttcagttctgtacaaatattgatatttgttaagatgctata

SEQ ID NO: 188592 - DNA, 533 bp, Homo sapiens
ttcactcctattagatgagcattggcctgaggttcttcctcagccaagcagagcctgtctttgtctcctgagaggcagaggacagcagcaaaacccacccccttgccttgccaggcaaaacactaagcaatcataagttagtaaattacaaatgcatttgatgtgtagagctgccaggaattttggttgtgttaaccaggtacctggaataattggatcaatcttagaatgttttgcatgccaagggtcactaaggtaaccracaatgactaggaaccaacaatgacaatcagtccctgcatgtaaggacagttggccctgggcacctcaccctagttcttagctctgtcttgttgtaggagcccagtttcttcattcactcaaaaaaattaagcacatattatgtgctctaggttctggggatatggtactgaacaaaacatggcttacatcctataggtaatgactaattattgtgctttctacaccccaggtactgttataaatatttctgctttatttcttttaatact

SEQ ID NO: 188593 - DNA, 482 bp, Homo sapiens
caattgtaacagggagcattataaatagggattttcaaccttgtctgcacactggaatcatagggattgaaaaaaaaatgcctggacactggcatttaaaaaaaatatctgggcaattcttatgcacaactagggttacaaatcaaccaatctgaaccacacacaacccacctttttagcatcttatagtagaacccatcaagttggtgtgaaaacaaaggccaagtgcctgaggcctgagcaagaaacayggacaaaggcagaagaacacactattttccaaatgttttcatttctccacaaagctgtcatgcagtaatgttatacttgtagcaagaattactatcaaactccactcattgggccagagacccttgtggtgttagcgaaaacttgcccctcatgtagcacactacctacacttgcgagttcatcggccagtcagtagcctcaactccaagctctaacaatgtgcacaggaa

SEQ ID NO: 188594 - DNA, 602 bp, Homo sapiens
tcccatctataattttacctggtgccattattcaatttagatatattgcataggatgtgccaacaatcatatttataaccaataattacatgattttgcttgggtaatctctttcagtggtgaacttcaggtcacaacaataaccatcagttcaactacaccaaggtttctgaagacaatgtcttctccacccaagcagtttgtatataaattccaaatagaaccttgcatcagcytgaaagaattctaacttcacactgctgggggaaatttaccaagatggcttcagagtagactaaccttacacagcacattagaaaagaaaagacatttattcagcatcatgatcagactattacatttagcaatcaacagcatgggtgcaaaaaaaaaaaaatctacattaagaccctttgttggaatgctttacactttccacagaacagaaactaaaataaccgttatacaattagtcacaaatacagtcctcaagatttttgctcatacacataagtatttgtctaaaacatgtcttctttgtagcagctaagccctgccaccactatgctttgttgagttcacaaatctgttgtaacctgtag

SEQ ID NO: 188595 - DNA, 641 bp, Homo sapiens
tgctagtccaatatctgacaaaaactcattgtcacctctctaggcttcagctttctcacgtgtaagatggagggcctgaacctagtggctccaagttcctttttctgggctaatatcatatgaatcagggatcatgatctccagactcccttggtcctgactttcaggctaatgcaagccacagaggagatataggagataggctggggcacagattgcaytgaggaaaatgcatatgcataaacaaagttttgccaacagttctgtattatttagagcacccctgcaagcccagttaaaccctactggtgtagggggtttcaacataccagggacagctttagcaatcttagtaaggtctgcttctttaaggaattgcacagagcaccaacaacctggaagtcttgtccatgacccatccacagtcttctccatgaactcattgtagagcctcaccatgatggggctccagctggcactggggagggagtaatcctttgtatcagactggaggtggctactgcttgagacctgaaaagtccaaaaggggtggtggactgtcccccagtaccttccgatttgactcattcattcaagcatttactaatagatgagtctgttttcatcttgcagagcatgta

SEQ ID NO: 188596 - DNA, 458 bp, Homo sapiens
agctgctttttggtagcgagacttgctgtgttgaaaggctactctttgtccagatgcctagactctccagagctggcaggcttgaatagctgagtcaactgaagtgcagatatggaagccatccctgccgcctacsctgcccccaccaagttccctcccagggagagatcaggtctttataatactggctgaagtaactgaacgagtcccacaggaagaccccacccagtgaggaggacttgatcggggtctgcttacagaggcagtctgggcacaatctggcaagtcaaatgtgctgcattagggggttccctcttgtcctgaccacctacactctccagagctggcaggctggaatactagttgaccgcactatgaaaatagtgcccacccctcccctgggaactccttcctatctcaggtgggctcagcctgttgcccctggctggctggaattc

SEQ ID NO: 188597 - DNA, 511 bp, Homo sapiens
tgctaacatcaaaagaatccttaagtaggggtaacagcaacagggttggaggtgaaatgtaccttcaagccaaaaacagcctgaaggctgtaagaccagactgctggtcctggatgaaatccatgacgcaaagtgagaatttctgttcctgtttgcctgcccctcccctattctgagccgataaaaagccccaggactcagcctcatggaggagactttcctgccttcsggtagggggaccacccccgcttccctctctgctgaaagctgtttcatccctcagtaaaactccccgccttgctcactcttcaattgtcagcacatcttcatttttcttgggcatggggcaagaactcaggaaccaatgtgcaaggcaaacttgtctcaggcgggcaaattgcgtggggtgcctcctgcagcaggtagtatgccccgagctaggcctccggcattgccggctagaggtccttgactggcaaagggactgagaaaaatcctgcattgagggaga

SEQ ID NO: 188598 - DNA, 655 bp, Homo sapiens
gttttgctgattttaacctcgtcctgttgagtaactccatgcaggtacagtggtacraacacatgtggacacacagacccagacctttatttcctcggggattctggtaagtgtagaggtgtcttgaccatagtcaatagcagaaatatgcacaaccacaagctctgaaattccatttgattgttgctcttagccttccactttttaggcatatgtcagtcccatttcatcccacccactctctccatttgggaggtggtagagtgagacaatactgaactataccagggctgagaataagtgtctttgaaaagggtcgaatctgtgatgctagagacagccctggaaactgtcaggagttagcccaaccaggactgtgaccagatcccaggctgtccaccacagatttgcaggctacctgcagatgtgactttttcaaatgtactcaaagacaagctgactttggctaatgcagaaattaattaattcctctttttcagtaaactttatcctcctacacttagattgtctgtaagtacatctctggagttgagctcaactagaaagaagctgtctgcatttagttaataccagcattggatgcacacaatataatttgaataatgtagagcaacattttaatcatctctcataa

SEQ ID NO: 188599 - DNA, 593 bp, Homo sapiens
gtccctgtctttgttttattcccttctatcttcattcaccactctcatttcctctctctccactagaaatcattctcaggaatcaaattaatattattctggcttatatgtgtttttaaaaatctcatcgctttttatacatgtaattttaatttatgtaagagactttgtcctacagatttcattgtgtttcttctctttttcgcccagcactgtgtgttccatttctatccagtctactatgtgtacatcaagtccatcatttctaactgttgcatagttcatgatgcgaggcatcttccacattgtatcccaattccctaactggaatcccagttccctgctacctcacacaatgctccagtgaacagctggaaaatcatacaacccaaggaattattgaaagtgattatatcccagcaaaaggccyaggcccatcttacacttccaccccaagaaggtactgctacttttcgggaatggcctggtctccttggcgaaattggcaattggcatttgatctgttctcatcactgtcgtctggcatcagaagtgaccccacttgtcaggcactgtactcagtgctttccatg

SEQ ID NO: 188600 - DNA, 588 bp, Homo sapiens
taatggctcatctttgaaatagtggctggttactgtcttgtcttttcacttcatcccaagaaattggatgaattattccaccttgtcaagaagagtgtcgtagagtcatagaatgttagagttgggaggtactctcactacttcatttttaagaaaaatttaggttagtgtaatgctgaagtttgggcttctattgatcccatctctcctattgaacatagtttccaataggagatttttcagtcctttcatctckcatcctctacccctttttggattccccagtgtctattgttcccatctttatgtccatgtgtacacaatatttagctcccacttataagtgagaacatatggtatttggttttttgtttctgtgttaattcacttaggataattgcctccagctgcatccaggttactgcaaaggtcatgatttcattctttttcacagttgcatagcattcctattccatagtatgtacgtaccagattttcttcatccagcccaccattgatgaggacccagtttggttccatgtctttactattgtgaatagtgctgtgataaacatacaagaccaggtg

SEQ ID NO: 188601 - DNA, 588 bp, Homo sapiens
taatggctcatctttgaaatagtggctggttactgtcttgtcttttcacttcatcccaagaaattggatgaattattccaccttgtcaagaagagtgtcgtagagtcatagaatgttagagttgggaggtactctcactacttcatttttaagaaaaatttaggttagtgtaatgctgaagtttgggcttctattgatcccatctctcctattgaacatagtttccaataggagatttttcagtcctttcatctctcatcctctacccctttttggattccccagtgtctattgttcccatctttatgtccatgtgtacacaatatttagctcccacttataagtgagaacatatggtatttggttttttrtttctgtgttaattcacttaggataattgcctccagctgcatccaggttactgcaaaggtcatgatttcattctttttcacagttgcatagcattcctattccatagtatgtacgtaccagattttcttcatccagcccaccattgatgaggacccagtttggttccatgtctttactattgtgaatagtgctgtgataaacatacaagaccaggtg

SEQ ID NO: 188602 - DNA, 550 bp, Homo sapiens
atgggcatccttgtcttgtttcagttctcaggggggaatgctttcaacttttccctgtttagtataatgttggttgtgggtctgtcataaatggcttttatcaccttaaggtatgtcccttctatgccaattttgctgagggttttactcataaaggaatgctggattctgtcagatgctttttctgcatctattgagatgatcatgtgatttttgtttttaattgtgtttatatggtatatcacatttattgacttacatatattaaagcatccctgcaatcctggtacgaaatccatttgatcrtgttggattatctttttgatatgctgttggattcagtttgctagtattttgttgaggatttttgcatctatgttcatcaggaatattggtctgtattttctttttttttgttatatccttccctggttttggtattaggatgatgctggcttcatagatgatttaggggggattccctctttctctatcttttggaatagtgtcaataggattcataccaattttttaaatatctgatagaatt

SEQ ID NO: 188603 - DNA, 604 bp, Homo sapiens
taatactaattcttagtctgtgtcgttgagtgaacgtttgtgtccctcgaaatctatgtgatgaaatcctagctccaagtatgatggtatatgaggcagggacttcgggaggtaattaggtcagaaggatggagccctcatgaatgggagtagaactcctataaaagagaccccaggggctgggcgcagtggctcacgcctctaatcccagcacactgggaggccaagacaggcggatcatgaggtcaggagytccagaccagcctggccaatatggtgaaacctcttctctactaaaaatacaaaaattagccaggcatggtggcgggcacctgtaatcccagcttctcgggaggctgaggcaggagaatcacctgaacccaggaggtgggtgttgcagtgggctgagatcgcaccactgcactacagcctgggcgacagagtgagactctgtctcaaaaaaaaaaaaaagaaagacagaaagaaaaagagacctaggtagctctctctttctcttcctgccatgtgatgatataaggagaagacagcagtatgcaacccataaaagaactctcaccagaccccaacaatactggactgggtt

SEQ ID NO: 188604 - DNA, 604 bp, Homo sapiens
taatactaattcttagtctgtgtcgttgagtgaacgtttgtgtccctcgaaatctatgtgatgaaatcctagctccaagtatgatggtatatgaggcagggacttcgggaggtaattaggtcagaaggatggagccctcatgaatgggagtagaactcctataaaagagaccccaggggctgggcgcagtggctcacgcctctaatcccagcacactgggaggccaagacaggcggatcatgaggtcaggagctccagaccagcctggccaatatggtgaaacctcttctctactaaaaatacaaaaattagccaggcatggtggcgggcacctgtaatcccagcttctcgggaggctgaggcaggagaatcacctgaacccaggaggtggrtgttgcagtgggctgagatcgcaccactgcactacagcctgggcgacagagtgagactctgtctcaaaaaaaaaaaaaagaaagacagaaagaaaaagagacctaggtagctctctctttctcttcctgccatgtgatgatataaggagaagacagcagtatgcaacccataaaagaactctcaccagaccccaacaatactggactgggtt

SEQ ID NO: 188605 - DNA, 527 bp, Homo sapiens
tcaagttgcactaggtgtgtagagaaatggatggtgttagtgggcaaaatatccccttataacttcacattgcataactccagggctatcagtcacacgtagcttatgtctatggggtgacagtcatataaactttactccccattgcactattccagactccttccacccccgaatagtgcaatgtggagcactgtccattatggaattgaaagtcctgggttttggtgttgggattctgttggttgcaagtaacaggaacaactcaaatagtttaaacaatagaggtgatatattggctgtgcattccagggttagagctggcctctctgtttccatctcttggtattgtcttcctgtttgtgttagcttcattacttcttactgctatgtgataagggttggaatgtgtgtgtgcgtgtgtgtgygcgcgtgtgtgtgtctgtgtgtgtgcgtgtgtgtgtgttggaggattacatctgagtgatattttccttggcagccgtatcagaaccacagggaaaagt

SEQ ID NO: 188606 - DNA, 576 bp, Homo sapiens
catgttgctgcaaaggacaagatttcttttttcttttctttttttttttttgaaatggagtctctcatcctatcatccaggctggagtgcagtggcatgatctcagctcactgcaacctctgcctcccaggttcaagtgattctcctgcctcagcctcctgagtagctgggattacaggtgcgtgccatcatacccatttaatttttgtatttttagcagagacggggtttcaccatattggccaggcttgtcttgaactcctgaccttaagtgatccacccacctcggcctcccaaagtcctgggattacaggcctgagccactgtgcgtggccaagctttcattatttttttayggctgcatagtatttcatggtgtttatgtaccacgttttaaaaatccaatctactgttgataagcacctaggttgattccatgtctttgctattgtagataatcctgccaagaacatatgagtgcctgtgtctttttggtagaacaatttatttttctttggatatatacccggtgatgcaattgctgggttgaatgttattaataggtccgttttaagt

SEQ ID NO: 188607 - DNA, 479 bp, Homo sapiens
caattcatagtgttaactgaagggtcatttctttctaatttcatagaaatcaaagggaaagcaaaatggcttttaaatttgtcttgatgacacctgatttgaaacccttaraatatggaagctgctaaaaattcaacctttgcattacatacagaaacacacttggctagggcttttgcacacatgcacatttgcacatttgcacatgcctcaatctcggtgaatgtatttgctccatctgtgaaagtgaaaatagaattgtatttagaaggccaactctgtttaaatgtaatgcatattataaaaagaagaggaaaaccataacataggtataatgttatgcaaatttctggtttctttggcaattagccaaaataggaaaagctaatatctgaatttcaacttttacttcttatttcctcctggcaattgtcaatgcttatctttatcaaatgaagaagaaagtgaagggtatgcta

SEQ ID NO: 188608 - DNA, 545 bp, Homo sapiens
ttcaaagccaaccacagagttccatggcaggaggtcatttgtaacttgtgaaagcatgaacttggacttcatggctttaagccttagctggtgagtaagactagccaatcagctacttaccctctgtatctcagtgtggccatgttattttacagttattatcagatctgcagacactctctaaagagaagaaaacattatatgtaaaattgcctgaaaatcaaagtggtactttcattagggcatccatagagggctctgcatagaaacctcaaaacgtaaaaacaaccaaatttcacaaccgktttatttaaatgggctcattgctttaatctgtatttcaacatgttgctaaatactcaggccaaaaagtactaagcacttggaaggggtggaggttggggggaattatcttcagctcattagtggcaagctcagggaaacaacagaaaaaaatcttttggggtcatgggctgggagaatgaaaataaaccaaggtttttaaaataaataaatactatcttgtcaaataaaacatacagcca

SEQ ID NO: 188609 - DNA, 352 bp, Homo sapiens
aattttagagtaaagaaaatacagttagttaataactacataaagacatgtataacaccaccagtcccagagaaactcaaataaaacaatagataccactttacacacatccagctggcaaaaaatagaaaaccaaacaatgtcaagtgctgatgaggatgtgcaaagacaaaaatatccttgcactgctagtagaaatgcaarctagtacagcctttttggaaagtaatcaggcctacagagcttgtactctagaactctatcatttccttcctggatatagatccacagaaactctcatataaatgcacaaggaaacatgtaaatgattattaattgagcatgatttgaa

SEQ ID NO: 188610 - DNA, 394 bp, Homo sapiens
gaattcatgcctgaggcatttctatctacatgtctcagtataaaatgttcgaaggaagtagctcatatttataaatgagttggtttgcctccccaagtctcctcatggtaagtaccatcaaaaacctcacaaatcatccatacyacccactatcgtctttgtgacacaaaggaagccctgctccattcaaacattctctacatcctccataagccccatgggtttccaatctttatttttttcataaagtaaatgacttcccaggtaatagaggcagatagatagatacatacacattttattgtttgtgctgacaggttataaggagtagagagaagagtggagatggaaaggcggtgtggagaacatcagccttgttggattacacatatga

SEQ ID NO: 188611 - DNA, 394 bp, Homo sapiens
gaattcatgcctgaggcatttctatctacatgtctcagtataaaatgttcgaaggaagtagctcatatttataaatgagttggtttgcctccccaagtctcctcatggtaagtaccatcaaaaacctcacaaatcatccataccacccastatcgtctttgtgacacaaaggaagccctgctccattcaaacattctctacatcctccataagccccatgggtttccaatctttatttttttcataaagtaaatgacttcccaggtaatagaggcagatagatagatacatacacattttattgtttgtgctgacaggttataaggagtagagagaagagtggagatggaaaggcggtgtggagaacatcagccttgttggattacacatatga

SEQ ID NO: 188612 - DNA, 461 bp, Homo sapiens
tttctgttcctgtgttaacttgctaagaataatgaactgcagctccatccatgtccttgcaaaggacacaatcttgttctttttcatggctgcatagtatgccatggtgtatatgtactacattttctttatccaggctgtcatttyttttaaattcattttttatttcaataggtttttgaggaacaggtggtgtttggttacatggataagttctttagtggcgatttctgagattttggggaacccatcactcaagcagtgtacactgtacctaatatgcagtcttttatccctcacttccctcccatcctttcctgagtccccaaagtccattgtttccttcttatgcctctgcagcctcatagcttagttcccaattatgagcgagaatgtgcgatgtttggttttttattcctgagttacttcacttagaataatagtctccaattccatccagg

SEQ ID NO: 188613 - DNA, 461 bp, Homo sapiens
tttctgttcctgtgttaacttgctaagaataatgaactgcagctccatccatgtccttgcaaaggacacaatcttgttctttttcatggctgcatagtatgccatggtgtatatgtactacattttctttatccaggctgtcatttcttttaaattcattttttatttcaataggtttttgaggaacaggtggtgtttggttacatggataagttctttagtggcgatttctgagattttggggaacccatcactcaagcagtgtacactgtacctaatatgcagtcttttatccctcacttccctcccatcctttcctgagtccccaaagtccattgtttccttcttatgcctctgcagcctcatagcttarttcccaattatgagcgagaatgtgcgatgtttggttttttattcctgagttacttcacttagaataatagtctccaattccatccagg

SEQ ID NO: 188614 - DNA, 560 bp, Homo sapiens
gtgttcatcttattttaatgatttttctttagataggaacaaagcaagttctctagcttaaatggtggatttggggcttcttgcattagtttggccaaacccatgtgagaaaaatatagcctatagtgtctggatgggaggtaatttttatccagcactcagcacctaggcaatgaaccacgacatgaatgcaaatcctcgttgaacgattgcatatatagcactgcctrtgttttccaagtactcttctagtcctattcatacaaaaaatgatcaaaataggtaacatattttgccctggtaacataatggagcttaaatcctaggggtagaatatagaaaaagtaaagtatatgaatatgttaggtgataaatgttgtagaaaaaaataaagtaaaacaaaatgctggagacttgtgttcaatttttaagagagtaatcaggcaatgttctctgaaaaactgtcatttaagcaaagatctttataaagtgaagcaatgagtcatgggatagctgcacggaaataactgggctggtatgtgccaggaatactaggaagt

SEQ ID NO: 188615 - DNA, 560 bp, Homo sapiens
gtgttcatcttattttaatgatttttctttagataggaacaaagcaagttctctagcttaaatggtggatttggggcttcttgcattagtttggccaaacccatgtgagaaaaatatagcctatagtgtctggatgggaggtaatttttatccagcactcagcacctaggcaatgaaccacgacatgaatgcaaatcctcgttgaacgattgcatatatagcactgcctgtgttttccaagyactcttctagtcctattcatacaaaaaatgatcaaaataggtaacatattttgccctggtaacataatggagcttaaatcctaggggtagaatatagaaaaagtaaagtatatgaatatgttaggtgataaatgttgtagaaaaaaataaagtaaaacaaaatgctggagacttgtgttcaatttttaagagagtaatcaggcaatgttctctgaaaaactgtcatttaagcaaagatctttataaagtgaagcaatgagtcatgggatagctgcacggaaataactgggctggtatgtgccaggaatactaggaagt

SEQ ID NO: 188616 - DNA, 560 bp, Homo sapiens
gtgttcatcttattttaatgatttttctttagataggaacaaagcaagttctctagcttaaatggtggatttggggcttcttgcattagtttggccaaacccatgtgagaaaaatatagcctatagtgtctggatgggaggtaatttttatccagcactcagcacctaggcaatgaaccacgacatgaatgcaaatcctcgttgaacgattgcatatatagcactgcctgtgttttccaagtactcttctagtcctattcatacaaaaaatgatcaaaataggtaacatattttgccctggtaacataatggagcttaaatcctaggggtagaatatagaaaaagtaaagtatatgaatatgttaggtgataaatgttrtagaaaaaaataaagtaaaacaaaatgctggagacttgtgttcaatttttaagagagtaatcaggcaatgttctctgaaaaactgtcatttaagcaaagatctttataaagtgaagcaatgagtcatgggatagctgcacggaaataactgggctggtatgtgccaggaatactaggaagt

SEQ ID NO: 188617 - DNA, 599 bp, Homo sapiens
ctcccagttttattttgtcacaaaacaccaagaaaattataaaagratttgataatttacatgttaagtaaaaagggcatatatagtaaattaaatgattttagttatctaatagtagaatgactatccattatccaaataaagatatttgagagtgaaaaggggtgctgaaataataatttataattttaaaattttatagttattacctagagccagtaaaattcatggttcaagaccagtcttacagtcacccaaatctgcccgcaattttgagaggcctactgcagtgagcttgccaactgcaatgtctgagggagcagccctccaggactcttcatctcagacacgagctgcaagtgtaggagttctcaggctaccctgacttcacaccagctgcctacaaacttgagggtccttacggtcattcacagctttaataattaggtatacactaattggttctggccatgtgcatttgatatcaatgtgttttctgctgttgttgagtggtgtcctataacattaattagatcttgttagttatggtgatcagttattctatattttggatttttgtttaattcctcaccattact

SEQ ID NO: 188618 - DNA, 599 bp, Homo sapiens
ctcccagttttattttgtcacaaaacaccaagaaaattataaaaggatttgataatttacatgttaagtaaaaagggcatatatagtaaattaaatgattttagttatctaatagtagaatgactatccattatccaaataaagatatttgagagtgaaaaggggtgctgaaataataatttataattttaaaattttatagttattacctagagccagtaaaattcatggttcaagaccagtcttacagtcacccaaatctgcccgcaattttgagaggcctactgcagtgagcttgccaactgcaatgtctgagggagcagccctccaggactcttcatctcagacacgagctgcaagtgtaggagttctcaggctaccctgacttcacaccagctgcctacaaacttgagggtccttacggtcattcacagctttaataattaggtatacactaattggttctggccatgtgcatttgatatcaatgtgttttctgctgttgttgagtggtgtcctataacattaattagatcytgttagttatggtgatcagttattctatattttggatttttgtttaattcctcaccattact

SEQ ID NO: 188619 - DNA, 352 bp, Homo sapiens
gggcaatgtattgtgtcacaaagagcacagtttttggtgtcagatagactcaagagtgaattgattggtttggcaacatattggctatgtgacattggttgatttgcttctgtgtataacactttttgattatcaaaagaggaataaaatatccgtatcacaagttggcattatagattaaagaayagtgcatttggcatttgatatgtactcaataaagagaaaaaacaagctgtcaagattaatataatttatcatacaacaaagcatgtgtcagcatttattggtgtaggggaatttagttataacaccttatattcttatattgccattcaaggtactgaagaagaca

SEQ ID NO: 188620 - DNA, 627 bp, Homo sapiens
cagcagatctttggtactttttccaacatttatgtaaacacattatctcaccatgtgtttgcttagtaacattgcagatttcaataggcatactcactaaattgtgagtcttgtactgggagagtagattggtctgagattttccctggtgtcataggcttttaccaacagagtgttcaaatttcaggtattctaccttgtttacrttttggattgggtaccatgtgctaaaggaatgtgcagtggcctgagagactcctgctgttttcaagaagattctgcctcgggaattaactgcagaataataacacaatggattaatgtggtacttttacttttctcctttttattgtttccttcctgccacaaacagctgtgcacttacaatctatctatatgaacaaaagaactattcattctagtgctcacatttgcttgtaggagttcgaattttgttatcatgagtttaagtctttagaaaattggatatgcaatatccacttaatttttcaacttatctattcattgaaggaaaggcaatatatttcagtagaaacaacaagaaaatatgaatatgaatttggtgcactgatttcttatttggccatttttctttttgctgaagaa

SEQ ID NO: 188621 - DNA, 574 bp, Homo sapiens
aacatttatgtaaacacattatctcaccatgtgtttgcttagtaacattgcagatttcaataggcatactcactaaattgtgagtcttgtactgggagagtagattggtctgagattttccctggtgtcataggcttttaccaacagagtgttcaaatttcaggtattctaccttgtttacattttggattgggtaccatgtgctaaaggaatgtgcagtggcctgagagactcctgctgttttcaagaagattctgcctcgggaattaactgcagaataataacacaatggattaatgtggtacttttacttttctcctttttattgtttccttcctgccacaaacagctgtgcacttacaatctatctatatgaacaaaagaactattcattctagtgctcacatttgcttgtaggagttcgaattttgttatcatgagtttaagtctttagaaaattggatatgcaatatccacttaatttttcaacttatctattcwttgaaggaaaggcaatatatttcagtagaaacaacaagaaaatatgaatatgaatttggtgcactgatttctt

SEQ ID NO: 188622 - DNA, 395 bp, Homo sapiens
ctggtttggggccaggcatttgggtttttttggttttgtttttggcatcagtattttttaaaaagcttccttgttagctttcctaggtaatgctcatatgtggtcrgagctgagaacttctgacctggaggcaaaggaaatacaagtaggcagaaaagacagagtagcccagtgtgctcaatagaagaaccagttttccttcaaaacaaactaaaacggggtagagttcgtgcgttcgtttcccattactgctgtaacaaatgaccacaaacttagtagcttaaaacaacacaaatttattatctgacacttcagtaggttagaaattcagcgtgagtcccacaggactaaaatcagagtgtgagcagggctgttgcattcttttagaggccgtt

SEQ ID NO: 188623 - DNA, 414 bp, Homo sapiens
ctagttggtctggtttggggccaggcatttgggtttttttggttttgtttttggcatcagtattttttaaaaagcttccttgttagctttcctaggtaatgctcatatgtggtcagagctgagaacttctgacctggaggcaaaggaaatacaagtaggcagaaaagacagagtagcccagtgtgctcaatagaagaaccagttttccttcaaaacaaactaaaacggggtagagktcgtgcgttcgtttcccattactgctgtaacaaatgaccacaaacttagtagcttaaaacaacacaaatttattatctgacacttcagtaggttagaaattcagcgtgagtcccacaggactaaaatcagagtgtgagcagggctgttgcattcttttagaggccgttagggagagtc

SEQ ID NO: 188624 - DNA, 395 bp, Homo sapiens
ctggtttggggccaggcatttgggtttttttggttttgtttttggcatcagtattttttaaaaagcttccttgttagctttcctaggtaatgctcatatgtggtcagagctgagaacttctgacctggaggcaaaggaaatacaagtaggcagaaaagacagagtagcccagtgtgctcaatagaagaaccagttttccttcaaaacaaactaaaacggggtagagttsgtgcgttcgtttcccattactgctgtaacaaatgaccacaaacttagtagcttaaaacaacacaaatttattatctgacacttcagtaggttagaaattcagcgtgagtcccacaggactaaaatcagagtgtgagcagggctgttgcattcttttagaggccgtt

SEQ ID NO: 188625 - DNA, 403 bp, Homo sapiens
tagttggtctggtttggggccaggcatttgggtttttttggttttgtttttggcatcagtattttttaaaaagcttccttgttagctttcctaggtaatgctcatatgtggtcagagctgagaacttctgacctggaggcaaaggaaatacaagtaggcagaaaagacagagtagcccagtgtgctcaatagaagaaccagttttccttcaaaacaaactaaaacggggtagagttcgtgcgttygtttcccattactgctgtaacaaatgaccacaaacttagtagcttaaaacaacacaaatttattatctgacacttcagtaggttagaaattcagcgtgagtcccacaggactaaaatcagagtgtgagcagggctgttgcattcttttagaggccgtt

SEQ ID NO: 188626 - DNA, 575 bp, Homo sapiens
tttttcatgtgatattatttcagagttgttgtaataaccattttctcttgtaataaaacattttgtttaaaaaccatcctttgttatagttctatctgacctataaaagtgtcaaaaggatgcttttcctttctatacttcttttgacttttaataaaaggccaacaatctcactaatctatacatgttatttaagaatatatttcaaaaaatgaaaataaaatcagttgaaacaaatcccactatgtgcaacaatagaaagaagagtttaggctggcttaagtgttcaaaaatatcatggcttaatcaaattcaggttcttgaatatgatgggctttttttccaggtgttgaaaacctatcatgactttcctttttatgaacagcatttggcaaccatttgacaattcttataatagaactcagtgggaatatgaagacaaaggctttggaatttttgtaagcacaggaaggtacatctcctgggaagtagagctwtcacacaataatcaattcatgcaaaaagcagagaaacacacacatacacacatacacacacacactcaaatatctata

SEQ ID NO: 188627 - DNA, 557 bp, Homo sapiens
actattgtgaaaaattaaaggtttattcaacctagtgttgttgatgtccaatcacatagaccctcagcctgctctgagtttacctgtggccacaggggccagttcctaccaagttgacagctttgccctgaatgggtttctctctgcttctttgctggctctctctgrcccagcaactgcatgcagggaagctgaaactgtgtgcagggaagctccaggagtgttgggggtttacagccccaggggtgaccttcagtgtcagtctcctcaagcctcagagccttcagtgggtaagggccacgttgccatcagtggtaacttgttctttaatgcaccatttattggctttgcccttcccttgcttacccactcccatgcatgtgcttcctcagaacacatcctaattaaactaccttcattcaaatctttgtctcaaggtttgctttagggggaacccaaataaaacatatcagacagaatgtagtcaaatgccaagatgtgtaaaaccaaaattttcttcccctccaactctaccacttctcaattccctgtcgatg

SEQ ID NO: 188628 - DNA, 557 bp, Homo sapiens
actattgtgaaaaattaaaggtttattcaacctagtgttgttgatgtccaatcacatagaccctcagcctgctctgagtttacctgtggccacaggggccagttcctaccaagttgacagctttgccctgaatgggtttctctctgcttctttgctggctctctctgacccagcaactgcatgcagggaagctgaaactgtgtgcagggaagctccaggagtgttgggggtttacagccccaggggtgaccttcagtgtcagtctcctcaagcctcagagccttcagtgggtaagggccacgttgccatcagtggtaacttgttctttaatgcaccatttattggctttgcccttcccttgcttacccactcccrtgcatgtgcttcctcagaacacatcctaattaaactaccttcattcaaatctttgtctcaaggtttgctttagggggaacccaaataaaacatatcagacagaatgtagtcaaatgccaagatgtgtaaaaccaaaattttcttcccctccaactctaccacttctcaattccctgtcgatg

SEQ ID NO: 188629 - DNA, 542 bp, Homo sapiens
cagatttattttttaaagtgacatctaggcagagctacctggtatgactgtgcaggtygaccaaggggaagagcggggattaaaatctggttcacaattgccaaacctggtgcagggctgtatctgcctttttctgattcacacaaatgttacaccacaagtgataggttgtcttacaatagggcataggtttaagtgaacgatgaaccagtttcgtgctttcaatcttaagtatctctctgactgtaggaataacatatcttgggggtatctccagaagtataaatttagggagctgcctaattgtgagtcctgggacaaatgagcctcctggcaggtcaccccaggcacatagggaatcttttcagatttacaaaaaggtggtgttgatgagacaacacaggctgtgtgaaacacgtggtttggagaacaggagccctgggctaggtttcagcctggccaggtgcttttgtgcaaattgtacaattgtagtgacactactggcctcccatatggtagaccttgacctggactccacatgc

SEQ ID NO: 188630 - DNA, 414 bp, Homo sapiens
aaaagtaagcccttgtttttgtcagacactgaaaatttcagagttttctttcaatagtgtagcatattgtggaaaaaacaaattcaccttccctgaaggatcagctttcactaataatttcaatggtttaaaaagccatatgcttggaagggaaccaaccctgttaccctattcatatctcatagttgtccaggggcctttccctmataaagcattatccataggggatatgttttttatctcttagtgactaaacaacatcatcaaattttggaggagtcaatgaagtaagacaggaagagaagcagtaatattggacccatgtcagagagaaaacttctaaaaatattttctaagacataaatttgaatcacaatctgccatttactttgtaatgttgactatgtgagttaa

SEQ ID NO: 188631 - DNA, 414 bp, Homo sapiens
aaaagtaagcccttgtttttgtcagacactgaaaatttcagagttttctttcaatagtgtagcatattgtggaaaaaacaaattcaccttccctgaaggatcagctttcactaataatttcaatggtttaaaaagccatatgcttggaagggaaccaaccctgttaccctattcatatctcatagttgtccaggggcctttccctcrtaaagcattatccataggggatatgttttttatctcttagtgactaaacaacatcatcaaattttggaggagtcaatgaagtaagacaggaagagaagcagtaatattggacccatgtcagagagaaaacttctaaaaatattttctaagacataaatttgaatcacaatctgccatttactttgtaatgttgactatgtgagttaa

SEQ ID NO: 188632 - DNA, 414 bp, Homo sapiens
aaaagtaagcccttgtttttgtcagacactgaaaatttcagagttttctttcaatagtgtagcatattgtggaaaaaacaaattcaccttccctgaaggatcagctttcactaataatttcaatggtttaaaaagccatatgcttggaagggaaccaaccctgttaccctattcatatctcatagttgtccaggggcctttccctcataaagcattatccataggggatatgttttttatctcttagtgactaaacaacatcatcaaattttggaggagtcaatgaagkaagacaggaagagaagcagtaatattggacccatgtcagagagaaaacttctaaaaatattttctaagacataaatttgaatcacaatctgccatttactttgtaatgttgactatgtgagttaa

SEQ ID NO: 188633 - DNA, 565 bp, Homo sapiens
tgggcgatgcaggaggccaaaaaatagagtggctaagttaagagacagcaagggaaacacattatctaaaaatcctaaaatcctctggaaccagccatccctgaagcataaaacacattggactgttagtcatgatgaatttagtttcttttactttaagccagagtcctggacaacacaatcagattatttctgctttcatgcactcaaggatgcatgatgtttacatctttactccctgttcgtctcttctcctcccattctcgttgacaattccacatctctgacatctgatcaccagcaaaagcttcaaccaatggaagatataaaactggacatagaaagagatagttcctcattctaagaatttggatatttatcaacggtgattatcttgtgtaaatcattagaaataattgagttgctaggaagaaacttactatcactgtgccaccaatgtctcatgaaaatgagatggctctagytccattaggtttaagctgagataaaaagtagcctaggatgtttacctttctaactttaaagagacccagtggagagaaat

SEQ ID NO: 188634 - DNA, 576 bp, Homo sapiens
tctcagcatttgcttagatgatactactgttgtgagtggcacagataatctgtctattcatgaatggttgcaagcaattagatgattcagtagagataatcaaatgctattctttttttaacttaagctcttcacttgcctactggtagtactggttttgtctagatggagtttagaacttctatattatttagtgtacaaaaatccacccagggctgggcgtggtggctcatgcctgttatcctagcactttgggagaccaaggctggtggatgtgagccctagagtttgagaccacccaggacaacrtggcgaaaccccatcactactaaaaatacaaaaattagccaggcatgttggcacactcctgtgatcccagctactcaagaggctgagacatgagaattgcttgaaccctagaggcagaggttgcagtgagctgagatcacgccactgctgctccagccttggaagcagagcaagactctgtcccaaaaaaaaaaaaaaatcaagccatccaaagtcataaaaatagtctgggtcaccaaaagaagccctgtgacaatttgacaattt

SEQ ID NO: 188635 - DNA, 623 bp, Homo sapiens
atggtggctcgtgtctataatcccagctattcgggaggctgaggcaggagaatcacttgaacctgggaggtggaggttgcggtgagccgagatcataccattgcactccagcctggctgacacagtgagactctgtctcaaaataataataataataataataataataaaagaagaagaagaagaagaagaagaagaagaagaagtgagtgtatgcaacagcaacagttaacatgtacaaaaatgttcatgtcagcaatgttcacaatagatccacttgggaacaaaccaatgcacgttgaccatagaatgaagacaaacattgaagtatagacacaatagacactataaagcaaaaagaaaaaaaaaatgaacaaattacaggtacatgaaacatgaaagaaacaacatggatgaatttctaaagtgatattaaagttgtatcagtagtatttagcaaaagatgctagatgcaaaatgatacgaggaataatttctttatgtaacatttaataacctggaaagctaasttatggtgtttagaaatctaaacttagatgggaaaagtataaaaaacaaagaagaaaaaaaaaaccagtattaccgtaaaagtcaaaatacca

SEQ ID NO: 188636 - DNA, 236 bp, Homo sapiens
tgacaaaggcatagagcaactgggaatggaggagccactgaaatgcgaagtctggccccaaaggctgcatgaaccaactccgctctgctgcctccatttttattttatgtgaattgctgaaagttcaaaaccaccccatacacacaggcaaggatggtggtgttagatcggaaattaccctgcttgattgaattyagaagctccacacaggagaagagacttacagaaacaagcac

SEQ ID NO: 188637 - DNA, 469 bp, Homo sapiens
cttagggtagtgtcataggctctatgccagctgaatatatattaaatgagacttgaaaaaaaactaaagacatttcactgtgcaaaattattttaatacaaaatctaaaattatttttggtgaaaagaaagcaagaaagcaaagcaatgctttttcacccatttcaaattattttacactattcccttccttataatatggatgtgtatrgagaaatggacaaatggtgatttggagacggaatgcaaatgactagtcagcttcagataatatgacaagttcctcttgactccttctcccctatcactcaaaaaattgttgtggtgtttctctaagagaaaaatagacttccaccaaggattagtttgtaagtcaacactcataaggattgaagagtgttgtctattgtgtatcctcattatcatattgtttctgtaaatcttattctcaaaaccagaagtcaaagact

SEQ ID NO: 188638 - DNA, 455 bp, Homo sapiens
  misc_feature (1)...(455): n = A,T,C or G
taaaacgcctaccagtacatgcactactaaaagataggagataaactccattaaaacttagaaaccaaccaacttggtgcaattttctggaggcttaatggtctgagaatttgttaggacattgcttccaaatanaagttgtttctgctccctgcattgcccaccactaagaaagagatccaatccttgataagtctctggattttaaaagcagtatataacacatctgagtgtgctgctctgacctgtttactgagtagctcacattacccccagttttgtgtggtggaacaaagcaaatgaaggcttttgggcaggtttgrtgaaatgcaagctggtttgcctttagatcacgtgaccccaaacacacaatagtacttgagatatctaaggcaagaaaaatactgtataaagcctctcgaattctcctaaaagaggataaataacagcacaag

SEQ ID NO: 188639 - DNA, 455 bp, Homo sapiens
  misc_feature (1)...(455): n = A,T,C or G
taaaacgcctaccagtacatgcactactaaaagataggagataaactccattaaaacttagaaaccaaccaacttggtgcaattttctggaggcttaatggtctgagaatttgttaggacattgcttccaaatanaagttgtttctgctccctgcattgcccaccactaagaaagagatccaatccttgataagtctctggattttaaaagcagtatataacacatctgagtgtgctgctctgacctgtttactgagtagctcacattacccccagttttgtgtggtggaacaaagcaaatgaaggcttttgggcaggtttgatgaaatgcaagctgktttgcctttagatcacgtgaccccaaacacacaatagtacttgagatatctaaggcaagaaaaatactgtataaagcctctcgaattctcctaaaagaggataaataacagcacaag

SEQ ID NO: 188640 - DNA, 636 bp, Homo sapiens
actcatcctggttgccagccccagggggacatgctttacctcatagagtccagcacccatggacacacacacacatacacatacacacacacacacacacacacacacacacacagagagagatagagagagagagagagakaggtcaaacctggcacaggaaggatgtgagatggggaagcctgctagccactcctcctgccagcctccagccaattacactgctgctcagttgccccaaagcccttctcattcttgatacccttctcttcagagcatggaatgcccgtggctgccccacatccgcatgtctcttgactatggatttttccttccatctaatctcatctgccttctcagtttttaggaattcctcaaaactgtcttgcccatgaagggcactcagtactgttgctaaaatatatgtaatctattattttcagatgccagggaaagaacgggtggagataccaaagtatgtcatcagtctaccatctcagtccctcttggcttttcttaggtagaggcttttgttgcccttctgaaattatggactccttgagaataaaattcacatctaattcatggttctttctcccacagtgcttaccacagcactttgcatatagctggttc

SEQ ID NO: 188641 - DNA, 580 bp, Homo sapiens
atggcttatgactgaataaactaatcataataatagctaccaggtgctgtgcaaatattatactatttaatcctcataaacatcatgcaggatctgtaccgttagcctcattttaccctggagaaaagcaagactcctaaaagttatagaacttgtcaagagtcacccagccagtgaacactgactttagtggaaggcagttagaaaggcaggattccaggtcattttttttccctcttagttagatctatgctggttttgctgtgcttgtgatgttatgaaggaccacaaacccaaactcctacagaatccaggcaggtaatgtaaaagagggagggagctgcgaagccaactgttagacaagtagagactgtggggaactgaggggcagggaacatgccctttctgaagaagtgagctgctccctctccagccacacatgctgtgccaagcaggagtgccagctcmgtgtggctattgcccgtgatattcccaaagaagcagaaatttgaatttaaaagtggatctgacggtgaagtatcctgatttttattgttaaatagtttaaaattagtaaaaa

SEQ ID NO: 188642 - DNA, 535 bp, Homo sapiens
atacaacaaaacaaagttctttaataccaccaaaagatcacactagctcaccagcaatggatccaaaccaagaagaaatctctgaattgccagaaraagaattcagaaggttaattattaagctaatcaaggaggcagcagagaaaagtgaaatccaacttaaagaaattaaaaaaaaaaaaggtaccagatataaatggagaaactccagtgaaatatacagcattaataaaaaacaatcacaacttctggaaatgaagaacacacttacagaaatgcaaaatgcactggaaagtctgagcaatagaatcaaacatggagaagaaagaatgtcagagctcaaagacaagcctttcaaattaacccaatctgacaaagactaagaaaaaaacattcttttttttttttaatgaacaaagcctccaaggagtttgggatcatgttaaatgaccaaatctaagaataactggttttcccaagaaaaggagaaatctaagtttggaaaacatatttgagagaagaattgaggaaaagt

SEQ ID NO: 188643 - DNA, 535 bp, Homo sapiens
atacaacaaaacaaagttctttaataccaccaaaagatcacactagctcaccagcaatggatccaaaccaagaagaaatctctgaattgccagaaaaagaattcagaaggttaattattaagctaatcaaggaggcagcagagaaaagtgaaatccaacttaaagaaattaaaaaaaaaaaaggtaccagatataaatggagaaactccagtgaaatatacagcattaataaaaaacaatcacaacttctggaaatgaagaacacacttacagaaatgcaaaatgcactggaaagtctgagcaatagaatcaaacatggagaagaaagaatgtcagagctcaaagacaagcctttcaaattaacccaatctgacaaagactaagaaaaaaacattcttttttttttttaatgaacaaagcctccaaggagtttgggatcatgttaaatgaccaaatctaagaataactgrttttcccaagaaaaggagaaatctaagtttggaaaacatatttgagagaagaattgaggaaaagt

SEQ ID NO: 188644 - DNA, 585 bp, Homo sapiens
agtgatgctccctacttggaaagtccttccacctctactccaccagggaagctcttgttcccatttcaagacctgacttgaatagcatacccactgtgaaattctccccagttattcagggccaagttaattactcccacctctatagttcaagagaacttcgcaattactcctgctgcagcatttattacattggttataccacaggctcatcttcctttctgagcaagctattaatcccccaagtagtgtttttccattagtctgctccatgtaatcagcagatcatgagtaagcataagttttatgaatgaatgaacaaacaactacatggaagtccacagggacttgcttctctacatctttatcaagggtgttatggattaaggtcagactcattaccactgcagataacaaggtcctactacaagcccaagaaacaggatcagatgccaaactcctgcagccstcaattactttgttgtttaaagtggaaaaaataaataaatttatattaatggctaacaaagtagaagaaagcaattctagttttcatattaaactgtaacatcaatagtcgatcag

SEQ ID NO: 188645 - DNA, 585 bp, Homo sapiens
agtgatgctccctacttggaaagtccttccacctctactccaccagggaagctcttgttcccatttcaagacctgacttgaatagcatacccactgtgaaattctccccagttattcagggccaagttaattactcccacctctatagttcaagagaacttcgcaattactcctgctgcagcatttattacattggttataccacaggctcatcttcctttctgagcaagctattaatcccccaagtagtgtttttccattagtctgctccatgtaatcagcagatcatgagtaagcataagttttatgaatgaatgaacaaacaactacatggaagtccacagggacttgcttctctacatctttatcaagggtgttatggattaaggtcagactcattaccactgcagataacaaggtcctactacaagcccaagaaacaggatcagatgccaaactcctgcagccctcaattactttgttgtttaargtggaaaaaataaataaatttatattaatggctaacaaagtagaagaaagcaattctagttttcatattaaactgtaacatcaatagtcgatcag

SEQ ID NO: 188646 - DNA, 587 bp, Homo sapiens
ctaattttttataaaacttgaatttttttttcttttaagcttattgctgctgaatggtttattgtaaaataaaaatgcattgacaataaaatatatttattttatcttaataattatgtatggtgtaaatctataagtatttataataaaatctgtatttatgtatgatatttcatatgtaaaaacatttattatatatgcatatttatagattttcactatacaatagttgaaactttgttttaaacacactgttactggcttgaaaagatgataaacttgtagagtaggaccattcagactattctgtatagactctgacaggattggtcaatctctattccttgtacatattttacttatgtttctacctgattaaccacctgtcaycctggtgactaggtgcacctggaaggcattgccattggactagaaggagcttactgatcctacccaattatatccaagtacacttcaacttatgaacgaattatgagtgaataaccctatatgttgtccttggaagggaaatgtaaactaagttggatcttgaaagggtagaggaaagagagttggtttatcactgt

SEQ ID NO: 188647 - DNA, 528 bp, Homo sapiens
tgcttgttcacagaacacctaaaactatctcctggatatgctctccttgccttcaatcagccttgcctgcaagatggttcccagcgcccagccatggccttctccccactggcagaaccaggcacgagtcggctggtcttgcatatactctggccaccggcagccccagcaccaccctagtctacattttgggcttttgtcttctcaagggcagaaagcagtgaaataaaagatcagatatctgccatttaacacaagcattaggtactctatgcactttttaaagcattggttgagtagaaatgtatttgattgtttttcctcaaaagaataccttctttaacaggagagactgcccatggccaaaggtctttgtcactctactccaaggtttctccatcttggtactacggccatgtggggctggatgattctttgctgtgggggctgccctgtgcatggtaggatgtttagcagcatgccaagycactgcccactagatgccagcagcactgcccctctcccagt

SEQ ID NO: 188648 - DNA, 607 bp, Homo sapiens
ttccttgttaaaaatttgttaaacgtgtttggcattaatgcaaacacaaagtggtcatttgttacaaattctattggaatgcattcatttaaggcaatgaagtagttactagaaaagaaaaaaaaagttcattaagtacattttaaaaatacaatgatgtatgcagtgtgtaactgtggcgccctggtggctatataaatcgctgacrgaataaccacacgttgtgtttagtttgaaattggaatcttttaaacacaaccgatagaacaaaaactggttttgtttgttgtcaaaactaatgatagtctttcttttctgaactagttaaaataaccaaaggtttggaatacaatttctaacatctcaaatcagtgtaacatacaggttaaaagaatgctttgggaatctttgcgggtgccactactgacatcagagatgggggctgatccaacaaacagaacacctgcactctggaaagagggggatgtccgagtcatcctggagaaccccacttgggtagcgccggtacctctgctctctgagctgcctgaggttattaggttacctgcagagggaaaactgtggctttcatcacagagacaatggt

SEQ ID NO: 188649 - DNA, 563 bp, Homo sapiens
tgtgtaactgtggcgccctggtggctatataaatcgctgacggaataaccacacgttgtgtttagtttgaaattrgaatcttttaaacacaaccgatagaacaaaaactggttttgtttgttgtcaaaactaatgatagtctttcttttctgaactagttaaaataaccaaaggtttggaatacaatttctaacatctcaaatcagtgtaacatacaggttaaaagaatgctttgggaatctttgcgggtgccactactgacatcagagatgggggctgatccaacaaacagaacacctgcactctggaaagagggggatgtccgagtcatcctggagaaccccacttgggtagcgccggtacctctgctctctgagctgcctgaggttattaggttacctgcagagggaaaactgtggctttcatcacagagacaatggtatcctatgaacaaatatcctaagcctgtgtctagaactcccactccctgtcctgccctaaactgttcacacaaaggaattattgctgagtaatagtgattcctgagcttgctgaagaaacag

SEQ ID NO: 188650 - DNA, 584 bp, Homo sapiens
ctgggctggggctacactttctaagacatggtgggggagaagccaaaacagcaggaaaagtaagctgcaaagaattaagcttgtaacaacttgggcaaagcacaaacagtgactgaggttgctcctttggctgttgacacackctggcctgggtcggttgtggtcactaaacccattagcgttccaatgtggcaacagctaatgcagcaagttcaatgtgtttttgtttaatttctaaatgctgggtgtatgcctgcaaggatggcctgctgaagacagacaactccactgccataaacacagtcatcattgtcagtgatctgaaattcattttttaaactatttatttcttggcagataggggctaaatggagttttgcatttcatgaactgttttttaacttcaacttgctacacacttctatgtgttttctaagcaaccaccaattcagagtttccccgcaacaaaaggaaatagtcttctctggggggaggggaccatttttggtaggggagaagggaaaagggaaacataaacacaaaccagcaaccagctgggtgaagtcaggccttttaacgatatg

SEQ ID NO: 188651 - DNA, 567 bp, Homo sapiens
gaaatgtgaatgagtcccagcttcttcatggagacctgcatgcaccgggatggtaagagtctgaggcttggtggcgtccccaccgtggggatgtgcagaacacagggactagagatatgcaggtgcctcagacttttgccactctccagtacatgactgggtagataaaattatgaatgatcaatttagatgtgccacgcattgtcagagacacacaccatgttctcataaggcgatttcttggcaagcattagtggtttaaaaaattgatttcttttccaacctggcccagaggtgactactggttacaccctcaaaatgcggttcttcaaacaacagattaaagaaatagaggagggtaaagsctcgcaatttttggtgttttttgtttcttcgtcaaacactccatgcatcatggtatacaaacactgccaacaccactcactcacagcgaatttatactttttgataatctaatgcattaggaatgaccaattagagtgaaccagcaggatactggagatgaggctagttgtccaacagaagctgaatccacagataaaatcc

SEQ ID NO: 188652 - DNA, 642 bp, Homo sapiens
tttacccaatattacatgcactaaggagaggaatgaatgatcattgttggaactatgayattttcggtgaaaattaagtttccatgtctttacgaggaagcaattcagcagaggccttgttgttaaaagtggcatgcgagcaggaacttcaaaagacctgctgactgcctgccgagccatttggccggagggctctgcatatcctctttcgggtaagaggcagcttacttgtcaactttgcataaaagacagccaatttgtcagccatttgctttaattttgtttctgagtcttccaacgacaaactccatataccttctggtctttaatatcatatatctgactgagggatggaaattcactctagtgtctcaggctggtttccttcccaggccatcctcctgggtcttataggatgtccttaatcagaaccacattactcagctagaggaagtccttgtgcagacgctggcaagacactatggcaaaagagtttcacaacatgaaaggtcagattgagaataaaagctgcagttatctgttgtgttttctttagttgagaaaataaaggcagggtgcctaactcctgaggaaccaagatttggataagtagcagccacttaggaaaggagttccattggc

SEQ ID NO: 188653 - DNA, 595 bp, Homo sapiens
gcctgtgaacctcttgaaatgatatgcaacgtttcaaatgtgccacatgctttttcttgggaaaagggtccagagcttctcagaaatttccatgacctcttccaaaatgaagaaccattgacttcgcatggagcaacctctgttctcacttctcttccaggacaggtgggttagcagatgacccctggggagaactctgccatcagggagagtataaccagctcataacacatgagtcttcatctagagtcatgaggccgatcatttgtaatcaatacccaagaactttgaaatatacatgcatgctgtcccctccccacattccaactggcctgggctttatccagtcctgcagttatacacaggctctcatcaacctcctggcctctgtacaagctgttccccctgtctggaacactcttcacttttcctgtagctaactctcacacattgctcaggtctcagctaaaacaacatstcccataggaagcaattcctcgtggctagactagatcatgggccccagtaacatcctgcatgtactctatcataccccatcagagtttattgtgaactctggtttcacagaagcttt

SEQ ID NO: 188654 - DNA, 461 bp, Homo sapiens
ttcttcctgccacccgcagggtctgtgcagcccaggaaggcaagactgacggcgttcctragggaggtggcgttgggacagtgaaggggcatttcctggctgcctgtcatcatgaggcattccagctagcgaggaaaacaaagacagcggccagggagcgtcgccttttatggttccatcctggctgcacttcaggagcagcccagaaagtggcctgggagacaggcaggctttgtcacccacttctgttcacctcggtccctgggccagcagctggagaaatgcttgtggcccggccagctagaggcacaggaacccaagggtgagaatttgatggcagagggaacacccttcctggcggtgtgctttcctcaatcctcaatatcatctcccacgagcacccatgtaggcaacaaaaagaaggagctgaagcaattctatgcttaaataacaccaggggc

SEQ ID NO: 188655 - DNA, 460 bp, Homo sapiens
ttgggatggagacaggaaatctgacaagcctgccttctgaggttgtgcgtttaagaagactcatcttcaagatcccactcatgcaccagctgcctccttgcctataggccatggggcttccatggctggcagcagcagatgctctaaggaagcccctcctcttccaacaaaaggagtgcctgatgacatgcatcgggccatctgacaaacatttgtgagcatcttttgagtcccattatctccttaagtcacacgtcagtcactacctactgtccctaggcrtgaagccattgcataggcaggactcctcgagggaggatgagtttttattacaaggtcaccacaccccattatacagggctcatgaaaaatgtttcccgcccaacttcaagaaactagggcctgtaaaaacctacctcctgctttcagcaggaaagctcagcttggaaactccagggtg

SEQ ID NO: 188656 - DNA, 403 bp, Homo sapiens
tgtctaaaagccaggaagaggctgggcgcggtggctcatgcctctagttccagcactttgggaggctgagttgtggggatcacttgaggtcaggagttcgagatcagccmggccaacatggtgaaaccctgtctctactaaaaatacaaaagggcatggtggtgggcatctgtaatctcagctacctgggaggctgaggcagaggttgtggtaagccgagattgtgccactgcactccagcctgggtgacagagtgagactctgtgtcaagaaataaataaataaaataaaataaagccaggaagagagccctcaccagaaacaagccatgctagcaccctgatctcggacttccagcctccaaaattgtgagaaattcgaggttctgttgtttgagccaccc

SEQ ID NO: 188657 - DNA, 569 bp, Homo sapiens
gactttgcttcttactggctatgtagtttggggaaagatacttagtcttccagggcttctatttccgcatctgtagaataaggagactaacacttccttttgagatgccacgagatcaaacaaaataatgtgaatgaaaaaacttaacaacaagcccagtcagtgtgcttagtaaatgagagcagttgctagtaaacctgtgttgcagttacatgggtcttatttttccattttatagatggtgaaagtgaggcccagaggaagctcagtggcttgcccaagggagcacagcttgctgcccacaggagtgatgtggggtgcaaaggtgggtacacctaaaattcaggagcccaggctgcagtactggctttcgccttctcattgaaaacatcatttccctattctcagcctcaaaatctcactctgtaaagagaatgtgagtccccaccctgctcatgtcatgggtctctcctgagacatgggaaaacatgctgcagcgtktcccatgggtgggggagggattggcatgtctgagctgaggctaagcccatcctctgcctccccaccct

SEQ ID NO: 188658 - DNA, 428 bp, Homo sapiens
gagtgccaggtaagggcctgacccatgctaagagcattcctagatatcgtgtttcattctcagtactgccctgattttcaagctcatctcatttcattctcaatgcatttctgcaaggtagatcatgaaatttctgcttgctgctgttgttgctgttgttgtgtgtaagakggttctgaagtgctggctgagaggctagacaaggtgtgacagctggaaagtggcagggcagggactggaactccagattccacagctggcactcttaaccactaaccaacaccgacttccactagaggaaagactgcagaacaggaaatagcactgtttgggctgtgtctatacaagcaaaggcaattggagagaagcaggtgattatccagataactcagaaaatagccattaaaaaataaaggtttgtggttggg

SEQ ID NO: 188659 - DNA, 552 bp, Homo sapiens
ccggtgcccggaacccggttttgccaaacttcgcaatctcctcacctgagggcacccgccaagatctccgtggcaggaccacgcatcgcgcctggatgctctgggccggagccagatgagcaatcatgcatcccactacccaagtccctactactctggggactttgcaggaggtgagcgcctaaccctatccgtcagccccagtgcttaagtatcctcccccagaggtaagaatgaggaggtcccccatgaggttccatgtcaaggcagcagtctccgtggagccccagtgggagcggtctgggatacgcgggcgagccaaggggtccaggcggggaagttggggttcagcctcccgccggtsggtggctctggaaggagcgcagacaaccaggcggcaggcaggcagcggctgcggagtggacctctctctttcagcagatgccgcgggggatggggaacttagagaaggggagacaaggagagtgtaccccgcctcccggcaccccagcccgtagtacggctttaaaatcctgcagagtttgtcatagg

SEQ ID NO: 188660 - DNA, 600 bp, Homo sapiens
aagtggagatgcgactcgtgaggctctcctttccgatccccctttgggacaccctctgcctacctctaccctggagccagggagacccaagtcttggtgaccggatgggcccgctctcagttggcctgggctctgggaactggtggactctccctgggggcttcgggctgggagtgggttcggtttgtgtggcttcggctctaacaaagagatccgctgtaatccgccgaatctgttatcaatttctctgctgcttgagccccgccccacgcgccccgcccgccgcgaagcttggaaagtgcacgcggccagcaccaatctgggccgctgactcggaaacatgtcgcagcgtgtgtgtctatgsacgcgtgtgagtgtgtaaatgtgcacgagtgtgaatgtgtatgatgtgtgtgcacgcggcatcggctgcccttggggagagttgactttgcagcctgggctgcgcgagaagcagactttgcagcccactccctcccctggaggaaatttgacacttagggcgggggtggggagatagccggagccttctctctcctagctggggaaaccccagatttccattctccaggatgcgcc

SEQ ID NO: 188661 - DNA, 610 bp, Homo sapiens
tggttttgtgatcgcaaacaagtcactctccctaataatgatggtgaygttcatggaagctcatgtttcctgagcaccaatgtcaagcactgtgctgagtgcttcccacaggttattttggtttgtctcccgacagtcctatgatgtagtctctatcatcatccaaactttattggtgggaaaacaggcctatgaagattaactttgctccaaaccacacagctaacaagtggttgagctctagttggagctcacatcattccattgttgagcccacgttcccaactctagcactcttctgcctcgctctgagcttccccatgtctgtagttatttatggagatatattataatccacagtggtagagattcaatctcgcatgccaactccattggcattttagcagaagcctcggatatcatgtcaagaaagattgtgtggtctggatggctcaacagaaagaaagccatgatcgattattgatgtttgcaatgggcgtgggtggggaaagtagtcgtacttgtgccacatatttgccatccttggaccagatgatctttatttaaagatctttccaagagccaaccactgatgttcctatttcttccc

SEQ ID NO: 188662 - DNA, 418 bp, Homo sapiens
cttcacacttacctccacagaggggctcttctgatgcctctatgtaaacagcacttttaaatcctacttcagggaccattggttttctctcaagagatatgttccttttttttcttctcttaactcttttgktattttactccttttccaataatggaaggcttttcagttttacattagaggctactacttgttttttttttttttttctaattgtaaagcaggcaaaaatcatcacagaaaacagatctcaaaagaattgcacttagtgttgtgacctagttggtttcttcattctttgaaacattatttgatttttcctcccgtattagctgttatgtatgccggttacataaccttaatttttcatggaaaatatggatgtcatcaattaataggactacccctgctgttgtta

SEQ ID NO: 188663 - DNA, 405 bp, Homo sapiens
cttcacacttacctccacagaggggctcttctgatgcctctatgtaaacagcacttttaaatcctacttcagggaccattggttttctctcaagagatatgttccttttttttcttctcttaactcttttgttattttactccttttccaataatggaaggcttttcagttttacattagaggctactacttgttttttttttttttttctaattgtaaagyaggcaaaaatcatcacagaaaacagatctcaaaagaattgcacttagtgttgtgacctagttggtttcttcattctttgaaacattatttgatttttcctcccgtattagctgttatgtatgccggttacataaccttaatttttcatggaaaatatggatgtcatcaattaataggactacc

SEQ ID NO: 188664 - DNA, 399 bp, Homo sapiens
tctacaagaaaaagttccagttttatggacatagaaaaacaacttaaaattgtataacatacatttgtcaaaacccatagaactatactcctccaagagaaaaytttactgtatgtaaatttttaataacaatcagaatagggggaggggactcaaaatggaattcaaactgtaacaattaaatccaactgtattacaaattattaacataactgtaatttagggagcggagaagaaaaaaaactaagttacttcggaaaacagtattttgactggatactgtgaggctaaacaactactatactctagttagtaaacttatgtctcacaggagtattgattagcaattctgaaactactttgtgtgtatactacagttgaactaataattaaatacat

SEQ ID NO: 188665 - DNA, 391 bp, Homo sapiens
ttgacctattaaccaaacaaataataattgctacccctttggagaggaggtatgaagatcaggatgattcccaatattaattcatgtttactttactgtttgttccctttagacttgctctattccgtaggcccatttgccatcctgaaagtctccaagtgtagtcactacttctgtttggacagcgatcattgtccttgtgtcatkgggctgcagtcttgtcatttaaacatagcccccactgatgttgtctgtctctgtttctttccctttctcttcatgacttttggtttctcccgctccactatccaggtaggcaggggccccagtcagactaatggctggcccattagtccattggggtcttcagggataataaaagttaggtttc

SEQ ID NO: 188666 - DNA, 541 bp, Homo sapiens
aagcagtttatcagattcagctggttgattctaaggtgataatatgcagggctttaaagtttccctggaaaaaatcaaggtagcaataacattcattcattcaccaaataattttctaatgctgtcatgtgccaagcactaaatgcagtgagcagaggtccacatggcaaacttagaagggggttacttcttaaaaagacagaaaagcaaattcagttatttttcttgaacaaataattcctgaattcctattttgtaccagccagtctgcttagttgtggagacacatggtgagtcggcaggcctctaccctcaggaagctcatatgactttctataacagatgctctgagagaggctcagccggtgttttgggagagcctgaatttcaaggacactgggagaggaatgagaaggggatgcaaaaaatcaaataagtcttccaggaggaagtagctctttagctrtgttgtgaataaattaaataaagaataagactttactataattaaaaaataaaaaaatagatgttggtgtggatg

SEQ ID NO: 188667 - DNA, 268 bp, Homo sapiens
cagcttgtctggagggatccaggagggtctctgacaacacgaccaaaatgcctctaatccaggctcctgccctgagaaataaaaacagaaccacagaagcagatgaatcccttgtccccagactctaacctctggccagttccctacaatttctcatctcctaactcaacttgggyaagcacagaagccaatggccttgggcttctgaggtgagaaggcacttctcacgtttagaggaacgcctctcccatttcactgcttcctcata

SEQ ID NO: 188668 - DNA, 268 bp, Homo sapiens
cagcttgtctggagggatccaggagggtctctgacaacacgaccaaaatgcctctaatccaggctcctgccctgagaaataaaaacagaaccacagaagcagatgaatcccttgtccccagactctaacctctggccagttccctacaatttctcatctcctaactcaacttgggtaagcacagaagccaayggccttgggcttctgaggtgagaaggcacttctcacgtttagaggaacgcctctcccatttcactgcttcctcata

SEQ ID NO: 188669 - DNA, 575 bp, Homo sapiens
cattctctttggctactttgaacttgaaatacatgtagaagaacaaatgctaggaggtagattggataggatagttatctagtaggacaaggggtgtcgtgagagaggtgtcctactcctaacttccccacagggctggctgaaagtcccagacagaaatgcattttccatattggttttagctaatcttggaaagtacatgagcctgggcttaaataaggaaagtgggggctggtagggcagagattgctgtggaaagacatctagataataagaatagagggatttatttgagttctgaggaatgagcatccacgttgttagtcttyaagaccatgcacaatagtcacttgaccaggagaaacaacatttcttgtggatcatcaatagagctatataatgaaccaggctaagagcaatccccccaaagaaggctcccctgacaaatacctacaacatcaaagggaacaggtgggtttctctatcaaagaccatgacttggggatgtagtctctccccttccatcctttcatgatccacttgcatgaatggtcttcaacaccaaccccagttca

SEQ ID NO: 188670 - DNA, 499 bp, Homo sapiens
tgagtagaggcaagtaggaaggtgagatcctacccaagagtagcgattagccaaacagctctgcctttcatataaacatgaatagaaagaagaacagaagagagaaaakaaacaagtaaaattcaaagaaagtaggcagataatgcatggctggggtactatgttgggattaatggtcaaattctcttcccagtagcaaggtggccaaaggacttttaagaacaaggatatatgattttcaatttaaaattatttttgttgctacaatataaagccctccctttctccctcttcagtcaagtctaccatatatgcaactgctttatgtaagattttttttaatacatagaaattaaggaaacctgagatcacagccagggctaagtgacagagaacaaaaagaatacacaaacgacaaatgataatgcaaaaactaaaatacagggaaccagaaggttagagccaaaggtgaccacaaacatgtaagtcccccaggaat

SEQ ID NO: 188671 - DNA, 431 bp, Homo sapiens
tgctggtgagggtgtacactggaggctcctcaaaaaactaaaaatagagctaccatatgatccagaaatcctcctgctgcatatataccaaaaagaaagaaaatcagtatatacaaaaaaacttccytcccatgttttttgcagcattgttcacaatagtcaaatttggaagcatcctcagtgtccaccaacagatggatagataacgaaaatgtggtacatacacacaatggagtactattcagccataaaaattatgagatccagtcatttttaacaacatggatggaactggagattattacaagtgaaacaaggcaggaacagaaagacaaacataaaatgtcttacttatttgtggggtgtaaaaatcaaaacaattgaacctatggacatagagagtagagggatggttatcagaggctgggaag

SEQ ID NO: 188672 - DNA, 428 bp, Homo sapiens
ctactatgtacctacaaaaatttaaaaaaaagaaaatatgggagaaatgcttcaggacattgttctaggcaaaggtttttatgggtagggcttcaatagcataggcaataaaaacaaaaactacaaatgggactgtgtcaaagtaaaatgcttcttgcacagcaaaacaaacaaaaaatcaactaagcgaagagacaacatgcagagttaaagaaaatatttgcaaactcttcttccaacaagggattaatatttaaaatatgcaaggaactcaaatgactcaacagcaaaaaaaaagtaatttgattwaaaaatgggccaattatctgaatagacatctcttaaaagaagacatacaaatgacgtatactaacaggtatatgagaaaatgctcctcagtaatcatcagggaaacgcaaatcaaagcc

SEQ ID NO: 188673 - DNA, 581 bp, Homo sapiens
tagaaatgtattctcccacagatctagaagctagaagtgcagaatcaaggtgttggcagggttggttccatctggaggctaagggaaaatgtttcatgcctcactccgagctttcggagactgctggcactcttggactttccttggcttgtagacgcttcactccaatctctgcccctgtcaccacatggtggtcccctctgtgtcctctcctcttcttacagacacctgtcttttcttttytttttttttggtctgtatttgagacagagtctcgctctgtcacccaggctggaatgcagtggcttcatctcggctcactgcaactctgcctcccgggctcaagcggttctccttcctcagcctctcacacagctgggattataggcatgcacccccacacctgtctaatttttctattattagtagagacagggttttgccatgttggctaggctggtcttgaactcctgacctcaggtgatccacctgcctcagcctcccaaagtgttgggattacaggtgtgatccagcaggcctggccataaatatgcctgtctttataacccaccctaatccag

SEQ ID NO: 188674 - DNA, 581 bp, Homo sapiens
tagaaatgtattctcccacagatctagaagctagaagtgcagaatcaaggtgttggcagggttggttccatctggaggctaagggaaaatgtttcatgcctcactccgagctttcggagactgctggcactcttggactttccttggcttgtagacgcttcactccaatctctgcccctgtcaccacatggtggtcccctctgtgtcctctcctcttcttacagacacctgtcttttcttttctttttttttggtctgtatttgagacagagtctcgctctgtcacccaggctggaatgcagtggcttcatctcggctcactgcaactctgcctccygggctcaagcggttctccttcctcagcctctcacacagctgggattataggcatgcacccccacacctgtctaatttttctattattagtagagacagggttttgccatgttggctaggctggtcttgaactcctgacctcaggtgatccacctgcctcagcctcccaaagtgttgggattacaggtgtgatccagcaggcctggccataaatatgcctgtctttataacccaccctaatccag

SEQ ID NO: 188675 - DNA, 581 bp, Homo sapiens
tagaaatgtattctcccacagatctagaagctagaagtgcagaatcaaggtgttggcagggttggttccatctggaggctaagggaaaatgtttcatgcctcactccgagctttcggagactgctggcactcttggactttccttggcttgtagacgcttcactccaatctctgcccctgtcaccacatggtggtcccctctgtgtcctctcctcttcttacagacacctgtcttttcttttctttttttttggtctgtatttgagacagagtctcgctctgtcacccaggctggaatgcagtggcttcatctcggctcactgcaactctgcctcccgggctcaascggttctccttcctcagcctctcacacagctgggattataggcatgcacccccacacctgtctaatttttctattattagtagagacagggttttgccatgttggctaggctggtcttgaactcctgacctcaggtgatccacctgcctcagcctcccaaagtgttgggattacaggtgtgatccagcaggcctggccataaatatgcctgtctttataacccaccctaatccag

SEQ ID NO: 188676 - DNA, 581 bp, Homo sapiens
tagaaatgtattctcccacagatctagaagctagaagtgcagaatcaaggtgttggcagggttggttccatctggaggctaagggaaaatgtttcatgcctcactccgagctttcggagactgctggcactcttggactttccttggcttgtagacgcttcactccaatctctgcccctgtcaccacatggtggtcccctctgtgtcctctcctcttcttacagacacctgtcttttcttttctttttttttggtctgtatttgagacagagtctcgctctgtcacccaggctggaatgcagtggcttcatctcggctcactgcaactctgcctcccgggctcaagcgrttctccttcctcagcctctcacacagctgggattataggcatgcacccccacacctgtctaatttttctattattagtagagacagggttttgccatgttggctaggctggtcttgaactcctgacctcaggtgatccacctgcctcagcctcccaaagtgttgggattacaggtgtgatccagcaggcctggccataaatatgcctgtctttataacccaccctaatccag

SEQ ID NO: 188677 - DNA, 534 bp, Homo sapiens
ccaacagtgaccaagcagagaatcaaatcaagaattcaaccccttatacaatagctgcaataaaataaaatacttaggaatatacttaacaaaggagtcaaaatacctccacaaggtaaactacaaaacactgctgaaagacgtcatagatgaaacaaacaaatggaaacacatcccatgttcatggatgggtagaatcaatatgcgaaaatgaccagactgccaagagcaatgtacaaattcatacaaaatccccaacagaatactaacatcattcttcacagaattagaaaacacaattcaaaaattcatatggaacccaaaaggagcctgcatagccaaagcaacactaagcaaaaagaacaaatctggaggyatcacactacctgatttcaaactatactataggctcacagtcaccaaaacagcgtgatactggtataaaatcggtacatagaccaatggaacagaataaagaacccagaaataaagcaaaatactgaagccaactgatcttcgacaaagtaaacaaaa

SEQ ID NO: 188678 - DNA, 389 bp, Homo sapiens
tcctgcccactgtagcccatgtgctttggtggaaactaaggcacasctgattccagatttggggcatgtaggaaaataagtgttattctgtccctaggccacagttagtggttcaaggctaggaatatagcacaatgtgggcccgtgaaattgtatgctggagttttctaggaggccataagaaagagcatcccctcttttccaaaagactcccagtgggttcccatatttacacactgcaaatgtggacaagaaacctggtcctcaagttggagagtgatggagaattattctcaggatgaggttggcacacaggaaggcaaaaaaggacagagagagaaagaaatacactgacattgtggtctgctgaatcacacccatcctgaagc

SEQ ID NO: 188679 - DNA, 389 bp, Homo sapiens
tcctgcccactgtagcccatgtgctttggtggaaactaaggcacagctgattccagatttggggcatgtaggaaaataagtgttattctgtccctaggccacagttagtggttcaaggctaggaatatagcacaatgtgggcccgtgaaattgtatgctggagttttctaggaggccataagaaagagcatcccctcttttccaaaagactcccagtgggttcccatatttacacactgcaaatgtggacaagaaacctggtcctcaagttggagagtgatggagaattattctcaggatgaggttggcacayaggaaggcaaaaaaggacagagagagaaagaaatacactgacattgtggtctgctgaatcacacccatcctgaagc

SEQ ID NO: 188680 - DNA, 446 bp, Homo sapiens
aagggaccagcattttatgagggcctccttccctccatagcaaaagggcaaagagagaataagagagagcaggagataacaaaactcattctttcataaagaacccactccctcaacaatgacattaattcattcataaaggcagagctctcatggccaaattacctcccattaggaccaacctcccaacactgtttcattgaggattaccactagcacttcttaaaattcaagcacagtacacaggcacccwcaaaagatcattggaaactggaaacattgattttcaaactaaatatctcagtaaattaattgacagagaagtggttaacagcgagacacaattaatgccctggaacaccaattataagaacaatctcaaatcacagaaaaaaaaatggtaaagtgaaagataaaagacttaaaggataaattcaagataatag

SEQ ID NO: 188681 - DNA, 446 bp, Homo sapiens
aagggaccagcattttatgagggcctccttccctccatagcaaaagggcaaagagagaataagagagagcaggagataacaaaactcattctttcataaagaacccactccctcaacaatgacattaattcattcataaaggcagagctctcatggccaaattacctcccattaggaccaacctcccaacactgtttcattgaggattaccactagcacttcttaaaattcaagcacagtacacaggcaccctcaaaagatcattggaaactggaaacattgattttcaaactaaatatctcagtaaattaattgacagagaagtggttaacagcragacacaattaatgccctggaacaccaattataagaacaatctcaaatcacagaaaaaaaaatggtaaagtgaaagataaaagacttaaaggataaattcaagataatag

SEQ ID NO: 188682 - DNA, 494 bp, Homo sapiens
acaacaacaatagcaataacaatttttggtgccaaacagtgaggttttccagaaacactaagaattagcatgaaaaattaacaggcatatgacataaacagtagcagrcatatgatttcttttggaaatgctgagaagacagtagttgcctgtttgatgaggacagactggttgaatttgaccacttttcctatgctacctttctgtacaaacatggattgcttttccatatcagaactctgccattcatctccagttaggaaaaaaaaaaaagcctgctggagagtgtaatatttcataagatgtttgaaaacttgagcccagtttcagtggcatgttaacataagttgggttttttgtttgtttatattagattttgatatgcttctgtgctcaagtgatttaagtatgtgatttcttttttttgcaaactttgaattaatgagaaaaggattcatgaggctagttgtaagctgtagcaaatcgggtgtact

SEQ ID NO: 188683 - DNA, 494 bp, Homo sapiens
acaacaacaatagcaataacaatttttggtgccaaacagtgaggttttccagaaacactaagaattagcatgaaaaattaacaggcatatgacataaacagtagcaggcatatgatttcttttggaaatgctgagaagacagtagttgcctgtttgatgaggacagactggttgaatttgaccacttttcctatgctacctttctgtacaaacatggaktgcttttccatatcagaactctgccattcatctccagttaggaaaaaaaaaaaagcctgctggagagtgtaatatttcataagatgtttgaaaacttgagcccagtttcagtggcatgttaacataagttgggttttttgtttgtttatattagattttgatatgcttctgtgctcaagtgatttaagtatgtgatttcttttttttgcaaactttgaattaatgagaaaaggattcatgaggctagttgtaagctgtagcaaatcgggtgtact

SEQ ID NO: 188684 - DNA, 634 bp, Homo sapiens
tcaaggggatttatagcaaaggaaacagtaggacagacactagcggactcatccttgttgcctgagcacaccagaagatagattgtggctctaaaatatctcaacaacgcccagctggtgggggcccctaacttctcttcgtttcttccttcaaactgtttgtcttttcagacttagctgtcaactcccttcccctgccatctttctataggaaatcacagcccttatccagcacggatgttctctctctcaccaatttttagctgcttagaatgtgaacacaaagggagaaatgcaatttttaaaaaatacgtgactgtaactgatttattaatagcccataatgttggtaatgggcaatctataagtctgttcttaagaatttatagggcaaatattccagaaccatattaaaaacacccctcataaatgcctgcaagcctcaatcyattaacttaggtggtgggagaatatcattatctgtaggaaaacaaacagagatccagcccccagctctgatttccttagatgctccaaaaggcgcatagtaagtaagcaaattgtatgacatgccgtaggcaaaagtgtcctgtgcatagatatcagccattggctttcttaacatgtgtgcgtg

SEQ ID NO: 188685 - DNA, 617 bp, Homo sapiens
aaggccaattgtcacgcaccagtgatgaggctgggatttaaacccagacagtatctaaaatctacatttttgactactgttccaggtgaggaaactgaggttctctgagacaaagtgctttacctaggatcacccaggccaaagggcagagttgggctatggcctggacctctgcctcctgactgcatggtccatcacatctgagctgacatgccatgggcactyccagcctagatccatgatgctggaagcttctcctgatgacagactcttcccagtctgccactgttgtaacagctccaggacaacagctgtatgagccacttaccagggaggctcagtggatgcgcgggtgtcacttgctgtccccacccctttaggggaaagaaaatgccaccagacacctggtgatctctgaggaaggctatggtctctaggtccctccacactggatagcactgaccacctggaaggaaatgtcaggtggactttttgcatggcacgttgactgtgggatagcttaacagagagatggagctgaacatcatggctgcctgggaaggttctccctggagacaaagggatatcaacagttccgtctcttccagaggagcagt

SEQ ID NO: 188686 - DNA, 521 bp, Homo sapiens
gaagcatatattttcatgaaaattattaccacttgtattagtgatctattgcaccaccccaaacttggcggtttaaagcaatgataatcatctattacctctcactcttcctgtgggtcaaaaacttggttctgctttgggatctctcatgtggttgatgttagccagggctgcagtcatctgaagcttgacgagaactggaggatctgctctcaaggttgttcatccatatgactggcaaactggtgctgactgctggcaggaggcctcagttcctctttgtatggatctctccacaggcgtgcttgagcatcatcacagcatagcggctggcttccttcaaagcaagcaattccayagactatgaaagaggctgctgtctttcttatgacctatccttggaagtcatacaagttctaatggtccagtggtgtagccctcattcaaatgaggaggaaactacaaaaagtcataaatgccatgcattaaggattacagggggccatcttggaggccaccat

SEQ ID NO: 188687 - DNA, 485 bp, Homo sapiens
atacaatatttcagacagggaaacagtggcataatatagagactagggtccaggactcaccaggcctagtggaagttctgatggacagactcactcttattgagtaagctgctttcctcccacctcaaaccccatcttctctcccctctgtccactcagcagtgatggatagtcttatgtttggggtctcccaacatccatgtttcctttccaaacagtagcctaaatatcctttctgaagccagcactcccctcttctcagccatattatttgggtagactggcttcagcccattagtatagcccacctcctgggcacatgattggtttagggataaatacatgtagccagcctcaagatccatgagttattggaacatgtttgcagaggttcttaggaaagaaaarctttctctcttttccacaggcactattagaaagaactgtccctcatccctcagacaacacggtgggaagaactctga

SEQ ID NO: 188688 - DNA, 523 bp, Homo sapiens
atctgcctcatccagatttatcctacttccaaagaccacagggggattttctgaggatctttccaggaataacatacgcatgcatttcaaatgccccatgctgcagtgtttagcatgatctagtgatagagagaaagagctgtccagggcaaaaccaacaaactcgagccttagatcttatcagtcttacctgccaaaggytgaggcttttttaggaaactcatggatcacaaggaagagaaatctattctgtttgagttgccctggaaagcagtcaaggctgcctttccctgtggtgcccccagttcagtgtaggaagccaggctgtccatgcagattactatcccctgcgtctgggcctgaccactggaagataaagtccccaggaaccatctctgcctaacctgacctacttagatgtgacaagcctgatgaggttgggagtggagctaatggagatggacaagaaggcaggcctgggatggcccaagggagataagctcacaggacttggctcaaaaca

SEQ ID NO: 188689 - DNA, 545 bp, Homo sapiens
agccctaggaggaaggaagagcgtctccagggctccctgtaaggtggcctttgcagactatcgcagttatgactcttgctggagctgttgaggccagttcctgtagtgtcttgcctgccatcttgaattccctgctaaagacaacgagaaggcattggagtgttgcgcaaggtaagtgacatcatcagatttgagttttggagaatgagctggaggaggagcaagacaggaggcaggggaccaatcaggaggcagttgctttcctcccagaccttaggccagtcaaaatggtagaaatgtgcgtggagacatgcatgatgtacgatctgcagactgcagattctagttgggcctggaaggagcaggactaacggcaatggcttgaactatttggaggatggtrctaacagttcccttttaggcggaatctgaggacgagaatgagaaactgtttttttttttaacgtgttgctgcttaagggagtgggcttcagtgatctgcagggcctcattccctgataacatcaccgtgacagttcaccacg

SEQ ID NO: 188690 - DNA, 383 bp, Homo sapiens
ttgttcacaaagggcagaaatacaaataaagaggaataattttaatttatacttaaaaaaaactttttaaagaaaaaaaaacagaattcagtgtctcaaggtttatttaccactaaattgaattatagacactacagaagaagtgtttcatgaaaagttatagtaacatagttctaatgtgtttgcttaggtttaatgtcctttatsactatctgaagagtaaggaaagcaactacaagttctatagggcactgaaatatttaggggtaaagagctataatgtatgtaactaaatcctaaatacaaaaaatatatacaaaatatgaaatgattttatatataaatagaaaaatagagaaagagcatgccagaaaatgatgaaa

SEQ ID NO: 188691 - DNA, 413 bp, Homo sapiens
ctgcataccaaacacagaatttcccaygtgtagcattcaagggactttacagctacagtttgtattaatttcttaaataaaatttaagggatcagagattgactagctattctatagatgaggaggctgaagcctggcgtttattgtgtgtattatcatctttagcaatgaaagaactcaagaaaaagattaagcattctttaaagggggaagcgcaaatgtcattgacccattatccttctgatctgcctttgagttgtctaatgaccgttccatggatagaaagataagtctgttgttttggtaatccatcactaaattaaaaaatgactgtaattaaaattttttttccagagtgcagtatctcctcctgtctcgtccaattgattatagttcaagaatgctgtttgtat

SEQ ID NO: 188692 - DNA, 433 bp, Homo sapiens
aggtcctgcataccaaacacagaatttcccatgtgtagcattcaagggactttacagctacagtttgtattaatttcttaaataaaatttaagggatcagagattgactagctattctatagatgaggaggctgaagcctggcgtttattgtgtgtattrtcatctttagcaatgaaagaactcaagaaaaagattaagcattctttaaagggggaagcgcaaatgtcattgacccattatccttctgatctgcctttgagttgtctaatgaccgttccatggatagaaagataagtctgttgttttggtaatccatcactaaattaaaaaatgactgtaattaaaattttttttccagagtgcagtatctcctcctgtctcgtccaattgattatagttcaagaatgctgtttgtatttgcaacatcaaaaa

SEQ ID NO: 188693 - DNA, 582 bp, Homo sapiens
agatctagaagctagaagtgcagaatcaaggtgttggcagggttggttccatctggaggctaagggaaaatgtttcatgcctcactccgagctttcggagactgctggcactcttggactttccttggcttgtagacgcttcactccaatctctgcccctgtcaccacatggtggtcccctctgtgtcctctcctcttcttacagacacctgtcttttcttttcttttcttttcttttcttttytttttttttttttggtctgtatttgagacagagtctcgctctgtcacccaggctggaatgcagtggcttcatctcggctcactgcaactctgcctcctgggctcaaccgattctcctgtctcagcctctcacgtagctgggattataggcatgcacccccacacctgtctaatttttctatttttagtagagacagggttttgccatgttggctaggctggtcttgaactcctgacctcaggtgatccacctgcctcagcctcccaaagtgttgggattacaggtgtgatccagcaggcccggccataaatatgcctgtctttataacccaccctaat

SEQ ID NO: 188694 - DNA, 525 bp, Homo sapiens
tgtaccctacaaacaatgctatagttcatatccctgcactgcatgtctttatacaatcgtacaagtatctctgttggataaacttctagaagtcgaacagctgggtcaaaggctgtgtgcattatagattttgatgctagttgaacggacatccaaagctatggtgttaatttatattcccaccagcagtgtatgagagtcctacttctctctacatttgtctaagcttttaaaatactgtcaatacttcttgtggctttaatttctgctttttcttatgatgagtgtgttagtyggctccagctgctataacaaattaccatagactgggtggctttaaacaacagacatttacttcacacagttctggaggctgggaagtccacgatcaggtgctggccatttcagttcctggtaaggaccctcttcttggttatgtcttcacacagtagagagagagaagcaaactcccttgtgtctcttcctacaacggcactaattccatcacgagggctccactcttat

SEQ ID NO: 188695 - DNA, 541 bp, Homo sapiens
aaacagctactacagtcagttccaaacagttctaattaaatagattacaacaaaacarggataaatgcacttcctaactgacatgaatgtgattcaaagaaaatttatattgattcctagtgtcctattcttcacatacaatatacaggaaatgagattatttatttgcagtgacccacagcaactagatcccttgtgaccaacagcacatacttgcaatatggctcctcagagttaaaaccacattcagtggtcaaggaacacagtaaaatcaagagacgttgattagaatgaacccatggtgtagtatcatggaaagaacactggctggaaattaggaggtctaggtcctaaggcctggtttttcaaccatttacctatgtgatgttaggaaatccactgtacctcaaggcacctcagattcaggacctataaagtgatagggttgacctagatactataaatcagttcaagtctcctggcccaggctaattacatcccactcataaaagcaacttgtaaatgagatggaacccttatt

SEQ ID NO: 188696 - DNA, 625 bp, Homo sapiens
tttttaaaaaggtgatactaatttacataaaaatayttatttcacgcctgtaatcccagcactttgagaggccgagatgggtggatcatgaggtcaggagttcgagaccagcctggccagtatggtgaaaccccatctctactaaaaatacaaaaattagccgggcgtgatggtgggaggctgaggcacaagaattgcttgaacctgggaggcagaggttgcagtgagccgagatcgtgccactgcattccagcctgggtgacagggtaattctgtctcaaaaaaaaaaaaattattatatcactgatggtatgtaatcaatatacaaattaatgagacattttaactttttttagtacaagatcttctcaattcagactagccacatttcaagtgctcagtagctacatgtggctagcagctcccatattgaacagtgcggttccagaggtggtaaatacttatgatctagatttttgctcacatgtatgatctgtgtgtctttaggaaaaacagatgagtgtgtgatcagtctgtatttctagttctttagttttatattgttactgccgggttttctttcagtggggaagagggtgtttagagggtttcagagaggaagctc

SEQ ID NO: 188697 - DNA, 316 bp, Homo sapiens
cactgcaacctccgcctcctgggttcaagcaaaattctcctgcctcakcctcccaagtagctggaatcacaggagtccgccaccatgcccagctaatttttggtatttttattagagacagggttttgtcacgttgcccaggctggtctcaaactcctgacctcaggtgatccacccacctcagcctcccaaaatgccaggattacatgcgtaagccaccacacctggcctggattaaattttcaaaaaccagctcctccctgacagatcttctgtgctgtgctccagcctctgaggagctgtagctactgacttt

SEQ ID NO: 188698 - DNA, 419 bp, Homo sapiens
gctcctttctgttgaaatggccataaagtaaacgctataaaggatgtgtcttctctcagatttccaaggaccaatggctagttggctttggtgctttgactatgtcaccaaagtgactcatgatctattcatgaagttcagcaagttgaataatgataaagcacagttgctatgcacctgctgtgtgcatatcccctatttaatccacaccatgagcaaggtaccattatcaccccattttatagaaaggcatawcctgcccaagaaggatggggagaacttgaccccagcggtctggcaccactgtacacatctaaccacagaaccctacagccattctgtagcagagatacagaacgatttgtctccactgttggaaattgtatcataaaatatcaaataagaaataaataaatgga

SEQ ID NO: 188699 - DNA, 419 bp, Homo sapiens
gctcctttctgttgaaatggccataaagtaaacgctataaaggatgtgtcttctctcagatttccaaggaccaatggctagttggctttggtgctttgactatgtcaccaaagtgactcatgatctattcatgaagttcagcaagttgaataatgataaagcacagttgctatgcacctgctgtgtgcatatcccctatttaatccacaccatgagcaaggtaccattatcaccccattttatagaaaggcataacctgcccaagaaggatggggagaacttgaccccagcggtctggcaccactgtacacatctaaccacagaaccctacagccattctgtrgcagagatacagaacgatttgtctccactgttggaaattgtatcataaaatatcaaataagaaataaataaatgga

SEQ ID NO: 188700 - DNA, 419 bp, Homo sapiens
gctcctttctgttgaaatggccataaagtaaacgctataaaggatgtgtcttctctcagatttccaaggaccaatggctagttggctttggtgctttgactatgtcaccaaagtgactcatgatctattcatgaagttcagcaagttgaataatgataaagcacagttgctatgcacctgctgtgtgcatatcccctatttaatccacaccatgagcaaggtaccattatcaccccattttatagaaaggcataacctgcccaagaaggatggggagaacttgaccccagcggtctggcaccactgtacacatctaaccacagaaccctacagccattctgtagcagagatacagaacgatttgtctccactgttggaaattgtrtcataaaatatcaaataagaaataaataaatgga

SEQ ID NO: 188701 - DNA, 596 bp, Homo sapiens
tttaagttaattttcaggcagcccctatgagtcaattactattattattcccaatctacaaataagtaaaataaagttcagagaatataaggaacatgaaaaggtcatacagctaaaaggtacaagagtcatgaaggtaargttttttgcaatgcatggtcacatgtaaaagaaactgtcatatgaagttaaagtataaaaatttaattccactagtaaaataccatgacaggatgacttagtgatctccaaaatcatcacagttgaaaaacgtcttgctctgtattcactacctggataactgtgaagactttttctgtgcattttttaaaaataaaaacctattgcctggatttaacttttctgcatcattcttttgtcctaaatgtctgccaactgcattgctaccacaatgttattaagatgcttagattcaaattgagatagttccaaggactttattaattagcccatctaggaatttggatgaatgttctatgcaggttcttcctgcacagaatccctctagatttaattttgttttaagattaccctacatgtacatgtaaaggtgatttgccaaatcaccattcaac

SEQ ID NO: 188702 - DNA, 385 bp, Homo sapiens
ttgggaagtggagagtgttgattggtgaaatcataggggtcgaagtgaggttttcttactctcttctgttcctgggtgggatggcagaactggttgagccaggttactactctgggtggtgtcagctgatcsatccattgcagggtctgcaaaatatctcaagcactgatcttaggttttacaagagtgatgttatccccaggagcaatttggggagcttcagactcttgtagccagaggcgaaatgacccctcaactgtaatttttaatcttgtagttaatttgttagtcctagaaaggcagactggtccccaggcaagaaggctgtctttttaggaaaagtcaatcaattttgtttcagagtcaaaccataaactgaattcct

SEQ ID NO: 188703 - DNA, 495 bp, Homo sapiens
gcactgtgttgagtgcttactccgtctcctaccctgtgccatccccctcatcatgtgctattggttaattgttacaacactgccagaaggtatttttattccctttttcagaagagaaaaagctgaggttcaaaaaaattaaataactcccaaggagttaattattagactgyggcaaagccaggattcaagctcaaatctgtctccaaaactcatattcattgtataattcccagaagaagaaaaaagcaaatctcacattgaataaacaagatgaatcaagtttggggacaaaaataatacagtaaacaaacactttattattaaatacattttaatttacttgaaacatctttttactaagtgctgcttcttccaatatgcatttttaactacttcattttaaatgcacaattagatattcagaccaccagcaagcaaagaatgacatcttatggatatgatatctagcacaattgatgcttatgatatatc

SEQ ID NO: 188704 - DNA, 577 bp, Homo sapiens
gtaattcatccaatttttggctgagtaatattccattgtatagatataccacattttgtttattcttttatcagttgatgaacatttgaattgtttttattgttttgctgtyatgaataacgctgctattaacattcatgcaaaggttttatatggacatatgttttcaattttcttgatctgataaccagaactaagtttaacatttcaagggactgccaaagtattttaaaatgtgattgcgccattttataattctatcaataatgtatgcaggttccaattactccatatcttcaccaatactagtggttatctgtcttcttaattttagccatcctagtaggtatacattggtatctcaatgtgattttgatttgcatctcttgtatgactaatgatattgaccatcatttcacttgattttctgtctagttgtttttgccattactgaaagtgacatttaaaaataaaagtctccagcaattattgtagagtgatcttttttcttcctcctattctgtcaggttttccttcatgtattttgaggctctcttcttaggtgcatagatgtttg

SEQ ID NO: 188705 - DNA, 577 bp, Homo sapiens
gtaattcatccaatttttggctgagtaatattccattgtatagatataccacattttgtttattcttttatcagttgatgaacatttgaattgtttttattgttttgctgtcatgaataacgctgctattaacattcatgcaaaggttttatatggacataygttttcaattttcttgatctgataaccagaactaagtttaacatttcaagggactgccaaagtattttaaaatgtgattgcgccattttataattctatcaataatgtatgcaggttccaattactccatatcttcaccaatactagtggttatctgtcttcttaattttagccatcctagtaggtatacattggtatctcaatgtgattttgatttgcatctcttgtatgactaatgatattgaccatcatttcacttgattttctgtctagttgtttttgccattactgaaagtgacatttaaaaataaaagtctccagcaattattgtagagtgatcttttttcttcctcctattctgtcaggttttccttcatgtattttgaggctctcttcttaggtgcatagatgtttg

SEQ ID NO: 188706 - DNA, 590 bp, Homo sapiens
gtttatatatatcacactttctttatccatttgttgatgggctctgattttttttttgttttgttttttgagatggagctttactctgtcgcccaggctggagggcagcagttcaatctcaactcactgcaacctccgcctcccgggttcaagtgattctcctgcctcagcctcccgagtagctgggactacaggtgtctgccaccacaccccgctaacttttgtatttttagtagagacggggtttcaccaggctggtgaagctggtcttgaactcttgacctcaagtgatccacccacctcagcctcccaaagtgctgggattacaggcgtgagccaccacgcctggcctgatttcattttttggctcttgtggatagtgckgcaggaaacgtgagagtgcaggtgtctctttgatgtactgatttcctttcttttggcttttcacccagtagtggggttgctggatcgtataatagttctattttcagttgctttgaggagcctccatactgttctccatagtggctgtactaatttccactcccaccaacagtgtacgagggctgtccttcctccatatcctcacc

SEQ ID NO: 188707 - DNA, 486 bp, Homo sapiens
gaattcataccggtgagaagccttttgaatgcagggaatgtgggaaagccttcagcaggaagtcacaactcgttacacatcacagaactcacacaggaacaaaaccctttggatgtagtgattgtagaaaagcmttctttgagaagtcagagcttattagacatcagacaattcatactggagagaaaccctatgaatgcagcgagtgtaggaaagcatttagagagaggtcgagtctcattaatcatcagagaacacatacaggagagaaacctcatggatgcattcagtgtgggaaggccttctcccagaagtcacatctcatatcacatcagatgacacacacaggagaaaaaccctttatatgcagtaaatgtgggaaagccttcagcaggaaatcacagctcgttagacatcagagaactcatacgggagaaaaaccgtatgaatgcagtgagtgtgggaaagctttcagtgaaaaattaa

SEQ ID NO: 188708 - DNA, 536 bp, Homo sapiens
attcatacaggagagaagccttatcgatgcattgaatgtgggaaagctttctcacagaagtcacagctcatcaatcatcagagaactcatacagtaaaaaaatcctaggaatacagttaatagtagtctttgacagatcatcttggacttcaggaaatgcaattatgataacgtttgtagacagtcacgtcatgttaggtgtytgtactccatgaggatgagaactctaaatgaggtggtgtatggaaagccgatcataattcatagagtagagtgaacctatgactgcagtggatctcaaaaacttttaaaaccatagacaagccttatagagtagaacattcacagcaaagaagaatcctgtgaatgtccaaaagccttccagaagtcaagtctcttaagctattagaaatattcccactggggatgagggaaaaccccatgaatgcgggaaatgaggcaatatttttaagaaatgacagttcattgtacataagaaaatgctcttaggaatgaagttctatgaaagtactaaa

SEQ ID NO: 188709 - DNA, 558 bp, Homo sapiens
gcattgaatgtgggaaagctttctcacagaagtcacagctcatcaatcatcagagaactcatacagtaaaaaaatcctaggaatacagttaatagtagtctttgacagatcatcttggacttcaggaaatgcaattatgataacgtttgtagacagtcacgtcatgttaggtgtttgtactccatgaggatgagaactctaaatgaggtggtgtatggaaagccgatcataattcatagagtagagtgaacctatgactgcagtggatctcaaaaacttttaaaaccatagacaagccttatagagtagaacattcacagcaaagaagaatcctgtgaatgtccaaaagccttccagaagtcaagtctcttaagctattagaaatattcccactggggatgagggaaaaccccatgaatgcgggaaatgaggcaatatttttaagaaatgacagttcattgtacataagaaaatgctcttaggaatgaagttctatgaaagtactaaatatgggacagtgcaacaagtaacsagactattttgtattttggagaattc

SEQ ID NO: 188710 - DNA, 454 bp, Homo sapiens
tcaccatcgtgacagtgtttctaccaccctctcccagccttcctgccttccctgctccctgctacctctctttcctctcggagctttcagtggacatttacaatattgagtctgtctcctccttactctgtcagtagccagcctggctgctgcaggcctcctgggcgacagtaagttgctgaacaaaacgtccttttcaacaagtccattaaaatcctggaaaacgagaggggatgctttccatccccagctcattctaatgcttcgcgagggccgctgtagggtgggagcgctcagttattaaaggagrttagagctgatgggtctgtctgaatggcgctccggtgcctccctgaggcccgagatgcaaatgggaaggagccagcaaaacaatttctctttgcctgggctttcttgggaaaaaacagagaaaagtcctttggtgtaaagtcag

SEQ ID NO: 188711 - DNA, 393 bp, Homo sapiens
aagcttttgagggggaaaaaaacacaattccactgtgatsacatacatggagggaaaatttgcagagtacaggttaagtatcttttatccaaaatgcttggggctggaagtgttttgggttttgggattagggatattcagcctgtacttggttttgcttttttccaaatgagtgatatttcaaagtgaccatgccaaaagtagtcaaggaaactaaagtgataagtagtattatgatttttaaattgctatatgattggtactctggagacattctaaaagtttgggccttggtggtagaagtgaagtaattatttcatggagtctttcaaaataaacagaaatgcagcaaaatgcacagagaaaagtatttgttttctgtgtcctgcctct

SEQ ID NO: 188712 - DNA, 622 bp, Homo sapiens
ctatgaggatggtagaacgggtatcttttctgtattttctctttacagaggagaaaactgattatatatgatactcattatgcatatatgattatatattatatgtaatcagttttctcctctgtaaaatatttttacatgtattatctatgtgtgtatatatgtgtgtttatatgtgtatgtatgggtgcatgtgtatgtgtgcatgggtgtataatatttgtgtgtgcatgtacctacatgtgtgcacatgtgtgtatatgcatgacactctaacacagagacacaagatctttttgaaaacttgtgggaaaatcagagaaacggctggcctgtgaatgtgtatgtgtgcatgaatgtataatggatgtgtgtgtaccttcatgtgtgcacgtgtgtgtataacacacacacatataccaaggtcaagtagacaatrgtagtggtaaccatttattcactgaaccaataatgtttgagctgaaactttcaaaatgagtaaaactgtcacgagagagcactccaaaccagaaaccaaatatggaagacatagcattcatacaacccagtgtaaaactctgtaaaactctagtgacaacgaacaaaaggcaagttagaacag

SEQ ID NO: 188713 - DNA, 519 bp, Homo sapiens
ttaatttctgatctcatccattccctgctcagaatctatgcatcgctccccactgcttttaaaattaccacccaaatccttagccccagcttcamatcatgcgatgaccctcaacattgtctttcttctttcctagtgatgggtcaccagtctcatttttcctttgtgcctgaatgaatatcctcctctgtcttgctaactcttagtcattcttcagttctctagtccaatattccttactcagaaaatctaccctaaccacacagaatggaccagctccctgtgttataggctctggtacatattggtacttttccacatagctttcatggcagtttgtgttgtggtgggtttcagcaggtgtatttggatactggctctctcatgctagactgataagactgcaagctcttgagaaataaatgtgtccattttgttcaccattgtaccccgaccagcatggcacctggaggatgaaagggaagagggatacagaaagaagttgggggcagagatagg

SEQ ID NO: 188714 - DNA, 416 bp, Homo sapiens
ttctgcattcaggaaccacctggtgaagttctttctgaggaatttagattttgtgtagccaggcgtcttccagaagtgtggtgagggagtcattgctgagagacttgtgcagtgaatattccaactcccgggtttgatggcattcctggttgggggtggtggctggcacctgtaatcccagctctttgggaggccaaggcaggaggatggcttgagcacaggagctcgagaccagcctgggcaacatagtgagaccttgtctctacaaaaatgtttaaaaattagcctggtgtggtgatgcatgcctgtagtcccagctacttgggaggctgaagtgggaggatccctagagcttagaagttcaaggytacagtaagccaggatcatgccgctgcactccagcctagatgacagag

SEQ ID NO: 188715 - DNA, 271 bp, Homo sapiens
aagatggtgtgctcactgggctctgaacgcttgcatgtcctcgtgacatggcccctgacttctcccagagggagtgatccccagagagagcaagaaggagactaccctgacttccaygacctagtcacagaagtcacacaccattgcttctgccatgctttatttcttaggagtgagtcactgagtctggcccacactcaagggggaggaattagttttcacctcttgaagggtggaacatcaaataatgcattatattttaaagccacca

SEQ ID NO: 188716 - DNA, 635 bp, Homo sapiens
ctctgcttctttacttgtaaagtggagggagagaatggcttcatcaaagattcctatttgggaatatgcatcaaaatgacccagagagtttttttgaaattcggattcctggatgctgccctaaaagttcggacttaaaataatcaggaatgaagtttttgcatttctgatgccaacacccctscccagcccttctcagcatgacttgggttgagaacaattaaaccaggtgagttctaaaccttcttccattttttatgttcttcaattctggggtgctcttttggatctataggtagaaaaacacaaagagaggactcactctcagggatattaaagagccacttctttgtcaccaggttcccaaaagatagaggtgggtcttaggactctgtatctctgcctagcagagcctcattgagatttctgcatctgctttctctgctaatcattctctggacctcatcttgtttttacattttgctcaattcaccaaaactctgtgcagcatcttggtgcaagcatcctacctaggaaaccgccctccacctccttgcccatagtcttttataggacccaaaatcaatctgcatccccctatcatttcgaacagctccacaattatcaatatgcat

SEQ ID NO: 188717 - DNA, 635 bp, Homo sapiens
ctctgcttctttacttgtaaagtggagggagagaatggcttcatcaaagattcctatttgggaatatgcatcaaaatgacccagagagtttttttgaaattcggattcctggatgctgccctaaaagttcggacttaaaataatcaggaatgaagtttttgcatttctgatgccaacacccctccccagcccttctcagcatgacttgggttgagaacaattaaaccaggtgagttctaaaccttcttccattttttatgttcttyaattctggggtgctcttttggatctataggtagaaaaacacaaagagaggactcactctcagggatattaaagagccacttctttgtcaccaggttcccaaaagatagaggtgggtcttaggactctgtatctctgcctagcagagcctcattgagatttctgcatctgctttctctgctaatcattctctggacctcatcttgtttttacattttgctcaattcaccaaaactctgtgcagcatcttggtgcaagcatcctacctaggaaaccgccctccacctccttgcccatagtcttttataggacccaaaatcaatctgcatccccctatcatttcgaacagctccacaattatcaatatgcat

SEQ ID NO: 188718 - DNA, 584 bp, Homo sapiens
ctctggtgttccagctggatctgcttatgctatctgaagccacagagacaggcacatccttctttcaaaagacagacatctctgtagttaaaagaagtcatcgcttttccaagtcaaactcatggagtttcttcaatattacttgctatgataaggggtctaggtttctcattttctgaatgagttaaaattttccatttttccccttcagcagaaggagaccaakgtagcacaattctctggatttgatatcatccatccattgccaatgcaatatggtgaaaatactttatttgtcctataaattataattgtgtgaactgagccagcaagacagcagccctattttctgttcagccttcactcacacatctggaaaccacacctggtcctgccttgggtccagccctcctgccatggggcacttgacccttgctccacaccttcccatccctcagtggatggatcgaaggggagcatgattttcacgccctacagagcttatcccgaggcttgtccacagaaatgggaaagaagccttctctgatccccaccagcatcagatgaggctgggcgtgaagtca

SEQ ID NO: 188719 - DNA, 436 bp, Homo sapiens
aactcataccctttagcggtcacccccacttttcacgacccctcaatcctggcaaccacgaagcaacttcttatttctacagatttactcattctgggcatttaatgaaaatggaatcacatggctcatggcctttggagcctggctgctcactcagagagttttccaggctcatccatgctgtagctggtgtccctgtttcattcttttttgttggctgagcggcttcagcattttaaaagcccmccatgaatgtaggagagtcccagctgctccacatcttggtctcgctcctttttttttttttccctgctaactgcgttatttcttgctatttaaaatttttattttaatccattaaacagtaggcttaattttcaatctattatttagtttcatgttctcagtctcccatgccaccatttatccaattcaa

SEQ ID NO: 188720 - DNA, 549 bp, Homo sapiens
tactcattgttaccgggatactgctgcttctaggccctgtcagctgacatagcaaagaaatatagatgtgtatatatgtcttatgtatatacacatatctatgaatatttctctacataaccatctatatctttattaagcaaaaacatgagttcatacttatgtctccagctctgacttattatcacatgaatcattctagcctcctcttrtttatctatttgcaaattcccacttcattagcatgaaacctggttgctacttcagttgagtcacaaaagaaaaatgaaaacaacaacaacaacaaaagaaacctggttgccaccacccactatccacttatgcagacaatgtttctagaattattaacccatacctccatgggcacaacttaattaactagagtatagtgcttatgtgaagtttcttttgcctatagtcttagagactccactccttttcagagttgcttccttccccccccaatccctaccttttctccttcagtatgatactttcatacatttgtacagttaggtcctctttcac

SEQ ID NO: 188721 - DNA, 549 bp, Homo sapiens
tactcattgttaccgggatactgctgcttctaggccctgtcagctgacatagcaaagaaatatagatgtgtatatatgtcttatgtatatacacatatctatgaatatttctctacataaccatctatatctttattaagcaaaaacatgagttcatacttatgtctccagctctgacttattatcacatgaatcattctagcctcctcttatttatctatttgcaaattcccacttcattagcatgaaacctggttgctacttcagttgagtcacraaagaaaaatgaaaacaacaacaacaacaaaagaaacctggttgccaccacccactatccacttatgcagacaatgtttctagaattattaacccatacctccatgggcacaacttaattaactagagtatagtgcttatgtgaagtttcttttgcctatagtcttagagactccactccttttcagagttgcttccttccccccccaatccctaccttttctccttcagtatgatactttcatacatttgtacagttaggtcctctttcac

SEQ ID NO: 188722 - DNA, 547 bp, Homo sapiens
ggatactgctgcttctaggccctgtcagctgacatagcaaagaaatatagatgtgtatatatgtcttatgtatatacacatatctatgaatatttctctacataaccatctatatctttattaagcaaaaacatgagttcatacttatgtctccagctctgacttattatcacatgaatcattctagcctcctcttatttatctatttgcaaattcccacttcattagcatgaaacctggttgctacttcagttgagtcacaaaagaaaaatgaaaacaacaacaacaacaaaagaaacctggttgccaccacccactatccacttatgcagacaatgtttctagaattattaacccatacctccatgggcacaacttaattaactagagtatagtgcttatgtgaagtttcttttgcctatagtcttagagactccactccttttcagagttgcttccttccccccccartccctaccttttctccttcagtatgatactttcatacatttgtacagttaggtcctctttcacagtctgcattgct

SEQ ID NO: 188723 - DNA, 594 bp, Homo sapiens
cagagaattattcaataagtcaatatatttaaagcatttagcaagctccccccaatagtaggtaagacaaataataactattaataatagtaccattatgctttttaagaaatcttagggaaaaattggcccagctgacaattttgaattatttttgttgttggaaaaacatgttggctatcaataactctcasgtgaatctgttgatctcttcaaatcacttttctaattctgtactttggacagtagtcatcagttgcttctgggaagaggcatgaggtcagcagacttgaattggtcaaatgtcagactgcagctcagtcatggctgggttatttaatgaattatatgggaaggaatagtgaatatctgtggcaggagcactgacaatatagcttagggatgctccaagactctggaaaacacagctaagcactgctcgttggcattccctataatgacgctgcatgacatgaaaaaggacaaagattcagagactgggaggtggtaagtttggagaataaaactggttgtttggctactattattacatgctccatcttcccctatgttgtacctgccactgtacccaag

SEQ ID NO: 188724 - DNA, 594 bp, Homo sapiens
cagagaattattcaataagtcaatatatttaaagcatttagcaagctccccccaatagtaggtaagacaaataataactattaataatagtaccattatgctttttaagaaatcttagggaaaaattggcccagctgacaattttgaattatttttgttgttggaaaaacatgttggctatcaataactctcaggtgaatctgttgatctcttcaaatcacttttctaattctgtactttggacagtagtcatcagttgcttctgggaagaggcatgaggtcagcagacttgaattggtcaaatgtcagactgcagctcagtcatggctgggttatttaatgaattatatgggaaggaatagtgaatatctgtggcaggagcactgacaatatagcttagggatgctccaagactctggaaaacacagctaagcactgctcgktggcattccctataatgacgctgcatgacatgaaaaaggacaaagattcagagactgggaggtggtaagtttggagaataaaactggttgtttggctactattattacatgctccatcttcccctatgttgtacctgccactgtacccaag

SEQ ID NO: 188725 - DNA, 632 bp, Homo sapiens
tgcttgtatctaggctacttgtgcattcattcatttactcatgcattcaatatttattgtttattttgtgaatacctaggactatgctaacttctagggatacgaagtggaatgatcttgtttttgcataaggagcttcatgggtactattatagaagcatacaatagtaattgtaatgtctggggaaggaggagagtgctgagtgtttgcagccctgaatggtctttaaagatgtggtattttccagacagcagactttatcttacatatctttgtactgagtgctcatcctggtctkgctacattgtttgggaaactacaaatgtgatgagacctaaggctgcagaggttgttaggttttcaattttagaaggccttatatattgtgtatggattttggccttcatatctgaagattttgtgagtagagaatcataggatgggtttctcagaactcctttcatactcactgtcatggcggggaacacaaaagaattacatagattcagaggttatgtcagtatttggcaactctttcatttgttcactcttgggtccttaatttataaaatgagacatttcacatagtcagggttattcatgtctatttgtgttctctgtctgaacacat

SEQ ID NO: 188726 - DNA, 476 bp, Homo sapiens
gtatatggaagacatcattctaggccagtggttctcaaacattaacttgcaccagaattgccttggggggcttcttaaaacacaaattgccagaatcttgttgccagaatctctaattcagtagatgggggtaagaaccaataatttgagttmctgacaagttcccaggtgataaacatgctggtctagaacacatcttgagaaccattgttctagctactacaaagaaaggaaaaagatatagacaaatttctattctcctgaaaatgacattcttttgtattctgtcacaatagctactttggtggattaaaactataaacagtccaaaccattagaatgaagaaagctggctttctttccttcagtgcaggatggactgtatcttaaaaaaaaaaaaaaattgcttggcctccgttccttaggagatgaaatggtttcattctttcctacagaatgggtcaaatcacttttta

SEQ ID NO: 188727 - DNA, 607 bp, Homo sapiens
actggggggttctaatgagcagcaaaaagaccaaaaggaaagctactgtagaaagggaaaaaaatctaaagaccccactgattctctgacttgaaaataggtccccaaataattgggaaccgcatcagggaaggcatgactaccataattcagagctccttcacaccattggaaggatggattcctttacgaatccagtaggaagttaatatggtctatagtatgatgaagctaattttaaggtcaggattagggtagatctactacaaaattttattatcatctctaataaaattccaatggccaagtctggggcaaaacttaggaggtgagctatgggtgcattgcatcatgggtgggactcaaatgtactttcatgactgaggtgtgagattggtaagtaaattcacaaacactgttttcagctgaactttgggtaatagctgattcagatctttgtattgaacaagtaccaaatgcctctcacattgtatctgacggtttggtgatcaactgaatggagwgttatgggaaggaacaagaactcctactggctaatgtaagagtgcagacagggaaagtgtaccttcccatctgctgcctctgg

SEQ ID NO: 188728 - DNA, 538 bp, Homo sapiens
tcaataaattgctgtatgttatagtacctgcaaatggatagacgaaagcataagaaaacgtcattataaactttgtgatatctgcccgagtttttaccaaaagggtgaaatgataaaaaataaaacattgcaattgtaaaacatstgaaatactataaaagataaataaaagatataaaatgtagtttcctgagtagataagtcagataaaagtagaccatcatgaacaaagccttcataataatcagaatgtgcaaccattttttaatgatatcatgcaattaaacagtttaagaagacccaaatataataaaccccaaagtcaatatacttgtagatattttatatttatatttatataatgtcttcgataactcagcaaagtaaattaataaaacaaggaggctcgctctctctcataaaataaaaggttatttaccaaaaacaaaaaagcataaagtagcaaaaacaaaaaggctgataactgatgaataaccccattacacacacacacacacgcacacacacacaaacacac

SEQ ID NO: 188729 - DNA, 582 bp, Homo sapiens
gattctcctgcctcggcctcacgagtagctgagattacaggtacccaccaccactcctggctaatttttttttttttagtttttttagtagacatgggtgtttcaccctgttggccatgatggtctggaactcctaatcttaggtgatccacccgccttggcctcccaaagtgttgggattacaggctgagccactgcacccagccctaattttcttgaaattggaagattttgcacattaaaatttcagaacccaaaagggtttctttcacacccagtgaaaaggaggaaggattccagtgattctttttcaaattttaaaccctgtatagcaacagcaaaccttctgaacattcatgagatgyatattgggttttccaacagaaagaacatggggtcctaggggtcagaagaaaatatgaagggtcaaatggctccctgaacatccctgggagcatcagagcagtggtggaagaaatgggaattcagatgaagagctatataaactggacagtttcctaataagaattcacatgttttctgagagggcttcacataaattaagaatagcaactggaatag

SEQ ID NO: 188730 - DNA, 573 bp, Homo sapiens
tatatattacatcctgaaagataatgcctcatctgtgcaaggtatcatctgcaagccagtatctaagctgctccttcaaaagtcaattccattatctttcagacctgcaacttcagagtggtgcagaatgtaacagaaccaatagatacatsgttatgtgtacactcctacaacattgttgtttggtctgaggctatgttacaccatatatggtgtgggtagatattccgttcttctgatggtgctagctgaggccttgtggtaggaaaaggaaactcataccacaatatgtgacttttccagtcgagatgaatcactaccttttccaggatagaaaggttccagtgtaatcaacttgccactgagcggctggttggtttccctgagggattttgctgtaccagagactcagtaatgatctcttttgctagcaatttggggaatcagcagctagatggagttggagaacaatacctaaatcagccttggttagtgaggacaaatgccactgagcccatccctcagcaatgatcagtttcttcatgcatccatcaggccagcattgggcaatga

SEQ ID NO: 188731 - DNA, 573 bp, Homo sapiens
tatatattacatcctgaaagataatgcctcatctgtgcaaggtatcatctgcaagccagtatctaagctgctccttcaaaagtcaattccattatctttcagacctgcaacttcagagtggtgcagaatgtaacagaaccaatagatacatggttatgtgtacactcctacaacattgttgtttggtctgaggctatgttacaccatatatggtgtgggtagatattccgttcttctgatggtgctagctgaggccttgtggtaggaaaaggaaactcataccacaatatgtgacttttccagtcgagatgaatcactaccttttccaggatagaaaggttccagtgtaatcaacttgccactgagyggctggttggtttccctgagggattttgctgtaccagagactcagtaatgatctcttttgctagcaatttggggaatcagcagctagatggagttggagaacaatacctaaatcagccttggttagtgaggacaaatgccactgagcccatccctcagcaatgatcagtttcttcatgcatccatcaggccagcattgggcaatga

SEQ ID NO: 188732 - DNA, 580 bp, Homo sapiens
aggtttacagaaatattatggaatatctactcacaccaaaggtggaactgtagagtagcaacagtgctttctcagcttggacccccatagagagccaacccattcatgacccaggtgtaactttttcttcctttgtcagtcagtcaaaagggatgcctaygtggctatagggaaaggcaacagtataacggtgagcttagggaaaggtgacagtataacaggggtgagcttagggaaaggtgacagtataacaggggtgagcttagggaaaggtgatagcataacaatggtaggttatttggaggtccgtgccctctgaaacttaacttctgccttttgtctctgccaattcccaattccagatatatcacttcgatcttacagtggattgctattggtttagctcaaccttatgatttgatggaggttggaaatacctaagttaggatgggcagttctggctgcatggtcagttgagctctcatattttccatctaccaagttccggtggcaaatcacgtagcagagctcttttttgcttgaagtctcaaatgaagttggtaatcttttgtgtcacttg

SEQ ID NO: 188733 - DNA, 437 bp, Homo sapiens
gaattccagctccagccataccagagatgggaccatgccaaactactctgagttctctgaacctcagtttcttcacctgtaaaaccctgtaaagtgctgttatgaggaataagtgagatgatttatacaatgcacttaaatacagcatggcacattgtaagcatccagtaaattttatggattattattactggtatataaatggagattgaaaggcgaatgaaagaattatggagaatttgtaagagaaaaaggaaaaagatggcaaagtatcattagtaatatgtcagggaatgagagtggactagagatctggaaaaatgaatgaaaaatgaacaataacaacaaaaagtagagacaagacttcttcctggtctyctgacccatttttatccttttcctgaatgtgtccacctcgatgtctaagaggcacctga

SEQ ID NO: 188734 - DNA, 567 bp, Homo sapiens
ttgctgcttgtattgttattcttgtgggcagagttttgctttattcacatgagtattcacctggcattcagtacttaggccatgctcatggaatgggaaaagaccaaggaataacttaatggaggtcctggcctatgagatagacatttataccagaaatcatggccaamtgtccttcatctattgtgaggacaaaccaagaaaacatgggattagttgaagaatttggttgggataaaacaatgtcctcactgcaagaacagtgtacttgagaagattttgttttggacagtttcagcagtcaccatctccttctggtggtgaaaagaccaggtgcccattctaagctctctgaaaaatcctacacctttacacggcatgccaaacaattccaacattgtcatccagccaactaaaggattggtccaggactgataacacgaatatacctatttatcttttaaatatgcccatgaaatggttgtgtgtgtgtgtgtgtgtgtgtgtgtgtgtgtgtgtgtgtgtctccgggtgggagcttttatgacatcactatttgtcttttac

SEQ ID NO: 188735 - DNA, 565 bp, Homo sapiens
taattttaggaaagctatataatgtcttacagccttagtttcttcttaagayggtaacatttttgaagaaatgatctaaggataataattattaataaatattaagttattggcccaggctataagcactcaataaatgctggttattattctgccacctagtagcagagctgatagacttattgcagaccacttacagtctagacacaatttctcaaaatcgagtccctgatgtacacaatatctgcctcaatcatgcaaagtgaagtaatcctttctgttgcacttgctatatctatttctgttcctcatgcctattgcacaaatccaagcaatatggaaatttcaagaggtgtgactcacacacccaaccccaacccaccccaaccaatggatgcctatttcacactgtggtgagagggttctaagcagaaaagaatatcttaggagccaactgcttcctggaagacttacacttattactgtaaagcctttctttctctgattgcccctatctatagatccctgttctgctaagcacctgtctgctttaggttctgaattc

SEQ ID NO: 188736 - DNA, 604 bp, Homo sapiens
gagaacatgtgataatgtataggcatagggaagtttaaggaaaatttctgtaatggaaattatctggaggagtgacttctattaaaagatgtcctcagtttatgttactctacagaaatcttatcatttcagatcttcccttgttacacaaaatattcacattgacataaaccagaaaggcatgctaaatggcttttctcgaaacagaggatagtctacttcaaagttaattaccatttttaccctagaaggcagaactgctggtaactttttttttttttttttttttgagacagagtctctctctgttgcccaggctggagtgcagtggtgctatctttttttaatgtgaggttttgtttttttaactttcaaaaatactaaaatttrgtctatgccctattacaggtataatacgaaatcctagccctagaccacttttctcactttccagaagtacctggaattgccacacccctgaactcactcttgaatcaattaccatggtcagagggaagttgctctgataataagctgagtcctaggtgctccacatctagaggtcacagctgggcaccctctaaactaagactgggaacaatga

SEQ ID NO: 188737 - DNA, 554 bp, Homo sapiens
tggctctcaaacattagggtccatcgcaggctcctggaggacttgttaaaacagactgttggggctgggcgtggtggctcatgtctgtaatcccagcactttgggaggctgaggcaggcagatcacctgaggtcaggagttagagaccagcctggccaacatggtgaaaccttgtctctactaaagatacaaaaattagctgggyatagtggtgggcacctgtaatcccagctactcgggaggctgaggcaggagaatcgcttgaacctcagaggtggaggctgtggtgagccaagatggcaccactgcactccagcctgggcaacagagtgagattctgtctcaaaaaaatataataataaaaataaaaacagattgttgggtctatccccagagtttctcatgaaggaggttaggaatgaagcataagaatgtgcatttctaacatgtcctcaggagacgctgatgtgctggtctagggaccatacttttaaaccactgtcctagagacaaaaacctctgggacagcattgaatagaatttcacctgttcat

SEQ ID NO: 188738 - DNA, 603 bp, Homo sapiens
agaatagatagcctcttaggatacaaagggacctatatatcatgccttctttccctcagccctcatgtctggaaaatttagggttaaatttgtatgcccaaggctgtagctgttgaaattcaagttgctggcaggattttctgtctctctttttatcctcacaggaaattgcttcagtaattgacttttgggaaaaccgaggccaaagttttctwtgtgtaggaacatttgtgtggtgtttatctcttttaatccctataatagttaatatcctccccacttgactgatgcagaaaccgagcagtgagttgaagagagcctgagttctccctagtccttggtgacagggtctggattcaaacccagctttcctgcttccaagcctctatcccatagatgcctctcagcctcccggaatccaagccaattatttgtttcctggttttaaagtgcccatctgttaatttcttataattcgtaaaaaagtagaagtagattttggataaaataagttgtaggtgggaacttggggggacaggtggcagaaaatgcagaagacctgtgaaaagatcatggcatcaggcagaggaaataggattgcag

SEQ ID NO: 188739 - DNA, 590 bp, Homo sapiens
ttctctgtctgaaaggttacttacctatgtctctccaggattggtcactggttccttacttagttcatttggtgaggccatgatttcccagatggtcctgatgcttttagatctccatcagtgcctgggcattgaagagttaggtatttactgtagtcttcacagtctgaattcatttttaccaattctccttgggaaaagttttcaggtatttgtggggacttggatgttttgatgtaagtatttggtcactgcagccatatctgctttaggtggcacttcaaactctataattctgtggctcttgaagacttgtagaggtactgctttggggtcttgggtaagatccaggagaattctctagattaacaggtagagacccttgttctcttcccttacttcccctaaacaaaagaaatcyctctctctctctctctctctctccgtactgagctgcctagagcttgggtaggggtgacacaagcacccttgtggccaacaccagtggaactgcactgggtcaaacctgaaaccagcacagtactaggtttcatccaagccctgcagtgaccactacctgtctactcatt

SEQ ID NO: 188740 - DNA, 590 bp, Homo sapiens
ggctctttcgttagcaggtgatgaattctgccttgactgggtccttcccttcaaggcagaggagttcacttctggtgtatctagaaatgttgtgtaggagctagggcctggaatgggggcttcaggactcggcttggtgccctattctattgtggttaagctggtatcccagttgcaagacaaaattctatttactctcttctctcctcagtcagagggaaggaaggtgactcttccagagctatgagtttcactgcctgggattgggggagggtcgatgcaagcactccttggttatcccagctggtgtctcactaggtcacgtgcaccgcaagtccactggctctgagcccagcacagcataacracttgcccaggaattgcagtccttgtggcctagattgcctttcaagtttatgtaggaccccagagttatttggcctaccctggtggggattctggaactcaggttctgaccgctgggttggatggtttgcctctagctaggtctgatctatatgctctttctgtggctgccagccaatttctgccccatgttgctttcagctgtcacaggcagcactgagttc

SEQ ID NO: 188741 - DNA, 400 bp, Homo sapiens
ggctaagtactttctactgcaatttgagctatgttttgtgattataccaaatgctctcttaacctttcagtatcctctgttgagtttttgaaaactcatttcttattaatgtgccccctcccctaactgccaacaactttcaagcacccaagagattcaaatatgattttatggagttgggtcagggagcatttcattcatcatcaaaattgcagctgtttcccccaacaacgatgcccctgaaatcttcattttttttttataatcagctttttcaactggaatcttttttttagaggtagacttattcctatatagcttttcagttactcatgtaaatwgactcctccaaaagtcccataacagagtaccagcccattttatagtatatggtaatata

SEQ ID NO: 188742 - DNA, 549 bp, Homo sapiens
ggaaattaaaatttcagtaacaaaaccatagttgttactaggagcagtttcaagcctgcatctgttatgccagcacaggtttgtatcaggtcagtagaattgtcttatctctgttacttgaggcagaaatcaccaggcagtttctttccattcccatgtagacagaggatccccagtggaaagctggcctggttgtgtgggctgtctggactcaactgacccagccagaatgcccttgataatttrtcagaggcagctaatctgggttttttcctagctgtttgctgttctctccttaggagatagaatcacaaatatctcctcttgggagtaggatataccttctagggctgccaggttggaggaaggagatatcacaggaggtggaaaaataaacttcccttcccacccactcttgggagtacacaagtgccttctgaaatagagaaaagagggcaggtccctgaatcagggaagacatccatataaattcttgtttcctcatcaaacacttggcattcattcaatttaaaaactaaattgtattgt

SEQ ID NO: 188743 - DNA, 515 bp, Homo sapiens
gaatggaatggctctcagaaatcatgtaagaggactttaagtatattccatcctgtaatctggagcaatgaagtcagagagctgataggacaaaagtagatccaataagtagctgagaatgtgaatagctctaaygagcctccactgaggcttgaagaggagaggcaaaggataataaatgtgctgtcttcaatactcggtactaattcaaagagtttgtacagtttcctgtatagatagcctttggaagaatatagatgaaatgatgaataacatattatcaaggtactatcattactaagaatgctaccttacatttgcataatgcttaatagctttcaaagtactataatataagtgagcttatggttcatatgattttcacaatccctgtgaaatatatacaacaggtaacattttataagcctgtaggcaaggaaatttgaatgagagttacaaatacttaattatcttatctgccatcgccataatctgtaaacaagtgaactggaacc

SEQ ID NO: 188744 - DNA, 525 bp, Homo sapiens
agatgtgaatggaatggctctcagaaatcatgtaagaggactttaagtatattccatcctgtaatctggagcaatgaagtcagagagctgataggacaaaagtagatccaataagtagctgagaatgtgaatagctctaacgagcctccactgaggcttgaagaggagaggcaaaggataataaatgtgctgtcttcaatactcggtactaattcaaagagtttgtacagtttcctgtatagatagcctttggaagaatatagatgaaatgatgaataacatattatcaaggtactatcattactaagaatgctaccttacatttgcataatgcttaatagctttcaaagtactataatataagtgagcttatggttcatatgattttcacaatccctgtgaaatatatacaacaggtaacattttataagcctgtaggcaaggaaatttgaatgagagttacaaatacttaattatcttatctgccatygccataatctgtaaacaagtgaactggaacccaga

SEQ ID NO: 188745 - DNA, 545 bp, Homo sapiens
atcaatgtgatctgtgatttcccatgaagagattggaaaggttaacaaaagggataaatagctaagcctgagaaatgagtgacatcaaattgcagtcaaggaggagggcatgagtggagaagtmgttaccttttaccttggttctctgaaccatttggaaacacattcttacatgggatggcattctgatccttcataaacccagaactctttctggaagctgaaatattagtattgaataagctttattttaagacagaaaaccttggagtattgatagggcttctgaacacgcttctgaactgggattgtgacaatttctaaccacggccagaggcaatgtaggctactggaagaacatggtggccgatacttatcctagctatgctatttactgcaggtcatttaatgttgttaatgcttgagttcacttggctatgtaaaaacgacaaaatgactctaattaggtaaaagtattttgctagcatcagttgttacaaatatcattcctactagaaagatgctccttcggagcattcctcttt

SEQ ID NO: 188746 - DNA, 373 bp, Homo sapiens
cccctagtgatttgaacaaacatgaatctaggtactacagaaaagaggctttggaaataaaattaaggttaataattacctgaccttaaaaaaaggaagattatcctggattattctgctagatccagtgcaatcacataggacttaaaagcagaagagaaaggttgtagagtctgtcagagagatgtggaagaatagamaaacagagaagatatgaggtagagggggacgtcatggagattcaaaatttgaaaaggattccactcactgttgctggctttgaagataggggaaaggggtcaaggactaaggaatgcaggtgacttctggaagctgcaaatgacccctgagcaagagacagcaaggatatggg

SEQ ID NO: 188747 - DNA, 373 bp, Homo sapiens
cccctagtgatttgaacaaacatgaatctaggtactacagaaaagaggctttggaaataaaattaaggttaataattacctgaccttaaaaaaaggaagattatcctggattattctgctagatccagtgcaatcacataggacttaaaagcagaagagaaaggttgtagagtctgtcagagagatgtggaagaatagacaaacagagaagatatgaggtagagggggaygtcatggagattcaaaatttgaaaaggattccactcactgttgctggctttgaagataggggaaaggggtcaaggactaaggaatgcaggtgacttctggaagctgcaaatgacccctgagcaagagacagcaaggatatggg

SEQ ID NO: 188748 - DNA, 590 bp, Homo sapiens
tattaaatgtcagcagtgtaaacattccaatcaaatgcggaaattgtcagaagaaatgagaagacctaaatacatattgtctacagataatgcacattaacaataaaaatacagatgaattgacagaaaaatataaggaaatacataccatagaaaacaatagtcataagaaagttggagtgggctgggcacagtggctcacacctataataccagcactttgggaggccaaggtgggaggattgcttgagcccaggagttcgagaccagcctaggcaacatgatgagacctcaactctatagcaaaaaatgtttttggaaagttggagtgcatatataaatattaaataaagctggcttcaggatgagaaatatcaacagagttcaattaaaaaaacttggtacagggataaaaaataaattcataaaaagagataataatctaaaacgtttatgtgcytaattatagagcttcaaatggataaaatagatcaaacctgtgaaatctaagaggaaacataaataaatttataattataaattgagatttctacatttctttctcggtaatgattaggggtatactgaaa

SEQ ID NO: 188749 - DNA, 590 bp, Homo sapiens
tattaaatgtcagcagtgtaaacattccaatcaaatgcggaaattgtcagaagaaatgagaagacctaaatacatattgtctacagataatgcacattaacaataaaaatacagatgaattgacagaaaaatataaggaaatacataccatagaaaacaatagtcataagaaagttggagtgggctgggcacagtggctcacacctataataccagcactttgggaggccaaggtgggaggattgcttgagcccaggagttcgagaccagcctaggcaacatgatgagacctcaactctatagcaaaaaatgtttttggaaagttggagtgcatatataaatattaaataaagctggcttcaggatgagaaatatcaacagagttcaattaaaaaaacttggtacagggataaaaaataaattcataaaaagagataataatctaaaacgtttatgtgcctaaktatagagcttcaaatggataaaatagatcaaacctgtgaaatctaagaggaaacataaataaatttataattataaattgagatttctacatttctttctcggtaatgattaggggtatactgaaa

SEQ ID NO: 188750 - DNA, 583 bp, Homo sapiens
atacacaacccaaatactcatcaataggtgaataattaaacaaattgtgttttatcaatataatgcaattctactcaataacaaaaataagaaactattgatatgtacaaataggtgaatctcaaaagaataatgctgagctgaaagtagctagaccataaaagaatacatactatataattctaattatataaagttctagacaaygcaaactaatacatagtgacagaaagtagttcagtggttggaagaaaattgtgagagagacttgaggataggtaaagcaaggtattactaagagacatgagaaaacttttgagggtatgtgtatgttcatcatcttgattgtgatgatgcttcactaatatgtatatgtgtgcatgtgtgtgtaaatatacacacatatacatacatagatcaaaattatatacttttaaatttttttagtatatatattgttacacttcaatacatttttaaaaactactgaggactggactgtaaattaaaattaaagtccaactgaaatcatgaactgtaaatgcaaaaattctttaaaaaaacctagcaaatgcaaatactt

SEQ ID NO: 188751 - DNA, 583 bp, Homo sapiens
agaattctgagtccacactgtgggaggctgtggcaggaatattgcttgaggacaggaatttaagtctattttgcttttgttgcctgtgcttttgagatcataccccaaaaatcattgctgagaccaatgtcactgagcttttcccctgtgttttcttctagtagtatcatagcttcaagccttacattttcttaatccattttgagtttatttttgtatatggtgtgagataaggttctaattccatttttttttctctgtgtgaatatccagttctctcagcgccatttattgaagagactgtcctttccttagtgtgtgttttttggcacatttgtcaaaaatcagttggmtgcaaatatgtaaattatttctgggctctctattctgttccaatgatctgcatgtctctttttatggcagtgccatgctgttttggttactgtagttctgaagtcaggtagtatcataatgcatccagctttgttcattttgctcaagattgcttttgctgtctgtgctcttctgtggtttcatacatattttaggattgttttttctacttttgtaaagaatgtcattg

SEQ ID NO: 188752 - DNA, 598 bp, Homo sapiens
agataaatgcttgaggtgatggatatcccacttaccatgctgtgattattacacattgtatgcccrtatcaaaatattcctttgtatttttccattcttacattgctaatagacataccagactggataatttataaagagagaggtttaactgactcacaattcagcatggctgaggcctcaggaaacttacaatcttggcagaaggagaagcaaacacatccttcttcacatggaagcaggaaggagaaaatgcaagaaaaggggaaaatccccttataaaaccatcagatctcatgagaactcactcactatcacaagaacagcatgagggtaaccttctccatgattaaattacctcccactgagtctctgtcatgacatgtggggattatgggaactacaattcaaggtgagatttgggtggggagacagagccaaaccacattattccacccctggcccctcccaaatctcatgtcctcacatttgaaaacacaatcatgcccttccaacagttccctcaaatctttaactcattccagcattaatctaaagtccaactccaaagtctcatctgagacaaggcaagtccctt

SEQ ID NO: 188753 - DNA, 596 bp, Homo sapiens
aaaacatggggcatattttaaattttattgacataactatcacttttatatatttgttttctttttatgtgtagactaaaatgtcttaattctactttttccagcttcrttgaaatataattgacaaataaatttgtatacatttaaagtatacaaagaataattttatatatatacacattgtaaaacaaataccatagtcaagctaattaacatatctattacctcacacagttaccttttttgtgtgtggttagaacaattaagatctatggtcttagtgaatttcaagaatataaaatagcaatattaactatagccaccccatgctctacttagattcctaggtcatacttataactgaaagtttgtatccttttaccaacatcttctcatttctcccatctactagcccctagcaaccaccattctactctctgcttctgtgagtttgactttgtaagatttgatgtgtaagtgaaatcaggcagtattcgtctttctgtgtctaacttatttcacttagtatagtatcctctaggctcatccatattattgcaaatagcaggatatcttttttgtaatatggctgaata

SEQ ID NO: 188754 - DNA, 562 bp, Homo sapiens
acatttttacgcttctacattaacaaaattaccttagaaatacaagagatattaaaaagtaagaattgcatttattttcatatttcttgaaatatctttatttttatctacaataacaaaacaaggaaagatttttggtgcctgctaagtctttgtaaattaaatctctcctcctgtggaagcctagttcctacctcagaaattctaaagcaggtacacatatgctttttcctatatgcaaaacaaacagggcagatgatgcaagaaacttgtgtttaagctcttgaaatgcttcctacttccacatgctttattgtggtttagaaagcccagcatcatttggccactgttttctgttctgaccstcagccgttttgaactccatactccagagtaacagacttttgctttttcaagcctattgtgctttgtctcctggataggcctttgcacatgtgattttctctatctggaacactctccccaaccttttgaaacaccaatacttagtatttcacagggggcagttctatgcaaacctattccaaaatctgaggaagct

SEQ ID NO: 188755 - DNA, 496 bp, Homo sapiens
ataaagtaggcagtttaaaaagggtataaagatatgctgtgggaatttagagaatgaattctaacgtgaagatgggttttatccagagagactcacagagtaaatcctgaaggatgagtaraatttgatggatggtaaagagaggaagcacaatctacaatgagaaaaacgtttggagcattttgtttttccgataaagtgtattccataggaactttgctaaatgaaagattttgtatataaatatgtttagagagtgctaagctaagagtgtccttactgtatttattataagattttacacagtgtttcttattctgatatataacatgaatttttgagaccagcatagtgaaatcatcattttcataatttatttgattttgaaaccattattttcaaaagtaactcttgggactagtgttctctaagacatacttggggaaatgctgagctagatgaaagactcagagacatgaccatgtttgggatgttt

SEQ ID NO: 188756 - DNA, 514 bp, Homo sapiens
tgggaggtgattggataatggggacagtttcccccatgctcttctcatgatagtgagtgagttctcacaaaatctgatggttttataagtgtttgacaggttcctcctttgcttgcttctctctctcctgctgccatgtgaagaaggtccttgctttcccttcgccttcctccatgattgttaactttcctgaggcatcaccagccatgtggaactgtgagtcaattaagccacttttgttcataaattacccaatctcagggaagttctttatagcagtgtgaaaacagactaatacacatggtaaagcctcagaatgtcatggggaaatgtatttcactcatattcagggatgctgtacaataatacaatctatcacagagaatttttcacaaagagcatccctccctccatgttttggcccactaaaatattgttagtcaacattcacctggacttttgaatgttaaagtggtygagattcacaggcaggcctggatcctgtgggcaaaag

SEQ ID NO: 188757 - DNA, 604 bp, Homo sapiens
taaacaaacaaaagtccagtaatatatgccatgttatagcttaaaggactagtccataaaatgagcatgtaagacacttgctgagggttccacagtttgaatttctgcagtgagtggggataaacctagagatactgarctttgtgataaatgtgattatctttcaatatacttattatactcatttatacatgtatttataaattataatatattcaaatcatatttattatgactccttatatattacatcattatgtatattaagatctactttttgctgtctgttcttaaccaccaatttatgtttattcttataccttcactacatttgagattattttgccttgaaaatatgaattatcaatttcataagtctagtttcttgtactcctcaaaattacctttgacattcttacctatctgttctttcagatgctataggtttctgttcttataaacctcagatcctttgcagaggtaagatagggaataaatgaaacgttaatgaaagaattcacatgcatacctgcatacatctatgaacaaaaaaccaagcaggcatattcttccttaaagatttagttgttttcctacatctatc

SEQ ID NO: 188758 - DNA, 321 bp, Homo sapiens
gaggaatcctaccctcagagagacccatcaggagacatgcctgtctgtgtccccagagtgaaacctgcagaayttggtccaacaacagattttaaacaggtcctgttacctggttctagctactctgtgccatggccccagtgtagtcctgtcttcctggaacccattagaagccacatccatctgtgtcccagtaggcagacacaccaactgcagtcaggctgtaggtcttcaactggccctgtaacctggatacaggtgttttcagctgtggttcaggaacatttctgcctacacagggacccagaaggaagcatgcac

SEQ ID NO: 188759 - DNA, 557 bp, Homo sapiens
tctggttttgtactataggtcatcattttttctgggtgttttcaagactttttctgctttctttagttatcaaaattcagctgtgatttaccttggcatatatgtttttaggtttttcctgtttggggtttgcttagcattttgaaactataggtttatttctcttgccaaatttggggtgttttcagtcttattttttcatacttttacagccccactgtttctctctccaattgggggacttcaatgacatgaatgtcaggtcttttgttatagccccacaggtccttgagactctgttcattcctttttcccagtctattttctctttgttgttctgattgagtaatttctattaatttgtctcccagctcactgattgtttcctatgcccttgctccgyggcaactctactgttgagtccatccactgattttttatttccattattatacttttcatatctaaaatttctatttggcttttctttatatcttctgtatatttattgtgactgtatttctttgcttggcctttctaatttttcttttgtttga

SEQ ID NO: 188760 - DNA, 613 bp, Homo sapiens
gattatataataataaagcagtaaattcagcaagaagatataacaattttaaacatatatgcactcaacactggagctcccaggtacctagagcaaatattaatagagctaaagagagagagaccccaatgcaataatagctggaggcttcaacaycctcacttttaccttcgtacagaccatctagacagaaaattagcaaactaacattggacttaatctgaccaaatggacataatagatgtttacagaacattttatccaagagctgcagaacagactttcttttgctcagcctgtagatcactctcaaaggtaaaccatatgttaagtcacaaaacaagtcttaaaacattcaaaatattgaaattatatcaagtattttctctgattacaatggaataaaattagaaatcaataagagtaatttgggcacctatacaaacacatggaaattaaacaatatgctacagaatgaccaaagggtaaactaagcagttaagaaggaaattgaaaaatttcttgaaagaaataataatggagatacaatatacaaaaactggtggatacaatgaaagtagtagtaagagagaagtttatagagataaatgcc

SEQ ID NO: 188761 - DNA, 613 bp, Homo sapiens
gattatataataataaagcagtaaattcagcaagaagatataacaattttaaacatatatgcactcaacactggagctcccaggtacctagagcaaatattaatagagctaaagagagagagaccccaatgcaataatagctggaggcttcaacaccctcacttttaccttcgtacagaccatctagacagaaaattagcaaastaacattggacttaatctgaccaaatggacataatagatgtttacagaacattttatccaagagctgcagaacagactttcttttgctcagcctgtagatcactctcaaaggtaaaccatatgttaagtcacaaaacaagtcttaaaacattcaaaatattgaaattatatcaagtattttctctgattacaatggaataaaattagaaatcaataagagtaatttgggcacctatacaaacacatggaaattaaacaatatgctacagaatgaccaaagggtaaactaagcagttaagaaggaaattgaaaaatttcttgaaagaaataataatggagatacaatatacaaaaactggtggatacaatgaaagtagtagtaagagagaagtttatagagataaatgcc

SEQ ID NO: 188762 - DNA, 607 bp, Homo sapiens
atccagagccatgactgtgtggattcaaacatatcttagaacttaatccagtgttgtgtttgtgtgtcggtatgggtgtgtacaacaatttggttaagtagagcagctgctggaagcaagaagtcatttatcctcactccagtaataatggctaatatttattgagtacctacaatggcaaagtagtattctcagcagtacttatcttattcattcctcacagaagctctgtgaggtagctgttgctactattttaaatcccawtgcacagggctgggcacagtggctcatatctgcaatcccagccctttgggagatcgaggtgatcagatcgcttgagccctggagttcaagaacagcctgggcaacatgataagaccttgtctctaccaaaaatacaacaattagcggggagtggtggcagatgcctgtaatcctagatacttggaagactgagatgggaggatcacctgagccccgggaagttgagggtgcagtgagccatgatcgtgccgctgcactccagactgggcaacagagtgagaccctgtctcaaaaaaaaaaaaaaattccattgcatggatgaataatttgagacacacagagg

SEQ ID NO: 188763 - DNA, 607 bp, Homo sapiens
atccagagccatgactgtgtggattcaaacatatcttagaacttaatccagtgttgtgtttgtgtgtcggtatgggtgtgtacaacaatttggttaagtagagcagctgctggaagcaagaagtcatttatcctcactccagtaataatggctaatatttattgagtacctacaatggcaaagtagtattctcagcagtacttatcttattcattcctcacagaagctctgtgaggtagctgttgctactattttaaatcccattgcacagggctgggcacagtggctcatatctgcaatcccagccctttgggagatcgaggtgatcagatcgcttgagccctggagttcaagaacagcctgggcaacatgataagaccttgtctctaccaaaaatacaacaattagcggggagtggtggcagatgcctgtaatcctagatacttggaagactgagatgggaggatcacctgagccccgggargttgagggtgcagtgagccatgatcgtgccgctgcactccagactgggcaacagagtgagaccctgtctcaaaaaaaaaaaaaaattccattgcatggatgaataatttgagacacacagagg

SEQ ID NO: 188764 - DNA, 607 bp, Homo sapiens
atccagagccatgactgtgtggattcaaacatatcttagaacttaatccagtgttgtgtttgtgtgtcggtatgggtgtgtacaacaatttggttaagtagagcagctgctggaagcaagaagtcatttatcctcactccagtaataatggctaatatttattgagtacctacaatggcaaagtagtattctcagcagtacttatcttattcattcctcacagaagctctgtgaggtagctgttgctactattttaaatcccattgcacagggctgggcacagtggctcatatctgcaatcccagccctttgggagatcgaggtgatcagatcgcttgagccctggagttcaagaacagcctgggcaacatgataagaccttgtctctaccaaaaatacaacaattagcggggagtggtggcagatgcctgtaatcctagatacttggaagactgagatgggaggatcacctgagccccgggaagttgagggtgcagtgagccaygatcgtgccgctgcactccagactgggcaacagagtgagaccctgtctcaaaaaaaaaaaaaaattccattgcatggatgaataatttgagacacacagagg

SEQ ID NO: 188765 - DNA, 607 bp, Homo sapiens
atccagagccatgactgtgtggattcaaacatatcttagaacttaatccagtgttgtgtttgtgtgtcggtatgggtgtgtacaacaatttggttaagtagagcagctgctggaagcaagaagtcatttatcctcactccagtaataatggctaatatttattgagtacctacaatggcaaagtagtattctcagcagtacttatcttattcattcctcacagaagctctgtgaggtagctgttgctactattttaaatcccattgcacagggctgggcacagtggctcatatctgcaatcccagccctttgggagatcgaggtgatcagatcgcttgagccctggagttcaagaacagcctgggcaacatgataagaccttgtctctaccaaaaatacaacaattagcggggagtggtggcagatgcctgtaatcctagatacttggaagactgagatgggaggatcacctgagccccgggaagttgagggtgcagtgagccatgatcgtgccgctgcactccagmctgggcaacagagtgagaccctgtctcaaaaaaaaaaaaaaattccattgcatggatgaataatttgagacacacagagg

SEQ ID NO: 188766 - DNA, 619 bp, Homo sapiens
gagaactggcttgcaacaataaggagggggagtcacaacaaaagtgggcactgcctctttgtctgcacctctgtgatcagaaacagaagtcagtaatcacagcaaagatctctgacatttggaaagcagggttatttttcatcaaccctggccctgcaatctgtgtgtgagctgctggggacaagggatgggtagctcttactgtgctatgaggtgaaatggtcatwaattaactgaaatgtaccatctaagccttcccttggaagttgcaagccttcaacagactccagagtttcaaaatatttacatcagactgattctgccagtgcaatttttgtgtaggtagggagacagacttctagtgctccctactctcgtcagaagccttcttgtcagaagccttccatccatgctttattaaccacaggataaaataatatagtagatgggattgtattgtgaaaaaattaagagaattggaggaaggcaaattattatgtataaaaaagtaacttaaaaatcattattttctccaaagtacctggtgactttatagtgaggtataatttacacagagtgaatgcatagatcttaagaacacaatcaattttaacaaata

SEQ ID NO: 188767 - DNA, 585 bp, Homo sapiens
tagttagtgtatacaaaaataatgtgacacatattattcaagtgtatgctgttaccactatactatatggtattttccactatatgctattttctccccaattctaaccctcatttcccagaaagaaaaaaatacttaaagggaaaattgtttgcataaatttctgaataatcaaaatattcagaattcacttggcttatggagatagtaagatacatgcacttatatttatttttatttctttcttcaacttttaagttccagggtacatgaacaggatgtgcaggtttgttacataggtaaacgtgtgccatggtggtttgctgcacagatcaacctattacccaggcattaagctcagcatccattagctattcttcctgatgctgtccctccccctgccttccccacaggccccactgtgtgttgttttcctccatgtgtccatgacacagacacatacttataaatacacgtrtgtttatatcaatttataaaatcaagaattaattttagaaatagtaactggcttagactatgctccattttctttccccaaattaatgcaaaatctacattagaatg

SEQ ID NO: 188768 - DNA, 671 bp, Homo sapiens
ctttcaatgtttgaagaaatgaaactattcagaagtttacataaggaagcaatttgcttggattgaataaggtaatacataagtatgtaaaaccctttctctgtaaatgctgcttttaattaggaatggagctctgaaagaaatcctagttattatatccacaaactgaactcaggcaactattttaattggaacagaaaacaccaaaatgcagaagatttatcaaggaaatttgaaaattagaaaaaaaagaacacctagttcayagtaaacaacattttgtgttctttttctttaccccagtaaagagattggaataatccccttgtcagaggagatggatggcatacattcaggattctgcagggcattaaatagttgtcgccatgtcaggcaactctcttcggttattaataccgaataaaatcaacattcttctccttctttcttgagttaaacatttcccctccattccattcctgctgtctgtcctttcagttcttagcatttgtcgtagttcttcctctagcaaggcttttctcttctctttggcaacgtccctcacattttacacagcagccaaagaaaccttgacttcttttcatctttttccttcctttggctattcttttgagggaaaagacatgtttctgtccttctctttagattgc

SEQ ID NO: 188769 - DNA, 671 bp, Homo sapiens
tcatgacctggcagaacaaagtacatgggattatacattaataacataataaccactacttccactgctgccaatggcaaatttacatgatctaagacttgctaactgaatactgtgtgtcattactctgttcgtttccctataaactgattattatttggcattatctgctcatttcatagatataggttatttagagatgaggaaactgaggattggcaatttagaaatttattctttagtaagttgggaggtcaattattggaatccaggagggctgactctaaatccttgggacttggctgctatgggactcaggcagagaaccaattagttacacatgagaggattaggaagatttcatagaaaggatttttttctatttattttataatatatattaagtacctattatgagctgggtrctgtgcaagatgctaaaaggacacataaaaataagacacaatgtctccccttaaagtgttcactcactagtagggaagatggcctcatttaaaaaaatgactgacagggagataagggcaataatagagacatatggaatgagggcaacagggagccaggcacctgcttgagtgggtgaggaatggcttcacaaggaaaagacaagtcctactgagacttgaaaaataagatagaattgacagatg

SEQ ID NO: 188770 - DNA, 671 bp, Homo sapiens
tcatgacctggcagaacaaagtacatgggattatacattaataacataataaccactacttccactgctgccaatggcaaatttacatgatctaagacttgctaactgaatactgtgtgtcattactctgttcgtttccctataaactgattattatttggcattatctgctcatttcatagatataggttatttagagatgaggaaactgaggattggcaatttagaaatttattctttagtaagttgggaggtcaattattggaatccaggagggctgactctaaatccttgggacttggctgctatgggactcaggcagagaaccaattagttacacatgagaggattaggaagatttcatagaaaggatttttttctatttattttataatatatattaagtacctattatgagctgggtactgtgcaagatgctaaaaggacacataaaaataagacacaatgtctccccttaaagtgttcactcaytagtagggaagatggcctcatttaaaaaaatgactgacagggagataagggcaataatagagacatatggaatgagggcaacagggagccaggcacctgcttgagtgggtgaggaatggcttcacaaggaaaagacaagtcctactgagacttgaaaaataagatagaattgacagatg

SEQ ID NO: 188771 - DNA, 648 bp, Homo sapiens
aagcttcctgaacacagagactgccttattaattgctatttcactatgaaaagtaaaaatagcctaacattgagtatgcactccaattcttaaatgtctataaatgaataaacaaattcagtgaatgactaaataaatgaataaatattcagtcttagctctacccatggtgtcctcaggctacagcagagctgactatacaagacaacttggcctgcactccagaacccctttctcaatctatcccatcagaatgacagtgatgattttcaaggttgagatatacattgccacagcctcccctattttgccgaaggctaaactattgccatctatttttatcaaaccatgcctgtgtcctctttgttttataaatctacagttctctatttckaattaaaactaaagattacaagaccaagacactaagatggccacagcttggagaagagaaggatgaaagcaataggttagagatatgcaccaagacacagagagtaacagagtgaggaagcaaggaagagggaaggccaacacataatgggtgaaaaacgtgacctgagagcaatgccttctgtaatatcactctttaggagacaggagaatgaagaagaactagagaaggaatatttagagatgtggaggaag

SEQ ID NO: 188772 - DNA, 564 bp, Homo sapiens
cagtacttttgctacaataaatgaaccagtattcacatatcatgattagataaagtccacagtttattcagatttctttactttttaactaatgtcctttttcagtcccaggatcctgcccaggataccatattatactatattcagctgcaatgtctccttaggctccttttggttgtgacagtttttcacgttttctttgtttttgagaatcttgacagttttgaggagtaatggtcaagcattttgtagaatgccactctactggaatgtatacaatgtttttttcatggttagattggtgtcaggggattttgtaaggaaaaccataaaagtaaggtgccattttcatgacatcacaggaaagacatactatcaaataatttaacatcagtgatgctgagaagacttattttgtaccatacaccattttgtgctgtttgaatttttaaagccatatatacatattactcactcaaatcctgttttataagttttagtctttcataagtgaagrgacaataatccattctcagcagagcctgcactttgagtgactacttt

SEQ ID NO: 188773 - DNA, 552 bp, Homo sapiens
tgtttaatggtacaaaggaaagggctgctaaggaagtcattcttatgactagctgaaaaatatttttcttagtgactgttctagagaaaaacaggtcaccgttggaagaaaaaagcagtctcacgttacaagcattttgaaagtggtttgatcattaaaatgtatttatcttacgacaaaacttaaaacggatactgcttactatatttgcaatgtcttgaaactcaacaagaaattatgtagcatcattacaagttttaattcatggtagaattttggagattatatttattgagctatgttttttatttcattagtacaaataaaactgcattttatttgttctaatgataaaatgttttaagtttataaaaktactgcaaatgtattccactgtgtggttctaaactgcatttgaattaaaataggacttgattgatggagaatcatttgtttgtgggtttacagattctcttctaggtagtttgaaaagattcattgtccagcagcaactgttcacccagagacatagtgcttagcatgagcttgatg

SEQ ID NO: 188774 - DNA, 530 bp, Homo sapiens
cctaaaaataataaacaggaagaataatgtgttacctactgagtttatccatttacttgttcacttattcactcactcattgatttccactagcacatactcatttattcagtaaatacacattggcttatccacctgtttgagcaaataaaaattttttgttgatatagcaacttctatattctctagtatctgttaaaaatacatttttctccataagggacagatgcttgttttctgttgcctatctctcctcccattacattccttttctcttttggaaggtatctaactctttcaagcaatagaactatcattctcaaaactgtagactaaatggtaaatatcatcttaatttttaaaatctatgactcatcctggaggaaaagtctgtattcttttcacccacctgttattctaaatagattaaaatttatactaccaattatccttataaaaacaataattacaytttcaattttactgttcatgagaacaacatacagttgtgggattcatgagcagaattc

SEQ ID NO: 188775 - DNA, 537 bp, Homo sapiens
taagaggtcaagaaagataagaactaaatgttaaatggatattattggtgcttttagaagagctgatttggtggaatgatgagactagaagtcaggtaagagcacataaaggagagagtgatagataaggaaatggaatctgagaatagtcaatccttctgagaaagttggctgattagagaaatatggtagtagctagaggagaatataagatcaaggaagttatattttgtaagtgggagaaacargaacatatttaaatactgaaggaaacaatccaataaacaggtatgattaaatttctatgacagaaaagagaaataatgtaaaatattgaaaaaaaactgggagaaagtagaaacaaaagggcaagaggcagaattggccttaagtaggaagggagacagcttctctactgcaaaagagggacgaggagcaggtgaatacagaggtaaatgggattttccatttggtagtgggaaatgaaaaagttcctgcctgagggctcctggtttttctatgatgtaagtgatgctg

SEQ ID NO: 188776 - DNA, 517 bp, Homo sapiens
aacttgctgatcatgagctgccggactgtttcctccatttctaaaagaagacagtcactggctcaggttgttcaatggctcccattgttataaatgaacaccaggaacaataacattctaaggaactgcttttgcaagatgatgaaagattttatgccatcagtgatttttcttctgtgattttttctgctgctttcctcatttaaaaatgcccattcggtattgtcttttcaccttctgaatcctgtgtaaaactgactcaaygttcccaactggattatggactgatctgcccctcctcagactgttaacaggcaccaactagattatgagcttgtcagttttttcaaatatggcactttacagcatctagtattaagaatagagcaggcacttcagagaagtctccatcttactccaggtaaataatgacaatccctttgggaattcaggaggccctgcatggtcagcctgcctaccctgctttctctccccgctgctttctcatgcctctcct

SEQ ID NO: 188777 - DNA, 446 bp, Homo sapiens
cagggatttaatacctggtaagaagtgctataactttcagagtgaagtaccagagaggagacagctgcacgatagagacagagggagagagagaaccagagtcagagagagagaaccagagtcagagagagagagctctgaagatctgcagagggctcccttccactctgcagttaagcactaatcagcactgcataagaaggagtytatctgaggctgggaaaagaaacacctgaaaggaacagacagaataatccacagatctcacacagttgaaatagcttgtgttcccataaacctgataatacatgggacataggatattctgctcagaagagtgttgtcttagtagctggaaaaaaattagccctagactaaaggctgctctgatctcacctaacaaagattaaaggcaagcctcaaaaaaaaaaaaaaaatctttttcc

SEQ ID NO: 188778 - DNA, 446 bp, Homo sapiens
cagggatttaatacctggtaagaagtgctataactttcagagtgaagtaccagagaggagacagctgcacgatagagacagagggagagagagaaccagagtcagagagagagaaccagagtcagagagagagagctctgaagatctgcagagggctcccttccactctgcagttaagcactaatcagcactgcataagaaggagtctatctgaggctgggaaaagaaacacctgaaaggaacagacagaataatccacagatctcacacagttgaaatagcttgtgttcccataaacctgataatacatgggacataggatattytgctcagaagagtgttgtcttagtagctggaaaaaaattagccctagactaaaggctgctctgatctcacctaacaaagattaaaggcaagcctcaaaaaaaaaaaaaaaatctttttcc

SEQ ID NO: 188779 - DNA, 446 bp, Homo sapiens
cagggatttaatacctggtaagaagtgctataactttcagagtgaagtaccagagaggagacagctgcacgatagagacagagggagagagagaaccagagtcagagagagagaaccagagtcagagagagagagctctgaagatctgcagagggctcccttccactctgcagttaagcactaatcagcactgcataagaaggagtctatctgaggctgggaaaagaaacacctgaaaggaacagacagaataatccacagatctcacacagttgaaatagcttgtgttcccataaacctgataatacatgggacataggatattctgctcagaagagtgttgtyttagtagctggaaaaaaattagccctagactaaaggctgctctgatctcacctaacaaagattaaaggcaagcctcaaaaaaaaaaaaaaaatctttttcc

SEQ ID NO: 188780 - DNA, 571 bp, Homo sapiens
cttcccctaactcgggttcctgggactggcctagggtatagtactctagattcctgaggtagttggccagatcagcccttgggtcccagccacagggccacaatactatacccaaaccacagattctccttaagtctttcatcagaaccacactgatgtacacatcctccaaatggcatccggcctaatgagaaacaggcccttggtgcctttcaaatgccacagagatccaagtgaacaggaaggaccactggaagttactaaaatcaacaggttgactggctcccatgtgagaaaagggataaaactgctcttgccyaactgagcacagcttctgccatcatcctcttctcaaagccatggggcccatttgctccaaggcaatggctcttattatgggggtagtacagacatttcagccatttttgtgatgtatcaacgaacagcaagaaggtaaacagcatttccataggtagaaccacagaaacattccaattcccaccctattgatttatttaattgctcagatagaggctcttataccaataaagacttcttattttcttgaaac

SEQ ID NO: 188781 - DNA, 556 bp, Homo sapiens
tagaggaaaacataagtttaaaatgtttgtaaaggaactcacctgaatctacacctctttacatgcgtcttgaggcagaaatggtgcttctctgtttcatatttcacttaaagaaactgaaacacctgtcctgcccagaaggctggaggaggaggatgggaggagtctcagagagagccagggggccagagggggacagctagtgagagaggaggaaggaagaagccagtcaggcaggcagttagggtggatccttggtggaactccttcaraccaagaacagcctgaaaatcaagctgcaagccctggataaagaaaagagcctgcatgtttgaatagaaacgcctactccatgaatccagatgaacaaattccactccttttttgaacatatatccctctccttggcacgcctttgtctcatttcacatgcttcctcccgattggtccttaccttttacctgtttaacatatacctatctttctgtgattagctgctcgccaaattttcatttgcataaagtgtaacgtcacttcagcccctgattggtcctgg

SEQ ID NO: 188782 - DNA, 582 bp, Homo sapiens
caattagaggaaaacataagtttaaaatgtttgtaaaggaactcacctgaatctacacctctttacatgcgtcttgaggcagaaatggtgcttctctgtttcatatttcacttaaagaaactgaaacacctgtcctgcccagaaggctggaggaggaggatgggaggagtctcagagagagccagggggccagagggggacagctagtgagagaggaggaaggaagaagccagtcaggcaggcagttagggtggatccttggtggaactccttcaaaccaagaacagcctgaaaatcaagctgcaagccctggataaagaaaagagcctgcatgtttgaatagaaacrcctactccatgaatccagatgaacaaattccactccttttttgaacatatatccctctccttggcacgcctttgtctcatttcacatgcttcctcccgattggtccttaccttttacctgtttaacatatacctatctttctgtgattagctgctcgccaaattttcatttgcataaagtgtaacgtcacttcagcccctgattggtcctgggccaaggtctcagtccaagctt

SEQ ID NO: 188783 - DNA, 582 bp, Homo sapiens
caattagaggaaaacataagtttaaaatgtttgtaaaggaactcacctgaatctacacctctttacatgcgtcttgaggcagaaatggtgcttctctgtttcatatttcacttaaagaaactgaaacacctgtcctgcccagaaggctggaggaggaggatgggaggagtctcagagagagccagggggccagagggggacagctagtgagagaggaggaaggaagaagccagtcaggcaggcagttagggtggatccttggtggaactccttcaaaccaagaacagcctgaaaatcaagctgcaagccctggataaagaaaagagcctgcatgtttgaatagaaacgcctactccrtgaatccagatgaacaaattccactccttttttgaacatatatccctctccttggcacgcctttgtctcatttcacatgcttcctcccgattggtccttaccttttacctgtttaacatatacctatctttctgtgattagctgctcgccaaattttcatttgcataaagtgtaacgtcacttcagcccctgattggtcctgggccaaggtctcagtccaagctt

SEQ ID NO: 188784 - DNA, 609 bp, Homo sapiens
actgtttgaggcttaaattcaccactcaaaagcttgttgtgatggaaatgggatatgttggtcagagactctgccatgaggctgcaaagcagggctctgtcagctgggagcatataatggccaaggcggatggaataaaagggacagccacagaagacacttgggcaagtttgcaaattaggattcatattcctgataggtcagcccagaaactcaagaaagtaggcaggaattcaaaacctcctgacctaccacaagcacctgctctctcaggctctggctctgggtagggtaagctggaaccaataccctccccaccccttcaaaggtcagaaatatttacagtgtgtatatgtgatgggggaagggggagcagtggtttgccagagggttcctatacctcatactattcaaattttaattccaacactatattgagtcaggaaatattggcattaaatgccagtgattgaggctgtaccacatatttcctgattcaatggggtaaacatcctggtgtatagcaccttttagctcagarctatatttcttcttactgctgactcaaggaaatgataccatatgaagtagttttaaaaaacaaaaagg

SEQ ID NO: 188785 - DNA, 427 bp, Homo sapiens
gaattcaattggaggacacccagttggtatctgctgcagaagtgattgcttgctttgtggtggaaaggaatcctcaggaaatgcagaagtcttctgtgttgattgttgtggtgtgagaacagaggaaaaccggtttgagagtttttcccgaacagtaactataatgtattgagaaaatgggacaccactgggagtgaacagaggtgctgtgaatattcatgctgggataacagggctctcttggctgaaccaggaagtatagtccccttattctgtgggaaatgctattttctattattatcacttaaaatggaaaaagtctaaatctgtattatcaagagcttattttaaaatttcaaaagttttcagttgatgaakggttgaggagaaaagtcaatagtagagttatggagaaaaaattctggaa

SEQ ID NO: 188786 - DNA, 514 bp, Homo sapiens
tccagcctgctcttcccgatggctgccctgcagagtttggatttccctaatcagtccctacaattgtgtaagacaatttcttgcaataaatctctatctagtacctattatcatcttatctgtctgtctatctatctatctatctatctatctatctatctatctatctatctatctatctatctatctacscatccatctatctatctatctgccatctatgtatctatcatctatcgatcatctatcttgctacctatctcctacatcctactggatatcctactggttctgtttctctagtgaaagcctgactcatatggatttaggtaatggaagtggttctaaaagaacaaaatcttaaggatgaattttctgaattgcctctctcgtatgattcaatttaaggccagtaatgactctatttccattggtaaagagggcatggaatgaggtggcaaaatattcctggatattcctgatcaaatgcttattaaaggtaaggttctggtga

SEQ ID NO: 188787 - DNA, 407 bp, Homo sapiens
cttatagttggttgtgcacaatatgcaggcatcacccaagatgttcaggtgtagcaatacatcttctctctgggtcattcctaaaccacagtgatgagaagaaatactcccagtaggcagaacttkgagcattgcacttggttgttcattttgcttggaaggaaaaataggtacttaaactctcaatcacattatttatagacagtctcagggttcagtcccacaaattgcagcctgtgaacatttgaatttgctagttgatttcagaaagaaaatcttagttcccaatttctaatttcagtgacaatgatgttaaaaaaaaaactttcactcttacttctatataacatgcagtatacgtattccatttcccacttttagcaaaaaagaggaaatggtgcctggct

SEQ ID NO: 188788 - DNA, 407 bp, Homo sapiens
cttatagttggttgtgcacaatatgcaggcatcacccaagatgttcaggtgtagcaatacatcttctctctgggtcattcctaaaccacagtgatgagaagaaatactcccagtaggcagaacttggagcattgcacttggttgttcattttgcttggaaggaaaaataggtacttaaactctcaatcacattatttatagacagtctcagggttcagtcccacaaattgcagcctgtgracatttgaatttgctagttgatttcagaaagaaaatcttagttcccaatttctaatttcagtgacaatgatgttaaaaaaaaaactttcactcttacttctatataacatgcagtatacgtattccatttcccacttttagcaaaaaagaggaaatggtgcctggct

SEQ ID NO: 188789 - DNA, 407 bp, Homo sapiens
cttatagttggttgtgcacaatatgcaggcatcacccaagatgttcaggtgtagcaatacatcttctctctgggtcattcctaaaccacagtgatgagaagaaatactcccagtaggcagaacttggagcattgcacttggttgttcattttgcttggaaggaaaaataggtacttaaactctcaatcacattatttatagacagtctcagggttcagtcccacaaattgcagcctgtgaacatttgaatttgctagttgatttcagaaagaaaatcttagttcccaatttctaatttcagtgacaatgatgttaaaaaaaaaactttcactcttacttctatawaacatgcagtatacgtattccatttcccacttttagcaaaaaagaggaaatggtgcctggct

SEQ ID NO: 188790 - DNA, 469 bp, Homo sapiens
aacagctggaggatctatctatctatctatctatctatctatctatctatctatctatcatcttctatctatctatctatcattatctttcratctcctccatatgatctctccccaaagtggctccagggtaaccagacttcttacatgacagctggagccttggagtaagtttcctaaagagacactggtagaagctgcatgatcttttctaatctgacttcagaagtcacacttctactacattctgttcattaatgcagccacaagggcccgcccaagttcaagaggtgaggatactgactctgtctcttaatgtgcagagtgtcaaataatttacaagcacgtttcaaaaaccaccagaagttgcaagaatgaatcagttagtgttgatgaatatcaatataatatagttacaaaatgaattattgcaagatttaaaatttgcaaactctgatagtcacctagt

SEQ ID NO: 188791 - DNA, 469 bp, Homo sapiens
aacagctggaggatctatctatctatctatctatctatctatctatctatctatctatcatcttctatctatctatctatcattatctttcaatctcctccatrtgatctctccccaaagtggctccagggtaaccagacttcttacatgacagctggagccttggagtaagtttcctaaagagacactggtagaagctgcatgatcttttctaatctgacttcagaagtcacacttctactacattctgttcattaatgcagccacaagggcccgcccaagttcaagaggtgaggatactgactctgtctcttaatgtgcagagtgtcaaataatttacaagcacgtttcaaaaaccaccagaagttgcaagaatgaatcagttagtgttgatgaatatcaatataatatagttacaaaatgaattattgcaagatttaaaatttgcaaactctgatagtcacctagt

SEQ ID NO: 188792 - DNA, 469 bp, Homo sapiens
aacagctggaggatctatctatctatctatctatctatctatctatctatctatctatcatcttctatctatctatctatcattatctttcaatctcctccatatgatctctccccaaagtggctccagggtaaccagacttcttacatgacagctggagccttggagtaagtttcctaaagagacactggtagaagctgcatgatcttttctaatctgacttcagaagtcacacttctactacattctgttcattaatgcagccacaagggcccgcccaagttcaagaggtgaggatactgactctgtctcttaatgtgcagagtgtcaaataatttacaagcaygtttcaaaaaccaccagaagttgcaagaatgaatcagttagtgttgatgaatatcaatataatatagttacaaaatgaattattgcaagatttaaaatttgcaaactctgatagtcacctagt

SEQ ID NO: 188793 - DNA, 550 bp, Homo sapiens [sequence omitted]

SEQ ID NO: 188794 - DNA, 635 bp, Homo sapiens
ttcacatcaactagggatttaacctccttgtaaagaggctaagattttatcataatgtaaaacctgacacaattacagttgaatttaaaccagcattgcttttggtctttgwttttcccagaagctctgccagatgctagtgccccaaagaaattagcaatgtaaaaatatatactttctttttaataagtcaggatgctttacttcatttcctcatattttcccagttactgtagccactgcaattgttggacaatggggtctcctcctcagggatattccaacccaccagggagaagttcagagtctccagcactgtccttgctcaattccccatagccgaggtgactgggttctatattcccaaagaagttttgctactgtcccagcttccagagctcagtgacaggaatcatcttctcccacaaacgccatgttacctctgccctctacagacagcacaggttgtgatatccccactagacacaggctaagtccaggttgtattgtagattgtattttattttaaactgcttctaacctatattgtgtaatgtaaatgagtgtaacaagtccagagaggacagtttccctaattggagacacactacagaggtggttacttgacatttttc

SEQ ID NO: 188795 - DNA, 635 bp, Homo sapiens
ttcacatcaactagggatttaacctccttgtaaagaggctaagattttatcataatgtaaaacctgacacaattacagttgaatttaaaccagcattgcttttggtctttgtttttcccagaagctctgccagatgctagtgccccaaagaaattagcaatgtaaaaatatatactttctttttaataagtcaggatgctttacttcatttcctcatattttcccagttactgtagccactgcaattgttggacaatggggtctcctcctcagggatattccaacccaccagggagaagttcagagtctccagcactgtccttgctcaattccccatagccgaggtgactgggttctatattcccaaagaagttttgctactgtcccagcttccagagctcagtgacaggaatcatcttctcccacaaaygccatgttacctctgccctctacagacagcacaggttgtgatatccccactagacacaggctaagtccaggttgtattgtagattgtattttattttaaactgcttctaacctatattgtgtaatgtaaatgagtgtaacaagtccagagaggacagtttccctaattggagacacactacagaggtggttacttgacatttttc

SEQ ID NO: 188796 - DNA, 550 bp, Homo sapiens [sequence omitted]

SEQ ID NO: 188797 - DNA, 578 bp, Homo sapiens
tatgtgctgaaaaaggatgaaaaagccataaagtggagatgtcaatacctctttaagaatgataggctacaaagctgattagctgcatacttgcattctttgtcatcactacctgaaggcaaaaggcctttttttgggagcatgtgctaaagataaaattactcttcctagttccttctggcaaatggtcaccaaaaaacacattcaagagccaatgtcttttgtgtgcaatacataggatattaaaagttmaggtaaacaaaggtcaaagattatgctagttggagtctcagggtttcctggttccttaaaatttagttaagtttgggccaatttttggaagtccaaatctcttctcaaatattctgttatttgtgctcctcttaggtgggaatgggaatttttgttctctaccctggggttgacacaaatgtgggactttcttgatcctccctcctaaagaactacagatcaagagcttgtattagatttttaaggggcatagggaaaggttatgtttgatgtcatagagcaatgactaaggcatgttaataaaattccatttaaaatgtattttt

SEQ ID NO: 188798 - DNA, 317 bp, Homo sapiens
gaattcaagacaaatttaaactggttggaacaaacagctaaaaccaagacgactttaacatagacaaattcaaattcaattgtttaggttaaaaaaaacaacagaaataggaagactactctgaacccatcttaatataaatatgagcaaatttttatacaaarcaaatctctttacaagccaacagagtgatgtagcgattaaaacattctgatatccttttggattgcattaatagtgtgttaatgtcaggtccacaggagccgatgttcctaccctatattgtttttctcagttcacaccagagtgtggtattg

SEQ ID NO: 188799 - DNA, 640 bp, Homo sapiens
acgttagggggtcaaccagcttatctgttgtatttctataggacattgactaccatagytgagtgtattattaaaactttttcaatgcaaatattataaaaggcattctgcagtgagagcagattccctgactttgtattcatcctgtccatgcaggattagtcattgatttcagcaacaaggagcacatacagtatctttacctgctgctgattgcctcactttcgttcaccgcacagaccataggaggcagcgacgtcacatagtgggatatgttaatccaaccaagtctctaaatacacagccaagcttattgagacagagctgtgacgttcctggaacaattttttaatcctgttttgtttatatgagtgaatttgctttcctcgtggataaatcctttgagagcaactctcattggatgccctattggaaaggggccagctttggtatctaaatccttagttctttattagtttgggaaccataaaaaatactttagacaatgaaaacttctctctttttcctctccatctctctccctgcttttctccttcaagtatatgcacaatcatactattcctcaattaaaatggagtttggcgtaaataaataacttctaaaatcatagaatgggaaa

SEQ ID NO: 188800 - DNA, 640 bp, Homo sapiens
acgttagggggtcaaccagcttatctgttgtatttctataggacattgactaccatagctgagtgtattattaaaactttttcaatgcaaatattataaaaggcattctgcagtgagagcagattccctgactttgtattcatcctgtccatgcaggattagtcattgatttcagcaacaaggagcacatacagtatctttacctgctgctgattgcctcactttcgttcaccgcacagaccataggaggcagcgacgtcacatagtgggatatgttaatccaaccaagtctctaaatacacagccaagcttattgagacagagctgtgacgttcctggaacaattttttaatcctgttttgtttatatgagtgaatttgctttcctcgtggataaatcctttgagagcaactctcattggatgccctattggaaaggggccwgctttggtatctaaatccttagttctttattagtttgggaaccataaaaaatactttagacaatgaaaacttctctctttttcctctccatctctctccctgcttttctccttcaagtatatgcacaatcatactattcctcaattaaaatggagtttggcgtaaataaataacttctaaaatcatagaatgggaaa

SEQ ID NO: 188801 - DNA, 616 bp, Homo sapiens
cacacattaacagggtacctacacacatattctctcatgtatgcatcacaacacatggctgaaggagggagagatggtgatgatatatgcctattttaaagaaggctcagaggggccaagtaatttatgcaggtcacacagctcagagtgctagagctggagtttaaacagaagtctgacaaatgatcattgattaccttttttgtgactcagagaaatggtcttagccaaaattaatatgtttgttatgttaatcttcagaaattattagtcacaataaacattgttcacattttgaaaacaattatagaatcrcatttgctcagatcacaagatgatactgataattgccgagaaatcaaatcataactaaatttaagtttacatgttaacaaggaaaattaaacatcctttcaaaatgtttgcagcagataaagttatattttatgttaggtgtagctgcattgaatatgctgtaaatgaaagggattgagttctgctaacataaaagtcggggggcttacaagcgttggttggttctgaaagctgatgcattttcactttaggactgtgcaaatgtacttatttatgcatatatagccatgaagtgtaacca

SEQ ID NO: 188802 - DNA, 548 bp, Homo sapiens
gctgtaaacttaacagtaagtctgtgtggattcaactggtaagtcccaatgttcatatccacataaaaataaatgtccytgggtggcagtttatctcctggtggagataagctaaacctctcagaggatggttcttctggagcactcttcttttctctgcatcttgtgttttagaaaaatatgtgaaggaagacaaaaccccatcttaatgagcacatctcctttttcctggccagctctacatgtttcaggatgaacatcacttgctcagggaagcctcataacccccctacccctgtcccacgtctgaattaggtgttcttgctacatccaccctcatcactttacataattttaccatgggcttggcatactttattgcaactgcccattttgctccatggagaacagaacttcttcaatcttgttcactgttttgtccccagcaattaacactatgcctggaataaaataagcactcaattgtcaaatgattgaatgaatggattgatggatagacaaccaatgccaaataaatgagagggcaa

SEQ ID NO: 188803 - DNA, 548 bp, Homo sapiens
gctgtaaacttaacagtaagtctgtgtggattcaactggtaagtcccaatgttcatatccacataaaaataaatgtccttgggtggcagtttatctcctggtggagataagctaaacctctcagaggatggttcttctggagcactcttcttttctctgcatcttgtgttttagaaaaatatgtgaaggaagacaaaaccccatcttaatgagcacatctcctttttcctggccagctctacatgtttcaggatgaacatcacttgctcagggaagcctcataacccccctacccctgtcccacgtctgaattaggtgttcttgctacatccaccctcatcactttacataattttaccatgggcttggcatactttattgcaactgcccattttgctccatggagaacagaacttcttcaatcttgttcactgttttgtccccagcaattaacactatgcctggaataaaataagcactcaattgtcaaatgaytgaatgaatggattgatggatagacaaccaatgccaaataaatgagagggcaa

SEQ ID NO: 188804 - DNA, 446 bp, Homo sapiens
gatattgtactgttggcattacagtatgtggtctttttagactgcctctttttatctagcaacaggcattgaaggttcctcaagtcttttctaaaagtttctcaggaaattgtaacaggcagctatgtttgagaagtcccaaattagaatacaagctcccagaggatctttctcttcttcaaacatgttttgtgcatttgtgtaccctcaaagcctasaacagagcctggcatataataggctcacaataaatttcaaatgagtgaatgagtgaatggtaaggtcagaccagatttacggaaacctaaacattcctcacatttgataatcctctcaataagctctgaaattggtttcagaccaaacaatacattgatcactcttgactgcagtttgccacttcctatttgctgtacccatgctccgtcactctttaaactccaaca

SEQ ID NO: 188805 - DNA, 395 bp, Homo sapiens
ttgatcacttgcaaaagacctaccaaatcatttcaaactcttttctgaactcttaaaataattactgcttttagattcattggacattgtgacgtgctacttgttttttctagaygtttgctcttgtgaagtgctttttgaacttgattgtgttattttcatgtgtttctccctggtgctccaactagaatctaagtgccctaaagacagatattacatccttactcatgttattcagtcttgagtctctcctagcacttagcattgtctcaagcttgataaatatttatttatttatttatttattctagttcaggaaatgatgaactatggggaatgagaatgatgtaaaggaaatagtgtaggtccaggcagccagaaattgtaatactagt

SEQ ID NO: 188806 - DNA, 439 bp, Homo sapiens
ggtagtataaaaatatactcattttattcctataaatgaatgtattataattaaataattttcaaatgaaccattacaagggtgattagagagtagactactcctgacaaagcctagaattaggattcctaactccttggtctgccattgtttccctacctgactctgcctaaggggttgtatgagtgtcccttaagaaatcattcaattattggtgttctttrgggacatcttcctacccttttaaaatagtttcataaaacctgtactaccagcaaagtttgcagtcctcagtactcaggtaaagctaacaccccttaagtcacttctttgacacattttttttaatcgaaaataaatatacaaagcagttggcttggacttcacacctagccaggtggggatttaaaaaaaaaatctatctgaggaaaaagcaaca

SEQ ID NO: 188807 - DNA, 535 bp, Homo sapiens
gaaacagttgagcctcatagattaaacaagcttgctcatggtcacatgtctggtacttagagaaagaagagctaaaaatactctcttgaaagtggtactgcccctttcggcaatactcccttggcacctatgrccctgcctttttcagcatctgtctcctttatttgatggtgttttggcctcaaagtcatagtatttcatgacttaaagtcaactcacaattgattatccaatttgatttcggttgacccacacactaaggcattatcccttgcttttgattgcagatatttgacagaggaacaaagtaaaattatacaagtaataatgtttattgaacaatgatggccaggcactacatttagtactttagtggtttagctcacaataatcttatgatcagttactttgtttccattttacagagaagcaaacgagtcttggagtaattaagtaacttgcccaatgttgctcagtttgcatgtggaagagcttggatttagcccaggcagcctgattccagagctcaagaact

SEQ ID NO: 188808 - DNA, 535 bp, Homo sapiens
gaaacagttgagcctcatagattaaacaagcttgctcatggtcacatgtctggtacttagagaaagaagagctaaaaatactctcttgaaagtggtactgcccctttcggcaatactcccttggcacctatggccctgcctttttcagcatctgtctcctttatttgatggtgttttggcctcaaagtcatagtatttcatgacttaaagtcaactcacaattgattatccaatttgatttcggttgacccacacactaaggcattatcccttgcttttgattgcagatatttgacagaggaacaaagtaaaattatacaagtaataatgtttattgaacaatgatggccaggcactacatttagtactttagtgktttagctcacaataatcttatgatcagttactttgtttccattttacagagaagcaaacgagtcttggagtaattaagtaacttgcccaatgttgctcagtttgcatgtggaagagcttggatttagcccaggcagcctgattccagagctcaagaact

SEQ ID NO: 188809 - DNA, 507 bp, Homo sapiens
gtttaattaattagaattaatgctaattattccatattgtatacatacatcaaracatcacattgtaccccataaatatatacacttgtgatttgtcaagttgaaataatattttaaaatatcaatagctacaaaataacaatgttgtagttttctctgtatttatgtttataatttatttgaaattagcttttgtgaattctataatggagaaatctagcttcatctccatgtagatagccaattgctcctgtaattctactgaatatttatgtttcctccactgatttgaaatacttaatctattatattaaagatataatatattaaatctaaatatatatatttgaatataagaaaagaaataataacttttaagggccatcttgactctagaacttccagcgggctcatttgtgaacttgattgggactgaatcacaagtcagtttatccgtttgtccaatcttgcttccttttcctcccatccagaggtgctgatctcaag

SEQ ID NO: 188810 - DNA, 459 bp, Homo sapiens
aatgacattcatctttgaacatgtgaatcttatcagtggttgtgaagaattggcttttgtggggaaactggagtgaaaacatgttaaaaggttattaaaattgtttagacaagagctaataaaagccaaaataaagcagaatctatgggatgcagaagagtgtgagaatttgggggagatgggatatatggtgcagatgctttgagtaggaaaaagagtcaagaattccaaatcctttaacatgaacaactaaacagatctatggtggggacattaaccaaggtaagactgtccagagaagaaataaattcttaaggccagagtaccayatgctaaatcaaccacatgtataaagtaaaatattatcaacataagaaattctctccctatatatatatatatatattttttttttttttgctgcacatttaaacaattgatcactccgcctgaaattta

SEQ ID NO: 188811 - DNA, 569 bp, Homo sapiens
aatctcttctgaacctgaagacatgtttgcttattaccttagagttttatttacatccaaactctccctgaagctcttttgtttgctttttccactgtgagaatatttgagagttctggtggttattatagacagttctaatcaaggcttcatcgtgcacaatatacacttggaaaaatccacacctgattatgccaaagcaagttgagggctgtttttcatttcactcagttgtggcatttttattaggtcccagattgcttactttgccttagacattttctrtgttaattaaactcatgattgttccactgcttaaattcttcccttttaaatagttgaataaaagagaaaatgccttagagtatttttgaaatttttgtattttaactgcaatattaatatgttatctcatttctcctttctataatcattaaaattccagagagataaatatttgcagcccaatttataaactcttgattgacaattgaaaagttgctttttgtcaaataaaagagcatctctttagaggtcaagaaaattaggcacaatacacaaagcttttt

SEQ ID NO: 188812 - DNA, 565 bp, Homo sapiens
ctcatgcaagacaaggtaagtcactwacacccacgagtctgtaaaagcaagttaattacttcctagatgcaatggggggtacaggcactccaaatgggagaaattggacaaaacaaaggggatacaggccccatccaagtcccaaatccatggggcaatcaagtcttaaagctacaaaatgatctattttgactccatgtctcacattcaggtcacactgacgcaagaggtgggttcccgtggtcttgggcagctccaccccatggctttgcagggtactgcctccctcctccctcctgagtgctttcatgagctggcattgagtgtctgcagcttttccaggaacatggagaagctgtcagtggatctacaattctggggtctgaaggactgaatgcttttaacagcacccaagtcttatgttgaatgctttgctgcttaaaaatttcttccaccagataccctaaaatcatctctctcaagttcaaatttccgcaaatctctagggcagggcaaaatgccaccagtctctttgctaaaacataacaagagtcacctttgttcc

SEQ ID NO: 188813 - DNA, 565 bp, Homo sapiens
ctcatgcaagacaaggtaagtcacttacacccacgagtctgtaaaagcaagttaattacttcctagatgcaatggggggtacaggcactccaaatgggagaaattggacaaaacaaaggggatacaggccccatccaagtcccaaatccatggggcaatcaagtcttaaagctacaaaatgatctattttgactccatgtctcacattcaggtcacactgacgcaagaggtgggttcccgtggtcttgggcagctccaccccatggctttgcagggtactgcctccctcctccctcctgagtgctttcatgagctggcattgagtgtctgcagcttttccaggaacatggagaagctgtcagtggatctacaattctggggtctgaaggactgaatgcttttaacagcacccaagtcktatgttgaatgctttgctgcttaaaaatttcttccaccagataccctaaaatcatctctctcaagttcaaatttccgcaaatctctagggcagggcaaaatgccaccagtctctttgctaaaacataacaagagtcacctttgttcc

SEQ ID NO: 188814 - DNA, 478 bp, Homo sapiens
gtctgggtgggcacaatctaatcagctgccagtccagctagaatataagcaggaagaaaaatgtgaaaacagagactggcctaatctcccagcctacatctttctcccgtgctggatgcttcctgccctcgaacattaaactccaaattcttcaattttggaactcggactggctctccttgcacctcagtctgcagacagcctattgtgggactttgtgatcatgtgagtgaatacttaataaactccccattatatatgtatctattccattagttctgtccctctagagaaccctggctaatacaccagtattattgtgctaattctacttttwtagaaggtcaagaaacctttagattctgtgatttagagtatgctgaatttattgctttgttttactaattgactttctttaaatgtatgagtatgggtatgaacaggtgtatagtaactatagattgagctcttcaaatct

SEQ ID NO: 188815 - DNA, 489 bp, Homo sapiens
ctggcctgtcccctccagggccagagacttctgggaactctccataacaaccgcctcctgctttacatcctgtgtggtcctcaacatggccccatgggagtatcacctccccattttgttgatgagaaaactgaggcacagcaagattagtaatttcctcaattcgcatagccaggacatagtggaggcaggattcatccccaaattcatctggacttcaaactgggggtcacaaactaaaccgtggcccacaatgcagccaaattcactccttgcctttttgtagaatggtttagaatgattttagcacttttaagtggttgaaaaaattgaaaatataatattgtgggacatctaaatttacatgaaattcaatttcagtgcacataaggttttattggtgttgggatgatcacacccaacacgaggccgtgggagctacaaagtctggcrgagtcaaaggaacgagaaaagacaagagtgcataat

SEQ ID NO: 188816 - DNA, 609 bp, Homo sapiens
gtcatttttttggggatctgctatagtcacctcacaagtcagatgttttcaatttcctggctgatagtctggataattcttgacatgggactggggcaccatctggttgtggaataagcgggaggcatagaacctgcctgttttagccatcaarccttagactaatttaaggataacagattattagtaagctgcttctgatgctacctctcaaatatgcccagcttgcagtatatcaaatggtggaatttttctcattgatattcttctatttctcaaagaataaaggaggacaagagacataacaaagctgttttcattttgaatgaaaaacatttaacctaaaaatatttttatttttcctcaatttgtcctgatagaaaaaggttgcaacctgcctttgacctcattcaagcctcacttgtggataaactgatcagtcctgaacagataagccccctttgagagaaggcccaccccaagacccagtgcagtcttttggaattagggctggagcaggggctttacgtggcagcttcttcctggggtggcacagcaactaggtcagctagctctgaagccagactgcctgggttcgtgccttggtgc

SEQ ID NO: 188817 - DNA, 419 bp, Homo sapiens
aatgctgctttttaatgccgctatgtacatgaccactgttaactggattgaactgaaggatctgtttctgaacatagaagtgactccctgaatttgaaataggagctttagaagtgctcgctttcaggaaaaaataacagcataatattatttcccactccctcttttatattyatcagccagaattcttctttaactatcactgaatattgtgggcttgctttactttctctctctttctaaacttttaactttgtaatgagcatatatatcatgatctcattctttctctcatggttagttggctaaatccactcattgattttttttcccttataagactgtaaaaactggaatgaaattctcttataaaaacagattgtagacagtcccatttctctgatcaatatttaccacct

SEQ ID NO: 188818 - DNA, 561 bp, Homo sapiens
aatgatcttgttttgctgagatttctccaaaggagcagactgaagaaaaatcccatatggaatttataacagaagtgacagaactaagattctgagaatgtcccagaggtttttaacacaagctcctcccagcacactgccctttatcactgtaccctggtgtggtgtctggagtaatacaagaatgtgagaaaaggatccagactttggggcccacaagcagatttcacactcaaagacaatccgactagtcgtctattgattggaattttcttagctgaaacacaaccattcttcaattcatttttctgtccattctgaaaaaaatgaaatgcattgagagagagagagagaagaaagagagagagggagagaggggaggaaggagaggaagagacagagagagaaagatggtaagggtgttagctgcctacttacttgtattactaaagttttaattaccttctattattaataaatgcctggtcattactgggataatgcyataaagagttctagtttaaaccagaaagaaatctaatgtaaactaagatgatgaga

SEQ ID NO: 188819 - DNA, 586 bp, Homo sapiens
tgtatacacacacacacatatatatatatatatatcctatcagtctgttcctctggggaacccagactaaaactcatggattacatatagattatgctaataagtatgtaatatatagttatagaatacataatatgtcatttatatatcatgcaaatatatatgtttgtgttacatatatatgtagcataaattatatatataaatatgtatatttatatataatatataatatattatatatatttatatataatatctaatatattatatataaatatatataytatatatattatattttatatatttatatataaatataaatttatatatatttatatatattatatatatatttatatatatatttatatatattatatttatatataaatatattatatatatatatatataaatatattttaaaaataaggaattgtctcacaggttatgaagcctgagaggtctcatgatctgcagtcagcaagctggagacccaggagagccaatattatagttctagtctgaattcaaaggcaggagaagactgatgtttcagctccaagacagtcaggcagag

SEQ ID NO: 188820 - DNA, 586 bp, Homo sapiens
tgtatacacacacacacatatatatatatatatatcctatcagtctgttcctctggggaacccagactaaaactcatggattacatatagattatgctaataagtatgtaatatatagttatagaatacataatatgtcatttatatatcatgcaaatatatatgtttgtgttacatatatatgtagcataaattatatatataaatatgtatatttatatataatatataatatattatatatatttatatataatatctaatatattatatataaatatatatattatatatattatattttatatatttatatataaatataaatttatatatatwtatatatattatatatatatttatatatatatttatatatattatatttatatataaatatattatatatatatatatataaatatattttaaaaataaggaattgtctcacaggttatgaagcctgagaggtctcatgatctgcagtcagcaagctggagacccaggagagccaatattatagttctagtctgaattcaaaggcaggagaagactgatgtttcagctccaagacagtcaggcagag

SEQ ID NO: 188821 - DNA, 586 bp, Homo sapiens
tgtatacacacacacacatatatatatatatatatcctatcagtctgttcctctggggaacccagactaaaactcatggattacatatagattatgctaataagtatgtaatatatagttatagaatacataatatgtcatttatatatcatgcaaatatatatgtttgtgttacatatatatgtagcataaattatatatataaatatgtatatttatatataatatataatatattatatatatttatatataatatctaatatattatatataaatatatatattatatatattatattttatatatttatatataaatataaatttatatatatttwtatatattatatatatatttatatatatatttatatatattatatttatatataaatatattatatatatatatatataaatatattttaaaaataaggaattgtctcacaggttatgaagcctgagaggtctcatgatctgcagtcagcaagctggagacccaggagagccaatattatagttctagtctgaattcaaaggcaggagaagactgatgtttcagctccaagacagtcaggcagag

SEQ ID NO: 188822 - DNA, 586 bp, Homo sapiens
tgtatacacacacacacatatatatatatatatatcctatcagtctgttcctctggggaacccagactaaaactcatggattacatatagattatgctaataagtatgtaatatatagttatagaatacataatatgtcatttatatatcatgcaaatatatatgtttgtgttacatatatatgtagcataaattatatatataaatatgtatatttatatataatatataatatattatatatatttatatataatatctaatatattatatataaatatatatattatatatattatattttatatatttatatataaatataaatttatatatatttatatatattatatatatatttatatatatatttatatatattatatttatatataaatatattatatatatatatatataaatatattttaaaaataaggaattgtctcacaggttatgaagcctgagaggtctcatgatctgcagtcagcaagctggagaccyaggagagccaatattatagttctagtctgaattcaaaggcaggagaagactgatgtttcagctccaagacagtcaggcagag

SEQ ID NO: 188823 - DNA, 459 bp, Homo sapiens
tttagtcttagtgtccttaacccttttaaaatgtgcctaygtccttccaactgtattgtcaaactctagatcagcattgtccaataaatataatgcaatccatacatgagagtagcacatataatcttaaagtttccaataattacattttaaaaagtgaaaaacagataaaatcaaatttaataagatatcttattaagatatcagcatatccaaaatattgtcattttaacatgtcatcaatgaaaaaagttagtaattagatattttacttttttcttattaaatctttggaatctggtatgtattttatacttaaagcacaactttatttggacaggacacattttaaggactcaatagccacaggtagctagtgtctacaatattggacagagcagctctagtccaagttgcaaccacctcttgttgtgtctgttaatgggtttcacacatccc

SEQ ID NO: 188824 - DNA, 459 bp, Homo sapiens
tttagtcttagtgtccttaacccttttaaaatgtgcctatgtccttccaactgtattgtcaaactctagatcagcattgtccaataaatmtaatgcaatccatacatgagagtagcacatataatcttaaagtttccaataattacattttaaaaagtgaaaaacagataaaatcaaatttaataagatatcttattaagatatcagcatatccaaaatattgtcattttaacatgtcatcaatgaaaaaagttagtaattagatattttacttttttcttattaaatctttggaatctggtatgtattttatacttaaagcacaactttatttggacaggacacattttaaggactcaatagccacaggtagctagtgtctacaatattggacagagcagctctagtccaagttgcaaccacctcttgttgtgtctgttaatgggtttcacacatccc

SEQ ID NO: 188825 - DNA, 459 bp, Homo sapiens
tttagtcttagtgtccttaacccttttaaaatgtgcctatgtccttccaactgtattgtcaaactctagatcagcattgtccaataaatataatgcaatccatacatgagagtagcacatataatcttaaagtttccaataattacattttaaaaagtgaaaaacagataaaatcaaatttaataagatatcttattaagatatcagcatatccaaaatattgtcattttaacatgtcatcaatgaaaaaagttagtaattagakattttacttttttcttattaaatctttggaatctggtatgtattttatacttaaagcacaactttatttggacaggacacattttaaggactcaatagccacaggtagctagtgtctacaatattggacagagcagctctagtccaagttgcaaccacctcttgttgtgtctgttaatgggtttcacacatccc

SEQ ID NO: 188826 - DNA, 289 bp, Homo sapiens
gaattcccaaattatacaacgtattacttgtcatttcacactgtcatatacagacactgccttaggatcatccaatcaatatagyaggaattaatcgaagagggactgactgtaagagcaagtgatagaaaactgtaaatcgtttcatattgttgagaaaatgcagagggatttagattacagaagcaaattcaggaaaattcatttcaaaaaaaaaattagggtttgggtcaaaatttccactttataacaaagtttgagtctatactcatgccctgcaagagccatg

SEQ ID NO: 188827 - DNA, 433 bp, Homo sapiens
gaattcccaaattatacaacgtattacttgtcatttcacactgtcatatacagacactgccttaggatcatccaatcaatatagtaggaattaatcgaagagggactgactgtaagagcaagtgatagaaaactgtaaatcgtttcatattgttgagaaaatgcagagggatttagattacagaagcaaattcaggaaaattcatttcaaaaaaaaaattagggtttgggtcaaaatttccactttataacaaagtttgagtctatactcatgccctgcaagagccatggagcagagacgctkacttggagtccgcattttgtggcagacagtggttgatgcttggtgttcaaagcactccccgcacactggtggtccacaggctggtctctttcagcactgatgtttacaataagatgatgttatgaataaa

SEQ ID NO: 188828 - DNA, 426 bp, Homo sapiens
gtgggcttaaaatattcagtaaaccatggtagaaacagatgtggtgtcatctaggctttgttggcgccacttacagagcacaggcaaaatagatttagcataattcttaagggccttggtatttttggaatggtcaatgagcattggtttcaacttaaagttagcagctgactttagctcctaaaaacagagtcaacctatcctttgaagatttgaagccaggcattgacttctstctagctttgtaagtcctagatggcatcttcttccaatataaagctgttttgtctacgttgtttgtttgttgattgattaattgtggcccaggctggtgttgagctcccggcctcaagtgatcctctcgcctaggcctcccaaagtgctgggattacaggagtgagccactggcccagctgaaaacctgct

SEQ ID NO: 188829 - DNA, 423 bp, Homo sapiens
  misc_feature (1)...(423): n = A,T,C or G
agatctttccaattgacttgctgcaccttctacttcagcatattctgtttcactttgcacttttatgttatggagacaatgtctttccttaaacctcatgacccagcctctgctagttacagatttttcttctgcagcttcttcacctcatttagccttcatagaactgaagagagttagggccttgctctggattaggctgtggcctaaggaagtgtttgatctattttgaccactanaactttctttacatcagcagtaaggctgtttcactttcttatcatttgtgcgtgaagaatcacctttaatttccttcaagaacttctcttttgcatttacaacttggctaattggtacaagagagctcacttttggccyatctcatttttggcatgcctttctctcaaagcttaatcgtttcta

SEQ ID NO: 188830 - DNA, 561 bp, Homo sapiens
tctagtgttcattctcttgaaaagtccaagtacagagcctacataccttaatgctccaaaatatcagtgctaagaatttagaaagtaggtcatcttgaataaaattattttacatatattttttatttttttcgccattcccatttctccttttcttcatcttgatctcccacatatatcaaaggaagtgttgaaggagacacaagattttagaaagtataygtaaagaaaattgtgtgcaatttttcacttagaggttaaaggggaaaaaatggtgatgggctaggggtatgttttttgacctctgagcttttttccatcttcagaggactgtgtctgacattgttcccactgcagattcacagccctcaggagagggtacatccatctcctaaacccatccaagggcccttgtaactaacaccaaccagtgtaggtcacaggacggtacacatactgcataaatacatacattatgcagaaaaccaactgctgacacttaagcacaggtgtaatctttgctaaaaaccttttgttataaccagtatattgggtcatgta

SEQ ID NO: 188831 - DNA, 594 bp, Homo sapiens
gggaaaacagtatctgcaaaggactggggttgggggaggatgaatcttttaacaaacagaaagatagaaaggaaggtgactctgagagtgctgtgaagaatgggagggtggtgacagaaaggctggtgacagatyacactaaggaatttggatgcatagtcaagtacagtgtgatgcaaaccacagtaatatggtctaatttcttctttttaatcacatgggctgctgtgaagagaatggattgaaggaaagcaagtggaagtagactaaataagagattttcataatagagaagagaatgctgttagtggagatgcagagatgttgaagcaatcaagaaacaagctggtaatcaactgaatgtagggatgataaggaaagacgtgtcaagatcaatttccaggtttctgttgaacatataggtgaatagagatgcaatctcctggttggaaaaactagaggatggagggtggagggtggaaggcaagggaaaagataagatcaagagttcagttatgggtgtgttcaattggaaatacccatgaaatatccaagtggggatgtcaggtaggcacaggatatgagtcagaattc

SEQ ID NO: 188832 - DNA, 505 bp, Homo sapiens
aatttttggcaacaggattggtctcatggaagacaatttttccatggacatgggggagggatggtttcggggtgattcaagcacattacatttattgggcactttatttctattattactacactgtaatgtgtaatgaaataattatataactcatcataatgtagaatcagtgggagccctgagcttgttttcctgcaactagatggccccatctgggagtgatgggagacagtgacagatcatcagggcattagactctcataaggagcrcgcaacccagattcctcacatgagcagttcacaatagtgttcatgctcttttgaaaatccaatgccaccactgatctgacaggagttggagctcaggcagtaacgtgagtgatggggagtggctggaaatacaaatgaacctttgctggctcaccgctcacctcctgctctgcggccccattcctaacaggccacaaacgctactggtctgtggcccatggcccaggggttg

SEQ ID NO: 188833 - DNA, 599 bp, Homo sapiens
aagaattgaaaattcccattaagagaaaaaagaaaaagctgcaacctttgctaatataaaccgtaagagcctatgcctcttgaaatttctctgtgtttgtctttgtacatttttaatgacttaatgagaaaaaagattcatcaggactcctttcctagcaggaggtttagtgtttcacaaatgagtagggagctgctctcataatgaggtaaacggccacctgattcttggataagtccaaggaaaacctttacaccagaggaagcaacagcttgccagtgttcaatctgagactttccaaggtcagaagagaggaggattggtattgatatttaataagcatttactgtgtccaaggcattttggtacgaattktatatctcttatctgatatccttgccttttaggactaggctgtttttacctttaaggtagatgctattattctcattctacacatgaggtaactgaaacactagaactctaaaaaccttgccaaacatttcagaggaggcagatttaaacccagatgcatttgcattaaaccccaatggatttgattccaaagcacgtcgtctttctgctaataatagccaaca

SEQ ID NO: 188834 - DNA, 498 bp, Homo sapiens
ctttccagactggagggaggactaagggtctggtctatagtacatgcttaatacattccttaaattttaggaatttatttattttctaaagcaaggtatatatctgctgtagcaccacataaaataaattttgactgaaaggtatttatattttaaacacaagctgcaaaaygcttaacccaggctgggaatcttgtaaacactcaataaacctatatgagtgatattcattattcaaaacatattttatgagcacctctctgcagggtctgtgctaggtattagaagccaattcctctgataaagtcacaaatgggagctgtcttacaagctttctttccagctctgtctagtacaataagagacttgattggcaagagctagtgcccccttgacttagatctgtgtttcaggaaaagagaaatagttaattattaggaaaataaaacaggtgcccaaaagccagttttatttatgccggttgtccttgcctgactt

SEQ ID NO: 188835 - DNA, 498 bp, Homo sapiens
ctttccagactggagggaggactaagggtctggtctatagtacatgcttaatacattccttaaattttaggaatttatttattttctaaagcaaggtatatatctgctgtagcaccacataaaataaattttgactgaaaggtatttatattttaaacacaagctgcaaaatgcttaacccaggctgggaatcttgtaarcactcaataaacctatatgagtgatattcattattcaaaacatattttatgagcacctctctgcagggtctgtgctaggtattagaagccaattcctctgataaagtcacaaatgggagctgtcttacaagctttctttccagctctgtctagtacaataagagacttgattggcaagagctagtgcccccttgacttagatctgtgtttcaggaaaagagaaatagttaattattaggaaaataaaacaggtgcccaaaagccagttttatttatgccggttgtccttgcctgactt

SEQ ID NO: 188836 - DNA, 673 bp, Homo sapiens
tctcactcacaagtagaagctaaatgatgagaacatggatgcttagaagggaacaacacacactggggccttttggagggtagagagtgggaggagagagaggatcaggaaaaataactaatggtactaggcttaatacctgggtgatgacatacgtttacctatgtaacaaacctgcacatgtaccctgaacttaaaataaaagttaaaaaaagtcattgtctaagtagtctctgttcacaaatgcttaaaattctataaagaacagactcttccttaactgtccttctagctcgcaaccttttaactactgtagacacctccactgtgatcaaataaaatggagtcctctgtggctgcctgttataagcacttttgctctgagtctttggaaagggatttttgttgttgtgtttttaatacacttggcayaacaaaaaaatagtctccgcttttgttgtactatggggtagaaatcttagttcatggtcaagtgtaaaaaattataattttatattgtaactaatcttttgtgtcacatcatgacacacgaaaaaaatatagcctccctaaaactagagcttttcttcttttgccaagtgacaaataaggtccaatgagaagggagtgtttacagcacccagcctttggcagctgatgtattgaggggaaa

SEQ ID NO: 188837 - DNA, 673 bp, Homo sapiens
tctcactcacaagtagaagctaaatgatgagaacatggatgcttagaagggaacaacacacactggggccttttggagggtagagagtgggaggagagagaggatcaggaaaaataactaatggtactaggcttaatacctgggtgatgacatacgtttacctatgtaacaaacctgcacatgtaccctgaacttaaaataaaagttaaaaaaagtcattgtctaagtagtctctgttcacaaatgcttaaaattctataaagaacagactcttccttaactgtccttctagctcgcaaccttttaactactgtagacacctccactgtgatcaaataaaatggagtcctctgtggctgcctgttataagcacttttgctctgagtctttggaaagggatttttgttgttgtgtttttaatacacttggcataacaaaaaaatagtctccgcttttgttgtactatggggtagaaatcttagttcatgrtcaagtgtaaaaaattataattttatattgtaactaatcttttgtgtcacatcatgacacacgaaaaaaatatagcctccctaaaactagagcttttcttcttttgccaagtgacaaataaggtccaatgagaagggagtgtttacagcacccagcctttggcagctgatgtattgaggggaaa

SEQ ID NO: 188838 - DNA, 673 bp, Homo sapiens
tctcactcacaagtagaagctaaatgatgagaacatggatgcttagaagggaacaacacacactggggccttttggagggtagagagtgggaggagagagaggatcaggaaaaataactaatggtactaggcttaatacctgggtgatgacatacgtttacctatgtaacaaacctgcacatgtaccctgaacttaaaataaaagttaaaaaaagtcattgtctaagtagtctctgttcacaaatgcttaaaattctataaagaacagactcttccttaactgtccttctagctcgcaaccttttaactactgtagacacctccactgtgatcaaataaaatggagtcctctgtggctgcctgttataagcacttttgctctgagtctttggaaagggatttttgttgttgtgtttttaatacacttggcataacaaaaaaatagtctccgcttttgttgtactatggggtagaaatcttagttcatggtcaagtgtaaaaaattataattttatattgtaactaatcttttgtgtcacatcatgacacrcgaaaaaaatatagcctccctaaaactagagcttttcttcttttgccaagtgacaaataaggtccaatgagaagggagtgtttacagcacccagcctttggcagctgatgtattgaggggaaa

SEQ ID NO: 188839 - DNA, 573 bp, Homo sapiens
aagaacagctgtttttattacaaatagaaaaggctattcctagcaacacaaaaagaaaagactgttttatatttgtaaatatgtacaccaaagcttctcactccaggtgcctcttggtcttggaaattgggtcacactgattctctggtagtcattttcaaaaaagatgactgctgaaatcaagttctatataccatgccttgtgaggtatggtatattcccaaagtaattcaagcaaaatctcatgatctcaggtacattcatgacagactctgttcttgaccaaaccctwgtatgacttctagcagattaagatttcgtccctaagatgacctcagctccctcttaaaatgtctgcctgcgaaagcttgcaattataaatcctttctctgcccttgagatataaatcttctatcacgcaaaactgtctcctcaaggacctgggagccatctctctgaaatgcaaacattaggaagataactcttcctctcagtgtgaaggtaagggcataacatctgcagccccttgccccagcttgcacaacttcccctgtcataaagatgtaagaagtt

SEQ ID NO: 188840 - DNA, 573 bp, Homo sapiens
aagaacagctgtttttattacaaatagaaaaggctattcctagcaacacaaaaagaaaagactgttttatatttgtaaatatgtacaccaaagcttctcactccaggtgcctcttggtcttggaaattgggtcacactgattctctggtagtcattttcaaaaaagatgactgctgaaatcaagttctatataccatgccttgtgaggtatggtatattcccaaagtaattcaagcaaaatctcatgatctcaggtacattcatgacagactctgttcttgaccaaaccctagtatgacttctagcagattaagatttcgtccctamgatgacctcagctccctcttaaaatgtctgcctgcgaaagcttgcaattataaatcctttctctgcccttgagatataaatcttctatcacgcaaaactgtctcctcaaggacctgggagccatctctctgaaatgcaaacattaggaagataactcttcctctcagtgtgaaggtaagggcataacatctgcagccccttgccccagcttgcacaacttcccctgtcataaagatgtaagaagtt

SEQ ID NO: 188841 - DNA, 615 bp, Homo sapiens
tgattaactcaataccaaagaaagttcacctaataacagatgtctttcccaagtagtagcaagatatacaagttttactagtaccgtcgtctagaattttacagaaaacttcccagatgttccaaagttgggaattattattttgcctgatgcataaatataacagaatgtatatataatatttcagcttactggttattcatatcaagctattaaaactggcccactcaccactataaaactataccaagctcccaataagtgaagtaaggtaatgaagagaaatatgttttaaggatatttgcatatgttatgactatatatgtaaaacaatccaaaagtaatctaaaattaaaatattaagataaataactgggccaggcgtggtggctcacacctgtaatcccagcactttgggagatcaaggccggcagaacacaaggtcaatagattgagaccatcctggccaacatggtgaaaccccatctccactaaaaatacaaaaattatctgggcgtgatagcacgcgcctgtaatcccagctactygggaggctgagccaggagaattgcttgaacctgggaggaggaggttgcagtgagcagagattgtgcc

SEQ ID NO: 188842 - DNA, 581 bp, Homo sapiens
gtgaacattgcaaattagtagaaaaaggcatgatataataattgttggttaaaaaaaagtctctttatagatcaacattgagcaatcagtctttctgtttatgttgtccagaccagttgtcagcaacattttcagcaccatgaagaaattattttatatgagggttaagatatagttttatattatattttttcagtgctttttaaaatagtaggtctgtaaacacacgctatgtattatagatgtcataagctaaatggtgaaacagcagagataatgatcacccttttctagggagaaaaggtagggaaaatatcagagagaagcaagggagctttaagtctttagaaaggcttaatgggattctatatatagataccaaaaccattggcttgggacttttgctaaggtaggtatgttgcatttctctagacttttctcttggcacaaggctactagtaagaaaatacrtaggaaaactaagtgaaagatttctgtttccagttatatgacagattagacacctgaattgatcttcctgctgacaaactcacaaaattatggataaaataatttcaata

SEQ ID NO: 188843 - DNA, 562 bp, Homo sapiens
aatggaataaagtatataaagctattaatatagtgttggaatttaatgagtactcaattcatggctggctacctgggatggaatcctgggtacacaacttactatatgtagaccttgggtaatcactaaacttttcttatctgttaagttaagggggctaacaggacctacttccaggactcctgagagcagtcaaggagatgacacatattcagttctccccaggctacctgggccrtagaacaggcttactaagtgttagctacagcaattgcattgcctgtacttttccttaaagtaagtagcacaacatgcacagtaggctgtttgttattccctctccttcccaatccctcactcgacaagctctgagaataatattgataataataataatggcagaatatagtttacaaactttctgtaagcctagctttttgaccttaagtaaacaatttaacgtctcattgcctctattttcttatctgtgaaataaagataatactgcctatttttgaggcatatattctttattaaagaattgaaggtaaaggtcacagaa

SEQ ID NO: 188844 - DNA, 569 bp, Homo sapiens
ttcaaataacatgaagttttcgarcattataattcagaatagtttcctaggcttcttatttctctttcctcagaatcattaaatattaggtatggagaatggtttttgatgataaaagtcttctaaagtgagctgagtcagaaacaaggaaatgtctaaccctgtgcattggaaagtggggtgccctctggggtcactgccctgtgtttccatcacagctcaggaactgttttaactggtttccccagctgattcccaagtgggtcgtctgtggaatgagtatggtcatctgtggaactggtggatctgtgatcccttcagatgttcactgcatgagttgaaatgcttgagagtttttgatctttgatctaaagaaagaaggctaagtagaggagaaaggacagtcctaggatgcctgaaagaagaagggatagggaagaggaagaaactaaagaggcatggcctctgtctcctcccatgacctgagtccctatgaaaagaagagttaggaacagaagctggacaagcaataattggtggggcaggggagatgggggagctgtgaaata

SEQ ID NO: 188845 - DNA, 569 bp, Homo sapiens
ttcaaataacatgaagttttcgagcattataattcagaatagtttcctaggcttcttatttctctttcctcagaatcattaaatattaggtatggagaatggtttttgatgataaaagtcttctaaagtgagctgagtcagaaacaaggaaatgtctaaccctgtgcattggaaagtggggtgccctctggggtcactgccctgtgtttccatcacagctcaggaactgttttaactrgtttccccagctgattcccaagtgggtcgtctgtggaatgagtatggtcatctgtggaactggtggatctgtgatcccttcagatgttcactgcatgagttgaaatgcttgagagtttttgatctttgatctaaagaaagaaggctaagtagaggagaaaggacagtcctaggatgcctgaaagaagaagggatagggaagaggaagaaactaaagaggcatggcctctgtctcctcccatgacctgagtccctatgaaaagaagagttaggaacagaagctggacaagcaataattggtggggcaggggagatgggggagctgtgaaata

SEQ ID NO: 188846 - DNA, 472 bp, Homo sapiens
atctcccagcacagcactcgaactctgctaagggatagactacctcctcaagtgggtccctgatccctgtgcctcttygtggggagacaaatcccagcaggggttgacagacacctcaagcaggggagctcaggctggcatctggcagctgcccttctgggatgaagctcccagcggaaggaagaggcagcaatctttgctgttctgcagccttcgctggtgatacccaggcaaacggtgtctggaggggacctccagcaaactccagcagacctgcagcagaggagcctgactgttagaaggaaaagtaacaaacagaaaggaatagcatcaacatctacaaaaaggacatccacacaaaaaccccatcttaaggtcaccaacatcaaagaccaaagatagataaatccacaaagatgaggaaaagacagctcaaaaaggctgaaatttccaaaaagcagaatgcctcttc

SEQ ID NO: 188847 - DNA, 480 bp, Homo sapiens
tgcctgtgatattgtgatataataagaaatacatatttgatcttcatccccagttcccagcacagagctcctaaaacccttacaatagcctaagtgtcggaggtgctaggagcattttttgttctaaaatttggtctttgaccttggtttctgaccaagagcttttaaatcttttgaaatttcctgggygatagaagcatcttttgtccaaatgaggtgactcttgatgggatcctagatagggctggtcaccaggaggccaagccatgattagaagctttgaactttcagcccaacacctatcctccaagaaatgaagaccactggagattaagttaataattgatcatgatgctatgatgaagcctccataaaaattcctaaactatgggattctgagagtttccaggctggtgaacacatccacatgctgagagagtggtgtaccccaattctttgagggacagaagtccctgtgct

SEQ ID NO: 188848 - DNA, 473 bp, Homo sapiens
aagttaataattgatcatgatgctatgatgaagcctccataaaaattcctaaactatgggattctgagagtttccaggctggtgaacacatccacatgctgagagagtggtgtaccccaattctttgagggacagaagtccctgtgctctggggtcttctagagcttatcctatgcacctcttcatctggctgttcatctgtatcctttacaatgaacctgtaaatggaagtaagtgttttcctgagttctgtgagccatcacagcaaattatttaacccaaggaaggggtcaaggggacctccaatttgcagccaagttggacagaagtgtggttacccrctacttgcaattggtatctgaagtccagtcttttgagactgagcccttaacccacagtgtctgcactaattccaagtaagtagtatcataattgaatttaggatatccagttggtgtgtgaagagtaagaga

SEQ ID NO: 188849 - DNA, 393 bp, Homo sapiens
ctccatgtgatccatctccacccgaagggagaaagcactcagtagccccacagggctggtggctgccatattggtaggcagagaactagagaatgactccttcaggaactactaagccatatcttggggtcataaaatgaggaatcttcaggttggcttcaggcccaagacttgttacatattttttaaaataaactttttaatttgaaataattttagatttacaaarccattgtattcttatgtatctcaaactctagaatcttcctgcggcagctcagggtacatcagctggtccacagagtctggcatattcagggcataggacttttggggttttgagaagtcagaccaaggctgacccaattacttgggtgatcagagtcagaattc

SEQ ID NO: 188850 - DNA, 537 bp, Homo sapiens
aacagctgtctctccgggaagcccatatcccatttcttcagctccccagaagtagacatacatattatttccctgagggttagagaaagctatcagaacttggcaacatataaagtaaatacccactaattgcaatacattcatttaaatcaggtctttatcctccttaggcattgtagtaggtggcttcctttgaagtcttgttgaatttgtccaaaattaccttgccagaggcagacggctgtttggaacatttgttctgaaccgatccccaaagcagtaaatcttagcrttggtaacggctctgctcacatgccacaaaaaggaaatgtcctgggtagggcatgaatccaggcttagatcccccattgtatgcaaagaacagaaagagaaagagagagatacctgcacagctcccagggatataatgctgttgtacaactctgatgacgttataaaccacaaaccctgtacattagtgaaatacaaaccaacagactgccagtgaattagtgattttttttctttttttctgct

SEQ ID NO: 188851 - DNA, 580 bp, Homo sapiens
gagaattcttaaaattacctgggccattatctacctaatcaagccctgacatgaccaggaattgaatgagtcagaaacacaaagcaaagctgactcatgagaaggtcaggcccatctaccacttccatttctctccttacccgacgttacccttccactttcagaccccttgccaactcctgctactctctcctggcactcactattgcacccaaagtgtcacacatggcttggttttaggtctctgtatttctcctttcatcccacttatgaccttttgatccctacatgcaggcttggttgctgccttctattcctgggatctctcaattacaaaaaattccaagacagatctcttcttaatgttctctctataagccaacagcaacttttgaaagattataagaccatacagcaattttctcatctttatatctttgataaagtcattaactacaggtacrtatgaacttgttggtatatgtgtgagcatacatgccaaaacacacaaatacatatacagaaacatacacacacacctggcataaccagatactagaagtttatgtgtaggttgcaa

SEQ ID NO: 188852 - DNA, 580 bp, Homo sapiens
gagaattcttaaaattacctgggccattatctacctaatcaagccctgacatgaccaggaattgaatgagtcagaaacacaaagcaaagctgactcatgagaaggtcaggcccatctaccacttccatttctctccttacccgacgttacccttccactttcagaccccttgccaactcctgctactctctcctggcactcactattgcacccaaagtgtcacacatggcttggttttaggtctctgtatttctcctttcatcccacttatgaccttttgatccctacatgcaggcttggttgctgccttctattcctgggatctctcaattacaaaaaattccaagacagatctcttcttaatgttctctctataagccaacagcaacttttgaaagattataagaccatacagcaattttctcatctttatatctttgataaagtcattaactacaggtacatatgaacttgttggtatatgtgtgagcatacatgccaaaacacacamatacatatacagaaacatacacacacacctggcataaccagatactagaagtttatgtgtaggttgcaa

SEQ ID NO: 188853 - DNA, 417 bp, Homo sapiens
aatctgtgtttcctaaggaaaaaaaaacatggaagtccaaggtaggcggatcatgaggtcaggagttcaagatcagcctggccaacgtggtgaaaccccgtctttactaaaaatacaaaaattagccgggcatggtggcacacacctgtaatcccagctactcaggaagctgaggcaggagaatygcttgaacccaggaggcggaggttgcagtgagccgagatcgtgccattgcactccagcctgagtgacagagcaagattctgtctcaaaaaaaaaaagaaaagaaaagaaaagaaaaaacatggaaagaggatcagattgaagggggaagattgagtttaggttggacatagaaagactaagatatgcaagtaaacatatcaaatagacatttggatatgtaggtctgaattc

SEQ ID NO: 188854 - DNA, 476 bp, Homo sapiens
gctgtcacaattgtgcacaaggagggttgagaaaaaggacaaagtgacaagtaagccttaagcaaatggttctataggcttccagagaagaagtttgctgcttctcccatgcaaaagtgaacgattataaatggcagtaagtaagtgaaaccctccttcaatgaagtgttctgcatgggtgctggtgtccaagcctgaagttgccaagcacaacacagatcaaacatctcacattaagaggtgaatcctacaatgtcagagatggccagcaacctcagatttcacccaaatccgcaaggtttcgtgtcagagaagagaattcactccagatagtttgagtaacatgaaattatgacactgtgtgctcggttaaatagtgtccttccaaaattcatgtccacccaaaaccccagaatgtgatttgatttagaaacaaggtctttgaayatgtatctagttgtttataaaagatcaca

SEQ ID NO: 188855 - DNA, 335 bp, Homo sapiens
ccagggagggtcagctttcaggagtaattcagagactcctgtattttgattgatttgtaagggcatgaatggacaacttatttatatatcatttttttctgrttataaaaataaaatctgttctgcagaaaacttagaaaacatagaaaaatgtaagcaagaaaatagaaatatcacaattgttgtgccagaaataactgctgttaagaattttacttatttctttctgatctatgtgcacacacatatacacacaacacaaacacacaaatggaattatactgtatatagagtgttgtggattattataacatagatatagtagaatgtattta

SEQ ID NO: 188856 - DNA, 633 bp, Homo sapiens
tttcccagcttaccaacatccagggaaataggttgattcatttagttttatattttttaatcagtatgaaagtattaaaaaatacattactgaaaatttagaaaattgactatttttccttatacatattgtcagagtattaataagcatacatgcatattgtattttactttccatttaatttttttataagtatttttacacatttcaacacagtcatcactgagcacctactatgtgtgaggtgctgatctaggctgtttttaatggtctttttagtcgataaactataatttactcaaccattcatctatacatgtacattgtttctgatttttccactattgtgaatggaagggcaatgcacatatttggagatacatctttttctatasttttattaagatagattttagtaagtggagttacagggtcaaagagcatgaatattttcatgaccattagtacttattgtaaattgctttccagagctagttttcaaatttacagtgctatcagtattgtataaaaatatcaacttcactggaccctcaagagcatctgattttatcattttaaaaaatgctaagaggcaaagaatggtgtcatattttttctttttttttttaactc

SEQ ID NO: 188857 - DNA, 599 bp, Homo sapiens
ctgtttgtaaatggagaatcagcagataaattcctgcagcaaaatagcagagtaaaaagaaaacttaaaaaaaataaagaagrcatttaattcccaagtaattatcaacattgcctgtggaagataaaattgcaacactgttatagaaagatttatgttcattctcatacaaattagcaaggaaactgattagttgacatcttctctgctcctctattcctgactgaatatgatctcagccctagggactggcaggccaggctttcagccagggtcagatgcaggttttgtggggcctgcagctgagaccatttttgaaggtctctttaaaaagaagacaaaattacaaattcaaaagttagatagaaaagtaaagacttactcatcctaaacgagaatagaaaacacaccgatgataaattgtttaaaagataataaatatcacaatcatcacaaagttcataaaatgccttattattataaatactactacatccctataatactccatccctacatatttggttacatgctcttcgatcatctctttatatgacaataattttgtaatatagttttctatagagaaaattccattt

SEQ ID NO: 188858 - DNA, 599 bp, Homo sapiens
ctgtttgtaaatggagaatcagcagataaattcctgcagcaaaatagcagagtaaaaagaaaacttaaaaaaaataaagaaggcatttaattcccaagtaattatcaacattgcctgtggaagataaaattgcaacactgttatakaaagatttatgttcattctcatacaaattagcaaggaaactgattagttgacatcttctctgctcctctattcctgactgaatatgatctcagccctagggactggcaggccaggctttcagccagggtcagatgcaggttttgtggggcctgcagctgagaccatttttgaaggtctctttaaaaagaagacaaaattacaaattcaaaagttagatagaaaagtaaagacttactcatcctaaacgagaatagaaaacacaccgatgataaattgtttaaaagataataaatatcacaatcatcacaaagttcataaaatgccttattattataaatactactacatccctataatactccatccctacatatttggttacatgctcttcgatcatctctttatatgacaataattttgtaatatagttttctatagagaaaattccattt

SEQ ID NO: 188859 - DNA, 381 bp, Homo sapiens
atggtaaattcatctcttctctcagtctatcctcaatcgacctttccaacttaccaaactttactaacagctgttccccaaagatgcctgtatcttttccacttctggccctgaaccattccagtatctctacctggattttctttccacaacatttatctactgagatcctgcaaagcctagctcaaatgttacttctccatgaaaccttttctgattctccttascagataaaatcttacctatgtctgagcccctttagcacctattgtcctcagagtttacagggacttttccagaattgcttgtatatagctaacatatgtatttatggaaaatgtgtaagaaatttctccagctaaataaaaagacaccccaaac

SEQ ID NO: 188860 - DNA, 457 bp, Homo sapiens
ccttttttgttcccctcacaaatctattcccasggctttaccattcagcttattatctctgtccagataaacattagcatagcacattatcgtatctaaaacccaaccatacttcaacctctctaatttcaggttagggtgacttaatccttttggagaacgaaaatttcacaacatttctgtcctttggtaataggagtaggattgtgattttgccaggcctataggaagaataagggggctatgtgaaagattctgctttgccaaacctgtacacactagcccttgggagggttcaaaggatcctaaggatcagcagacagataagaagcattgtaatggtaagagcctggtgctgcaaaacaagccttctgcaaaaacagggctgaaccatgaggctgagcactagggcccagtgaagtctcctcatgtctaaaatctttgtcctcacgtctaa

SEQ ID NO: 188861 - DNA, 521 bp, Homo sapiens
taagtatatattaagagaagtgaaataattctctgggtgggttcaaccttttagtaaatggtcaagtttgctatacatttgaaccacagaactaagtaacatatgcttagctggcttgtgaatctagttctaacacatacgaagtttccagataaggtgctcagccctgtgggggaggtgccctgagtgcacagtccttgactcaatggagtcaaatrcatgaattaaccgtaagagatgacagaatgtaaatgacaaaagaaaaagggactaaagcactctagttggtaagtaggagagatcaaagctggtgggagaagaacagcaaagttctcatgaaggaagtggcaactgagcctggccttcaggactgggggaaattccaacggtggtacaagtagaaagaagaggcagggctggaaatgtgtgctaggtccagaaggtacagggctttgaatgccatgccctttcttatttgttatgccaagggagtcccctaaatgcagtaagagttgtttaga

SEQ ID NO: 188862 - DNA, 471 bp, Homo sapiens
ggacttccggcccccagaactgtgaggaagtgtgttcctctacgcccccagtttgtggtatttactgatggcagcccaggcaaactgaaacataggaaaacatagggataacgtctgggccagggagataatggtgctgaacgcaagggcaagtgttcgcgttgtaggcggcgggacacagtgccggaaagcaatctgatgccgygcgcccatggtgtgctctgtgcgcctggcatcgtgcctagaggccaggggtccagcacaattcacacttaccaggaagttctggggcaggcactgcactgtgaaggccacaactccacctaacccacatgtggtgtctgtgcgctggcgcgacccaccctcaccccatgacccacccttgccccacgacccacctgtatcatgtacagctgggcgatgcggtactcctccacggtcattggcagaggaatccgatattcctttata

SEQ ID NO: 188863 - DNA, 471 bp, Homo sapiens
ggacttccggcccccagaactgtgaggaagtgtgttcctctacgcccccagtttgtggtatttactgatggcagcccaggcaaactgaaacataggaaaacatagggataacgtctgggccagggagataatggtgctgaacgcaagggcaagtgttcgcgttgtaggcggcgggacacagtgccggaaagcaatctgatgccgtgygcccatggtgtgctctgtgcgcctggcatcgtgcctagaggccaggggtccagcacaattcacacttaccaggaagttctggggcaggcactgcactgtgaaggccacaactccacctaacccacatgtggtgtctgtgcgctggcgcgacccaccctcaccccatgacccacccttgccccacgacccacctgtatcatgtacagctgggcgatgcggtactcctccacggtcattggcagaggaatccgatattcctttata

SEQ ID NO: 188864 - DNA, 426 bp, Homo sapiens
gaattcaagcaggtagtttagaataactgctttgttgccagttcgtctggagcagttctcatctgggggctcttttgctactaaagggacatctggtaaggcctgcagacatgtttggttgtaactgagagctgctgccagcttgcagtgggyggaggccaggggtgctgctaagtaccctacaacgcacaggacggccccccacaaacggttatcttgaccaacatgtgactagtgctgggctgacaagccctgctccagagacccagccctgtgtttcagcattgttcccttctcctccactttttcctttctatgtattatcgagggacagcctggtgttggtaacattcggcttctgttgggaggaggaaagaagcggaaactcaggttatcaaacacagatgtgccagggcaacaggaccc

SEQ ID NO: 188865 - DNA, 593 bp, Homo sapiens
tggcaggtgtaggtgaccaaaatttaaagttagaactgcaactgaggggacccacagtcagcgccwctgtagtctccagggaagtgtctgtccttgctctgagactgagtgatgagaagcagaggcccttctccccagccctcttgtcatcttctccctttgatggcagtagaaagtatgcagctgagaagtcactcttgctttaaatcaaaagattcgacttcgagtcctcttcaaaagaagattgtttcttctaggtgtttaaaagactgagaggaacctcgagaagggaacagatcaggtatcttcaaaggcaaagaagggggtcacaagcatcctcagaatttccccagctgagaccagtccctccaaggctgttattagcacagcccttcgggacttggaggtgcagatcaaggattctcggcagacttgtttggaagtgtttgtagaccattgaggactgtcagagcgtctcagttccctgggtctgatctctctctgagcaacaagggctgcctttgacaagttctcatagcactgaagctcagtggattattattctatcttgtcaataagctgcagttgctagg

SEQ ID NO: 188866 - DNA, 557 bp, Homo sapiens
tctttaggaactatccaccaatgtttggtttccatctggtgtctcatcactatggtacttggacctatgcaaggaccaggggtcacatacaagctattcagccctcttggttaggatccaccatccttcgagtccttgaatttccatgagtggaaaccatctctctccactgctgctagggaaacatcaaattgttgggtgttgttttggattaaaacaaacaagaacattctgtgttttctggmaggggccttattagtcagttgtactcaagcttttatttctcatttggaggtgttaggactgagctgcatgaggaaataaaagatgtgactgctcacaaaggcaataaaaaagaaaccaccacaactctagatgtttgcccttgaacgaggcctccaatagactcttctgtgtgttcttaatgagcagttgtgaacatctctttaggaactcattgccttctgcggcagcataggttaagtagatctgaccatctagtcttgcggaagagttagtatttaaaggggaagtggatgaaaatggttggttgaatt

SEQ ID NO: 188867 - DNA, 503 bp, Homo sapiens
tattggaacacagccatacccatatttctgtggctgcttttgtgctatgatgtcagagttgagtagtcatgacagagactgcatggcctgcaaagcctaaaatatttactgtcagattctttacagaaaagrttttctgacccctgatttagaggctctttcactccatgtctggtgcctgggctgggttgagtcaaagcctgggttcagcagagatgtcaactagagcacctgtatatggacttgctgtaatgcttgggtgtcctcacaatatggctgcctcagggtagtcaggcttcttacatggtagctcatggctcaaagagcaactgaattagcaaacaggtggaactttgacagtgtcacttctgctgcactttactgatggaagcagtcacaagcctgctcagattcaacgggaagaaacacggacctcaactcttagtgggaagcgtccacggatttgtagtcatgttttaaagagcccgtggcaggcaataaga

SEQ ID NO: 188868 - DNA, 503 bp, Homo sapiens
tattggaacacagccatacccatatttctgtggctgcttttgtgctatgatgtcagagttgagtagtcatgacagagactgcatggcctgcaaagcctaaaatatttactgtcagattctttacagaaaaggttttctgacccctgatttagaggctctttcactccatgtctggtgcctgggctgggttgagtcaaagcctgggttcagcagagatgtcaactagagcacctgtatatggacttgctgtaatgcttgggtgtcctcacaatatggctgcctcagggtagtcaggcttcttacatggtagctcatggctcaaagagcaactgaattagcaaacaggtggaactttgacagtgtcacttctgctgcactttactgatggaagyagtcacaagcctgctcagattcaacgggaagaaacacggacctcaactcttagtgggaagcgtccacggatttgtagtcatgttttaaagagcccgtggcaggcaataaga

SEQ ID NO: 188869 - DNA, 423 bp, Homo sapiens
gaattctgtgtagtagctgttgggtcctgttgccctggcacatctgtgtttgataacctgagtttccgcttctttcctcctcccaacagaagccgaatgttaccaacaccaggctgtccctcgataatacatagaaaggaaaaagtggaggagaagggaacaatgctgaaacacagggctgggtctctggagcagggcttgtcagcccagcactagtcacatgttggtcaagataaccgtttgtggggggccgtcctgtgcgttgtagggtacttagcagcacccctggcctccrcccactgcaagctggcagcagctctcagttacaaccaaacatgtctgcaggccttaccagatgtccctttagtagcaaaagagcccccagatgagaactgctccagacgaactggcaacaaagcagtt

SEQ ID NO: 188870 - DNA, 321 bp, Homo sapiens
agatcttctggacttagtatgaaaagggatttttttttgtcaggtacctcactagttatttttaaaataggattgcatgttgaaatgataatcttttggatatattgggttaartaaatgtattattaaagttaatttcacttaaaaatgtttaatgtagctactagaaattttaaaattaagcatgttgctcaccttatgtttctattggacggctctctctagacacaaaggctgccaagagggacctcactctggcttcagggagaagagaggaattagcaaggccaagcagaggctcctgagggcagggccaagggc

SEQ ID NO: 188871 - DNA, 414 bp, Homo sapiens
cttagtatgaaaagggatttttttttgtcaggtacctcactagttatttttaaaataggattgcatgttgaaatgataatcttttggatatattgggttaaataaatktattattaaagttaatttcacttaaaaatgtttaatgtagctactagaaattttaaaattaagcatgttgctcaccttatgtttctattggacggctctctctagacacaaaggctgccaagagggacctcactctggcttcagggagaagagaggaattagcaaggccaagcagaggctcctgagggcagggccaagggcggcttggtggggtggggatgggatgcacaaagataactccaacccttaggaaggtgtttcctagagcaggctgtgacctgtcagtttatatactgaggcttagga

SEQ ID NO: 188872 - DNA, 419 bp, Homo sapiens
ctggacttagtatgaaaagggatttttttttgtcaggtacctcactagttatttttaaaataggattgcatgttgaaatgataatcttttggatatattgggttaaataaatgtattattaaagttaatttcacttaaaaatgttyaatgtagctactagaaattttaaaattaagcatgttgctcaccttatgtttctattggacggctctctctagacacaaaggctgccaagagggacctcactctggcttcagggagaagagaggaattagcaaggccaagcagaggctcctgagggcagggccaagggcggcttggtggggtggggatgggatgcacaaagataactccaacccttaggaaggtgtttcctagagcaggctgtgacctgtcagtttatatactgaggcttagga

SEQ ID NO: 188873 - DNA, 321 bp, Homo sapiens
agatcttctggacttagtatgaaaagggatttttttttgtcaggtacctcactagttatttttaaaataggattgcatgttgaaatgataatcttttggatatattgggttaaataaatgtattattaaagttaatttcacttaaaaatgtttaatgtagctactagaaatkttaaaattaagcatgttgctcaccttatgtttctattggacggctctctctagacacaaaggctgccaagagggacctcactctggcttcagggagaagagaggaattagcaaggccaagcagaggctcctgagggcagggccaagggc

SEQ ID NO: 188874 - DNA, 365 bp, Homo sapiens
tcactagttatttttaaaataggattgcatgttgaaatgataatcttttggatatattgggttaaataaatgtattattaaagttaatttcacttaaaaatgtttaatgtagctactagaaattttaaaattaagcatgttgctcaccttatgtttctattggacggctctctctagayacaaaggctgccaagagggacctcactctggcttcagggagaagagaggaattagcaaggccaagcagaggctcctgagggcagggccaagggcggcttggtggggtggggatgggatgcacaaagataactccaacccttaggaaggtgtttcctagagcaggctgtgacctgtcagtttatata

SEQ ID NO: 188875 - DNA, 419 bp, Homo sapiens
ctggacttagtatgaaaagggatttttttttgtcaggtacctcactagttatttttaaaataggattgcatgttgaaatgataatcttttggatatattgggttaaataaatgtattattaaagttaatttcacttaaaaatgtttaatgtagctactagaaattttaaaattaagcatgttgctcaccttatgtttctattggacggctctctctagacacaaaggctgccaagagggacctcactctrgcttcagggagaagagaggaattagcaaggccaagcagaggctcctgagggcagggccaagggcggcttggtggggtggggatgggatgcacaaagataactccaacccttaggaaggtgtttcctagagcaggctgtgacctgtcagtttatatactgaggcttagga

SEQ ID NO: 188876 - DNA, 363 bp, Homo sapiens
tcactagttatttttaaaataggattgcatgttgaaatgataatcttttggatatattgggttaaataaatgtattattaaagttaatttcacttaaaaatgtttaatgtagctactagaaattttaaaattaagcatgttgctcaccttatgtttctattggacggctctctctagacacaaaggctgccaagagggacctcactctggcttcagggagaagagaggaattagcaaggccaagcagargctcctgagggcagggccaagggcggcttggtggggtggggatgggatgcacaaagataactccaacccttaggaaggtgtttcctagagcaggctgtgacctgtcagtttata

SEQ ID NO: 188877 - DNA, 395 bp, Homo sapiens
aaaagggatttttttttgtcaggtacctcactagttatttttaaaataggattgcatgttgaaatgataatcttttggatatattgggttaaataaatgtattattaaagttaatttcacttaaaaatgtttaatgtagctactagaaattttaaaattaagcatgttgctcaccttatgtttctattggacggctctctctagacacaaaggctgccaagagggacctcactctggcttcagggagaagagaggaattagcaaggccaagcagaggctcctgagggcagggccaagggcggcttggtggggtggggatgggatgcacaragataactccaacccttaggaaggtgtttcctagagcaggctgtgacctgtcagtttatatactg

SEQ ID NO: 188878 - DNA, 365 bp, Homo sapiens
tcactagttatttttaaaataggattgcatgttgaaatgataatcttttggatatattgggttaaataaatgtattattaaagttaatttcacttaaaaatgtttaatgtagctactagaaattttaaaattaagcatgttgctcaccttatgtttctattggacggctctctctagacacaaaggctgccaagagggacctcactctggcttcagggagaagagaggaattagcaaggccaagcagaggctcctgagggcagggccaagggcggcttggtggggtggggatgggatgcacaaagataactccaacccttargaaggtgtttcctagagcaggctgtgacctgtcagtttatata

SEQ ID NO: 188879 - DNA, 211 bp, Homo sapiens
agatcatgtggctcctcagctcaaagcctcatctcagaggaaagctctggtcccttaraaatggcccaggtggtgacagacagactctaaggtgagcagactgttgctagatatctgggctcggaggactcgccactgctcaaaggcagtgaggattttcgcactagaagctggaggagagggatccttgttaggtaggagcagaaagctt

SEQ ID NO: 188880 - DNA, 211 bp, Homo sapiens
agatcatgtggctcctcagctcaaagcctcatctcagaggaaagctctggtcccttaaaaatggcccaggtggtgacagacagactctaaggtgagcagactgttgctagatatctgggctcggaggactcgccactgctcaaaggcagtgaggattttcgcactagaagctggaggasagggatccttgttaggtaggagcagaaagctt

SEQ ID NO: 188881 - DNA, 596 bp, Homo sapiens
ctgtttatgtggtgtatcacatttattgacttgtggatgttaaaccatscctgtatccctggtgtgaaacccacttgatcatgggggattatctttttgctatgctgttggatttggttaggtagtattttgttgaggatttttatatctatattcatcagggacattggtctgtagttttctttttttgttatgtccttccctagttttgatattagggtgatactggctttatggaattatttaaggaggattccctctttctctgtcttttggaataatttcagtagaattgttgagaattcttctttgaatgtctgatagaattcagttgtgaatccttctggtcctggacttttttttttgtttggcaatttttaaattaccatttgaatctcactgcttgttattggtctgttcagagtttctatttcttcctggtttaatctaggaaggttgcttatttcaggaatttatctgtctcctctagattttctagtttagcttgtaaaggtgttcatagtagcattgaatgattctttgtatttctattttatcggttgtagtatctcctgtttcatttctaattgagctta

SEQ ID NO: 188882 - DNA, 596 bp, Homo sapiens
ctgtttatgtggtgtatcacatttattgacttgtggatgttaaaccatccctgtatccctggtgtgaaacccacttgatcatgggggattatctttttgctatgctgttggatttggttaggtagtattttgttgaggatttttatatctatattcatcagggacattggtctgtagtttyctttttttgttatgtccttccctagttttgatattagggtgatactggctttatggaattatttaaggaggattccctctttctctgtcttttggaataatttcagtagaattgttgagaattcttctttgaatgtctgatagaattcagttgtgaatccttctggtcctggacttttttttttgtttggcaatttttaaattaccatttgaatctcactgcttgttattggtctgttcagagtttctatttcttcctggtttaatctaggaaggttgcttatttcaggaatttatctgtctcctctagattttctagtttagcttgtaaaggtgttcatagtagcattgaatgattctttgtatttctattttatcggttgtagtatctcctgtttcatttctaattgagctta

SEQ ID NO: 188883 - DNA, 596 bp, Homo sapiens
ctgtttatgtggtgtatcacatttattgacttgtggatgttaaaccatccctgtatccctggtgtgaaacccacttgatcatgggggattatctttttgctatgctgttggatttggttaggtagtattttgttgaggatttttatatctatattcatcagggacattggtctgtagttttctttttttgttatgtccttycctagttttgatattagggtgatactggctttatggaattatttaaggaggattccctctttctctgtcttttggaataatttcagtagaattgttgagaattcttctttgaatgtctgatagaattcagttgtgaatccttctggtcctggacttttttttttgtttggcaatttttaaattaccatttgaatctcactgcttgttattggtctgttcagagtttctatttcttcctggtttaatctaggaaggttgcttatttcaggaatttatctgtctcctctagattttctagtttagcttgtaaaggtgttcatagtagcattgaatgattctttgtatttctattttatcggttgtagtatctcctgtttcatttctaattgagctta

SEQ ID NO: 188884 - DNA, 596 bp, Homo sapiens
ctgtttatgtggtgtatcacatttattgacttgtggatgttaaaccatccctgtatccctggtgtgaaacccacttgatcatgggggattatctttttgctatgctgttggatttggttaggtagtattttgttgaggatttttatatctatattcatcagggacattggtctgtagttttctttttttgttatgtccttccctagttttgatattagggtgatactggctttatggaattatttaaggaggattccctctttctctgtcttttggaataatttcagtagaattgttgagaattcttctttgaatgtctgatagaattcagttgtgaatccttctggtcctggacttttttttttgtttggcaatttttaaattaccatttsaatctcactgcttgttattggtctgttcagagtttctatttcttcctggtttaatctaggaaggttgcttatttcaggaatttatctgtctcctctagattttctagtttagcttgtaaaggtgttcatagtagcattgaatgattctttgtatttctattttatcggttgtagtatctcctgtttcatttctaattgagctta

SEQ ID NO: 188885 - DNA, 618 bp, Homo sapiens
ttcaggtctcacccctctctgcttgccttggcttctgtgctcatatctgcacttcccgtttttgccctaccccacaatgctgtccaggaaaattcatgctcagtcgaaattattacaaagttctgctggaagtctcctccttgtgacccttccccagtyccactctctgccctccctgaggacccctgtgagagaaagtcagaaatggcttccctgggcttccctgggggctgggagtacttacagagctcttctcaccgctgcttctacttttatatttcactcggctctctaaatttatttcacctctacgtaaggttaaatccttctcctgtgatctggattttcagtttccccagtaaggatgtgtatttggaggcagaccttccccctctcacactttaggcactcacagttttttggctgtctcatgaagtttgcagcggcgagctgcttctttcaaagggtctgtgaattcctttgggtttcctggtatgttttgcggtagttcttggagcaaaagttcataatgtgagtcttcacacactgttctgtctccatctgagtgggagctgcaagttagacctgcctcctatttgccatttttttctgagtccc

SEQ ID NO: 188886 - DNA, 618 bp, Homo sapiens
ttcaggtctcacccctctctgcttgccttggcttctgtgctcatatctgcacttcccgtttttgccctaccccacaatgctgtccaggaaaattcatgctcagtcgaaattattacaaagttctgctggaagtctcctccttgtgacccttccccagtcccactctctgccytccctgaggacccctgtgagagaaagtcagaaatggcttccctgggcttccctgggggctgggagtacttacagagctcttctcaccgctgcttctacttttatatttcactcggctctctaaatttatttcacctctacgtaaggttaaatccttctcctgtgatctggattttcagtttccccagtaaggatgtgtatttggaggcagaccttccccctctcacactttaggcactcacagttttttggctgtctcatgaagtttgcagcggcgagctgcttctttcaaagggtctgtgaattcctttgggtttcctggtatgttttgcggtagttcttggagcaaaagttcataatgtgagtcttcacacactgttctgtctccatctgagtgggagctgcaagttagacctgcctcctatttgccatttttttctgagtccc

SEQ ID NO: 188887 - DNA, 618 bp, Homo sapiens
ttcaggtctcacccctctctgcttgccttggcttctgtgctcatatctgcacttcccgtttttgccctaccccacaatgctgtccaggaaaattcatgctcagtcgaaattattacaaagttctgctggaagtctcctccttgtgacccttccccagtcccactctctgccctscctgaggacccctgtgagagaaagtcagaaatggcttccctgggcttccctgggggctgggagtacttacagagctcttctcaccgctgcttctacttttatatttcactcggctctctaaatttatttcacctctacgtaaggttaaatccttctcctgtgatctggattttcagtttccccagtaaggatgtgtatttggaggcagaccttccccctctcacactttaggcactcacagttttttggctgtctcatgaagtttgcagcggcgagctgcttctttcaaagggtctgtgaattcctttgggtttcctggtatgttttgcggtagttcttggagcaaaagttcataatgtgagtcttcacacactgttctgtctccatctgagtgggagctgcaagttagacctgcctcctatttgccatttttttctgagtccc

SEQ ID NO: 188888 - DNA, 480 bp, Homo sapiens
ccatccctaggaaggaggaacttggagaaattgattcagcctcattctgaagaagtgggaagcacttcctgggttcagatgccatttccctcactctccacttttgtccttgacaagtcagtgtccttctcctagatgagactgtaattttcctaattaggaaataggggtgattgttctcaccatggggcatcgggtgataactcagatctctttgatatccttaagagaagtgcaaataatcttaaaattcaacagaagaggttttagttgggcttaaagaagcytttgccaactagaaatttgtgagacagcattacagatcacagagggatggtggatttgtgctgctggttgcttttcagggtatgctcaacattcctgtgtctggaatggctaaatgagaatagagcacatgtagaaaggtggcctggcagtgtagaagaaaccctgagcctgcattctagtctgtcactgtca

SEQ ID NO: 188889 - DNA, 580 bp, Homo sapiens
atttatgggtaccatgtgcccagtgagctggcccaccccccaccaccacgtggtgccagacttgaatgaccttatgagaaggaacttgtgctctgcacatatattggtttatctgcattcstgatgtgtttttattttgcttttctcccatttatcttcctagcaaactttctttggtaaagaatgaataaaggaagcttatccacagctgagctcacggttaggggaaacagcacacaggaggatgctttggtagtgaccagcattccagctaaagaatggaggttgggggatgaaacaagggcacacaaaaactcaaactcttttttctgaattttctttgtttgcctagttgatttgctgtccaagaattgggtgcttggacagcaaattagagacgaatacgataagtgaaacagcctgcagcataattatccatgcggattgttgaaaatgcagatttctgagccctatattgtagcaggacaagccgcagacaaaattcctcagacaccgagttaaagaaggaaggggtttatttggctgggggcatcggcaagactcctgtctcaagagctga

SEQ ID NO: 188890 - DNA, 580 bp, Homo sapiens
atttatgggtaccatgtgcccagtgagctggcccaccccccaccaccacgtggtgccagacttgaatgaccttatgagaaggaacttgtgctctgcacatatattggtttatctgcattcctgatgtgtttttattttgcttttctcccatttatcttcctagcaaactttctttggtaaagaatgaataaaggaagcttatccacagctgagctcacggttaggggaaacagcacacaggaggatgctttggtagtgaccagcattccagctaaagaatggaggttgggggatgaaacaagggcacacaaaaactcaaactcttttttctgaattttctttgtttgcctagttgatttgctgtccaagaattgggtgcttggacagcaaattagagaygaatacgataagtgaaacagcctgcagcataattatccatgcggattgttgaaaatgcagatttctgagccctatattgtagcaggacaagccgcagacaaaattcctcagacaccgagttaaagaaggaaggggtttatttggctgggggcatcggcaagactcctgtctcaagagctga

SEQ ID NO: 188891 - DNA, 580 bp, Homo sapiens
atttatgggtaccatgtgcccagtgagctggcccaccccccaccaccacgtggtgccagacttgaatgaccttatgagaaggaacttgtgctctgcacatatattggtttatctgcattcctgatgtgtttttattttgcttttctcccatttatcttcctagcaaactttctttggtaaagaatgaataaaggaagcttatccacagctgagctcacggttaggggaaacagcacacaggaggatgctttggtagtgaccagcattccagctaaagaatggaggttgggggatgaaacaagggcacacaaaaactcaaactcttttttctgaattttctttgtttgcctagttgatttgctgtccaagaattgggtgcttggacagcaaattagagacgaatacgataagtgaaacagcctgcagcataattatccatgsggattgttgaaaatgcagatttctgagccctatattgtagcaggacaagccgcagacaaaattcctcagacaccgagttaaagaaggaaggggtttatttggctgggggcatcggcaagactcctgtctcaagagctga

SEQ ID NO: 188892 - DNA, 650 bp, Homo sapiens
aagtgttgggattaccggcatgaatcaccatgcctggctggtaaatatatcttgaagggtgattgtagaccctggcttcattctctttgttgatagttttgcatgcatttgtccatcctctactattacaagatatgcaatttcactttgcaatggatttgcattgcttttgcattgtatttatagttggcagtcagcagaatctgaccaatcaagatggcagagatgttgaagtggtgggcaggggtagatgctgctgtcatctaagggccatgtgtgggcagggactgacatctggaagagtccatttatcaacaagtggtttcttgttctgccaatttatccttccgtatgtaatcccataatttcaaggattcatacagcaaatgtttatgtaatgaagaacctatggaaaatacrtataattttttttttctgtatgtcagaaattggttattatgtaagtgagataaaaatggttcctgctcattggcccctgtgttgtttgtttcttcacagcaggctgggacctgttagctcaaaagcctgctggcaccaaattcatatttttacacatccaattgttttaaacatagcccaaataaacagatttttagccatttggagcctgcctgttttgcataccctgc

SEQ ID NO: 188893 - DNA, 379 bp, Homo sapiens
tttcagcatttgtgaacaagttctttttctactgtgaaatgggtaccggggaaaggtgagccacagtctcagtctgtggccaaaaccatctgagactcactggtctggactgagccatgctccyctttgcatttccaagtgcttcatgtgtagtacctgaaactcaagaaatcctctttaaacgtcggaggactgggtggatgatatggggtataaaaatatttcacagtcttgatggcgtgagttctaattgcacgcttccttctccaacccccgcccatggcagacagtgaaagacttgacccacccactggaaagctgggaaggtctcaagaccaccctcacttctgatgccatctgcaagtctggagggtcccca

SEQ ID NO: 188894 - DNA, 428 bp, Homo sapiens
tatttattttaatatgagtcagaaagaaatataaccagcacaacaaaccagtaatacctatacctcaggacaaggctaaacttggcattaagtttaaaaacaagtgggtcaatttaaagataaatattgactgggcacagtggctcacatctgtaatcccagaactttgggaagctgaggcagaaggattgcttaatggcaggagtttgagactagcctgggcaacataacaagaccctgtttctmcaaaaaaaaaaaaaaaaaaaaaggaaaccttagccagacctggtggtatgcacctttggtcccagcttggattcagtccaaagactgaatctgaccaacagatatgttttgttttgcttaagaagtgtctgaaaaaataggggccaacataaaaaaaaatggactattgctcataaatagct

SEQ ID NO: 188895 - DNA, 605 bp, Homo sapiens
aacatacctaaaaatacatgagacatctatgacaaagccacaaccaacatcatactaaatggatgaaagttgaaagcatttcctttgagaaatggaacaagacaaggatgcctactctcaccactcctattcaacatactatgggaagttttagccagagcaatcagacaaaacagagaaatgaaaggcaaccaaataggaaaataagaaatcaaactctctctcttcgtggatgatatgattctatacctggaaaaccctaaagagtctgccaaaaggctcctggaactggtaaacaatttcaggaaagtttcagaataaaaaatcaatgtacaaaaattagtagcatttctatacaccaataatgtgcaagstgagagccaaatcaagaatgcaatcccatttacaatagccacacatacaaaaaaaaacttaggaatatgtctaaccaatgaggtgaaagatctctacaatgagaactacaaaacaccattgaaagatacatatacaaatgcaaaagcattccatgctcaaggattggaagaataaatatcattaaaatggccatagagcctaaagcaatctacagatccaatgctatgcct

SEQ ID NO: 188896 - DNA, 605 bp, Homo sapiens
aacatacctaaaaatacatgagacatctatgacaaagccacaaccaacatcatactaaatggatgaaagttgaaagcatttcctttgagaaatggaacaagacaaggatgcctactctcaccactcctattcaacatactatgggaagttttagccagagcaatcagacaaaacagagaaatgaaaggcaaccaaataggaaaataagaaatcaaactctctctcttcgtggatgatatgattctatacctggaaaaccctaaagagtctgccaaaaggctcctggaactggtaaacaatttcaggaaagtttcagaataaaaaatcaatgtacaaaaattagtagcatttctatacaccaataatgtgcaagctgagagccaaatcaagaatgcaatcccatttacaatagccacacatacaaaaaaaaacttaggaataygtctaaccaatgaggtgaaagatctctacaatgagaactacaaaacaccattgaaagatacatatacaaatgcaaaagcattccatgctcaaggattggaagaataaatatcattaaaatggccatagagcctaaagcaatctacagatccaatgctatgcct

SEQ ID NO: 188897 - DNA, 578 bp, Homo sapiens
atttgagctgcttggctgacaaactgggggccgtgttaaacagaaatgcagctcaggagatctaacggcaggggataagtgcttcagaaaccatcatgcatttattcttcacagcaaccttatgaggtaggcaatttgagaacaggctcagagaagttatgcaattcctatccaaggttacccagttggtaagaggtggcatcgggattcaaactcctatcttttgattaaatccagtgttccttctaatacacaatgctgtcagaaataatgacttggtacacatctttctcctcyagtagacagcacgcttttggggagatcagactgtcttgattgtctttgaatgtctagtatttaccataacaccttttgctcaataaccatttgccatttaactgagagccatttaattagctggtatctatgctacagggctggctgaaatctccaaggtacaaactgcatatagcaaaaagaaggctgtcatgaacagaaccatggagcatcctggtctcaaggggacagggaaaacacatgagaggaaagtagtcccagagatgaaacagaaccagaat

SEQ ID NO: 188898 - DNA, 271 bp, Homo sapiens
tcatggctcctcccccaggacagatgatgagcagaaacagagggtgtctttctgtagatcacacaacagagggatacctgagtggaggacagacagaggtttctgagccaccgcctaaggctcctactggcagcaaaccaagaggtgtggcargtgcagggcggtgcatgagtgtttgcaggtgcagggcggtgcatgagagagtgtttgcaggtgcagggcggtgcataagacagtgtgcgtaggtgcagggtggtgcatgtgtgcttga

SEQ ID NO: 188899 - DNA, 509 bp, Homo sapiens
gagaattgagtcggttggggaagggggttgataagaaaggtggggagcaaggatcctctttctgtgggttcctaagaccatgccaccagctgacctgtcctctcggtctggatctgacccggctggaatgactgcaaacctcctccccctccacgcccacgcatgctagcaccctctcccggaacacagggcttcctcccgcgcccacccagccagagcccgggaggtgggctcccatttctcagaccgccacctcccgctttgtctccaaactgtcgaggaatgaggttgcccggtgacctgttttcacaccccctgcaacgctgctctctcacgggttggggggcaggggktgcgccaggcagggatgagacacactctgccccgttggggattgccttccttggcgggactgagcgcgtctgctactgacaagagccaggctccctgccctcagatcattctatacctcttccttccttctgaatcgagttccacctttgccacaa

SEQ ID NO: 188900 - DNA, 352 bp, Homo sapiens
caagaagtttactgaaatctgagatggtgaggataaggaaatgaggtgatgtgaaagttggaaaattsacattccgggaattgttcctatgtattactgtttgagaaaactagagtcagggcaggctgtactggaattgaaaagtcttaagagaatgtttggattaagatacactgttcatctccctcgaagagggaacaaaaagtatatcaagactatgacagaagataggttagactttcacactacaaggattggcctgtggaaataactagtgaaggagatggtggtttgtgtattttacattccacacctgaattattaaggacatgccaccctcagcagtgaattc

SEQ ID NO: 188901 - DNA, 577 bp, Homo sapiens
gggaatacctggacaggttatcttaattttgacatatgaagagaagaaaaaatatttatacatctttacttccacaatcaataamatctttctgaaatgctggggctaggttagcaacacggaaataggcatggagtctcttaaaactgaggccctaaatcccaaaaatcacaaaaaatttgttgtacgtagacatgtttctagagacaaggttcaattaactattctgaaacaacagaaaattttaatgttggccatttattttttacattaacactgctgatgagtactttaaacctagattagaattggccatataaaataggtaagtataataaaaagtctcagtgccatttaataatgtatataacccaatgaaatgataactatcaccatctggaaaatgtaaactctttcagggagaagttaagattcaaggtgtatacactgaaatcaacagaacactgttgaaagaaattttaaaagatgtaaataaatgaaaacacatgttcatgaatcagaagacaatgctgttaagatggcaatactccactaatggatctacagattcaatgta

SEQ ID NO: 188902 - DNA, 549 bp, Homo sapiens
tcatttctcttaggtatatacctgagtggtaaaaacattttttaaaagatacccttattttgaaattgctgtcttcattcgtcctgcttgtttttgtgttattaccaattatcgagagcctttgtactatacatagaacgctcaccccctggatatttatatggcttatacctctatctccttcaaatctgtgttcaaatgtcacctttccaatgatgccgaccctaaacatcttgttttaaattgtaaccaccctctcctcattctacttaaattgtaaccaccctcctcctcattctaccctattccctcttactcytgtttttcccccatagcactttccacattctaatgtgcaatttattattcacctaattctactggaatatccagagagaggtagttttgtctgttcagctcactattgtttctacagaggccacaagagtgcctgatacaaaacaggtgctcaaaaataagtatttgagttaaggaataaaattcagcaaatacatgggcaattctgatatctacttcaaacctgatgct

SEQ ID NO: 188903 - DNA, 583 bp, Homo sapiens
tcatttctcttaggtatatacctgagtggtaaaaacattttttaaaagatacccttattttgaaattgctgtcttcattcgtcctgcttgtttttgtgttattaccaattatcgagagcctttgtactatacatagaacgctcaccccctggatatttatatggcttatacctctatctccttcaaatctgtgttcaaatgtcacctttccaatgatgccgaccctaaacatcttgttttaaattgtaaccaccctctcctcattctacttaaattgtaaccaccctcctcctcattctaccctattccctcttactcttgtttttcccccatagcactttccacattctaatgtgcaatttattattcacctaattctactggaatatccagagagaggtagttttgtctgttcagctcactattgtttctacagaggccacaagagtgcctgatacaaaacaggtgctcaaaaataagtatttgagttaaggaataaaattcagcaaatacatgggcaattctgatatctacttcaaacctgatrctctaacagggactcccaaatagggttttgtcaaac

SEQ ID NO: 188904 - DNA, 590 bp, Homo sapiens
ggttaattttttatatttttagtagacacgtggtttcaccatattggccaggctggtcttgaactcctgacctcaggtgagccacctgcctcagcctcccaaagtgctgggactgcasgcacgagccattgcacccagactgcacatcttaaaaaaaaaaaagaaaaaaagaaaaaagtcatatgtggcccagtatggtggcatgtgcctctagtcccagctattcaggaggctgaggcaagaggattgcttgaggccaggacttcaagggtgtattgcatgatgatcacatctgtgcataatcactgcactccagcctgggcaacacagtgagaccccattgctaattttaaaaaataagaaaaaggaaaaaaagccatatgtggccattggctaccatattagacagtacagtcctaaatggatgtcactctgctggacaggtgtctgagaaagccctctggctgggcgtgcagccaggcaaagtggcaggaatgagtcagatctgctcccggcctctgtcctccacgagagcagcctcagaacatttgatgccaaattggctccctctgctagggccttcctccccc

SEQ ID NO: 188905 - DNA, 590 bp, Homo sapiens
ggttaattttttatatttttagtagacacgtggtttcaccatattggccaggctggtcttgaactcctgacctcaggtgagccacctgcctcagcctcccaaagtgctgggactgcaggcacgagccattgcacccagactgcacatcttaaaaaaaaaaaagaaaaaaagaaaaaagtcatatgtggcccagtatggtggcatgtgcctctagtcccagctattcaggaggctgaggcaagaggattgcttgaggccaggacttcaagggtgtrttgcatgatgatcacatctgtgcataatcactgcactccagcctgggcaacacagtgagaccccattgctaattttaaaaaataagaaaaaggaaaaaaagccatatgtggccattggctaccatattagacagtacagtcctaaatggatgtcactctgctggacaggtgtctgagaaagccctctggctgggcgtgcagccaggcaaagtggcaggaatgagtcagatctgctcccggcctctgtcctccacgagagcagcctcagaacatttgatgccaaattggctccctctgctagggccttcctccccc

SEQ ID NO: 188906 - DNA, 590 bp, Homo sapiens
ggttaattttttatatttttagtagacacgtggtttcaccatattggccaggctggtcttgaactcctgacctcaggtgagccacctgcctcagcctcccaaagtgctgggactgcaggcacgagccattgcacccagactgcacatcttaaaaaaaaaaaagaaaaaaagaaaaaagtcatatgtggcccagtatggtggcatgtgcctctagtcccagctattcaggaggctgaggcaagaggattgcttgaggccaggacttcaagggtgtattgcatgatgatcacatctgtgcataatcactgcactccagcctgggcaacacagtgagaccccattgctaattttaaaaaataagaaaaaggaaaaaaagccatatgtggccattggmtaccatattagacagtacagtcctaaatggatgtcactctgctggacaggtgtctgagaaagccctctggctgggcgtgcagccaggcaaagtggcaggaatgagtcagatctgctcccggcctctgtcctccacgagagcagcctcagaacatttgatgccaaattggctccctctgctagggccttcctccccc

SEQ ID NO: 188907 - DNA, 471 bp, Homo sapiens
tgaattcagaagttcaatatcagcctgggcaacatagtgagaccccatctctacaaaataaaaaaaaaaaattgaaaattagccaggctcagtggtgtgtgcctgtagtcccagcacctcaggaggctaaggcagggggatcacttaggcctagaagtttgaggctgcagtgacccatgattgtgccactgtactctagctggggtgacagagtgagtgagactctagctcaaaaaaaaaaaaagcacttgttaatgcattgatgaaaatggcagtgtgttaccacagattcttagttatagcctaagtgacaaaaactcaggcatataagcagaagaacatcctagaccacatttattgtacactgaatatttcaratttcctctgatctgtagtttactgagggtaatgacgtcctataactatcactcattaaagttggcttttagagataaagggactgttagggta

SEQ ID NO: 188908 - DNA, 590 bp, Homo sapiens
gtgaccatcagcaccttggtggtggtgctcatgaacaattcagtaacactgcttgaggtgggtttgggaggagggtagcaggcacaggagagatgcaggaagaaagggaatcagggcctttggcttcctagctccaggccacctcataaacatataatagccaatctcaaacagtgcacaccacgcagtgcaggctgtgtgtccctggcagcctctkagggctcctccttcctaatctgacctgagctaacttgccctcttattgatccctgacaaagtcatttcctcctcagaatccacatgtgctgctgatctgtttatcatcccttctagaagattttgtacggaataagaagcaacctttcttaaaataggagatttaattctagccaaaagattttattactaactttctggtacaaggcaaataaaccaagatttgaaaataattttcctaccatttaaagatgacccctacttagcatgtggtatttgttcttccactttcccttttcaacagaatttgtgtgtagcatgatgttcactgctccccatgctcacactgactccagcactggagcagcctgtca

SEQ ID NO: 188909 - DNA, 588 bp, Homo sapiens
aagagatatattaacaattaataagctggccaaacataagacagctgtagagataatatgcaaatgaccatatgagaaggatactgcaggtgttgtttaagcactggaaagaaagtttgttcatgtggcagagaagaactttcaacatgctatcaccattgagtctacccctttccctctacttgtatgtacayactcaactttctttcctgtttcaatagatgaagtatctgtgctgccaagatcaatccttctatttatgcatggggttccatttccttttacctgagtcaagctttaccaccaccataaaaacacgttgtaatttctcaccttatagatgtaatctagtcccttccttgtctccatatctgctttcattcccattagcaactctccttggaagagctctcttcattttccattttctatttcctctcttcccattctcatttaaacccattgaaatgacacttctgaacactcccccactgaattgctctgtcaaggtcactaatcctatggtcaatcctcagttctcaatctatttaatctatcagcagcatgcgacaccaatcacttactccc

SEQ ID NO: 188910 - DNA, 588 bp, Homo sapiens
aagagatatattaacaattaataagctggccaaacataagacagctgtagagataatatgcaaatgaccatatgagaaggatactgcaggtgttgtttaagcactggaaagaaagtttgttcatgtggcagagaagaactttcaacatgctatcaccattgagtctacccctttccctctacttgtatgtacatactcaactttctttcctgtttcaatagatgaagtatctgtgctgccaagatcaatccttctatttatgcatggggttccatttccttttacctgagtcaagctttaccaccaccataaaaacacgttgtaatttctcaccttatagatgtaatctagtcccttccttgtctccatatctgctttcattcccattagcaactctccttggaagagctctcttcattttccattttctatttcctctcttcccattctcatttaaacccattgaaatgacacttctgaacactcccccactgaaktgctctgtcaaggtcactaatcctatggtcaatcctcagttctcaatctatttaatctatcagcagcatgcgacaccaatcacttactccc

SEQ ID NO: 188911 - DNA, 557 bp, Homo sapiens
attttttattatacatgaatttttaatgaatcaacattcagaaaaggggttccatggggctgaagggaatataatgtgtcagattatatggaatgagtgagggataatgatggtaataatcatagctgaaatttaacctgggtttttcttctaaagagctcaaggcatttcacatatatggagaattatttttcaccctgtaggaagagtattttcaggaggatgctgacccatcaggaggccatagagaaatagtttcattatcccttggtgccaggctgtgtaagaagaatatttttccttccagggcctgagatgaagtgaaacatacatagtcattttgatcatatagccgtagagtccctgkagtcccatttcagggtctgcaagggatttaagtaaaaacaccaagagtatataaatatgaaaattctgctaagacattttctccttcttacagaattctgaaggttcacttcccttagccctaataatctgtcctcctaatgggcttttttgaggtgatactgaactaagaacatacattctagccattt

SEQ ID NO: 188912 - DNA, 630 bp, Homo sapiens
tggctattataaggttttgctaaggataattcacattcttctgttaatgtaataattaatttgttaacatgagaagttaaagtaagttgaggagaattcatattctcctattggattcatttctgatttctcaccagtcatggcagtgggagactgagagcctgccatcttgatggagagaccttgactcctaagcttggtgccagaaattgcataatttcccrttttccacccttcaaaatgccttcattgcaaatatcaaccaaactttcttctatatggatctattttccattcatctatggcaggaaatgacctatttcctactgtcctgattttgccttattttaataataacataacatggcagggataccatctctcagaatccgtagattggctttctggggttatcttacagtcatgccagtgggagactgagagtctgccatcttgatgagagggaacttgactcctaagcttgactggaattgggcttgcaattctcttctgggcttgttgcttcagaactttggaaagcataactttgactctcagaaggtgaattgctctatgatctcagatttagttgggtgtaattgttgaaggtcatcataatatattccaata

SEQ ID NO: 188913 - DNA, 630 bp, Homo sapiens
tggctattataaggttttgctaaggataattcacattcttctgttaatgtaataattaatttgttaacatgagaagttaaagtaagttgaggagaattcatattctcctattggattcatttctgatttctcaccagtcatggcagtgggagactgagagcctgccatcttgatggagagaccttgactcctaagcttggtgccagaaattgcataatttcccattttccacccttcaaaatgccttcattgcaaatatcaaccaaactttcttctatatggatctattttccattcatctatggcaggaaatgacctatttcctactgtcctgattttgccttattttaataataacataacatggcagggataccatctctcagaatccgtagattggctttctggggttatcttacagtcatgccagtgggagactgagagtctgccatcttgatgagagrgaacttgactcctaagcttgactggaattgggcttgcaattctcttctgggcttgttgcttcagaactttggaaagcataactttgactctcagaaggtgaattgctctatgatctcagatttagttgggtgtaattgttgaaggtcatcataatatattccaata

SEQ ID NO: 188914 - DNA, 509 bp, Homo sapiens
gttggtgttattaattaaaagtagaaaataggcaattagaataaacaaacatggrtgtaatagctgacggtaaaaaagacaaaagatgtattaattataaaaacataaaagcaaaggtttgaggtaccatataatgaagggacaatacacagtggtccgcattaaaattaatcactacctgggtacttcaatcgggcatgaattgattaattagtatttataataccagagtaatactacactaattgtaatacaagtgtaacgtttgtaatattgacccaaattcatcagtaaaatatcccattatattcagtctattctctacaaaagcatggaagaatggaatacattcagaaaacttttcagccaaagaacttgaaaatcatttaaaagagtcttgtgctgcacatttcagcctctgttatttgtaacatgttttttgcagggctttgatgtttcaagcaatgctgggtcaacccaaccactcagcacattcactggacctggtc

SEQ ID NO: 188915 - DNA, 560 bp, Homo sapiens
actctatcacattggggataaggtttcaacatatgaactttggggggatataaacattcagacagtagtaagcagtaaaaaatttaaatgccataaaagaataagatatgaagagattccaagattcacttttttttgatcttcttagtktgaagtacgatgcttcatattagaattttgagaaagaatagaaggaagaatttcccacattgtaaagagagcacagatattaaatatggggcaaatattgactaaatgagtacattatatagctttaagccctattgacttgagtgttaatagaataagggaaaaaaccatttgagattctgtagctcgtggagttgacttgagtgaacccatgcaaggtcactttgaaaaatttctaggctcactttcaaagtaaaaaagaggagctggcaatgttgagcattcactttgcatccctgctctgacatttgtcattttcaaagatgcaaagtaatttggggggctgtaaatatcatcaaatagtaggccattgttgcctttggaaataattgtaacacaaccctccctgg

SEQ ID NO: 188916 - DNA, 594 bp, Homo sapiens
tctttgcatattatggtgtttatttcatcctgctggcttctctgtgctttcacaaattacctatattacataacatttttgcaaatatttcctgtgtcaatatattcttgrataaattaattcctagacaaagagttacaaaaccaggatcacatgcctatcacaagcctatatgcttcttcctttttaatgcattctacacaaatgcagtaccttctacttagtcatatatgtttcataaaatttataggaggccattggtttggattgagctcctacactaggcccaacaaaccaaatcaaaatggagtcactcatgctatcaccaaggtgaaactaagttgtttatatgaccttcccagaaatgagaagaatgaatgataatagctaaatccccaaacaagccagttttagctagcatgataaggaagtcccctgtgttttacctttacagggaaagtaactttgaaacaatcaatctgcttttgttttctgtttcttctttcctcagccattttctatgtataaaaccaatctgctcagtttatcagaatactcattctgtttttgtatttatattctattttacagaat

SEQ ID NO: 188917 - DNA, 519 bp, Homo sapiens
gaattcactcacctctgaaggagggcattaatctattcatgaaggatccaccctcataatccaaactcctcccactaggtcctacctcctaacattgccatattgcggatcaaatgtcaacatgatatttggaggggacaaacatccaaaccatagcagtctgtaaagacaacttctctcctttagactgtcctagtgctgtggtaaaagagaaggtaattttggaccctggctgccttgatttgaacaccacttctttccataaaatctagtgaccctaggcaaataacttagtctcactgtacttcaactctcttattggtaaaatgggaaaaataattaataatggctttgttaggattaaattagttagtgtatacaaaaataatgtgacacatattaytcaagtgtatgctgttaccactatactatatggtattttccactatatgctattttctccccaattctaaccctcatttcccagaaagaaaaaaatacttaaagggaaaattgttt

SEQ ID NO: 188918 - DNA, 509 bp, Homo sapiens
ccaaggcactgagtccacgtagttattatcctgaaactctagtttattcattgtttattcaaatgagttacgaaatcacacaattaggagaaagacccacctttaaaaaaaaaaaaagaactcagaatattgyacttctataaccatacattctttcttagaagtgtgtgtttattcactctcccatcctgaaacatatgacatcctattatttaaacactggccaaactacagcaaaatgaatagaaactaaaatatttcttaaatatttaaagttcagctactcaaaatcttgacgctctggtctatccaagtcctactgattgctagtggcaatttcttcagggtgttctttctcctgtttatttttgccaattttgtcaaagatcagttggttgcaggttatatggttttatttctggattctctattctgtttccattaatttatgtgtctatttttaccccagtagcaggctgttttggcatgtaatttagagttgagtaaca

SEQ ID NO: 188919 - DNA, 449 bp, Homo sapiens
taaagcagactgatggttgaccctcaggcatcagagtaagaaatcttatcatcagattattttctagtttgtaaccatgtaacagggcacctgtatctcttgcttacacaattgcttctacatttcacatgggataataagagtaaattaacaatccttttgaagttgtgtatagcaaattgggaaattttctttcctgatcatacagttcaacaaatagaagatgaaattgttgaggggagagaaggtttgggagttcttcagagcatactttttaaactatataagcctgatttgagtttctcattcataaaatggaaatactagtaggagtttcctgacggatttttgtaaggttaagtgagatgatatgttgcttaattcmgtgcctggctggcacaacaatatgtgttttagcttaatccaacagatatttattgagcatatac

SEQ ID NO: 188920 - DNA, 472 bp, Homo sapiens
gtccaaatcctccacatcttagaagatttcrcactaatgccatctctttcttgcagttgttccaaagcaccctgccatctttggctgtggtctcataagcctgaattatttacatcactcatctctcattcagttggaatgttactttgctttctttcttttatttttttctttttttattttctgcctttttatttttggaagggtggtggtatgtgtgacaaaccttgactcccactcatctcgcacattcaatggcaattgtttatgtttttaattcattgacagtacaagtattctttttagcatgtctttcattttccaggcaacccacttgtccccaggaataaaacactttaaaagaaaggcgtggtccttctttcatgaagtttatgggtgcagagggagatagacggatgtcaatgaagtaatcattccatgtttacataagtataatttgcaaaaagaacat

SEQ ID NO: 188921 - DNA, 477 bp, Homo sapiens
attgcttgtccaaatcctccacatcttagaagatttcgcactaatgccatctctttcttgcagttgttccaaagcaccctgccatctttggctgtrgtctcataagcctgaattatttacatcactcatctctcattcagttggaatgttactttgctttctttcttttatttttttctttttttattttctgcctttttatttttggaagggtggtggtatgtgtgacaaaccttgactcccactcatctcgcacattcaatggcaattgtttatgtttttaattcattgacagtacaagtattctttttagcatgtctttcattttccaggcaacccacttgtccccaggaataaaacactttaaaagaaaggcgtggtccttctttcatgaagtttatgggtgcagagggagatagacggatgtcaatgaagtaatcattccatgtttacataagtataatttgcaaaaagaac

SEQ ID NO: 188922 - DNA, 471 bp, Homo sapiens
tccaaatcctccacatcttagaagatttcgcactaatgccatctctttcttgcagttgttccaaagcaccctgccatctttggctgtggtctcataagcctgaattatttacatcactcatctctcattcagttggaatgttactttgctttctttcttttatttttttctttttttattttctgcctttttatttttggaagggtggtggtatgtgtgacaaaccttgactcccactcatctcgcacattcaatggcaattgtttatgtttttaattcattgacagtacaagtattctttttagcatgtctttcattttccaggcaacccacttgtccccaggaataaaacactttaaaagaaaggcgtggtccttctttcatgaagtttatgggtgcagagggagatagacggatgtcaatgaagtaatcattccatgtttacayaagtataatttgcaaaaagaacat

SEQ ID NO: 188923 - DNA, 522 bp, Homo sapiens
caaggaaagaggtacaaagtcccaagcagtttatatttatttattttattattattattttcttgagatggagtctygctctgttgcccaggctggagtgcagtggtgtgatctcggctcactgcaagctccacctcccgggttcacaccattctcctgcctcagcctcccgagtagctgggactacaggggcccgccaccacgcctggctaatatttttgtatttttagtagagacggcgtttcaccatgttagccaggatggtctcgatctcctcacctcatgatctgcccgccttggtctcccaaagtgctgggattacaggtgaaagcccctgcacctggccccagtttctatttattttttgtgttaagaatgtcttgaggactgctgccccaggatggtgtgtgtatgtttgtgagtgagagtgtgtgtgtgtgtgtgtgtgtgtgtgtgtgttcaagcctcatccccctaggatcttctgggtagattagtcctccaaactgcttcctgaaccta

SEQ ID NO: 188924 - DNA, 583 bp, Homo sapiens
tgaattcatatgatgggcttgaactgtgatgtaaaaagcatacttcctcctttataaataaaaatactggtcttgtatttatgtagtatccccccaaccaattgaaatgaatagtaactrtgataatcactgaatgtctatgtttaaataaaacaccccaaatatagacatttactcctatcaacatatataccagcttttataaaatgcacttggcatgtttagcaatgatcactgaaagtatttctgtgaacttaaatatggattgaaaagaatctatttaacaaaataaaagtgacatcttgtcattattaacatctcagaaatgtgtttgtcattcaatgaagtcaaagaaaagagagtttttgcctataatactttattcagtttatctttaattcttatcttgtttaaattctgccttagcctattttgatcacaaaatatcctggattttatttcattgtgtcaacttaactattacgctcaaaatgccactggttagctgtcatatgatcagcaaatatttagtctataaggtgggtaaggtatttcactttatgctgattgacatataaaaggg

SEQ ID NO: 188925 - DNA, 423 bp, Homo sapiens
tgataaaattgtaaaaaataggagggagaaaaaaggacaagagtaaaaatagtgcttattttggcagagaaaaaggattttaataagtatggggcatgtggagggtttctggagtggctggccaagttctatttcttgttctgggtggtggttacaagggtatttgccttagaatatcattaagctatgtaatcattttgtctgattttccgtatctatgctttattttacaataagaaagggctgagcactgtggctcatgccygcaatccgagcactttgggagggcaaggcaagagaatctcttgaggccaggagttcaagaccagtctgagcaacatagtaagaccccatctctacaaaaaatagttttttaaaaatactaatgtttaaacgaaaaacctcaccaggaccactcatacc

SEQ ID NO: 188926 - DNA, 565 bp, Homo sapiens
tttcattaaaggtttgataaaaagttaacaagaacttggttttcaactattactaatgacctaaaagttttcttgtcatgaaggactttgagtttcagtcgccattattttagctacccacaccacctgcaggctggcaggagaggcaaatcacctgggtgctgggcccagggatgtcactggtactcttccrggaaccattctagctctggacagctccatttcctcagcactgtctcctgacccttgagcttgtcccaaaaagcctggagagcagccttgggagagtcttgtgctggtggagatactgacaagtgtacagagaatggttttggccctgattaagccctctcattgctagaatatctgtagtgactttagtttcccttatagttattttttgagagaaatgaattgtttgaatataccttacctgcatgcagatcactcaaaacagaattctattctccagtaccataggcactaactacatgtggccactcggcaattgaaatatgattaagctcaaattgcaatgagatagaagtctaaaataacataccag

SEQ ID NO: 188927 - DNA, 578 bp, Homo sapiens
tgattaaattaaaggagaagcaattaattaatttattttttctttaaagacttcatggaaagaggggtagagaaatgaagaaaggagagtgagagaaagagagggaaagagtaaaggatgcttatgtccattgagaataggtgtatttctgtataatatcagagatacgtgggtttttcctggcctgaggcatggaaaagataaagcattgatttggttttaaaggattttgtaagcaaatgtatacaaagtgtttataaaggtccttggagtatgttgggaaaaaatactgttgaatttataaatgcagccattaacagtagccaagattgcaagtgttcatgtttattgtgcaatgattaattctrtttttatactgtatgaaacatgttagggttagccccaatggcactgcagggtctaagggctgctaatatttggaaatattattgcgtgttccttcaccacagtaaagctacatctgactcgcgtgaactttggaatatggaagaatctaacttcatcttttaacttggcactatgcaaatatttattttcttaattaaaaaaataaatac

SEQ ID NO: 188928 - DNA, 648 bp, Homo sapiens
aagcttcctgaacacagagactgccttattaattgctatttcactatgaaaagtaaaaatagcctaacattgagtatgcactccaattcttaaatgtctataaatgaataaacaaattcagtgaatgactaaataaatgaataaatattcagtcttagctctacccatggtgtcctcaggctacagcagagctgactatacaagacaacttggcctgcactccagaacccctttctcaatctatcccatcagaatgacagtgatgattttcaaggttgagatatrcattgccactgcctcccctattttgccgaaggctaaactattgccatctatttttatcaaaccatgcctgtgtcctctttgttttataaatctacagttctctatttctaattaaaactaaagattacaagaccaagacactaagatggccacagcttggagaagagaaggatgaaagcaataggttagagatatgcaccaagacacagagagtaacagagtgaggaagcaaggaagagggaaggccaacacataatgggtgaaaaacgtgacctgagagcaatgccttctgtaatatcactctttaggagacaggagaatgaagaagaactagagaaggaatatttagagatgtggaggaag

SEQ ID NO: 188929 - DNA, 648 bp, Homo sapiens
aagcttcctgaacacagagactgccttattaattgctatttcactatgaaaagtaaaaatagcctaacattgagtatgcactccaattcttaaatgtctataaatgaataaacaaattcagtgaatgactaaataaatgaataaatattcagtcttagctctacccatggtgtcctcaggctacagcagagctgactatacaagacaacttggcctgcactccagaacccctttctcaatctatcccatcagaatgacagtgatgattttcaaggttgagatatgcattgccacwgcctcccctattttgccgaaggctaaactattgccatctatttttatcaaaccatgcctgtgtcctctttgttttataaatctacagttctctatttctaattaaaactaaagattacaagaccaagacactaagatggccacagcttggagaagagaaggatgaaagcaataggttagagatatgcaccaagacacagagagtaacagagtgaggaagcaaggaagagggaaggccaacacataatgggtgaaaaacgtgacctgagagcaatgccttctgtaatatcactctttaggagacaggagaatgaagaagaactagagaaggaatatttagagatgtggaggaag

SEQ ID NO: 188930 - DNA, 445 bp, Homo sapiens
actctcttttcttcagttccaagtattcaacatgccaaagtgccacactttggggtctcattttctgaggcccaataatcattacatttcttttctttcttttttttttttttttaagatggagtcttgttcttgttgcccaggctggagtgcagaggtgtgatctcagctcactaaaacttccaccttccggtttcaagcgattctcctgcctcaggctcctgagtagctgggattacaggcgcccgccaccacgcccractaatttttgtatttttaatagagacggggtttcactttggtggccaggctggtctcgaactcctgaacttgtgatccgccctccttcgccttccaaagtgctgggatttcaggcgtgagccgccgcacctggcctaatcattacatttctttgaagtctttccttaaagctcttccaccctca

SEQ ID NO: 188931 - DNA, 527 bp, Homo sapiens
aaaatgagaggaaaacatgccaaagggaaatgatttaactttgtgaaactgaaatacrgaattaagtttgtagatacagtgtgactttaaattagcataacacttttggaaaataatctgacagttatatattgataaactttaaaaagttcataccccctgatccccaaaaggaaacaaagagtaagttttatgcagcgagtttctcatcatgacattatttatactggtgaaatattagaaaaaacttcaatgtccaacaatatgggcatagttgatgaaaatacctaacatataataaatactgtattgccattaaactatgattcctaaggatatgattaacatgaaaatatttatatttagaaaataattacacagcaataactataacaatgtaaagcaaaatctaccaaaacaatgaaatctttacatctgtgaaaaaaaaaaatgcaaaaatattaacagtggtttcttagatgggagcaacaggccccaaagatggctgccatcaatttcttccctct

SEQ ID NO: 188932 - DNA, 453 bp, Homo sapiens
gtttcttggcttcctgacttgacatgcaccatgcacaaagagcaaggtactgactggtctaaagccactctccccggacactgctaactctrgctaaccatctcacagacatcctgcctctgatcataagatggtccctggaaggaagcataaacacttcccaaatactagaacagacagcccaaagtgcaagttctactaatgggagagtaaatgaatcacctctgtgtacagagaatggcacaggaaattgttatgagtataaaaccatatctcccctttcttaatcacttgttattatctaacaaaggtagatacttttgagaagacctcaccaactacataagtatgtcctataaattgtcttgaaaacatattcccatgtttaaagattactttgaagaaccaaagttgaatgttcaaaaataaaaactattcttaccaagtttccca

SEQ ID NO: 188933 - DNA, 603 bp, Homo sapiens
aataatatgtaagttaatggcttctcagcagagcaaaaatcagtcacagatttgcaaagtccctgaacctggtatattctgtgcctgtagtgaagatttttgctgataaagcacaggtgtgtcaatgccgaacagcccaggctcattttagatggattctgacatgagatgatggtttcctgtctgagctcatggcttggatgtctccaagctgttgctcctgctgagcccagccctcctgatgcttgggggttgtgacagatsagggaggaaatgactttgactttgtcttcttcatgacataaacaataaactgcggacttctcaggaagcctcctgggaccctctctgcctcttgaccatacatggctctcccagatgtcaggaggatcttccttctctgtttacaggaacagtccatcccatcagagactgaaaggctgtggcaatgacagcaaaaatgacaccacattcttctagttcaatgccagtgtttgcacccgagagggatgtaattcactgaacacagaaattgagctcattcctgcactaggcaatgatgataatcaaatatggtaaaaattagtcaacttgtacgatgga

SEQ ID NO: 188934 - DNA, 605 bp, Homo sapiens
gctcccttcttccctactcagtaatttgattgggaataaaccaaaagagttaacttccagggtgatttgaagtagaaatatacaattttggaaagtaacaagaaaaaactcacatttttttgtggaggctgacatgtttgagccagagaaatctggagttcaatccaccagagctccaggtgtgtctgattcccaagcccaagctcctgatcactatcccataattactragtacttacctttttgagtttcagtttcttcatctgtaaaacggtgcttcatcttcctgagtctgtttcctcatcattatccctgtatcacagcgttgttgtgagaataaatgagaaaatatgtagatgtcaaatagtatggcaattccccagaaaagtaaaaatataattttaaccaataatgatccagcaaccccacttcttggtatgtatccaaaagaattgggtgcagggacttgaagagatgtttctacagccatgttcatagcagcattatgcacaatagccaaaaggtggaagcaattgaggtgtccaccaatggatgaatgaccatcttgtatggcctatccatacaagagaatagtattcagcctt

SEQ ID NO: 188935 - DNA, 531 bp, Homo sapiens
ccagtcacaaaaagacaactactgaagattccatgtatgacgtacctaaagtcatccaaattcatagagacagaaagtggaatgctgrttgtcagaagctggaaagagggaaaatgaggagttagtgtttaatggatgcagagtttcagttttgtgagatgaaaagagttctggagattggtttgcacaatgatgtgaattcactcaacagtacagaaccgtacacttaaaaatgattaagatagtaaattttatgttgtgggtatttgaccatgattaaaaaatatatatgtatatgtctcaatgctcaatacatagtaagaattcattacaatctataattctgttgtggttgtcattgtcagcctactcctttattgggttatgagctggaattcactctatcttgaagggcatatggccatttttactttagacgtgccatgagcagatgacctaactcctccactgtggtcatgatgcaaacaggggaaattatgtaacacaaggctaaaatgtttcttccgaagg

SEQ ID NO: 188936 - DNA, 606 bp, Homo sapiens
atagatctttgtctaggcattggtaagcagagtaatgctggcttcataaaatgagtttggaagtgttccctttccttcaagtttttggaaaagtttgagaagaattatattattattttttaaattctccagtaaagtcaggtcctagctaatcttgttgggaagcttttgattaytgatttctctgttcagattttatagttcttcatgatacagtcttgataggctgtaagtttcaggaatttatcaatttttttctaggttatccaatttattggcatataatggttatagtagtctctgatcatcctttgtatttcatcaattgtaatgtcttctttttcatttctgattgtggggacaacagtgattctatcttgaatgctaatccaacatgttgatttctgactagccccagtcctgtgaatgtctcctgagtcctactttagttactgtccctagaatacaaacatgtgaaccttgatgttatagcacaaattataggtcataatgcatgtagcacacatgcctgttctgaagggttgcccttaattatctccctggagcatgtaccccctttccccatggcatttaagccctaggtct

SEQ ID NO: 188937 - DNA, 563 bp, Homo sapiens
accttagtgatgaccttgagcagtaggatataaataactcccacgtgcttagcgttccaataatggaacactaggcataagtataaactttggcttagctttgtcaaatccttctcctgtgtactaatatgattatcagacaaatttttccccttttaatctggtaatcttgtaatttagataaataggtttttctactgttaagtcaatcttgcttttttgaaataacctagttatagtatactcctatctattgttggattcagtttgttttctygtatttggtttaggaatttttcatctacaaccttgaataagattggcttatattttgctttttaacatagtccttctctggtttaaatatcaagtttgtaacaatttaagaggagtgtttcctctgcttttctccgaatttgtgtgaagagtgaaattatctgtaccatcactattaagtaagcacgatgttttatgtatgagaaaaaatgaattctacaattacgtaccatgataactcttgtgccactcaaggttttcactttttcttgagtcagttttaatga

SEQ ID NO: 188938 - DNA, 609 bp, Homo sapiens
tatccataaacataaggaatgaaacaatataagatttttcattgcagaatttttttaggagaaaaatactggaaacaatacaactattcaacagcaggagattgactaaataaattatgggttatacgtccacagaatgaagtactatacaattataaagagtgaaggagataaacagtatggttcatcaaaaaacaaaactaccatgtgacccagcaattcccatttctgggtatatatctgaaggaattgaaatcagtatctcaaagaaatatctgcactcccaaattcatgcaacattattcccaatagccagcaaaaagggtgctggtgtaaataagacaggattagctattctagaggcagcactcaatcaagagaagttatgcaaagtctttcccagaaatatctaaaaataagayagtataaaaacaaacccatctgtttagtaatgaatatatattatagccaataaaagtctagaaaataattttataataagttccacatgaaaacatttgaaactttaaaaggcatggcctaatatggtgaacagaatgtttctattaaatggtagaaataggaatttgttgggaaagtaaaaattta

SEQ ID NO: 188939 - DNA, 469 bp, Homo sapiens
ctctgggtgtccagctgtagggacctcaaattagaaygtcacctcctcccagagtcttcagctgcacgaccctcaatctataacatcagctcctctccgggtttccagctccatgaccctaaaaatacatgagcagctcctccctgaatcttcagctgcacaacctcaaattacaacatcagctcctgtctgcatctccagctgcagggccctcaaactagaatatgagctcctccccgagtcttcagctgcacgaccctcaaactagatcatcagttcctgtacagatctccaactgtagggccctcaaactagaacatcagcttctccccgagtttgcagctgcaagaccctcaaattacaacctcagctcctcccggagtcttcagctgcacgaccctcaatctcgaacatcggatcctctccgggtctgcaactgtagggccctcaaactataacatcagctcct

SEQ ID NO: 188940 - DNA, 470 bp, Homo sapiens
tctccgggtctgcagctgcaagaacctaaaactaraacatcagctcctccctggatctgcagctggaagatccattaagtagaatatcagctcctgtccgggtctccagctccatgaccctcaatcaagattatcagctcctccctgagtctccagctgaaagaccctcaaggcgaacaacatcagctcctccccgagtcctcaactgcatgaccctcaaactacaacatctcctccccgagtctgcagctgcatgcccctcaatgtagaacatcagctcctctccaggtctgcagctgcacgaccctcaatgtagaacatcagctcctcttcaggtctgcagctgcaagaccctcaaactagaacatcaggtcctctccaggtctgcagctgcaagaccctcaaactagaacatcaggtcctctccaggtctgcagctgcaagaccctcaaactagaacatcagctcct

SEQ ID NO: 188941 - DNA, 455 bp, Homo sapiens
gctgcaagaacctaaaactagaacatcagctcctccctggatctgcagctggaagatccattaagtagaatatcagctcctgtccgggtctccagctccatgaccctcaatcaagattatcagctcctccctgagtctccagctgaaagaccctcaaggcgaacaacatcagctcctccccgagtcctcaactgcatgaccctcaaastacaacatctcctccccgagtctgcagctgcatgcccctcaatgtagaacatcagctcctctccaggtctgcagctgcacgaccctcaatgtagaacatcagctcctcttcaggtctgcagctgcaagaccctcaaactagaacatcaggtcctctccaggtctgcagctgcaagaccctcaaactagaacatcaggtcctctccaggtctgcagctgcaagaccctcaaactagaacatcagctcc

SEQ ID NO: 188942 - DNA, 530 bp, Homo sapiens
ggcaacacagggacaccctgtctcttaaaagaaacaaacaaaaacccagctgcctatacagctggggagaccctggacccaaagaaatgatgcagaccctcacattaaggctacacatgaacccacaaaacaaacaaaaattacagaagcatcaaggaagttggtcactctgtgtgggcttgagcaggaaaaatatytggctgtagaccaccctcccaaggacttcaaacacagtcaaggaactccacgtcacaaatatctagcgcttttcaaaaaagcatgttcttaaaactgaagactatcatatgaaatatttgaataaagaatggaatcacaaaaataaataagcaatgtctatcaaaaacacccagataagatgtgaaagtaactaataatttagaaattttaaatatatgtcatctttagaattagaaactgaaaggacaggttacaccgtacattaaaaataaacagaatcaagaatagagcaaacatacacggagagacgtgaaaaggtacagagacggggg

SEQ ID NO: 188943 - DNA, 530 bp, Homo sapiens
ggcaacacagggacaccctgtctcttaaaagaaacaaacaaaaacccagctgcctatacagctggggagaccctggacccaaagaaatgatgcagaccctcacattaaggctacacatgaacccacaaaacaaacaaaaattacagaagcatcaaggaagttggtcactctgtgtgggcttgagcaggaaaaatatttggctgtagaccaccctcccaaggacttcaaacacagtcaaggarctccacgtcacaaatatctagcgcttttcaaaaaagcatgttcttaaaactgaagactatcatatgaaatatttgaataaagaatggaatcacaaaaataaataagcaatgtctatcaaaaacacccagataagatgtgaaagtaactaataatttagaaattttaaatatatgtcatctttagaattagaaactgaaaggacaggttacaccgtacattaaaaataaacagaatcaagaatagagcaaacatacacggagagacgtgaaaaggtacagagacggggg

SEQ ID NO: 188944 - DNA, 530 bp, Homo sapiens
ggcaacacagggacaccctgtctcttaaaagaaacaaacaaaaacccagctgcctatacagctggggagaccctggacccaaagaaatgatgcagaccctcacattaaggctacacatgaacccacaaaacaaacaaaaattacagaagcatcaaggaagttggtcactctgtgtgggcttgagcaggaaaaatatttggctgtagaccaccctcccaaggacttcaaacacagtcaaggaactccaygtcacaaatatctagcgcttttcaaaaaagcatgttcttaaaactgaagactatcatatgaaatatttgaataaagaatggaatcacaaaaataaataagcaatgtctatcaaaaacacccagataagatgtgaaagtaactaataatttagaaattttaaatatatgtcatctttagaattagaaactgaaaggacaggttacaccgtacattaaaaataaacagaatcaagaatagagcaaacatacacggagagacgtgaaaaggtacagagacggggg

SEQ ID NO: 188945 - DNA, 530 bp, Homo sapiens
ggcaacacagggacaccctgtctcttaaaagaaacaaacaaaaacccagctgcctatacagctggggagaccctggacccaaagaaatgatgcagaccctcacattaaggctacacatgaacccacaaaacaaacaaaaattacagaagcatcaaggaagttggtcactctgtgtgggcttgagcaggaaaaatatttggctgtagaccaccctcccaaggacttcaaacacagtcaaggaactccacgtcacaaatatctagcgcttttcaaaaaagcatgttcttaaaactgaagactatcatatgaaatatttgaataaagaatggaatcacaaaaataaataagcaatgtctatcaaaaacacccagataagatgtgaaagtaactaataatttagaaattttaaatatatgtcatctttagaattagaaactgaaaggacaggttacaccgtacattaaaaataaacagaatcaagaatagagcaaacatacacggagagaygtgaaaaggtacagagacggggg

SEQ ID NO: 188946 - DNA, 526 bp, Homo sapiens
ggaattccagaagggagcaaagtgatacggacccacagacaaaggaaacacaagcgggtacccaagcgggtcggatacaaagcagcccaggttggtccgtctgccgatacttacatatgatcgacctgacagtcactggattaaagggagtccacgtgcctgaaaacaaacaacaacaggagttaaagtaaaaggaaaatctttctgggacactgagtttgtgatctatacctggaggcaccaggaaaagcagtgggggctctagggtagtggttttctagacactccaggtgacgtgtcggctgccatgactcctgggagggggccaaagcactgcctggtgggttcacaccctgctgtgtgtgggagtccttygtggcctcccagacctccaaggctgtccacagtcatcgcggctggacatgcactcttatttaacagataaccaagaaatggttctgtatcattttacacacggaatttttcaaggatgcagtcaccagctaagttgagaagttcgcactta

SEQ ID NO: 188947 - DNA, 508 bp, Homo sapiens
aaagtgatacggacccacagacaaaggaaacacaagcgggtacccaagcgggtcggatacaaagcagcccaggttggtccgtctgccgatacttacatatgatcgacctgacagtcactggattaaagggagtccacgtgcctgaaaacaaacaacaacaggagttaaagtaaaaggaaaatctttctgggacactgagtttgtgatctatacctggaggcaccaggaaaagcagtgggggctctagggtagtggttttctagacactccaggtgacgtgtcggctgccatgactcctgggagggggccaaagcactgcctggtgggttcacaccctgctgtgtgtgggagtcctttgtggcctcccagacctccaaggcygtccacagtcatcgcggctggacatgcactcttatttaacagataaccaagaaatggttctgtatcattttacacacggaatttttcaaggatgcagtcaccagctaagttgagaagttcgcactta

SEQ ID NO: 188948 - DNA, 526 bp, Homo sapiens
ggaattccagaagggagcaaagtgatacggacccacagacaaaggaaacacaagcgggtacccaagcgggtcggatacaaagcagcccaggttggtccgtctgccgatacttacatatgatcgacctgacagtcactggattaaagggagtccacgtgcctgaaaacaaacaacaacaggagttaaagtaaaaggaaaatctttctgggacactgagtttgtgatctatacctggaggcaccaggaaaagcagtgggggctctagggtagtggttttctagacactccaggtgacgtgtcggctgccatgactcctgggagggggccaaagcactgcctggtgggttcacaccctgctgtgtgtgggagtcctttgtggcctcccagacctccaaggctgtccacagtcatcgcggctggacatgcactcttatttaacagataaccaagaaatggttctgtatcattttacacacrgaatttttcaaggatgcagtcaccagctaagttgagaagttcgcactta

SEQ ID NO: 188949 - DNA, 573 bp, Homo sapiens
attccccaaacagaaatattttaaaaggacactatagaagaagaggtaactttcccaggaggatwtaggaaataacagatttgtctaatgaaagaagggctaagagaaaacgaggcagataaaacatgtgaagaaatgatgtgcagaaatttttagagacaccaatacagacatttaagaatcccaattatcgcaagaaacatttagacaagaggaaatccatccttagacacatcaaaatgaagctttaaaacaacaaagtctgagaaaatcctaaataggaatcagcaaaaataaagattaatcgtgttcagtttgctttgaatccttgaacatattcataagagctttttaaaagtgcttccctgctaattccaccacctttgctatttctgttgacaaagaaatgttgctaaggtgggacaaggaacaactatcagaggtggcacagggctgggacaaattcaagttctgaccaggcagggtagaaatactttgttgaatgcctaggacttttagtaaagatcccagaaaaggcataccttagtatcagggccaaaccagatctagggt

SEQ ID NO: 188950 - DNA, 573 bp, Homo sapiens
attccccaaacagaaatattttaaaaggacactatagaagaagaggtaactttcccaggaggatttaggaaataacagatttgtctaatgaaagaagggctaagagaaaaygaggcagataaaacatgtgaagaaatgatgtgcagaaatttttagagacaccaatacagacatttaagaatcccaattatcgcaagaaacatttagacaagaggaaatccatccttagacacatcaaaatgaagctttaaaacaacaaagtctgagaaaatcctaaataggaatcagcaaaaataaagattaatcgtgttcagtttgctttgaatccttgaacatattcataagagctttttaaaagtgcttccctgctaattccaccacctttgctatttctgttgacaaagaaatgttgctaaggtgggacaaggaacaactatcagaggtggcacagggctgggacaaattcaagttctgaccaggcagggtagaaatactttgttgaatgcctaggacttttagtaaagatcccagaaaaggcataccttagtatcagggccaaaccagatctagggt

SEQ ID NO: 188951 - DNA, 573 bp, Homo sapiens
attccccaaacagaaatattttaaaaggacactatagaagaagaggtaactttcccaggaggatttaggaaataacagatttgtctaatgaaagaagggctaagagaaaacgaggcagataaaacatgtgaagaaatgatgtgcrgaaatttttagagacaccaatacagacatttaagaatcccaattatcgcaagaaacatttagacaagaggaaatccatccttagacacatcaaaatgaagctttaaaacaacaaagtctgagaaaatcctaaataggaatcagcaaaaataaagattaatcgtgttcagtttgctttgaatccttgaacatattcataagagctttttaaaagtgcttccctgctaattccaccacctttgctatttctgttgacaaagaaatgttgctaaggtgggacaaggaacaactatcagaggtggcacagggctgggacaaattcaagttctgaccaggcagggtagaaatactttgttgaatgcctaggacttttagtaaagatcccagaaaaggcataccttagtatcagggccaaaccagatctagggt

SEQ ID NO: 188952 - DNA, 507 bp, Homo sapiens
acttaagtctgtaacccattttgagttgagttttgtatatggtgagatatatggttctaatttcattcttttgcttacrtatatccagttttcccagcaccatttattgaagagagcgttctttccccaatatatgttcttggcacctttgtcaaaaatcattgggtgaaaatatgtggatttatttctggggtctctgttctgttccattatgaagtattcttgactagtattctacagtattcttgactagtagtttttttttcttttaacacttctgtattatgtttcatttagctatttgtctgtttttataccaataccatactgttttggttactttagctttatagtatattttgaagtcagattgtgtgatacctccagcttccttctttttgctcaggattgctttagctatttgggatctttttggttccatatgaatttataattgtttcttctatttctataagaatgtcattggtattttgataaggattgcat

SEQ ID NO: 188953 - DNA, 611 bp, Homo sapiens
tgaagactatacagatacatggaaaaaaatagatatgttgtgctcatgtagaataaagttcatctttaggaagtattctcatcatttttcatatttaaaaaaacctcagttctatagttgaaataacatttaacatttaaatacaaagagttattagatctttctttagttttaatctatagtaaatgttttattccaagcatcrgaatactttcattttagaacagagcaaaggtttctatataaaaaaagtcatttttttaaaaagaaaaataataattaagtatacaattattttatacatacatgacttgtttttctctgttatttatgcaaatctggaataaaaggttagaaatcggtataaagccagatgacccagtaaaatagttgtgctatataatcagttttaattttaaactttcatagcaaatccaaatgaggcaatcatgtgttacaattaccactgaatttcatttcaagctatcattaaaggtgataatccaccatttagagtagttgacccaaaagttagtttctaaagtttttctaaaattgatacttagagcatctcttcattcttactgcaattatgataaaatatttctatt

SEQ ID NO: 188954 - DNA, 611 bp, Homo sapiens
tgaagactatacagatacatggaaaaaaatagatatgttgtgctcatgtagaataaagttcatctttaggaagtattctcatcatttttcatatttaaaaaaacctcagttctatagttgaaataacatttaacatttaaatacaaagagttattagatctttctttagttttaatctatagtaaatgttttattccaagcatcagaatactttcattttagaacagagcaaaggtttctatataaaaaaagtcatttttttaaaaagaaaaataataattaagtatacaattattttatacatacatgacttgtttttctctrttatttatgcaaatctggaataaaaggttagaaatcggtataaagccagatgacccagtaaaatagttgtgctatataatcagttttaattttaaactttcatagcaaatccaaatgaggcaatcatgtgttacaattaccactgaatttcatttcaagctatcattaaaggtgataatccaccatttagagtagttgacccaaaagttagtttctaaagtttttctaaaattgatacttagagcatctcttcattcttactgcaattatgataaaatatttctatt

SEQ ID NO: 188955 - DNA, 331 bp, Homo sapiens
aaaaatttgtctccattctccatgtgggataaaatgttgtattaccaaaaaaaaaaagtcaatagcctaaaatttataaagcttttgtgaatagctacagtttggaaagttataagaaagtamatgtgacggttttaattcagaattatcttaggaaaaaaattaggcctattaacaaccctgcaatggcatctaagcgttcaaatgaaaggagttacatgtaccacactttaaatcaaaagctagaaatgattaaccttagtgaagcagacatgttgcaagccaaaatagtgtaaaacttagaatctttcggcatttagccaagtggtga

SEQ ID NO: 188956 - DNA, 404 bp, Homo sapiens
gtctgctgtttccttctttgtattcatgggtgtaatttttagctcccacttataagagagaatatgtggtgtttggttttctgttcctgcattagtttgctaaggataatagtctccagcttcatccatgtttccacaaaaatactatggctgcatagtattccatggtgtaaatataccacattttatttatccaatctgtcactgatggatgtttatgttaattccatgtctttgctattgtgaattgtgctgcaatgaacatttgcatgcatgtgtctttatcatagaatgatttttattcctctgggtacayacccggtaacgggattgctgagtcaaatggtagttctgtttttagccctttggggaattgccatactgctttccacactggttgaact

SEQ ID NO: 188957 - DNA, 412 bp, Homo sapiens
ctttctttaacctctggcctcaccataaggcaagttttccccatgtagctgccacttctttagcctaggtcccaatttagtacacagggagcagaccagagacaaagctgcaacaataagcctagcccagctacatctgctgtttaaagaggaaatgcctagctaaacttaggctatatgagctgatccccaactaatatggttgggatttgtgtccccacccaaatctcatgtcaaattttaatcccttgttggaagaggggcctagagggaggtgattagcttagaggtgtggattttccttttgctrttcttgtggtagtgagtgagtcatcatgagatctggttgttttaaagtgtgtagcacctcctcctcctcctccttctctctctttttcctgctccagccctg

SEQ ID NO: 188958 - DNA, 529 bp, Homo sapiens
ctcacgctgaaatgagctaagaattcagagactgttgaaaagggaggattgtattttgcaatgtgagaaggacatgagatttgggaggggtcaggggtggaatgaggtggtttgaatctgttttcctgcacaaatctcacgtcaaattgtaacccctaatcttggtggaggagcctggtgggaggtgattggrtcatgggggcagatttccaccttactgtccttgtgatattgagtaagttctcaagagatcaggtggtttaaaagtgtgtagcacctttcctttcattctctctgccttctcctctggccacataagacatggttcctccctctttaccttctgccaagattgtaagttttctgtggcctccccagccatgctttctatacagctggtagaactgtgagccaattaaacatcttttctttgacttaatctcaggcaattttttatagcagagagaaaagactattaagccaagctcagagctatgagaaaaaagtgcttattgttgaatggcactga

SEQ ID NO: 188959 - DNA, 501 bp, Homo sapiens
tagaattatgaaagttatgaagtttaaacaggctttatatgaagtagttgtgacttctttacttaaatgttttataaaaatggatactgtatctgactaggggggtatttcccctacctatactataaaacagaaggcatgtaagtctgccatttgactaatattaattggacatgcaaatgggaaccagtaagattgcccaggcccacagaatacaagatagaagctggattgcyggtagggacaaactcatttggcagtcctttgtgaagtgtttactggggcttgtggcagaagccagtgagcacctctcaatggcaactacttggttcgtagatggcagttctaaggtgaataaacgacattctgtttggaaggctgctactctggttgtaaagtatacttttgtgtgcaggatttactcttctaccagggttctccagaatttggaaactatttgtgagtattcttcttttatggcagcatggttatttgtataat

SEQ ID NO: 188960 - DNA, 537 bp, Homo sapiens
tctaatttgattgcactgtggtctgagaggctgttataatttcaagttcttttgcatttgatagcacattttttaacattctggaaagcagcaaatatccaatgtctttttatgactttgtgtttattctcattctgctgctactgagtttcacatattttaaaaggtgtgttgtatcgtttatcattagagaaatccatatcaaaaccacaatgagataacatctcacatgggtccgaatggctattactaagaagccaaaaaacaagctacagatgctggcaaggttgtggagaaaaaaggaactcttttacgcattggagggagtgtaaattagttcaaccattgtggaagacagtgtggtgttcctcaaagacctagaggcaaaaataccattggacccagcaatctcattactgggtatatgcccaaaggaatataaatcattctgctataaagatatctgcgtgtgtatgytcattgcagcactattcacaacagcaaagacatggaatagacttaaatgcccatcagtaa

SEQ ID NO: 188961 - DNA, 553 bp, Homo sapiens
tgaagctggaagccgattatcctcagcaaagtaacacaggactaggaaatcaaatactgcatgttctcaattttaagtgggagctgaatgatgagaacacgtggacacatggggtggaacaacacacsctgtggcctgtcggaggctgagggcagaaggagggagagcatcaggaagaatagctaatggatgcagggcttagtacctaggtgatgggatgatctgtgcagcaaactaccgtggcacacgcttacctatataataaaccagtacattctgcacatgtacactggaacttaaaataaaagtttaaaaaatgtgtgttggacatttctatatttttgtcttccatttttcctctggtgctttctgtttcatattgatttttcaagagaaatttgtatattagaaaattaagtaaaaatatataatgttcttttaaatattttttatattgtactttatagaaatgtattaattgctattttacataatcccagaagtcctttgtgatgactgacttttgtattatgcttaaaaatacctacaaaca

SEQ ID NO: 188962 - DNA, 548 bp, Homo sapiens
ggtcatgatactttactctttcctctaatagcaattcctggctattctgattgctacatactccaatggccaaaataaatcctcagggattcgaatttaatataggtttattcacctgggtcctcttgctgaattaacatagttctagatctatggcacagtgatcactttttctaagtatgttgctttcagtcttcctatatggcctaggtgggccaaaagcagtgtgataatatgtatgataataattgtgggataaacatataataaaattatagctagtggaatagtaagcatgaaattttggaattggaaacagcaaaaatgctgcyagcttagactctgggaggtatggagaagtgggaggcattaatgatctttgtcttttaggaccatccttagagggttcttcccaaaggaaaatccactgttgctgttctcacaaattgctgagaacaccttaaatttaactggctcttgaatttgccacccttgactaatcaaaatttgactgacattccctttaaccttaccaagaagtctaccag

SEQ ID NO: 188963 - DNA, 411 bp, Homo sapiens
tgatgtgtacaaactggccaaacagtaatgaatacccttgagtaatacctccaaaaaaagagaaattgactaaagtatttgaattgaactaggattcttaagatccaccagttgtatgaaaagctatgtagaagtgttgttcatctgtgtctccaagtgatgtaggttgcttttagtgatctccaataattgcatacaacatttcccttccagagcagcacatgtactcttgggcctctatttyttgtgtgagttatcagtcattaatttgattccctcctgagcattcagtaactcagatattagtagcagtcattaaaaaaattaaaatatttaagaaaatattcaagtagatcatgtagccttctgataatacctctccaaagaggttaccattgattaaccaggaga

SEQ ID NO: 188964 - DNA, 551 bp, Homo sapiens
gtagtcccagctactcgggaggctgaggcaggagaatggcgtgaacccaggaggcatagcttgcagtgagcagagatcatcacgccactgcactccagcctgggcaacagagtgagactccatctcaaaaaaaaaaaaaaaatgagttcatgcctttttcarggacatggataaagctggacaccatcattctcagcaaactaacacaggaatggaaaaccaaacactgcatattctcattgataagcaggagttgaataatgagaacatatgaacacggggatgggaatatcacacactggggcctgtgcaggggtttgttggggcctgttgggacaaggggagggatagcattaggagaaatacctgatgtagatgataggttgaggggtgcagcaaaccaccatggcacatgtatacctatgtaactaacctgtatgctatgcacatgtatcccagaacttaaagtataataataataataataataaaattattgtgcttttttctcctctaaacatcttgtcttcctctgctgcccactattgtca

SEQ ID NO: 188965 - DNA, 624 bp, Homo sapiens
actaagcctcatcttttaacactgttgctggtggcactgcctactggttgggctcggcagaatattagctgccccctgtctccatcccatcctggctcagaaaccattaagccacagtcctctgggtgagtttacattcacattttccaccataaaacatatcaaatttgtcaaaatacaccataaccatcccctgatagatggtggaatggaacatactcttgtttgcaaataggggcatctgcaaaatccataataccaaccttgcttctaagctctgaaacacagcaaagatagtgtttgttaggtcctccccwcaaaatataaattttacaaaccaattcaagaactaaatttcaaaatttgaagttataaattcaggataatttattaaaatattatacaaactataaacctataattccctttgaattgttattcacattgagagcatatagttttagggcaatggactaacttgttgcatatctttatttctgtgtgattatattttcttgatgagcccagaaaattaatgtatatataagatgacaaaacatacccagtgagtactagaatgcatttcaccacatgaggatctatgaaacgagaattcttattata

SEQ ID NO: 188966 - DNA, 513 bp, Homo sapiens
gtccccttggagattttcctactaaacgtatgtgcatatttttcatggccactgatatttgaattgcagcctgctcccatgcagaacatgaaacacttcaaactgcataatgctgactaaattataaagtctccagtggcctgaggtagcaatagccataataatgagtgtacttaagtggtttgtgtagatctccccgcccccttaaatttaatgccttgacttatcaggttttttttctttttccccacataacattactgaccactytgtattggggaaatgcaattgtctctcattgtataatgactatgcaagaatagaaaaggtagtggtcggtggctgatttataggcatggtttaattgaataaagcagtcacctggcatgttttcatccgttgttattccatcttgtttaaatacagataatgcaaggatttgtgcacgttaaagtatagcacttacattactttaaacgatatcatccacttgcacacctaagttggtacatc

SEQ ID NO: 188967 - DNA, 513 bp, Homo sapiens
gtccccttggagattttcctactaaacgtatgtgcatatttttcatggccactgatatttgaattgcagcctgctcccatgcagaacatgaaacacttcaaactgcataatgctgactaaattataaagtctccagtggcctgaggtagcaatagccataataatgagtgtacttaagtggtttgtgtagatctccccgcccccttaaatttaatgccttgacttatcaggttttttttctttttccccacataacattactgaccactttgtattggggaaatgcaattgtctctcattgtataatgactatgcaagaatagaaaaggtagtggtcggtggctgatttataggcatggtttaattgaataaagyagtcacctggcatgttttcatccgttgttattccatcttgtttaaatacagataatgcaaggatttgtgcacgttaaagtatagcacttacattactttaaacgatatcatccacttgcacacctaagttggtacatc

SEQ ID NO: 188968 - DNA, 573 bp, Homo sapiens
ctgctgtttaccaaggcatggtaaaacctctgtagacatctcacctagataattttcaataaacattgagatcactgttatggctacacatgcttataagagcctaattcagtatattaattgaagttatagttatcacttggtagtgtctcagcattattgttcagggactgtctgcatgccgacagaactcttgctggagcctgggacccaaaaccccagggaaaaaagcactgaggagggcaagttcaatatacacgaccattttcttctcatgttagtctctggcagagttcggtaagaaaaattcttgcgtttgtcaggtccacaaacaaggaatgggttttacacatttcaatgtttttctaaaaaatcaaaagaaaaataatgttttgtgatacatgaatattayatgacattcaaagttcagagtccataaatatattttcttggaacacagccatgtcctttcatttacacatagctgtggctgcttgcctgccacctgcagagctgcagcagagaccacaccgcccttgaagctgaaaatctccatcatctggcccattacag

SEQ ID NO: 188969 - DNA, 526 bp, Homo sapiens
aaagtcttgctatgttgcccagcctggtctcaaactcctgggctcargtgatcctcctgccttggacttccaacatgcagacatctattttttcaaatatattgagacaatttgtggcctatcatatgatctaccctggaccatgccccatgtgcacttgagaagaatgtgtatgttgtcgttgctgggcagagtgttctgtttatgtctgttagatctagctggtttattatgttggtttcttaagtcctctattttcttgtgtatcttacttgtctggttgttctgtctgttattgagagtgggatatggatgtttacaactgttattgtacaactttctatttctccctttgattctgtcagtttttgctgaatatattttgatgatctgtcattaggttgtaaatgttatagttgttctagtttcttaatgtgttgaaacttttatttatattgcccttcttgtctcttgtaaccatttttacaatttaaaatctattttgtctgatattagtatagtcacc

SEQ ID NO: 188970 - DNA, 418 bp, Homo sapiens
taagtggctacagagtatttcaatatgagtgctctgtcttctacaccgttgtcagaattaaatttctaaatgttttcagaaatttatttgacatttagttccatgtttttgttattataaacaatgtcttaatgactgtccttatggtttcttagcattcttttttaataaaaaattttaaaagtgcaatttrtgaactaaactgtatgtacatttttaagactcttgatgattatttctgtatcacccaccagagagagtatgttgatttaaattttctccagctgtacattggagtgccttttctttttttttttttttttttgcatgctcatatgtgcatttttctggagagagctcatagctttcaccagatgctcaaaggagtctataaccacatcctccctacccactgaaa

SEQ ID NO: 188971 - DNA, 636 bp, Homo sapiens
caactgcttcattcatggtgggaaagcataatgtaatcaattatattgtcaccaggttgctgagtgataacctcaggacagggtttgcaagctaaagctcttgggtaaagtcttgtctctgtttttaacaaaatgtaattgaattacaactacactcgatatatttactgcctatggctgcttttgggttataatggcagtcagagttcagtagctgcatagagacaatatggcccacaaagcctaagatatttactatctagctatttgcagagaaaggttgtagacccctgccttagcagttatatgctagatccatatctgaagcttacctttgatttctgctgtkggtaggttgattacccagcacatagttagatgcatttaaatgagaaaaaaagggaatttatagctcttatctctgcaaaccaaactgatacagctctgatgactgggggaacaccacggttctcggacttgcgccgataggattaatgacatggacacacatggagtggttttaaggagcgaaaagttgaataggcaagaaagaaggaagaagaaaacagctcccccgcacaaagacagagggaggggggattagaacaaagaaaaaaccccgtgtgcagtggaaaa

SEQ ID NO: 188972 - DNA, 448 bp, Homo sapiens
ttttctttcaatgttttctttctgggccacccaggagtgaggatgcagtaatcaaatgcaggcacagaatgcactggagttgttcttaayaagcttagatttttgaccagggaagtatgacacagagacacaaggacaaatgagtatagagtatagatatatgcagggtagagacaaggaaatcagacaagaaatttcttgtctctaccagtggtaaaaggagtaccagtggtatatctgcttgtacgtaaatcatagcaggtatcatttttgagggataaaaaaagaaaaagagtctcctggtagcaatgagtaagtagtataactattgcacttccagaccctgcattttgtgtaatgtaggagggaaaaaaagacagaactatagcaaataagtaagagtatcacttcatgggcatactgcctgagattgtagctgggtttcctc

SEQ ID NO: 188973 - DNA, 556 bp, Homo sapiens
  misc_feature (1)...(556): n = A,T,C or G
agagatgaatctattgcttttctctcaggcaatcctccataaagtttgtttttctctactaagctttagaaaaatattggaagggtgagagtttggaactacattccctgttaagtaccacgagtacctacaatgcagctatgttgggcagccaggtaaatgcagagccggtgtgagaaaaataaacctctctacatattcttttgtgaaatttgcgttgcctaaccaaccaaattttgttgccgagaggcaaaccgaagggttatcagctcataagcaaaatcaaagttttctgtagaatgtaattctaggtttattcacacggtaatgaaagaaaaagagagagaataaatatsagtttctgtgattttatgtcataactggggaaaaagaattgtagtcttaaaatcccttcattcatcttgcttttctcaaccactatttttcctaagtcaatcatatggcaaatgtgctcaggggaaaactctaaaaatatttaaaacaataacangaagggaaggaaaggtattcatttttactatagttcagaatatcc

SEQ ID NO: 188974 - DNA, 581 bp, Homo sapiens
ccctaccacactcttccatctctgtgtgctgttctagaagggaattctctctgtgattttcacttggcaggaagtcataattaagataattagtcttatctaatttttatttgacttcaaatacttatttttcccttcaaactcttaaaataattgcagtattgaactccatctgaaagaattattgggaaggtcatgcagtgtctcgatttgtcagccaactcacgttacttccaagtaattaactttgctgtttactaactcagaacaggggggaaaaaaagaaaaaaaaaaaaatatatatatatatatatatgtatatttaaactcctgaactcacaacctayggagggtactaaaagtatgaaagtgcttcaaagaacccaacaggttggcaatttcaagatagaaagctgaagatccttaaaattaagacatgtgcaaaaacaataaattaatcagcactgcaagttccccaaatttatgtcatttctaatatgatatacttactaataaaaaaaactgaaaacttgtcaataaaatcaaatctgttcttctgtataaagcaatgaggaaataac

SEQ ID NO: 188975 - DNA, 581 bp, Homo sapiens
ccctaccacactcttccatctctgtgtgctgttctagaagggaattctctctgtgattttcacttggcaggaagtcataattaagataattagtcttatctaatttttatttgacttcaaatacttatttttcccttcaaactcttaaaataattgcagtattgaactccatctgaaagaattattgggaaggtcatgcagtgtctcgatttgtcagccaactcacgttacttccaagtaattaactttgctgtttactaactcagaacaggggggaaaaaaagaaaaaaaaaaaaatatatatatatatatatatgtatatttaaactcctgaactcacaacctatggagggtactaaaagtatgaaagtgcttcaaagaacccaacaggttggcaatttcaagatagaaagctgaagatccttaaaattaaracatgtgcaaaaacaataaattaatcagcactgcaagttccccaaatttatgtcatttctaatatgatatacttactaataaaaaaaactgaaaacttgtcaataaaatcaaatctgttcttctgtataaagcaatgaggaaataac

SEQ ID NO: 188976 - DNA, 581 bp, Homo sapiens
ccctaccacactcttccatctctgtgtgctgttctagaagggaattctctctgtgattttcacttggcaggaagtcataattaagataattagtcttatctaatttttatttgacttcaaatacttatttttcccttcaaactcttaaaataattgcagtattgaactccatctgaaagaattattgggaaggtcatgcagtgtctcgatttgtcagccaactcacgttacttccaagtaattaactttgctgtttactaactcagaacaggggggaaaaaaagaaaaaaaaaaaaatatatatatatatatatatgtatatttaaactcctgaactcacaacctatggagggtactaaaagtatgaaagtgcttcaaagaacccaacaggttggcaatttcaagatagaaagctgaagatccttaaaattaagacatgtgcaaaaacaataaattaatcagcactgcaagttccccaaatttatgycatttctaatatgatatacttactaataaaaaaaactgaaaacttgtcaataaaatcaaatctgttcttctgtataaagcaatgaggaaataac

SEQ ID NO: 188977 - DNA, 570 bp, Homo sapiens
tagcaaaagactgtgttaatgcacaaaagtattaaggcaataaattctttcagaagtctttgcaaacagacatagggatggaatgtatgactggayggttacatgtcatggaaggcatatcaagaaagttcaacatctatctaataggagttttagaactgggctgcaagacagagcaaaactccatcaagaaaagaaagagagagaaagagagagagagagaaaggaagaaagagaaagaaaagaaaggcaaggcaaggaaagcaagaaagcaagcaagcaagcaagcaagaaagaaagaaagaaagaaagagaaaaattatagcaaggacactgccagagcaagaattttttttaagtcccagaaatgaagacaaatggaagaattcagtttaaaggggccttgtgagttctgaagagaatgcaaataaacagattcacgtgcagacacattgtggtgacgtttcagaactccgagaataaacacacatttcttaaaatcatctagacacatgtttcttaaaatcttttagagaaacagaaaggactaatcacattacattagattta

SEQ ID NO: 188978 - DNA, 570 bp, Homo sapiens
tagcaaaagactgtgttaatgcacaaaagtattaaggcaataaattctttcagaagtctttgcaaacagacatagggatggaatgtatgactggatggttacatgtcatggaaggcatatcaagaaagttcaacatctatctaataggagttttagaactgggctgcaagacagagcaaaactccatcaagaaaagaaagagagagaaagagagagagagagaaaggaagaaagagaaagaaaagaaaggcaaggcaaggaaagcaagaaagcaagmaagcaagcaagcaagaaagaaagaaagaaagaaagagaaaaattatagcaaggacactgccagagcaagaattttttttaagtcccagaaatgaagacaaatggaagaattcagtttaaaggggccttgtgagttctgaagagaatgcaaataaacagattcacgtgcagacacattgtggtgacgtttcagaactccgagaataaacacacatttcttaaaatcatctagacacatgtttcttaaaatcttttagagaaacagaaaggactaatcacattacattagattta

SEQ ID NO: 188979 - DNA, 570 bp, Homo sapiens
tagcaaaagactgtgttaatgcacaaaagtattaaggcaataaattctttcagaagtctttgcaaacagacatagggatggaatgtatgactggatggttacatgtcatggaaggcatatcaagaaagttcaacatctatctaataggagttttagaactgggctgcaagacagagcaaaactccatcaagaaaagaaagagagagaaagagagagagagagaaaggaagaaagagaaagaaaagaaaggcaaggcaaggaaagcaagaaagcaagcaagcaagmaagcaagaaagaaagaaagaaagaaagagaaaaattatagcaaggacactgccagagcaagaattttttttaagtcccagaaatgaagacaaatggaagaattcagtttaaaggggccttgtgagttctgaagagaatgcaaataaacagattcacgtgcagacacattgtggtgacgtttcagaactccgagaataaacacacatttcttaaaatcatctagacacatgtttcttaaaatcttttagagaaacagaaaggactaatcacattacattagattta

SEQ ID NO: 188980 - DNA, 592 bp, Homo sapiens
aaccattagtttttatttgccccaaaagtcaaatctttaatatagttaataatggtgtatttttcttttatgggagcactattttgcatattaattaacttccattgttgcaagctgtaagccaccactggaaaatttttttttccaaacakccagcaccagaaacagttagaaagaatttactaagtcaatggacaaatatttctacatgggagttgacatttaataacttccctgagtcattttaaaaagaaatattagaaactaaaatcattatcaagtcaaaaaacatggcaaaaaaaatatgaatgtctaagaatgtcattttatccagcagtttcagccatcattagccaaactgtcttcaatactttcagaagctaaaccatgtctaatgatatcctcactaatagcagaaagacatttgagtaaattcattttttaaaggatcattgagtgccttagctagttaaaccggaagcccacagtaatcagaaagaggcattgctcgccttctcctatggtttcttcattagcagtggtaataacgacaataggtagttcataactagtacattgttaagatgaacac

SEQ ID NO: 188981 - DNA, 592 bp, Homo sapiens
aaccattagtttttatttgccccaaaagtcaaatctttaatatagttaataatggtgtatttttcttttatgggagcactattttgcatattaattaacttccattgttgcaagctgtaagccaccactggaaaatttttttttccaaacagccagcaccagaaacagttagaaagaatttactaagtcaatggacaaatatttctacatgggarttgacatttaataacttccctgagtcattttaaaaagaaatattagaaactaaaatcattatcaagtcaaaaaacatggcaaaaaaaatatgaatgtctaagaatgtcattttatccagcagtttcagccatcattagccaaactgtcttcaatactttcagaagctaaaccatgtctaatgatatcctcactaatagcagaaagacatttgagtaaattcattttttaaaggatcattgagtgccttagctagttaaaccggaagcccacagtaatcagaaagaggcattgctcgccttctcctatggtttcttcattagcagtggtaataacgacaataggtagttcataactagtacattgttaagatgaacac

SEQ ID NO: 188982 - DNA, 358 bp, Homo sapiens
gtaaatcagaactcaaaaacatccctgaaactacatagtcagataatcaaggaaaataaagggtaacaacatcattgtgatttctttcctcgaaaaataattaacctttggaaaggctttccatcaatgccgtctttgtcagttaacagagtcagacacattcctgaaaagcaaataacaggaagcaagtcttggttgtattcagtctctagggaagaaagacttcccaagtttttcttcccatttttaaaatccatgatttttctttcgggttattatttcttatcattatacagattaaygcaacacattaaaatcatcaaaataaatatatagcacctggagaatttatagcagg

SEQ ID NO: 188983 - DNA, 482 bp, Homo sapiens
ttgaagacctctttgaaaagtctccccaggagcaggacagataggcgcctgctgtaccagtcagagacacctccctactgtgatgttaataagatgaagggtaccagtacaaaaagccacagtaattatagggagaggtaaatactttttttattattcacagactgcctctccatgcagcctgcacgttaacgtgtacatgtgaattcaacatttctttagaattttgcctttcactaataggtcagagaagagccacaatagggacaaatcattgccaatcgtataggatattagaagatgcctatgtctcctaattcttttgttctgtctttcaagaaagttatttgccaccaatttktcaaatacctgtcacaaatattaatgccaactggtttccagaaacatgtggattaaggggataacagaataactagatcattttatatacacccaagagggcacccaaaagtaaaatacat

SEQ ID NO: 188984 - DNA, 437 bp, Homo sapiens
aggtgaagatatgcctttctcttaaaagcctaaaagccatcamttatccatttagtttgcccaagcacaattttggagcctaaagagacagacaacaacaggtgacctctggaagtgaacgtgaagggacaccaacatcaataccccatagtttccaagaggtctggattctgacaatataccgttccactctactgagttgcaatgaaatgtgtgtgtgtgtatgtgtgtgttatcagaaaatcagtgtaacactaatcttaaggtatgactctgcaataagctgaactaccatattgtcagagtacctatgaacttcttgtattgtctcaggataaagctacgtgacttgttttgcagttctctcagtatctgtatttgctctccactttggtgactttttttcaaagatctaccactctgcactttattttagg

SEQ ID NO: 188985 - DNA, 584 bp, Homo sapiens
tgtcctgccccttttgcccttctgccatttgaagatatagcaagaaagtaccatcttggaagcagagagaggccctcaccagacactaaaygtgctagtcccttgatcttgacaaataatttctatcatttatgagttataagttacccggtgtctggtattttttttatagcagcaagaatggatgaagacagatagtgaagttggtataatgtgaaagaggtattgattcatacgtgatttttctgagtgtgaatttttttaagtaattggagcgagctctctcacaattaaagaaaagccttagcaatatataaactccatataaaactctacaaaagtatctcttttagtgcaagctatgcctgcacttccccatataaagctacagtgaaacacaagtgaacgtgaaggtgatgtgctgacatttctttccttattaaaacaatggattaacaaaacaggctacagtctggataagatttttgattctgatgaacatgtctctattagaagcaaatgccctccaggaattacatttcaggaaactgcataagccccagggtttaagatgagaagaacta

SEQ ID NO: 188986 - DNA, 584 bp, Homo sapiens
tgtcctgccccttttgcccttctgccatttgaagatatagcaagaaagtaccatcttggaagcagagagaggccctcaccagacactaaatgtgctagtcccttgatcttgacaaataatttctatcatttatgagttataagttacccggtgtctggtattttttttatagcagcaagaatggatgaagacagatagtgaagttggtataatgtgaaagaggtattgattcatacgtgatttttctgagtgtsaatttttttaagtaattggagcgagctctctcacaattaaagaaaagccttagcaatatataaactccatataaaactctacaaaagtatctcttttagtgcaagctatgcctgcacttccccatataaagctacagtgaaacacaagtgaacgtgaaggtgatgtgctgacatttctttccttattaaaacaatggattaacaaaacaggctacagtctggataagatttttgattctgatgaacatgtctctattagaagcaaatgccctccaggaattacatttcaggaaactgcataagccccagggtttaagatgagaagaacta

SEQ ID NO: 188987 - DNA, 584 bp, Homo sapiens
tgtcctgccccttttgcccttctgccatttgaagatatagcaagaaagtaccatcttggaagcagagagaggccctcaccagacactaaatgtgctagtcccttgatcttgacaaataatttctatcatttatgagttataagttacccggtgtctggtattttttttatagcagcaagaatggatgaagacagatagtgaagttggtataatgtgaaagaggtattgattcatacgtgatttttctgagtgtgaatttttttaagtaattggagcgagctctctcacaattaaagaaaagccttagcaatatataaactycatataaaactctacaaaagtatctcttttagtgcaagctatgcctgcacttccccatataaagctacagtgaaacacaagtgaacgtgaaggtgatgtgctgacatttctttccttattaaaacaatggattaacaaaacaggctacagtctggataagatttttgattctgatgaacatgtctctattagaagcaaatgccctccaggaattacatttcaggaaactgcataagccccagggtttaagatgagaagaacta

SEQ ID NO: 188988 - DNA, 520 bp, Homo sapiens
gttgacatgtcttttcctaaatgcttagctttccaaagtagccattcatcctcagggttaaacagtgctctctcccagctgaatattttacaaagacttgcaaaatagtgagccaattatactatcactggattaagcctaatgatcaasctaagtgacagattggacaaaaagatttcaaaggtccttggattctgtgaaatactcattaataataataggagttaccaacatctgagaacaaattgttgtatccatcctgcttccttccattcatggtagaagagcaatgtcataagagaagcagaccctttggcagaaaagataccatatggagactagagatgcctgttttcaaattctttattggattgggcagggtcttctagtatgaatacacatgaataaaattatgataaggagaaaaataaattatgtattaagtacatatgtcaggttctgtgatcaacatctattatttcctttaattcccccataaaataaaccccacaaaaaccct

SEQ ID NO: 188989 - DNA, 448 bp, Homo sapiens
cacccaggtgacaccactctaaaatgtgctaccactcaagtgctatgaacttcagcactatcagtgyccctaaggaagactgcagtagaaaacagtatatacaaaaaaaaaggatatatgatttttcccccaacagaaaagataaatgtggcctagcagtaaatattgaaggaataaaatccctttgggataacagaaatgcagaactgtaaaaatgtataaagggtttgattgattgtttgttagtaacatggtatgtattaaagagagagagagacagagaaagaggcaacaaaataggagaaagaaatacaagccagcacttttaagagaatatgatttaagaaagaaaaaagaatgttaaaattcagtgccaaacctagaatgagatctgtggaatgtaggccaggtgacagattcctgagtcaggacctataggtcctaatgg

SEQ ID NO: 188990 - DNA, 587 bp, Homo sapiens
tttagagacagttttagagaaaagggaagtctgggatagtgagacagactatgatgatgatgctaacgtgagcgagtttcatattctctgtgtttgccaagagatgggattcaggacacactatgtaaaatatggctccttgccatgtgagaagatagtagatataggaaggtcactctctgaccttttcccaccctactcctctgaagcaggccataagactctcactcaagaggtattcttcttacaaccagaggagaggaatgtccttatctctgaaaatacagggacatagagaaaaatgagaacaaacagaccttgctaagctccctccaattgattaccattagattacaccccctttgctcaatcatacttytgcacaactctccattcttcctcaaactaagcataaaaatacacaggttttcctttttctttgggtctttatttctgaagcctcccatgtcacatacaatttattaaataaatttgtatgctattctcttttccatctgtcttttattagaggtgccttagcctgaacctggtgatgggtgaaaaaaaaatttcctcccctatatacc

SEQ ID NO: 188991 - DNA, 587 bp, Homo sapiens
tttagagacagttttagagaaaagggaagtctgggatagtgagacagactatgatgatgatgctaacgtgagcgagtttcatattctctgtgtttgccaagagatgggattcaggacacactatgtaaaatatggctccttgccatgtgagaagatagtagatataggaaggtcactctctgaccttttcccaccctactcctctgaagcaggccataagactctcactcaagaggtattcttcttacaaccagaggagaggaatgtccttatctctgaaaatacagggacatagagaaaaatgagaacaaacagaccttgctaagctccctccaattgattaccattagattacaccccctttgctcaatcatacttttgcacaactctccaytcttcctcaaactaagcataaaaatacacaggttttcctttttctttgggtctttatttctgaagcctcccatgtcacatacaatttattaaataaatttgtatgctattctcttttccatctgtcttttattagaggtgccttagcctgaacctggtgatgggtgaaaaaaaaatttcctcccctatatacc

SEQ ID NO: 188992 - DNA, 482 bp, Homo sapiens
  misc_feature (1)...(482): n = A,T,C or G
gaaatgttactagatgataaagtaaagcaagaaacatccactgctctgtatgtatttaattaggaattccagttaattactcattacacccctttgcatttctggaaattantagagaaaatggtttctttctcccttgtgttaaaaaaaaatcctttcagagcaagaaagctttttttttttttttttyttttttttttttttttacttcatttgatcggatccttaagtgacctttgtaaacagtacttttctatttcaatattttcctttacctttctgtctttaaacagtagctcaagtccgaaaacattttgtagttagatacactgacagtccagcatggaagaatgaactatatgttttctttttgtaacaaatacttttatcttaaatacttaaaaatattaacttatttactcatttaatcctcctaacaaacatatgaggcagaatactattattatcccactttacagctg

SEQ ID NO: 188993 - DNA, 482 bp, Homo sapiens
  misc_feature (1)...(482): n = A,T,C or G
gaaatgttactagatgataaagtaaagcaagaaacatccactgctctgtatgtatttaattaggaattccagttaattactcattacacccctttgcatttctggaaattantagagaaaatggtttctttctcccttgtgttaaaaaaaaatcctttcagagcaagaaagctttttttttttttttttcttttttttttttttttacttcatttgatcggatccttaagtgacctttgtaaacagtacttttctatttcaatattttcctttacctttctgtctttaaacagtagctcaagtccgaaaacattttgtagttagatacactgacagtccagcatggaaraatgaactatatgttttctttttgtaacaaatacttttatcttaaatacttaaaaatattaacttatttactcatttaatcctcctaacaaacatatgaggcagaatactattattatcccactttacagctg

SEQ ID NO: 188994 - DNA, 389 bp, Homo sapiens
cccatatgtcattagtgccactgttgagaaatcttgatataggggaatagggccctgccttttatcatgcagacttcagcaagcattgttggacacagtgtaaattcttaactattaattggaagcaccatgagccacacggtcctagcaacaatggttatgctaaagcttactgatgcatctccatcttcatatgggagtcagggagaaatctggggaattatttattcagagacatctgtggggcattttctggtgactttcagaaasagtaagaaaataagttagaaagaaagacagagattcttccttcttccctcccttcaccttatttgagttctttcttcccatcctccttcgtcatatggatacaaacatgaaaaaaataa

SEQ ID NO: 188995 - DNA, 305 bp, Homo sapiens
gtcttaaggagggcaactacatgtgtgtttggtcgatattatcttgcagacaccaatgtttctctgaccaaagtatcttattttgggagatgcaatgtttgcattatttacctaaggaaggtracatattaagtcatgagaaggtaacatattgagtcactatttccttttagaaatcgatttatcagaaataaattctcactggctaggtgggaaacaagatggctaagagtactcttgctcgtcaggggtgagaaaagctttcctataaagcacacagaatccccgggaagtggagctaggga

SEQ ID NO: 188996 - DNA, 556 bp, Homo sapiens
acagactttcttgacctgctcacatgagtaacatgtctaaattgcttaaagatctgataatttctcttccctcagatttatggaaagttaataaaagctaaattcttgtcttgcattgtggaagagcacaagttggtcttatgaatgtgattccaaatagaccaaacacagtatggattttcaraaagtatttagttgctcccttaaatctcttagctaaagaaattgggttggtaattatgacatttctactacaagatttgttggatacaagagtctcaaaataatgttagaaaagcctttttaaaatagcattctaggaaccagtcatctaaatcttttggaatatccaaaggtctttgtttaaatttctttaaagaaaaaataactggttatatataataaatatagagcttatttgtaaataaatcattattgcttcctatgttcagcaattaggtactaaatttcagatacttacaatttttggctattcgtcacttttcttctagttactaccaaaactaatattagattccaacaattagctttaaat

SEQ ID NO: 188997 - DNA, 377 bp, Homo sapiens
atagaaactactttaggtatttccaacacaggtgatttaatgaagggatttttaaaaaaacaaaaatattgtaagractgaaagataagatagggaaaagtgatgtttagaagttagtaattgtgggaagctgcttctactccttactttgaagatatttaaaaagctaagtaactctgcccaagggtcaccttagcaatatattttcttctagataattggataccttggggagggacagtaagaaaagtgagtaaaaaagtcagggggaaattatcctagggactttattccagtgtaggtccgtcctttggacccctgatgtagatgatttgaccaaagggtgagttggaattagctcgggttctggaagcaga

SEQ ID NO: 188998 - DNA, 571 bp, Homo sapiens
ttaacattctgggagggagagaattgatctagctagggtccgaggtctagggtgggcaagaatctttggcaaccactatgcctttatggtaaatgaggaggagtctcaaaagcaaactaggaaactatctgttaccggaggaagggcaggaaaaaaaacaaaacaaaacagatatcccctataggcagtattttttcaccctaacattttaggattagtgtagtcattgtcccaatatcttcttctctccataatcttatagtgttttcacaaccttttcattataggcttgccccttaatattttttttttaactccagtccagctttgagaggactgtgcattgagacgctcttactttggtcaggctatgcattatggtttagttctagcataggttctgtattgttcttgagattcaatttccttgtttctgagactccagttctagtgaccaggaccttgtcttatttcctggatctgaagttggaatgaaatactgctttgcttcttgctagtcyctcatccctaccaaaggcttgggtgcttttctgaacttccaatctgtgct

SEQ ID NO: 188999 - DNA, 580 bp, Homo sapiens
gtcagcctaccttacccgtgggccccaattgtcctgggcaagttacttttcctttcttcgcctcagtttccttatctgtaacatcagaggctgagcaggatgatcttgtgggtctcttcaaactctgagattctatgagtctatacaaagagtgtttatccaaaccaagaacagaggagaagaaatggcaccaatattggaaccatgaagtcctgggtttaaattgtggctctattatctactacctgggtgcatctatcaggtaggattcacctggttgcaagtgacagaaaattcaaaccatcttaaacaatagagatacataagcttctgtgactggaatgaccagtggcaaagatggcttcaggagttttcaagtcagtagaccaatgatgtcatcaagattttgctccttccaactctctgccctacataccctctgctgaaactatcttatggctgatgccccatcgtgaacacaacatgggaacctgccaacattccacaagtgcttccatgcatgytcttgtatctttagaaggttctcagaagccctccaataaaatctcccatctcatcg

SEQ ID NO: 189000 - DNA, 561 bp, Homo sapiens
tttggccagcactgagcaaagactgttttcctttcagtgaagatctatgtaaggatgtaggctgttgtaataataacctacttcatataagagaaaataagctcccaaatacaatgtgattagcctcagtggtcaatctaagcacaattgtcccaggaacctggacaccatcctaactgcagtcgtagaagtcaccaactgtgctctcctggcccttggtcaggactgcaatgaaatcgtctcaggcaaaggtgcatgcacccagatttttaaacccagtttttttacaatgcaacttcaacatctgcatcaataaataaaccacgtgaacaaccaaaacgacttttttagacagtgagaagagctgtgtgcaagacaaaatgggccatgagatagagagtgctaagggggagcggtcaaggaggatctatcactcctaaagagatgacattctggctgtggctagaagaacccaatcatgtaaatttcattttatttcttaaaaaatgttatgggtacatagtrggtgtatatatttatggagtacatgagatattttgg

SEQ ID NO: 189001 - DNA, 534 bp, Homo sapiens
tcaacacatatttattgaacatctatgttgtgtcagactctgccctcctggaatccctcctggatggccctgtgaggggaatctactattgttcccattttatagcagaggaaaatgacgcccagaaaggtgaagggcttgcccaatatcccagcagctggtaagtgttggagccagaattctcacctcagcagtctaccgcagactccaagctcttcgccactcagtgaactgtgatacattcccmcagttaccaatggtagactttgaaaaaggaaataaaaaaggaagctgaaatccacattgacagcaaagataggcaggaggggattgacaggagcggaagcaagccctttctcaggagatgatgcataatgatgagaaatagccagccaagggagggaatgaggggaagagcattccaggtggaaagaaaagcatatgcaaatgccccaaagcaggggagaccttggggttgtctcccctgtcaggggagacagggtcagtggggctggagcaaatgaggaggctgcc

SEQ ID NO: 189002 - DNA, 453 bp, Homo sapiens
catctaacataatatagctaccctttgacaaccagaactgcaccagtccccaacccaaatgctattacataaagctaacaatacttaaatgctgatatgaactccataaattttatttcacacgataaaggaaaaggtaataaaakgaagatattttcttagtacaagtatatacatgaacaaacacatttttaacaaaaaaaggaggaaatactcaggacaattagtccttgttcctgctggtcacgtggtcgtagctggtattgatgactaccttcttccactacccattctgtatccctcttgcattcagcaagcacctcaacaggttgtggttcttctcctggtggagtgaaccaaagcttcattcctgaagggtctgtttcaatggtagtcctgcctagattgggctgttggagtttcccattgcccttaaacacaggtcatggtaat

SEQ ID NO: 189003 - DNA, 454 bp, Homo sapiens
atagataaaaatctctgccctcgtcgatcttacatttattggagaaatggataataaagcaagataaattagtaaaamaaatagtgtgtcaaatagtgataagtgttgaggaaaaaaacaaagcaaggatagaaagtgttggtagggagttgaaattaacagggaacgtgagacaataatgcttctgctaaaagctgcattcctgcgatgtgtttctttgtcagagaaacactataaacagacagagaagtaatagtgaaagcacaacactacaatcctgggtatcacctatgggtctacataaaaatccattaaaaattccctgaaaggttaccacattcacagaaagcataaaatccgaatctcgagttttgaggggcaggatatggattctctggatagcagtgactcaggtaaacaaagggagcatgacatggaaggaaaagactcatcc

SEQ ID NO: 189004 - DNA, 454 bp, Homo sapiens
atagataaaaatctctgccctcgtcgatcttacatttattggagaaatggataataaagcaagataaattagtaaaaaaaatagtgtgtcaaatagtgataagtgttgaggaaaaaaacaaagcaaggatagaaagtgttggtagggagttgaaattaacagggaacgtgagacaataatgcttctgctaaaagctgcattcctgcgatgtgtttctttgtcagagaaacactataaacagacagagaagtaatagtgaaagcacaacactacaatcctgggtatcacctatgggtctacataaaaatccattaaaaattccctgaaaggttaccacattcacagaaagcataaaatccraatctcgagttttgaggggcaggatatggattctctggatagcagtgactcaggtaaacaaagggagcatgacatggaaggaaaagactcatcc

SEQ ID NO: 189005 - DNA, 454 bp, Homo sapiens
atagataaaaatctctgccctcgtcgatcttacatttattggagaaatggataataaagcaagataaattagtaaaaaaaatagtgtgtcaaatagtgataagtgttgaggaaaaaaacaaagcaaggatagaaagtgttggtagggagttgaaattaacagggaacgtgagacaataatgcttctgctaaaagctgcattcctgcgatgtgtttctttgtcagagaaacactataaacagacagagaagtaatagtgaaagcacaacactacaatcctgggtatcacctatgggtctacataaaaatccattaaaaattccctgaaaggttaccacattcacagaaagcataaaatccgaatctcgagttttgaggggcaggatatggattctctggatagcagtgactcaggtaaacaaagkgagcatgacatggaaggaaaagactcatcc

SEQ ID NO: 189006 - DNA, 436 bp, Homo sapiens
ttcttgtccttcactttttccaaaggcagactagcgagtgagaacggaagacaggagaaggtcttagcaaatcacaatcgacaataactctgctgaaagcctagaaaagcctcccttatttccccccaaaatgttsactgttacagaaggtaatcaatcatagaagccaactgtatcgacaagattgatattttgaccattatagactgctttttgttattctgatgggacttttggggaaaggttttaagaatatttggggcaaagcacatcccaatttgcctgaccacatctccagtgaagcacatatggcaaaatgctaaagaaacagaatgtggtcaatttgcaaaatgtttatttagagaaatatatataatgataaataatatataaagtactatggtagttaatgtccattagagaacatctctttttg

SEQ ID NO: 189007 - DNA, 505 bp, Homo sapiens
gaattccggggttcccagttgcttttagttattataattcaatttacttcttattgtagaaaattttaaatatatacagagaaagagagataacagtcctccatgttgctttaagaagagaaaatattcattatttcactgatatttattgcttccctacccaatgctaggctttgctctgagttctgggatggagtgagccagtccaagygaggcccctctgagctgacctctgcgaactcctcgtgccacccctccccttatgtcctgggctccagctggagccaccacatacaggaattttaatgtgtgggaatgtctcttccagtctgacttacaccaacacatctttcaggatggagctcttagcagcttgcatctttcctggtcctcttcctctacgagcaggaagggctgaccattcccttctttgagccctcactgtaacttcttatttcgctcgaagcacctaagaaattattgcattgatttgtttatgtgtctg

SEQ ID NO: 189008 - DNA, 519 bp, Homo sapiens
tgctctcagggtataagggaagttcactaacctgggcagtatatgatgatattcattaactgcctatctaggcatgaaaatggttacatatccactcagtgcttaatatatggcaggcattgttctgagatccatcctgcattttctcatcgagttctygtcatgagcccataatttattccccttttacagatgaggaaacaggctgaaagaggcaggacaatcacccacaacccatcagggcatgtgctctcagctgcaggcccaggggtagtagtggactcccactggtctgccacactctgttgtgagtctctgttgtgaaagctatctatgtggcaaagccaaccagatcatgagtccaaaacccaggactctgacttgaagttctacttgctgagacaatcaaccacaaaaggatggatcacacggaaaggaagaaatagatgggctggagcctgtatagataagaagtatgtccagaaaataaatttccaaaaaatcatcaagtctacaaaa

SEQ ID NO: 189009 - DNA, 558 bp, Homo sapiens
ccactaaattcaaactaagtgtgcccccagtcaccctcttctttattggatttcagtaatacgtatggacatggcaacagcagcaggcaagaggggaaacatgtaagcacgtgggggtggtcagatgagaggagacagtagaggtagccaagtgcagttaaaatactctaccctgacacattttatggccatatcacactcttccagtctcttcctggaattttctttttttcttttgtttgagacagagtctcactctgtagcccaggctgaagtgcartggtgtgatcttggctcactgcaccgtctgcctcctgggttcaagcgagtctcctgcctcagcctcccgagtatctgggattacaggtgcatgccactacgcccagctggtcttgaactcctgacctcaggtgatttgctcgccatggcttgccatagttctgggattacaggcatgagccactgcacctggcttcttcctgaattttgaaagaagcctgtgcaaataagggacatgggcttcgttcagtaccttcatggcaatgcacttgagttaaa

SEQ ID NO: 189010 - DNA, 558 bp, Homo sapiens
ccactaaattcaaactaagtgtgcccccagtcaccctcttctttattggatttcagtaatacgtatggacatggcaacagcagcaggcaagaggggaaacatgtaagcacgtgggggtggtcagatgagaggagacagtagaggtagccaagtgcagttaaaatactctaccctgacacattttatggccatatcacactcttccagtctcttcctggaattttctttttttcttttgtttgagacagagtctcactctgtagcccaggctgaagtgcagwggtgtgatcttggctcactgcaccgtctgcctcctgggttcaagcgagtctcctgcctcagcctcccgagtatctgggattacaggtgcatgccactacgcccagctggtcttgaactcctgacctcaggtgatttgctcgccatggcttgccatagttctgggattacaggcatgagccactgcacctggcttcttcctgaattttgaaagaagcctgtgcaaataagggacatgggcttcgttcagtaccttcatggcaatgcacttgagttaaa

SEQ ID NO: 189011 - DNA, 616 bp, Homo sapiens
ttcagcttttactttagattcagggagtgcatgtgcaggtttgttacctgggtgtgctgcatgatactgaagtttggggtgatcaaatgatcccatcacccaggtagtgagcatagtactcaacactttttcaaccttttcttcccttactccctcccctttctagtatttcccatttctgttgttaccatctttatgtccctgagtacccaatatttagctcccacttacaagtgagaacatgtggtatttgttttttttttttttttcctgtgctaattcacttaraataatagcctccagctgcatctatgttgttgcaaaggacatgaattcattctcttagaactgcgtggtattccatggtgtatatgtaccacattttctttatacatttcaccatttatggacacctaggatgatttcatgcctttgctattgtggaattgtgttgcaatgaacatatgactgcacgtgtcttttcgggagaatgatttgctttcttttgtatataaacccagtaatgcgattgctaggtcaaatggtagttctagtttaagttttttgagaaatctccaaactgcttcccacagtggctgaattaatttggattccc

SEQ ID NO: 189012 - DNA, 616 bp, Homo sapiens
ttcagcttttactttagattcagggagtgcatgtgcaggtttgttacctgggtgtgctgcatgatactgaagtttggggtgatcaaatgatcccatcacccaggtagtgagcatagtactcaacactttttcaaccttttcttcccttactccctcccctttctagtatttcccatttctgttgttaccatctttatgtccctgagtacccaatatttagctcccacttacaagtgagaacatgtggtatttgttttttttttttttttcctgtgctaattcacttagaataatagcctccagctgcatctatgttgttgcaaaggacatgaattcattctcttaraactgcgtggtattccatggtgtatatgtaccacattttctttatacatttcaccatttatggacacctaggatgatttcatgcctttgctattgtggaattgtgttgcaatgaacatatgactgcacgtgtcttttcgggagaatgatttgctttcttttgtatataaacccagtaatgcgattgctaggtcaaatggtagttctagtttaagttttttgagaaatctccaaactgcttcccacagtggctgaattaatttggattccc

SEQ ID NO: 189013 - DNA, 616 bp, Homo sapiens
ttcagcttttactttagattcagggagtgcatgtgcaggtttgttacctgggtgtgctgcatgatactgaagtttggggtgatcaaatgatcccatcacccaggtagtgagcatagtactcaacactttttcaaccttttcttcccttactccctcccctttctagtatttcccatttctgttgttaccatctttatgtccctgagtacccaatatttagctcccacttacaagtgagaacatgtggtatttgttttttttttttttttcctgtgctaattcacttagaataatagcctccagctgcatctatgttgttgcaaaggacatgaattcattctcttagaactgcgtggtattccatggtgtatatgtaccacattttctttatacatttcaccatttatggacacctaggatgatttcatgcctttgctattgtggaattgtgttgcaatgaacatatgactgcaygtgtcttttcgggagaatgatttgctttcttttgtatataaacccagtaatgcgattgctaggtcaaatggtagttctagtttaagttttttgagaaatctccaaactgcttcccacagtggctgaattaatttggattccc

SEQ ID NO: 189014 - DNA, 572 bp, Homo sapiens
ccacttttgtgacttcttttgagaaatgactgttcatgtcttttacccatttttaaatggtttttttttttttttcttgttaaattccttatagattatggatattagacctttgtcaaatgtatggtttgggaatatattctcccattccataggttatctgtttactctgttgatagtttcactggctgtgcaaaaactatttagtgtcattaggtcccacctaccaatttttgtttttgttgcaattgcttttgaggacttagtcataaattcttttctgaggtcaatgttcaraatggtgtttcctaggttttcttctaggattcttatagcttgaggttttacatttaaatcttttaaattttgagttaatttttgcatatgatgagaggaaggtatccagtttgattcttctgcatatggctagccaactatccttgcaccattttttgaatagggagtccttttcctattgcttatttttgtctactttgtcgaaggtcagatggctgtaggtaaatttcatatattttcaagaagagattatgttttagagttgatgctgtcaa

SEQ ID NO: 189015 - DNA, 476 bp, Homo sapiens
attaataagcgggttattctatccacactaacatgtwtatattaatatgattaaggaatataacaattaatatatgataaatatttcatgagattaaatttaatcatttaaaagttgaacatagaaaaacgaacataacctcaggctttcacatttatgtttatgtttctgtaactacctaagtgtttttataaacagaatgtattgtttatatgtgcctctaaaatctagtctaatcatatgacaatctcctaccaatatgatgtctgaactcttagtagtggaatatctttgctttcaaagtttgcttttatgacctgtaagagagcattttgaggagaagcaaatttggtgcagaaggaatcacttgcccttttgtaacccagagaaaataatcaggaaaggctcacagtgggctactctccagaacctgaagaagagtcagctcctactcccatctctcagcgttggcatgc

SEQ ID NO: 189016 - DNA, 476 bp, Homo sapiens
attaataagcgggttattctatccacactaacatgtatatattaatatgattaaggaatataacaattaatatatgataaatatttcatgagattaaatttaatcatttaaaagttgaacatagaaaaacgaacataacctcaggctttcacatttatgtttatgtttctgtaactacctaagtgtttttataaacagaatgtattktttatatgtgcctctaaaatctagtctaatcatatgacaatctcctaccaatatgatgtctgaactcttagtagtggaatatctttgctttcaaagtttgcttttatgacctgtaagagagcattttgaggagaagcaaatttggtgcagaaggaatcacttgcccttttgtaacccagagaaaataatcaggaaaggctcacagtgggctactctccagaacctgaagaagagtcagctcctactcccatctctcagcgttggcatgc

SEQ ID NO: 189017 - DNA, 523 bp, Homo sapiens
ttaataattgaatatttcaagttttgagacatatgctgaaaatctcctatatataaatgcagagcgtgtaatggcttgtcttcctgattctattagtcagtcattgacatatatatatatgtaaagggttggctcatgggatgatggaggcaagctggagacccaggagagcctctgctgtagttccagcctgaaaactggcagtttcaagatgcaagaagaggctatgtttcggtttgagtttgaaggcaggaaaaaaaatgatgtaccagctaagtagtcaggcaggaagaatttccacttacttagctttttgttctctttacatattcagtttgacwgggggaggcccacccacaggagggagggcaatctgctttactcattgtactgattcaaatgttcttctcgtacagaaacgttctcacaggcaccccaggacaacgtttgaccaaatacctgggcaccccatggcctggttaagttgacacatgaaattaaccaaccttctgacattgtccag

SEQ ID NO: 189018 - DNA, 541 bp, Homo sapiens
tgcactccagcctaagcaatagagcaagactctgtctcaaataataatgacaataataaataaattatttataattagcataggaaaaatataggagaaatgggatttaacgactacatactaccaagcaagatatggagtaaaatatattcttaataaggttcacttcaccaataaattataatkaatagagtagggttttccttgtttttatcctctcttattctttttttttttaatccaagcccacttccccttcttttaagaaagttatattattgactgaggagggtgtatgagggaatactggactaggaatcagaagtcatgggttccatttctgccaccgaattgctgtaggtactcagtcttgccagtttagcatttttccatttatatatcctcatttgcaaagtgaaataattagactagagcaaggcttctcagacctgacctgcatcagaatcgggaaagaagcttttttttccccagaaatacagatcctggaaattagccaaagacattttaactccataaatat

SEQ ID NO: 189019 - DNA, 277 bp, Homo sapiens
aatgaaagagaaaataaatgggcatgcataagaatttctctcttgtgggagactcctctgtctccctgaaactgctctgtcccggtcctggcaatggggcagtggtcaycaagcttcacttaggtcttcttgctgtgcagctgttaacacagtgctaacttgtgctttaacttcaaaagagacagaccttccctctgagcatgagaaatagatacttcctcatctggagcagaatagccagagtgcaggaaatcaactctttctacttcattcacaa

SEQ ID NO: 189020 - DNA, 573 bp, Homo sapiens
gtcttagtgttttgttttgttttaggatggacagaatagaagaaattrtacagaatgggaactgtcattagtaatatcgtattgtctactgaaaatttgctaagagtagattttaggttcccttaccttccacccccaaccccccaccacacacacatacacacaaaaggtaactatagaaggtgattaatattttaatttgtttgactgtagtaatcatttcaccatgtatatacaaaatcatgttgtatacatttaatttacataataaaatatatttaaatatatgtataatatttaaaattctaaccttgtatcaatttaatacattgatatactacatttttattcagtttacctagtttctacttaccaagaaatccaaggtttatattgctaagctggctgttgggggcggggggagccggtggcggggggggagcgtattttaaaacatttcattcactgaaaaagcttgaatataaattttacttttggtataagttgtatatttttaagaccgcaagtcatttcacatatattattttacttactgttggtttttcttaattg

SEQ ID NO: 189021 - DNA, 573 bp, Homo sapiens
gtcttagtgttttgttttgttttaggatggacagaatagaagaaattatacagaatgggaactgtcattagtaatatygtattgtctactgaaaatttgctaagagtagattttaggttcccttaccttccacccccaaccccccaccacacacacatacacacaaaaggtaactatagaaggtgattaatattttaatttgtttgactgtagtaatcatttcaccatgtatatacaaaatcatgttgtatacatttaatttacataataaaatatatttaaatatatgtataatatttaaaattctaaccttgtatcaatttaatacattgatatactacatttttattcagtttacctagtttctacttaccaagaaatccaaggtttatattgctaagctggctgttgggggcggggggagccggtggcggggggggagcgtattttaaaacatttcattcactgaaaaagcttgaatataaattttacttttggtataagttgtatatttttaagaccgcaagtcatttcacatatattattttacttactgttggtttttcttaattg

SEQ ID NO: 189022 - DNA, 471 bp, Homo sapiens
ctccctgaatgcggtaatggaaaaacttcatctttaagagtcagcagagcatgactttggacaaattattaagctctctccatttcagtttccttattcagaaaaagcagataataccagttgccacctcgtaggtagaatttgagaattaagggaraccatacatgcagattgtttaacattagatatagtacctagtaaacgctcaataactactagctacaacaaccattataactatgttagggcatctgtaattgtatagttcctacccctctctactagaagcttcttagagatctacggcatatgcttacttcaaatgagttatcaatatatctcagcaggcacatcacacagttgtagtctctaaataactgcgatctgctaggtgctagttgttggtagtgattaggaagatgacagtgacgatgccaaatagcaggcaagcactttctcagcactggaatt

SEQ ID NO: 189023 - DNA, 588 bp, Homo sapiens
aatagaatccgtgacctgaagatttcttctttcctgtcttcaattcttctcaaacaaggccattcagagcttgactttgcatagcttgctggtctattagccaagccctgatgaaaatgaggcaaagcattgggcttcccagcakatgctgcaagttggcagcaaatgagagacaagagagtcatcttgactggattctaggtttgtttctctcttctaatcacaatacatttggctcaatcatttctggaaagagaatgactcccgtggccatcatgttagtaactccttggatagaaatgggacattttattttgtctttctgccaagtttccagctccagagatgtggcttttaggatttctcataaaagcccaaaatggtaacataaataaacttaccacaataattttctacactgctctctagcttcccaatggaaactcttgtctttcttctaagtcatccttcacaaagctctctcagatttattatctaagggggtaattcgtcatctaggataaataccaccttcttccactgggcagtactatgctttaggtggctatcgtttctatagtatgcata

SEQ ID NO: 189024 - DNA, 588 bp, Homo sapiens
aatagaatccgtgacctgaagatttcttctttcctgtcttcaattcttctcaaacaaggccattcagagcttgactttgcatagcttgctggtctattagccaagccctgatgaaaatgaggcaaagcattgggcttcccagcatrtgctgcaagttggcagcaaatgagagacaagagagtcatcttgactggattctaggtttgtttctctcttctaatcacaatacatttggctcaatcatttctggaaagagaatgactcccgtggccatcatgttagtaactccttggatagaaatgggacattttattttgtctttctgccaagtttccagctccagagatgtggcttttaggatttctcataaaagcccaaaatggtaacataaataaacttaccacaataattttctacactgctctctagcttcccaatggaaactcttgtctttcttctaagtcatccttcacaaagctctctcagatttattatctaagggggtaattcgtcatctaggataaataccaccttcttccactgggcagtactatgctttaggtggctatcgtttctatagtatgcata

SEQ ID NO: 189025 - DNA, 567 bp, Homo sapiens
atgttgaagttctatatagccagaaaaattttcaggcctagcactttcaaactgcaagaaagctgagcatctttaatcctaaagaatgtgtgcttctcaacttgtttatattctttggtttcatggtaaacagaattctctcttatggaatttgcctccaatgtttggaaaccttgaaatagtgacaaaagaaacttcttgatttttctgatcctgattctgatcactgaaattactcaatgtrtggtgcctatttttattaagtcatcagaaattctaaagctcataactgattccatttatatacagaaaatactaaacatatttccatggagtatttccctgcaagataataggctcaaaccactagctaatctcaccaagaaaaatagagaggcaattaatcccaaacgaagcattccatctgtgttcaaaagcttgaaatgcatgtgggcaggcatgtaaacaaaattccaaatagttttaaaaatgcaagtcactgtcttctcccacaaccatcaccaccacacacacatatgacacacatagaccttagctatttgtgtc

SEQ ID NO: 189026 - DNA, 644 bp, Homo sapiens
ccatctcgaaaacagctagtttaaggaggttttgcaagtggctatcagtagaagaaggaaagctgatgcagacactttggtgacaaacaacattgagtttgtagaaactctctttatccaaagacagagaggaaccaaggcaataagagatctcagagggcttcattctgcaggtcgggatgattgagacagaaattcaaagagagcctttgtcttagtccttttgggctgcctataacaaaataccataaactaggtggctttttgatatgatttggctgtgtccccacccaaatctcatcttaaattgtagctcctacaattcccacatgttgtggaaaggacycggtgggaggtaatttaaccataggggcgggtctttcccatgctattctcatgatagtgaataagcctcatgatatctgatggttttataaagggcagttttcctgcacaagttctcttctcttgtctgccctcatatgagacatggctttcaccttccaccatgattgtgaagcctccccagccatgtggaactgtgaattgattaaacctctttcttttgtaaattgcgtcagtctcgggtatgtctttatcagcagaatgaaagcggactaatacacttataaacaacagaaatc

SEQ ID NO: 189027 - DNA, 576 bp, Homo sapiens
ggtctctgcctttcatggttcttgtatcttatcattgtaccatattctatcaggttccttcattcactcttattcatctgtcaaatacttattgtacacttactatgtgccagaaattgttttgaaagctttgggatatgtcagtcaacaaaagaaagatttctgcttttctgggctctaacgaaggaagacggacaataagaaacatgaaaaatgagacaaattatatagtattttgaaaggtgatgagagctatacagaacaaaaagaaaaagaaaaactagatcatgttaagagagaytgggaagatcagggtagcagggaaacagtttacagtttgaaataagatgccctaggtaaacctcatcaggaaggtaatgttggaataaagatttgcatgaggtgagggagtgagccgtgtagatatttgtgatcagaacagtctagacaggtagtgtcaagcttctaggtgggagtgtgcctcgtctgtttgaagaacagtgaggagcaattcactagaacaagttggaaaagaacagtaacaagaactgagttcgggaggcaataggaggccag

SEQ ID NO: 189028 - DNA, 541 bp, Homo sapiens
cccattttagttagtacaatttaaattccgagtatcctgcctagaattaattaatccttctaacattggcttggaatttttaaacaaaataaactgaaatcaaacattatacataaaaatttcttcctctattttaactctgctctttaaaaaatcaaatgtgttccttttagcctctgaagactttttgaacacattgtctacattcacctctcctcctctcaactctcacagctttcattctctataatgttactcagggcttctattttgttttgaattgttgctaatattttgacatacttgtgcctygattccagaagtagagtacacttacttcatatcccacaattactttagcaatcaataattgctgactgtctaatattcagaaaattgcaccatccatcactttatgctatttataaatggtatttgggatcacaattctcagattaagtttgtgataaatagtttgtcacatatgtaaatgcccataatcaggataaagatatgattcaggataaggaaattacggggc

SEQ ID NO: 189029 - DNA, 568 bp, Homo sapiens
tccatcactttatgctatttataaatggtatttgggatcacaattctcagattaagtttgtgataaatagtttgtcacatatgtaaatgcccataatcaggataaagatatgattcaggataaggaaattacggggcaatatcttttatcagcctctagatattaccttacttcactactcatctatctatagctgggctttagcagtgcaatgaactgtggttctcactcaatatctgtaaattagttattgtggctttgagtggttgtggtttggagggcccagtggtagtccctgtattattttgcagattgtaatcttagcacagattctggtccataaaaggtattcaattaatctttgttgataaataaattccagagttttccctttactagtatgtgactttgactaagatgctaatggtacctcagctgtcactgctactaccgctaatagcagtaacagcagcagcaaaaatccaacattagagatcrtttgaaatcacttgtactgctcctgtcttatctagcctgtcagagaataacatcagaaaaaacagtgtgc

SEQ ID NO: 189030 - DNA, 395 bp, Homo sapiens
gaaaacggctgacagttgatgccattgattgcattcctgaaggtttacacagggatggtatattctagataaatatgagacaagtgatagaaaaaaaaaatgactttataggggagacagcagccaaaacaaattcagggaggaaaaatggagcacgagacttctgagatttcaaggactttggaatggctggggatcaggatgttggctggttagtggtagagatgagttcaaaggtaaataaggggataatcaagaagatgaccttgattgccaagttaakgagtttagattcaatcatgaaggcagtggagagccatggaaggaattttagcaggcgtctgacatggttagatttgcctagggctagcctgtgttgaggaaataagatgtaa

SEQ ID NO: 189031 - DNA, 606 bp, Homo sapiens
ttatctaaaatggaattgaggctccaaaagttatttgatcacttcacataactaataggtgactaaacaagaatttgatagaacacagaatcattgcattcattttccccaaacatccaagagtattgtctgtgaatacttttaatagattaactgtttcaggaaaaaatacattctttaaaatctcatcaaatttcaccaaataacttgatggataattcatgtgacaatttgtatagcaacttgtttctctttaaaccataccctcaagattcatctctctatatttaactagatatattttaaaaaagattgtcttctctggcatccatcggggataagtgacagctgtctgtgcattgatgaagcacgaagactttttccatccgaaggargaaagatcactgcttttcatccttattctttgaactatttaattttacagccatctgaatcaacttttattcttctcgcatatgttctagaatcttataaatagagaaggcagaaaagtgcaacacctaggtagacagcttttgtcaaatattactcctacattgttttacaaggttccttttgttctgtggtaaaaggcagtgtttttca

SEQ ID NO: 189032 - DNA, 616 bp, Homo sapiens
gtttaaatgtaatttttaattagaatgtatcacagaaaatgcccttttcaatttattttaaaagatttgatcatatttttgcccttttaacttatagctagagcaacacatactgtgaaaagtttagaaaagttaaatctaaagtctgcccttgacatgactggtcaattatttcttaaataaatgataataaaaacttaaaaaacaggtaaatagagctggctttcctgtctccaattgagtactttgatatgtaattcacaaaattattaaattttataaaatacactattattttcctaaatttgatgatgttgattttaggaaaagttgatcatataaatgctaagatakattgatgagtatatatgaactatttaattgttatatttgttcaaacaattcagtgtagttattatctttgcctgatcaactacaataaaaatggacttttttgttggcattgacataagaagcatctaaattttcagaggtgcaaacaatttttctttaacttcaatttttttgtttccattttttaatagtttgacaatgaaattctacatgcaattggaattttgagttaatctattacattttaaataatttgaagctt

SEQ ID NO: 189033 - DNA, 427 bp, Homo sapiens
gaattcattcctaatctctctttagttagaaagtccatgatgtgttatatttgtttmtagattgctagtgctgtagcgaaataaacaaagttcaacactaatgtcaccaacataacaccaaaaaactctacaattcaaatgtaacaatagggcacatttcattcaagcatagttgttagatgtgattaaggacgttttatcctttcaagatatggtagtagcaaaattttatgttttatatacaagtgttccctttgttcttgtgtacacatacagtgagcgtctaatgaattattttgtttatattcccaggtataatgttccccagctctagctctaaatttctagactaaactatgaatgtgacatggtgatttttagacacttctggttagctaacaggaaactttatttataaacttttcag

SEQ ID NO: 189034 - DNA, 427 bp, Homo sapiens
gaattcattcctaatctctctttagttagaaagtccatgatgtgttatatttgtttctagattgmtagtgctgtagcgaaataaacaaagttcaacactaatgtcaccaacataacaccaaaaaactctacaattcaaatgtaacaatagggcacatttcattcaagcatagttgttagatgtgattaaggacgttttatcctttcaagatatggtagtagcaaaattttatgttttatatacaagtgttccctttgttcttgtgtacacatacagtgagcgtctaatgaattattttgtttatattcccaggtataatgttccccagctctagctctaaatttctagactaaactatgaatgtgacatggtgatttttagacacttctggttagctaacaggaaactttatttataaacttttcag

SEQ ID NO: 189035 - DNA, 427 bp, Homo sapiens
gaattcattcctaatctctctttagttagaaagtccatgatgtgttatatttgtttctagattgctagtgctgtagcgaaataaacaaagttcaacactaatgtcaccaacataacaccaaaaaactctacaattcaaatgtaacaatagggcacatttcattcaagcatagttgttagatgtgattaaggacgttttatcctttcaagatatggtagtagcaaaattttatgttttatatacaagtgttccctttgttcttgtgtacacatacagtgagcgtctaatgaattattttgtttatattcycaggtataatgttccccagctctagctctaaatttctagactaaactatgaatgtgacatggtgatttttagacacttctggttagctaacaggaaactttatttataaacttttcag

SEQ ID NO: 189036 - DNA, 427 bp, Homo sapiens
gaattcattcctaatctctctttagttagaaagtccatgatgtgttatatttgtttctagattgctagtgctgtagcgaaataaacaaagttcaacactaatgtcaccaacataacaccaaaaaactctacaattcaaatgtaacaatagggcacatttcattcaagcatagttgttagatgtgattaaggacgttttatcctttcaagatatggtagtagcaaaattttatgttttatatacaagtgttccctttgttcttgtgtacacatacagtgagcgtctaatgaattattttgtttatattcccaggtataatgttccccagctctagctctaaatttctagactaaactatgaatgtgacatggtgatttktagacacttctggttagctaacaggaaactttatttataaacttttcag

SEQ ID NO: 189037 - DNA, 469 bp, Homo sapiens
cgggagaaaataaatactaaaattatagcagaactgaatgaagttgggacccaataatccaaagaactgatgaaactataatttgattttttgaaaggataaacaggattgagattgctagctagattaacaaagaaaaaagagaaaagatagaaataagcatgatcagaaatgrcaaaggtgatattatagccaatcccatggaaatacaaaagatcttcagagactcttatgaacacctctatacacacaaactagaaaatgcagaagaaatgaataaattcctggaaacatacaacctcttagggttgaatcaagaagaagttaaaacactgaacagaccaatattgagtgctgaaacttaatgggtaataaaaaacctaccaacaagaaaaagccctggaccagatggattcacagccaaattctaccagatgtccaaagaagggctagtgccaattccagtgaa

SEQ ID NO: 189038 - DNA, 469 bp, Homo sapiens
cgggagaaaataaatactaaaattatagcagaactgaatgaagttgggacccaataatccaaagaactgatgaaactataatttgattttttgaaaggataaacaggattgagattgctagctagattaacaaagaaaaaagagaaaagatagaaataagcatgatcagaaatgacaaaggtgatattatagccaatcccatggaaatacaaaagatcttcagagactsttatgaacacctctatacacacaaactagaaaatgcagaagaaatgaataaattcctggaaacatacaacctcttagggttgaatcaagaagaagttaaaacactgaacagaccaatattgagtgctgaaacttaatgggtaataaaaaacctaccaacaagaaaaagccctggaccagatggattcacagccaaattctaccagatgtccaaagaagggctagtgccaattccagtgaa

SEQ ID NO: 189039 - DNA, 462 bp, Homo sapiens
acacacaagcccagactgaaaagactacaataaatacctaacccttcaatgcccagacacagattaacatctacaagtatcaacacaatcccagaaatcatgacttcatcaagtaaactaaataaagcaccaagaaccaatcctggagaaaaagagatayctgacctttcagacagagaattcaaaatagctgtcttgaggaaactcaaagaaattcaagataatgcagggaaggaattccaaattatattaaagaaatttaacaaagagattgaaataattaaaaaagaatgaagcagaagtcctggagctgaaaaatgaaaccggcatactgaagaatgtatcagagccttttaatggcagaattgatcaagaagaaagaattagcaaacttgaagacaggcaatttgaaaatacagtcagagaaaacaaaagaaaaaagaattaaaaaaaaatgaagca

SEQ ID NO: 189040 - DNA, 602 bp, Homo sapiens
gctattttgaagcaaatctcagatatagaataattttatttttaatacatcaaaattacattatagtccgcctaattaatataaaagaaaatcagtgaaagaagaaatgcaaagaaaaaaggaaagaaggaaggaagaaaagaaagaagcaaataaccaataaaccaactaaaaaggaaagaagaaattatgaggaagggagtgagaaacatggtytgctattattttattcctgtaaatgccaattcaaatgaagtagtaaaattttgatttggtgcaagctaatttgctttattttgaaactgatcccagttagtgcatatttaccttcaaagagttaagttgtgctgtaaacccattgattccaattcccaggtgcttcaaacacttctagatggaattcagactctgtgggatcatctgttcctacccagagggtggtcattatagaaccagaaccaccttactctaggtttccttgtcactaaaacaaacaaataaaataaaatctggcatttttctgacctatggttttatttcgttttgttttcactgtagctaaaacacttcaataaagatagaaaaatgtaaaacttcagaaa

SEQ ID NO: 189041 - DNA, 617 bp, Homo sapiens
atggaagactgtcaagaatgcatattccttggagctgtcattctgaaacttacatgcttaaacttctagccactgtgttttttagagtatgctagattttgtctaattcaaaacacccatctgagcaaggctgagtcagctacaagggggatttcagctgagagtagctttaagttagcctggagctttctctaccatagtaccactggtgggacacttttttcactttgtttaagcctaagtttgtctggatctctggctcattcattgtgggaaaaataaatatattcttgactctttcctttttatggtccagggacatctggagacagtcagggaaaagtgtcacatttcacttgctgggcactcattcaaactaaactatctacctcccagccattttcaccatcagtctttttaaattttcaaatcyactctccagccagctgagttagtgtcagatggttgacatgaatagacaagatgatccctccaatccaccctgtcagggacagcaaatgacacttgtgggaaaggctgggtctctcatggatgacatcatcactccacagaggttaaggattcaccagacacttctaacttctcctcaataacct

SEQ ID NO: 189042 - DNA, 487 bp, Homo sapiens
tttaagccaggctatcctgaagatctctcctttactggctgtattaatcaaagttctctagagggacagaactaataggatatatacacacacacacacacacacacacacacacatatatgtatgtgtatatatatacagatatacgtatgtgtatatatgtgtgtatatgtatataaagatgagtttattaagtattaacttacacagtcacaaggtcccrcaataggctgtctgcaaactgaggagcaaggagagccagtctgactcccaaaactgaagaacttggaatcaatgttcaaggacaaatagcaagagagaaagatgtaggctgggaggctaggccagtcaccttttcacgtttttttgcctgctttgtatttgctggcagctgattagattgtgcccactagattaagggtggatctgccttccccagcccagtgacttaaatgctaatctcttttggcaacgccctcacagacac

SEQ ID NO: 189043 - DNA, 487 bp, Homo sapiens
tttaagccaggctatcctgaagatctctcctttactggctgtattaatcaaagttctctagagggacagaactaataggatatatacacacacacacacacacacacacacacacatatatgtatgtgtatatatatacagatatacgtatgtgtatatatgtgtgtatatgtatataaagatgagtttattaagtattaacttacacagtcacaaggtcccacaataggctgtctgcaaactgaggagcaaggagagccagtctgactcccaaaactgaagaacttggaatcaatgttcaaggacaaatagcawgagagaaagatgtaggctgggaggctaggccagtcaccttttcacgtttttttgcctgctttgtatttgctggcagctgattagattgtgcccactagattaagggtggatctgccttccccagcccagtgacttaaatgctaatctcttttggcaacgccctcacagacac

SEQ ID NO: 189044 - DNA, 487 bp, Homo sapiens
tttaagccaggctatcctgaagatctctcctttactggctgtattaatcaaagttctctagagggacagaactaataggatatatacacacacacacacacacacacacacacacatatatgtatgtgtatatatatacagatatacgtatgtgtatatatgtgtgtatatgtatataaagatgagtttattaagtattaacttacacagtcacaaggtcccacaataggctgtctgcaaactgaggagcaaggagagccagtctgactcccaaaactgaagaacttggaatcaatgttcaaggacaaatagcaagrgagaaagatgtaggctgggaggctaggccagtcaccttttcacgtttttttgcctgctttgtatttgctggcagctgattagattgtgcccactagattaagggtggatctgccttccccagcccagtgacttaaatgctaatctcttttggcaacgccctcacagacac

SEQ ID NO: 189045 - DNA, 565 bp, Homo sapiens
tctgagtaatcttccccagatttaccactttcattagtggtgatatcttcattgatatccagaaactaaaagaattgaaagagaagtcttcataatgtagcattcttcactgaagtacgaattctgttcaggcaagccagatgttaaaaatctttgcttttcccaagcatctctttggcaggatcgaagaaaaaataactgaatataattgttatcactgtgccattaagatagtgtctgcttttaaaataggagtttgggaaaatgtgcttttcaaattcaactttggcttcaatatcccgggctggggggccaagaggatggtaggaattgctgtgtgtcaaatcctctttactttgtattctgttttgttgtaaggaatcgttaggtatggtcctgcatgttgaggggaaaatcaacctactgtgtccgatcgcggcaaggctccaagcatcagctcactgctctcccagctcccaaactctcatcaattaccctgctcactcatttcagcagcaccyaggagctggaaggtgttaggacaaatggcagaaagaacaaaagc

SEQ ID NO: 189046 - DNA, 386 bp, Homo sapiens
tagaactagagcaatccagagaaatcatgtagctcattcaactcttaattcctcagatgaaaaaacagatttagataacctaaattttcaatcataaccaattagaggtagaggagattagcacccaggtctcaggcttacaaatccagtggttgtttcttatattatagcatgataccttcagtcatgctaaaaattttttwaaaaaagatttaacacctcattgattttagcgtatcagtgaaactgaacagatacattgctaattaaaggaatttaatgtaattaatattttttaaaaagttgcctgcaagactatactttcagggatcatttctatggttcattactagggaagtttccctgaatgtgtagagcaccgaaaa

SEQ ID NO: 189047 - DNA, 560 bp, Homo sapiens
ttgttagtaattatgcaattgtaattagaagacagatattattttttttaaaagaatcccattttccttataattccaaattgcctgtagtgctaacatatttcactaaacgctttacatatgttttcattactggtcttaatttacacagtgatgacttctcattacttattcctgaagtcacttttaatcttatgtctttggtttgtgattttgtttataccttcccccggctgaaccaccatatgttcaagaggtttagtctgaaatttcttgtctattcaatatttctttgtctgccttaacaatttttcaaactgttacaagttttccccttcatcttctgacacaagggctttatagccatgctgtccctttaatttgtccctgctttccagacatattcctcttcctgctctcttatcactagaatctcctttcttctgttcattctccttttaccagcattaccatatcctccatttttatccccagggttattgctccttttattttgttatatatttgtaycggaaggcaagccctaacctaggcactga

SEQ ID NO: 189048 - DNA, 437 bp, Homo sapiens
gaccagtcagttctaaggaattactgagatattccttaaaaggagaagcaaaactcatcacaaacagaagtgcttgaatcttgttttttaaatttatttgattaatgattgctttccaaagtcatgagtcacagtggcctgcagcatgatactgtgcagccatagtttcattctttactaaaagtatgacaggcttttgacaaaataaagataattgtgattatataataagatggaggctgacatactttagcaagaaggagctgaccattccatttctgtatttcgcccatgatagcaagcaaatactaaggcttaaaagaataagaatatgctccattacataggacttratttaacaggattattttgagattgacaagtctaaaatttgtcctgtcataataactatcttttatagtacatgcagttgaatt

SEQ ID NO: 189049 - DNA, 634 bp, Homo sapiens
ctagacatggtagatttttaaaatatacatattttatgtggtaacacaagtttcaaatatgttatgatactcagaatgttccacatttatgggctgataatgattgctctacaggcaaacaaaaatattggtacttattaggtggctaactgatcagatatgttcacctcctatccattctaagatctaactgaaatagaggttatacatacatatgtacatacatacaaaggtcattaagtacattaaaacaaaggcaattactaactccaagaaaaatgaaactttgtacatatgaaaactagatcaaattgagactacttagaaaaggacaaaacaataattacagtcacaaaaatgaaacaattgaatataagtttatgtttatgttgggacagtgggggataaatttaaaagwtagagaaaagatttttccattatagggggaaaaaaggtaatttaaggaggtagaactgctggagaagctttaatgacagtataaaagtttgtagggatctatgaggagtggggatctcaggaaagaaagcattttcagagttttatacttgcattaattggttacatatatcttcaagtaataatgcatgttgcttaaagaaaatataaaaaataa

SEQ ID NO: 189050 - DNA, 589 bp, Homo sapiens
tcttgggacctatgagacaatatctgtaacagacacaaagatgcactgcccagttcccctttcaaggaaggacttcaaatcttgctgcaggaaataggattggcacacagcctccaactatcagttccttcaggacctgccttaactatagagagttgctttgcctaattctgttttaagcagcttgcatctggtgactgaataaggcagaggtacaaagtcccggttatttcagcccagctgrgcaatgttaactccagagctccctgctgtttgggccaatgttttgtctgcctgcatctcagttcaacttcttcctctgcccaattgaacttctttccccttattttcccatggattaattcctattaaatattttgtatcacaaactctgtctcaacatctgctttcagagagctcaacctcaaagagttaatactggcagtgttctgaaaaatcaggtgataagatgaagttttggagatgaatcattcattgcttagatgacaacgagaatcctaagctggttttggtggaagacagacagccccaggcacgtggaagtgggtcaaatgtcaagccttcacca

SEQ ID NO: 189051 - DNA, 553 bp, Homo sapiens
tagttccagcaatttctaattaaatacagctcaggagaaattttatgatctgtgtcacatgatttctgtctgtatctgggatgctttttctccccctatttaaaagcccctccagtgaagtctgcctattttcttaatcataaagggctaactaatctagatgcgaaaatattgttttattctctgacgttagcatatccataggagtccattgccgaagttctgcargcgagggatcttcaacctcttaactctaaacactgagcaattgtggatgaatggggtgtgagttgctcccttcttatagctccttcacgatgtctctattcaaaaagtgaatggcatgcacatttgtgcttttccagctttggctcaagactgctaactaataatcctaaattaaccagaagaataggctggtataaattttgccaaacacactcacgtatattaacttatttacaatttaaagcaatcacgtgaaggaagctggccagatattattatccccattttacaaatcagaacactgactttctcaaacactaagtta

SEQ ID NO: 189052 - DNA, 438 bp, Homo sapiens
atagttttaaaaaatatggaagaatgcattatttgtaaagaatatttctatgactcctataaagtgtatggattcctggtctgatgagacaataattgggaggaaatccactgttagatgtttatgagtgtccctgagagaagaaccctctttcttgtcctctttgcatctatgctggataaacccaggctgggtgaacaggtaacagaaatgtcaggtagattgggggagtcagatgtaaaggctcatgtgcctcacttcccatttggaaattaaatgattttmtgattcatgagtcaatttgtcatatttcctttttcacttttaaaaatgtattttgtcccaatttcatattggcacaaccactatggggaacagtttggaggctcctcaaaaaaaaaaactacaaatagtgctaccatactctagcaatcccac

SEQ ID NO: 189053 - DNA, 547 bp, Homo sapiens
gaaggtttgtaggggtttttacttccttttggtactattgtaaatggaattgctttcttagttttcttgcctgatactttactgttactgaatagaaaagcaatgaatttttgtatgttaattttgtatcctgcaagtttactaatttattagttctaacagtttttagtgaaattcttagaaatttctatgtgtaagagtatgtctgcaaatgaaaatactttaattcttcattttttatttgtatgcttttcatttcttttctttttgtattgctctggctaggaattttagtactatgttgaatcaaagctgtragagttgtgttcttgattttagaggaatggttttcagtttttcaccagtgagtatgatattagatgtgttcttttcatacatggccttagtgagttgacatttattttttctattcctagtttgttgagtttttaccatgaaagatgctgaattttgtcaaatgttttttcctgaattttaaagacaataaatagattttagtttatttttgtctttttttccaagatgg

SEQ ID NO: 189054 - DNA, 613 bp, Homo sapiens
atagttctacgtcttatgaacagtaatgagtttcatagcctccttggggggccaggaggtcagtgtcattatgacaagttttagaaaatgagaaacaggaggcacagaaaatctgaatgatatggcctaaaaccatcactgggtcacagtggccattagtaataatttctctctcttttttttttaattttattattattatactttcttaaactaacctttgggtgttttttttcttagtgagacacagaggagaaataaatatcaaacaactagggaaatcaaaggaataacaatagatatgttaaaacagaattaaaggtttaaaaattagggatgaaggagaaacaaaaaaayctaatatgattagaacagaatatttatgtatctgaaagtgataaactcaaataagacaattgaaaactttactatggataccatattttacttttatgctttggtttaaatatattaatgaaaaatggataatcatttttacatgaaagtagatacaacactggactttgtagtcagcattttgtcttctgctttgcatgtatctactttactacatttttctcttggttaagaactccttctatgtattaattta

SEQ ID NO: 189055 - DNA, 626 bp, Homo sapiens
atagtacctaattaaaggaagattaggttagttcatacttaaagggttaaggcaatatttggagaatattcttacaatgggctgtaagagaaacagaaatatttttacttattttgggaaatgttattttctagtatgttcctgtgcaaatcaggattttagaaacatagacctgaaatttctaggtttcttgaggaagcaactgattgatggctattttctccattcttggcagcccaaatgaatgactccaatttatggaagatagraaagggcataaggagaaacataggagacatattcaaatattcatgtccatactctcacacatgtttaggaatacttcaggtttgtttttgatgatggcagaatctaggtaactttcaagatttgagaaagtagctaaataattgcttattttgtttctattcaaatattgaatgtacatcttcaaggtactcaaggtctttgctagagatgctggaagaactttgcgtctaatccagagaattgtagagtaacaacttgattctctctttgatgccatctcatcgaaagacttgtgaaatgtacaatcctagacacaagctatatgctcagtaactattttttttaggttttataag

SEQ ID NO: 189056 - DNA, 481 bp, Homo sapiens
cacattttctttatccattcatctattgatggacacttaagttgcttccaaatcttggctattgtggacagtgctgcaacaaacgtaggtgtgcagatatcacttcaacatgctgatagaaatacttaattttatttcagtgtttgtacttatggtccaatgattgtttccttaacagttgtggtgactttgaaagaatgtattatgtttctaaggagaaaaagagagacatttaggagctttctacatgaaattttatcagtctaaggaatcacacatggaggkaattgagaaattaaaattatgttttgaaagcaaaatttttcctctttgaaaaattagcttatcaggcaattccttcaagcattaagaaaaagatctgccaatagaaacagcctccccgtggattttcaaaattttagattttacctatgttttgcatctttattaatctccagacgatttactagtgggctgggct

SEQ ID NO: 189057 - DNA, 410 bp, Homo sapiens
aacttttttgatgagcctttagggttttctaggtagacagtcatatcatcagtaaacagtggcaatttgactccctctttaccgatttggatgccctttatttctttctcttcttgggttgattgctttggctaggacttccagtactatgttgaatagaagtagtgaaagtaggcatccttgtcttgatccaattcttagggggaatgctttcaacttttcctcattcaggataatgttggttgtgygtttctcatagatgacttttattaccttgaggtatgtctcttttatgccaattttgctgaggttttaatcataaatcgatgctagattctgtgaaatgctttttctgcatctattgagataatcatataatttttgttttaaattctgtttatgtaatgtgt

SEQ ID NO: 189058 - DNA, 580 bp, Homo sapiens
gccagcagcctccagtcactgagaggctggagccgggcctccctcggccttcagaaggaaccaaccatgctgacaccttgatcttggcctccagcctccagaaccatgcaaaaacaaacttccattgcctaagtccccatccccaggaaacaaatgcagttagagttgtgaaragcagaaactactgaatatacgaggctttttctgatctactctctctgatagtcagatgtggagtttgagagttcattattgaaattctagtaaacaagctgactccacgttgattctggaagccgctgacagtggaggcagtattctctgtaaactcccagtgtggttttgtggcctgggcctcggggctcgctctgccagctgatgacccgctgtcctccatgctccatgtggcgtcttgctgaccgtctgctgttggtagagcctgaggaggtcaaagtcccaggaatggttcgtcagcatttgctaactctagaaatgcaatccccaagtcactgacccctggcattaattctgggtgctggggggtggccatgggcagctcggccagtgtcactgcctacaa

SEQ ID NO: 189059 - DNA, 580 bp, Homo sapiens
gccagcagcctccagtcactgagaggctggagccgggcctccctcggccttcagaaggaaccaaccatgctgacaccttgatcttggcctccagcctccagaaccatgcaaaaacaaacttccattgcctaagtccccatccccaggaaacaaatgcagttagagttgtgaagagcagaaactactgaatatacgaggctttttctgatctactctctctgatagtcagatgtggagtttgagagttcattattgaaattctagtaaacaagctgactccacgttgattctggaagccgctgacagtggaggcagkattctctgtaaactcccagtgtggttttgtggcctgggcctcggggctcgctctgccagctgatgacccgctgtcctccatgctccatgtggcgtcttgctgaccgtctgctgttggtagagcctgaggaggtcaaagtcccaggaatggttcgtcagcatttgctaactctagaaatgcaatccccaagtcactgacccctggcattaattctgggtgctggggggtggccatgggcagctcggccagtgtcactgcctacaa

SEQ ID NO: 189060 - DNA, 580 bp, Homo sapiens
gccagcagcctccagtcactgagaggctggagccgggcctccctcggccttcagaaggaaccaaccatgctgacaccttgatcttggcctccagcctccagaaccatgcaaaaacaaacttccattgcctaagtccccatccccaggaaacaaatgcagttagagttgtgaagagcagaaactactgaatatacgaggctttttctgatctactctctctgatagtcagatgtggagtttgagagttcattattgaaattctagtaaacaagctgactccacgttgattctggaagccgctgacagtggaggcagtattctctgtaaactcccagtgtggttttgtggcctgggcctcggggctcgctctgccagctgatgacccgctgtcctccatgctccatgtggcgtcttgctgaccgtctgctgttggtagagcctraggaggtcaaagtcccaggaatggttcgtcagcatttgctaactctagaaatgcaatccccaagtcactgacccctggcattaattctgggtgctggggggtggccatgggcagctcggccagtgtcactgcctacaa

SEQ ID NO: 189061 - DNA, 580 bp, Homo sapiens
gccagcagcctccagtcactgagaggctggagccgggcctccctcggccttcagaaggaaccaaccatgctgacaccttgatcttggcctccagcctccagaaccatgcaaaaacaaacttccattgcctaagtccccatccccaggaaacaaatgcagttagagttgtgaagagcagaaactactgaatatacgaggctttttctgatctactctctctgatagtcagatgtggagtttgagagttcattattgaaattctagtaaacaagctgactccacgttgattctggaagccgctgacagtggaggcagtattctctgtaaactcccagtgtggttttgtggcctgggcctcggggctcgctctgccagctgatgacccgctgtcctccatgctccatgtggcgtcttgctgaccgtctgctgttggtagagcctgaggaggtcaaagtcccaggaatggttcgtcagcatttgctaactctagaaatgcaatccccaagtcactgacccctgrcattaattctgggtgctggggggtggccatgggcagctcggccagtgtcactgcctacaa

SEQ ID NO: 189062 - DNA, 555 bp, Homo sapiens
aacagtggtgagaagtggcatcactgcrttcttcctgcttttggtgggaaagcttctggtttctcactattaagtgcgatgttagctgtaggtttttgtagaaaatatttgttaagctaaggaagttaccctctattcctagtttgctgagagtttttatcataaatgaatgaaatgaatcatgaagtccattttgtaataacactatagcactttgcagatagtgcaagtatcctatatgacaaaataaccctaacttttcttttccatcccttgttatcattgctgttactcatttcttatacataagcatatatgtaagcactgttaactgaacgcattgttgctattattttgttaaatccaacaaaaaccccaatattttcatctattaatgtaatcatctgttttttctttcttagtctgttgagtgatggattttattaattgaactttgaatgttgaatcagacttgcatacctgggataaaacccacctggttgtggtgtataatttttttacactttattggatttgatttgctaatattttgtt

SEQ ID NO: 189063 - DNA, 595 bp, Homo sapiens
acaaggtcaactcattgacctggcattctcagaagaaattcaaattttgaacgttgtagtgaatgcatttatgctgatacagttccagttctagagaatatacttatgtaggtacaggtccatctgaacaggtaatacataaaaggctagaatctgtcaatgtctctaatattattctagcttgtkatgactgttctataaatgtctggcaatgaacaaattgccatgggccagttgcagatgactcagtatagtctgtattatgtatcccttatgctaaagaattcacaatcaggttcttgaatgtatttcaattggttgcaatacttagttggtaatattcatgtcacatacacataaaattatattttctaagaaatatagatattcaaaatgtatttacatcttagttactttgaatgagacttagagattttcacacatgattataatcaagtattttaagtaaaagtaaactagttttatgtaggttatgaaatataggaggaatatctctagcacatgaggaatcactttcccatattagaaagactacttcctttcaaggaagagtttatcaataattaataatttc

SEQ ID NO: 189064 - DNA, 509 bp, Homo sapiens
ttcagcgtaagaaaacatccatctaaatttatccctaattcagtcattttccccaaagtaaattaaaaagtatcaagaaaatcatatgtaaaaagattcaattcacttcatactttttytcatacttagtagaagattaatattagaaatttagagattttatacataatgtcacaaccataaatcagaattaagaaatctgccaatgttgcttaatctttgcatattttaaacaaatacttactaaataagaatgatcatttgccctgtgcataaccaatagtttatgactaaatataggaattgccaatattcagaagtccttatgcagccagcttaatggacctcattttgtgcctcattatatgaaacacatgtatttccttttagcacctgtctaaaaatatgtaagagatttcctttttagtttatatttgttttaaaaatatctctacatgtatgtacaatgttaacacatataaatatttacccttttgagaaacattcaa

SEQ ID NO: 189065 - DNA, 623 bp, Homo sapiens
caaaatttaatgggatagctttttactactgagtatatttgctgtgatatttttgtagatactctttattaaattaaggaagttcctaattatatctaagttgctaagaatttttttatcaatgagtattgaattatattaaaagctttttctgcattcattgggataatgtatggtttttctccttcagtctgttaatttggtgaattacactaatttacatttaaatgctaaatgaaacatgcatttctgaaataaaccacctcagctatgatttattatattttaggtatttcacattcatttaggatttgattttgttaaaattgtctgyatacatattaatgagaagcattggtctataaatgatctctttgtaataaacttttccagttctcacgtcttctcaaaaattgaatattacaaatgaatttcaaatcctcactgccatgactaccatgcattaattcgttcattcattcctttattctaaaactctgttgagagcctgtcttatgtcaggcactgaaataaaattttcccatttaataatacatttatgcctcccaataatgtcatacgtattattagtatcttcagcttttaaaaaaggaatgaagttg

SEQ ID NO: 189066 - DNA, 578 bp, Homo sapiens
gagaggccaactaattaatgaaatttgagcgcttaaaaaagcatcaggtgcacagtaagcactcaataaaagttatgtcttcatttttatgttgtctacatttaacacaatgaatttgttgactatatagtacggttgtttaacctttttcttccaattacttctctgaaatctaaagcaaaacctctcagtctgttttagatgttaggacagatagcatcacattcccagggttcyaaaccttccttatttagcttcaggatatacaaatcttaatattaagtcttaaggcaccaatgctaccatacctatgctattcgaagaattatttttaataccattgagaaaacccaggtgcagcatgcttgttaattcccacaatacatttatctgcttggcaggtacagcctgtgagcttgacatgttaatgttgctgtaatgctcctttcctcatccaactatcagtgggaatactgcatgcaaaggcaaaaacggtgacacagaaaaggcattgcctatgctaggtttgtttttccttgttttatctaagcttgaacaggagaggttttgtaatagat

SEQ ID NO: 189067 - DNA, 558 bp, Homo sapiens
gagcactcatctacattacctgtaattacagtgtactaagataaaaagttgacataagataaaataaaataaatttcattctaaaaatatttataacaaaaagaggcgcaggatccaaccctggcatccacaatccagagatgtaaataagaataaggacccacaaaatgcactgaaaggtacagtgcagcctatatgatttgaggatactaaggattgtggattgtgttaccaattgtggcaattgttgctgagaggtcaagaaataggaggacagagaagckatcataacataacatttaatgttcaagattctttcctaaatttaatgttttgaatcaccttgtttttaatcttatatacttttacctgtgtatcactctaatttgtgatcttagtagaaaaatagaaattgatcttaatttcatggttaaaattaaattttaatctcaagatttgaaatataaaactcaatatggctgttcccctgcttccaatgaagactgctataaaatcagaacaatgattatcaaatgatgccatgaatgttagcattat

SEQ ID NO: 189068 - DNA, 602 bp, Homo sapiens
tatcatatgtacttgaaaaactccagagaaaaaaatatagaaacaataagaaaagccagtaggggagtcagcaacaaaattacaaaagtcagtcaatagtttatcaatagctttccttcctacaaataaaaagattataaaataaaatagaaaaaaaaacattaaaaataaccaaaaaataaaaaacaagtgaaaaaggttaagataaatccaagagctatatgaggaaaggtttaaaactctattgtggggcatggaaaaagactcgagtaaakgaaaaacgcctggatggggagactcaatattgaatcagcgccatttctacttgaatccattaaatcaatgtgatcccaatcaaaatactagaaatttttagaactttttaaaatttcaaaaatgttttaaactttaaaatttgtgaaattaaaaaaattttaaaccactggctctgtttctctggaaaaccatcactaatttaaaatttatatacatacataaaatatatacataacccatgtgtgtctttgaggcatctggaaaaaagcacaccagcttgttggtggcttcctctgatatgtggcacagaggacttctcacatcac

SEQ ID NO: 189069 - DNA, 569 bp, Homo sapiens
caatcttcatttctgaggatactgcaactctcccagatgctctattagatgactaagtgtgtgtctctcatttcatataggtatgtatacttacttatatttacatataggaacatttgtttctcaaagttgaagtatattcattcaactacactcattgaattagattgacttaattttgtccaaatgacttaggtagaactgtaccraaattcgtactaatagtattccagaccgtcatccacaaattaagttgtgactcattagctggatttatcataggaacgtgagttgtctgattttctttccataaattatttgtttgtgggttccacattcatagcttcaatgcaacgcaacatttttggagcacctactctgaccatggcattgtgcaagagattgagatgacctaaacttcaaacagtaaaggattacttgccatctacccaaaacaacaattctgaatattcagtctactttctcagagtaattttcataatatagctatactttttgttcaatttgagcaaaggtggaaatggaagtttaagtgtagttgaggtttt

SEQ ID NO: 189070 - DNA, 569 bp, Homo sapiens
caatcttcatttctgaggatactgcaactctcccagatgctctattagatgactaagtgtgtgtctctcatttcatataggtatgtatacttacttatatttacatataggaacatttgtttctcaaagttgaagtatattcattcaactacactcattgaattagattgacttaattttgtccaaatgacttaggtagaactgtaccgaaattcgtactaatagtattccagaccgtcatccacaaattaagttgtgactcattagctggatttatcataggaacgtgagttgtctgattttctttccataaattatttgtttgtgggttccacattcatagcttcaatgcaacgcaacatttttggagcacctactctgaccatggcattgtgcaagagattgagatgacytaaacttcaaacagtaaaggattacttgccatctacccaaaacaacaattctgaatattcagtctactttctcagagtaattttcataatatagctatactttttgttcaatttgagcaaaggtggaaatggaagtttaagtgtagttgaggtttt

SEQ ID NO: 189071 - DNA, 596 bp, Homo sapiens
caggtgtttaaatttggttttcatttcttagaaaaataaatgcatataaggtttaaatatagtcatttccaaaagtatctttatcctttcttggaataagctaccagtattgccagattctaatagtttatcacttacagtaaagcataaagtaggccaayagggagttctcctgttagtgaaaaatgtccttggtgaactatttaacaatttgaaggaacactgtttactaatccaccctgtctgtaatgctctatctacgagatcacagtccaagaaatagataagataattgaggaatctatttgcagtccagaaattcataaagtcaggatgaaattttcatccctctcctattagtggccagtctcctcataatgaggtttggtaaaagcatattaccaaagggaaaagaaaatagtcagagtaatgtcctgacgcagataggtactcaaatagcactggattcttattaccagctgcttctccaccatatatgggactgccaaatcatttggggtagagtagattacttgacatggtgtcaagtgcttacaggattctggatgactaagcatctttatttaactgccatg

SEQ ID NO: 189072 - DNA, 596 bp, Homo sapiens
caggtgtttaaatttggttttcatttcttagaaaaataaatgcatataaggtttaaatatagtcatttccaaaagtatctttatcctttcttggaataagctaccagtattgccagattctaatagtttatcacttacagtaaagcataaagtaggccaatagggagttctcctgttagtgaaaaatgtccttggtgaactatttaacaatttgaaggaacactgtttactaatccaccctgtctgtaatgctctatctaygagatcacagtccaagaaatagataagataattgaggaatctatttgcagtccagaaattcataaagtcaggatgaaattttcatccctctcctattagtggccagtctcctcataatgaggtttggtaaaagcatattaccaaagggaaaagaaaatagtcagagtaatgtcctgacgcagataggtactcaaatagcactggattcttattaccagctgcttctccaccatatatgggactgccaaatcatttggggtagagtagattacttgacatggtgtcaagtgcttacaggattctggatgactaagcatctttatttaactgccatg

SEQ ID NO: 189073 - DNA, 372 bp, Homo sapiens
caagtagtcagtctgcagaaaactaaagataaaaagcaagttttaaaagcagacagaggggtaaaaagacatattaaatactagggtaggggtccttctaacatctttacaaagctgaaagaaaatatagtatgaacctaagattctatacctagtaaaaatatccaccccraataaggtgaagtaaagatgtttctgaactgacaaaatgaaaaaagtatctgttcccaggagacctgcactactagaggtttttcagcctgaagcaaaacaacactagaaggaatcggggtatcttaggaataaagatcagtagacacagcatatgtagaggaaaatagtatatatgtacatatgtataacatttatata

SEQ ID NO: 189074 - DNA, 613 bp, Homo sapiens
ggaggggaggaaaacagaaactttacagtgaagaaactttgagaaataccatctcaagaatgtgatccaggccacattactcakcagtgataaattttgttaataatatatacttctgattttatgtaataaaaatgacccataccttctgcaatcttcctaccagaaacctgtaactccagcgtaatcataagtaaagctttaaacaaaacacaactaaggacattctgcaaaataactgaccagtaatccttgaaactgtgaagatcatcaaaaacaagagaagtctgagaaactgtcacagtcaagagtcacctaagaagacgtgactattaaatgtaatgtgctgccctgtctgggattctggaacagaaatgggataagaaaaaattaagaaaaattggaaaactatagattgtagttaataatgtatcaacagtagttgattatgacaaacgtgccatactaatgtaagagaataatgaatgagagaaaagggtgatggttatataggaactctatactatccttgcaattttcttgtaaatataactactctgaaataaaaaatatatatatttaagacaaaaaggatgagaagacagtagatttt

SEQ ID NO: 189075 - DNA, 613 bp, Homo sapiens
ggaggggaggaaaacagaaactttacagtgaagaaactttgagaaataccatctcaagaatgtgatccaggccacattactcagcagtgataaattttgttaataatatatacttctgattttatgtaataaaaatgacccataccttctgcaatcttcctaccagaaacctgtaactccagcgtaatcataagtaaagctttaaacaaaacacaactaaggacattctgcaaaataactgaccagtaatccttgaaactgtgaagatcatcaaaaacaagagaagtctgagaaactgtcacagtcaagagtcacctaagaagacgtgactattaaaygtaatgtgctgccctgtctgggattctggaacagaaatgggataagaaaaaattaagaaaaattggaaaactatagattgtagttaataatgtatcaacagtagttgattatgacaaacgtgccatactaatgtaagagaataatgaatgagagaaaagggtgatggttatataggaactctatactatccttgcaattttcttgtaaatataactactctgaaataaaaaatatatatatttaagacaaaaaggatgagaagacagtagatttt

SEQ ID NO: 189076 - DNA, 352 bp, Homo sapiens
aatgtgaattcatggagacctcaagcataaggtaacttttctcatgaagttatatattttgcctgctgtgtatttcatacaaagggattktttccacaccaacttttcacttaaatttaatctcatcccattatctccttcaaatatgttcagtacttatggtttccacctgctatctatttgtagactgttaccattttcttactttgttgttccttagaacttgcaaaaatcttcggtatctttaaccttgttttaaatcattccctctcttctctttcccataatcttatccattgctcctctctgaagttcctatgtgcgtacacagctcttaggtaatgagtgccaa

SEQ ID NO: 189077 - DNA, 531 bp, Homo sapiens
aaacaaacaagaacctagaacttcttttgtcaaaagccttttctttggtaccaactttacaaagatgacatgacttctaatatcaaagtctataaaatataagccaagtgatcaaaamaatcagagggttagaaagtacccagaagtcaacaagttcaattctttagattacccctgctcttagaaacctggctgtgattcagtgcctaccctgaacctgtatatcacccttctaacaatttctccatgtgttgtccctcatagagtggaagaccagatcccaaaaacgtgtcaaaggaagaggaaaacaatgttctttggtgaacatatcaaaactgattttttctgggtctactggcagaaatatggaactgatgctaaagctaaaaaatggggggctatactaagatgtgaaaataagtttacatgactaagaagtatttttaaactcaagtttagtgagtcttcttggtatatactcagatatatagtcttgtttttggcagtggtagattaaatcatcaaaatgtt

SEQ ID NO: 189078 - DNA, 572 bp, Homo sapiens
tgttttaggggctgggtcttgctctatcacccaggttggagtgcagtggtataatcatagctcactgcagcctcaaactcctggcttaaagtgatcctcctgcctgatccttccaagtagctatgaccataggtgcatgccaccacacctggctaatttctttttaactatttgtaaagacagggtctcagtatgttgcccagactggtctcaaactcctggcctcaggcaatcatcctgtcttggactcccaaagtgctaagattacakgtgtgagccaccatgcctagccttcatggctttcttaagtccaaatttctgatttactaaatctcagagctatgggtcattttttaagtatagaaagccttaaaggtagggatttcatctttgtattctttttatacccaaagcctaacaaggtgactggcacatcataataggtacataaaatgtataatgaatatatgtgtaaacatgggaaataaacatgtaatgaaacttaaaatggttttgatttcattttaacatgtttttattatgtcttgattgaagaacgtggttcctttgat

SEQ ID NO: 189079 - DNA, 378 bp, Homo sapiens
gtagaagtttagcaggtttgagtctcagcgttgttttaaggactyatgcagctcagcctgatgttctaatccctgggcattcctgctttcttttcctcttttgaattgcatctgccagaagacagacctgtttctgggcagacgagaagcagagctaaggcagtgtggcggtgtcagtgtccgtggacttaagtggccagtggtaaatcactgatcagaagataaaggttgatgtggtgggggcctccccctgttatattcctgctgtaacctgctcttggttattattagtttctacaggacccctcgtatcatagtcatatcatatttcactctgcttatttctatgtgtttcccacctctccttctgttgcacat

SEQ ID NO: 189080 - DNA, 378 bp, Homo sapiens
gtagaagtttagcaggtttgagtctcagcgttgttttaaggacttatgcagctcagcctgatgttctaatccctgggcattcctgctttcttttcctcttttgaattgcatctgccagaagacagacctgtttctgggcagacgagaagcagagctaaggcagtgtggcggtgtcagtgtccstggacttaagtggccagtggtaaatcactgatcagaagataaaggttgatgtggtgggggcctccccctgttatattcctgctgtaacctgctcttggttattattagtttctacaggacccctcgtatcatagtcatatcatatttcactctgcttatttctatgtgtttcccacctctccttctgttgcacat

SEQ ID NO: 189081 - DNA, 572 bp, Homo sapiens
ctgggctcctcacagggccctgattgtgcttggccattcctctcctcactgttgttaagtctgttctatctccatctggggcatgccagcactgtcacctggccagtgcctaggtgtcacccacagaaagtctttgatagcccacgagcccatcccaggagctcacattcgagctctcagagcagtcataattctcctctcacctgaataacactggactctctttcctgactccatctaccctgggagctccgtgagggaaggaactttgtctttgatctcgggyacatagcagatactgcttactggtcagacataatataaaatattttttgttgactctcccagaacaaaaatacatgtttccctttttcaaagatagcatgatccataatagaaacagctttaattttggagccaggaagacttgagctccaatcccagttctgcatgaattggttgtatgaattttagtaagtgatttagcttctctggccatctgtttacttatcggtaaaagaggaccaataatggaatacgactgaggattagggattgggagtatgtaattc

SEQ ID NO: 189082 - DNA, 559 bp, Homo sapiens
agttcatcctcagatcaaaagtcatgccttctttatgccatgaatacgtgagtgggtgtgcactgaattcatcaatgtccctttctatatttgaactgttttaagatacatcttgacaatcatgtatccaacttactgttatatgatggccctgttgaatctgcctgtggcctacaaggatctcttccttggaaagtttcatcgtacagggagttagatgcatcttgcactcagttaccgccattcattcgttcagcaaacatccattgaacgcctgctacatatttgaatgtttgctttcaagaacctattctagtaaaaattatgaaaacttaagtggcacttgatatttatgttttgcaatatttgtgcttgtttgtgttttcgggtaggaatggatttttggcaaattgttcagatctttagcttttacaytggtgaaagttaattcatggtataatttccgttgcttcactctagatagaacacaagtttaatttggtaactgtttgtatgttacagatatttatttaaatataattgtatatgtcatagtcaa

SEQ ID NO: 189083 - DNA, 445 bp, Homo sapiens
attcttttatagtttttatctgtgaaattcttcagtacatcagttaattacattcagctactaaacagtggcttaaaaaaaatagaggagtcagtccaggactagcctaacagctccataggccagcaaggacccrggctccttcttcctcaaacgttacactggacatatgtttgccaactcatagtcatcgtatgactgctccacctctgacactgaggaactggcaaagggtcaagccatccctttatgacctttaaaggtcaagctctttaaaagtctatcccattttaaagagcttttccaaaagtccttccaggaaacttctgtgtatatctcagtagctacaagagggttccgctagaagatttagtttttgatcctgggcatattgctaccctgaacaaaattctattagcaaacagaagacacaaaattactcttc

SEQ ID NO: 189084 - DNA, 322 bp, Homo sapiens
ctcccatgcacaaatggttactatctaagatgtccattctgggctttgagaatgatagtctcaatgataagtactttcttctttgcatgtttatattgtcataagtgggatttagtcatggaaaaggaaatagtgggttttttttatttcatattartgctattaaattttattttaataatttaagaattgtattatatgctaaatagtctctctaaggaacagactgcccaactgaaagaaagaatgtgcaacactatcaggaaagatagtcatcagcttatttactgtttaggtcagtaatttcagtggaaggagatct

SEQ ID NO: 189085 - DNA, 322 bp, Homo sapiens
ctcccatgcacaaatggttactatctaagatgtccattctgggctttgagaatgatagtctcaatgataagtactttcttctttgcatgtttatattgtcataagtgggatttagtcatggaaaaggaaatagtgggttttttttatttcatattagtgctattaaattttattttaataatttaagaattgtattatatgctaaatagtctctctaaggaacagactgcccaactgaaagaaagaatgtgcaacactatcaggaaagatagtcatcagcttatttwctgtttaggtcagtaatttcagtggaaggagatct

SEQ ID NO: 189086 - DNA, 561 bp, Homo sapiens
gcaattaagtcctgctatatacacaaaattttaaaatcctcatcaaatgcaaataaggggattaagcattgtggaaaatctgttttggtatgtagattgccaattcaatttttttaattaaaaataatatcttggaaaatactcattcaactttttaaatttgtataaattaaaagttttggccaggtgaggtggctcacacctgtaatctcagcactttgcgaggccgaggcaagaggattgcttgagcccagcctgggcaacatgacaaaacactatctatacaaaaaatacaaaaattagccctgcgtggtagcacacgcctgtagtcccagctacgtggagggctgaggcaggaggatcgcttgagtccaggaggtccaggctgcagtgagctgagaccactgcactccagcctgggcaacagagtgagaccctgyctcaaacaataaaaataataaaaaaaaaaaaaaagagtttttataaatcataaagaagttggttttgtttgcataccactgatttttaaaactccttttttaaataaacactggggtgaaa

SEQ ID NO: 189087 - DNA, 602 bp, Homo sapiens
agatcttgttgcagaactaaagtttcagctcatgctggggaacagcagtggtgaataattgtttaattaaagggatagtaggcataagcattgctatttacttcttcattctggcaacagtagttcctctttcaaaagggaaaacataaaaaaaaaaacccatccrcccaaaagtttcaggggctaatttatgatgtaactacctttaatggttcccatgatttaagatccaattcagtagtgacaaccagttgatttttttcaaatcatgtagtgccattaacattttatactttgtttcaaaggtcacatattgatgttctcccccagttcaaggcactgtgcattatgtatgccaagggttatgtaactacaatttctggaaatggtaaacagctgagactaaccctaaaaataaattcctctgggattttttttgtgcgaaaatccatctgccctcactgcaggttcatcattacaaaaatcactgtttagctcaaaccaagagacagagaagtcatcatgatctctcctttctgtctccttcctgtagcagctgtgcttcccctctctggtatgtacacacgcacacaccttcttta

SEQ ID NO: 189088 - DNA, 271 bp, Homo sapiens
ttgtttaattaaagggatagtaggcataagcattgctatttacttcttcattctggcaacagtagttcctctttcaaaagggaaaacataaaaaaaaaaacccatccgcccaaaagtttcaggggctaatttatgatgtaactacctttaatggttcccatgatttaagatmcaattcagtagtgacaaccagttgatttttttcaaatcatgtagtgccattaacattttatactttgtttcaaaggtcacatattgatgttctccccca

SEQ ID NO: 189089 - DNA, 602 bp, Homo sapiens
agatcttgttgcagaactaaagtttcagctcatgctggggaacagcagtggtgaataattgtttaattaaagggatagtaggcataagcattgctatttacttcttcattctggcaacagtagttcctctttcaaaagggaaaacataaaaaaaaaaacccatccgcccaaaagtttcaggggctaatttatgatgtaactacctttaatggttcccatgatttaagatccaattcagtagtgacaaccagttgatttttttcaaatcatgtagtgccattaacattttatactttgtttcaaaggtcacatattgatgttctcccccagttcaaggcactgtgcattatgtatgccaagggttatgtaactacaatttctggaaatggtaaacagctgagactaaccctaaaaataaattcctctgggattttttttgtgcgaaaatccatctgccctcactgcaggttcatcattacaaaaatcactgtttagctcaaaccaagagacagagaagtcatcatgatctctcctttctgtctmcttcctgtagcagctgtgcttcccctctctggtatgtacacacgcacacaccttcttta

SEQ ID NO: 189090 - DNA, 436 bp, Homo sapiens
gattgttgaattcaatgcttgggtcacctccagattcattttcacagtctttcatgttttggtcatattacattgtattttgctgccatatgactgakctctttttgttaaatgtgagatacttgttaaaaaatatttagcaatgaattgaggcctagtggcatgttatcttgctgcagaagagatgggagtctacttctgggggatggtcacgggtcctccatacaggctgcaattgaggtcgtcggtgcaggctcagtccctacaaaggccagggtatttcctgtccacctctattctgatgcatgactcttctgggtctcaaccagagccagtggacttcagtacgggtcgctttcattggcagaccctcaatccacttgttttccatctaatcccacgcatgtgtgcaaaagctgctgtgcttctttacatc

SEQ ID NO: 189091 - DNA, 403 bp, Homo sapiens
gaattcaatgcttgggtcacctccagattcattttcacagtctttcatgttttggtcatattacattgtattttgctgccatatgactgagctctttttgttaaatgtgagatacttgttaaaaaatatttagcaatgaattgaggcctagtggcatgttatcttgctgcagaagagatgggagtctacttctgggggatggtcacgggtcctccatacaggctgcaattgaggtcgtcggtgcaggctcagtccctacaaaggccagggtatttcctgtcyacctctattctgatgcatgactcttctgggtctcaaccagagccagtggacttcagtacgggtcgctttcattggcagaccctcaatccacttgttttccatctaatcccacgcatgtgtg

SEQ ID NO: 189092 - DNA, 403 bp, Homo sapiens
gaattcaatgcttgggtcacctccagattcattttcacagtctttcatgttttggtcatattacattgtattttgctgccatatgactgagctctttttgttaaatgtgagatacttgttaaaaaatatttagcaatgaattgaggcctagtggcatgttatcttgctgcagaagagatgggagtctacttctgggggatggtcacgggtcctccatacaggctgcaattgaggtcgtcggtgcaggctcagtccctacaaaggccagggtatttcctgtccacctctattctgatgcatgactcttctgggtctcaaccagagccagtggayttcagtacgggtcgctttcattggcagaccctcaatccacttgttttccatctaatcccacgcatgtgtg

SEQ ID NO: 189093 - DNA, 389 bp, Homo sapiens
tactaaccccatctctacaaaaaacagctgggcgtggtagtgcacacctgtaattccagctacttgggaggctgaggcacgagaatcatttgcatcttggaggcagagtttgcagtgagctgagatcgcaccactgcactccagccgggatgacagagcaagaccctgtctcaaaaaaaaaaaagaaaaaggaacaaacaacagcaacaacaacaaaaaaacctctgtgtcaatcacagccttcragctaggggagaggcggccgaattctgccctccgctaacgagctatagctttgtggaaatgggcgagtggcatgcccctgtgagcctcagggccccatctgtaaaatgggcataactgtcatgcccgtctttaagaacagcctt

SEQ ID NO: 189094 - DNA, 485 bp, Homo sapiens
agaaacttatgtgaaaaggtgcttcacttttattgcgatgtaggtacatgcccacgcatagaccagaatataaattctaaccagtttaactatatttttgtagattgtcactgaaaaagagttacttttatttaaaccatcaattaatacttcaaaaacagaaaatataaaaagggcaaaaatataaaactaaccacacaaagaaacttgagtttgtcrttattgtggtgactggtcacttaggtattattttagatctcatttccatttaaaaaaaaaaccaataagcaaagaactcaggaagcatgtataaatactaaaaccagattaaatatatcatatgtaactttcaataaaaagcaggaagaacccaaccatgaaagttcctcagatcaaaaaggcaggctgtgttccatgccctgaagagctatttaggaaaacagtgtggaactataaaaacgttctaaaaaattaaaaataagtgg

SEQ ID NO: 189095 - DNA, 365 bp, Homo sapiens
tgattcatgtttgtatcagggcccacatggtacagtgccaggaatcttttatacctatttcctgggtggcattttaggtggcaactctaatataaagacttctcaaatcagaacatgtcgttgtgagtccttaggcacccaggtgtggtgcactgtagatatagttgaagtaaaagcacttgctcatccatgtatttcaatacctgcttgccatctatatatttttctgggctggtgtttctcctttgagagaaacttcattattcatatctccaattttactaaacatcatttaatacasaaaataggtggtagaacattgtgtcagagcaagttcttttcattcacttatttgcatatatagt

SEQ ID NO: 189096 - DNA, 551 bp, Homo sapiens
agaaaataggtggtagaacattgtgtcagagcaagttcttttcattcacttatttgcatatatagtcaattcctcattcattagataaggaatacatgaggacaaaatcagtaccaagaattcaaagattactaataaggtacgtttcataaagacagscatgcacatagtacaacagagcagggtgtgtctatgtgtctattagattgtacaacattttactgagaaatttaccctgtctgtatgaagcattgactaaacccttgtcaattatctaactccaggaaattaatttagatgtcattgtattattccacttcatagatgaagaagctgagacccagaaaagtcaaggaaattttaacttttacttttttctctttggaccaggctcacagtaataaagtgggggttgaaattttggaatgctaaactctgtggtcctgagtatatgactcactctgttaaatatgaatgtcagtcttctaagcattggtcttaatactgcatgttctttgcaaaatataaagtgttgtacaaatgtatgactg

SEQ ID NO: 189097 - DNA, 551 bp, Homo sapiens
agaaaataggtggtagaacattgtgtcagagcaagttcttttcattcacttatttgcatatatagtcaattcctcattcattagataaggaatacatgaggacaaaatcagtaccaagaattcaaagattactaataaggtacgtttcataaagacaggcatgcacatagtacaacagagcagggtgtgtctatgtgtctattagattgtacaacattttactgagaaatttaccctgtctrtatgaagcattgactaaacccttgtcaattatctaactccaggaaattaatttagatgtcattgtattattccacttcatagatgaagaagctgagacccagaaaagtcaaggaaattttaacttttacttttttctctttggaccaggctcacagtaataaagtgggggttgaaattttggaatgctaaactctgtggtcctgagtatatgactcactctgttaaatatgaatgtcagtcttctaagcattggtcttaatactgcatgttctttgcaaaatataaagtgttgtacaaatgtatgactg

SEQ ID NO: 189098 - DNA, 612 bp, Homo sapiens
attaactcaaaattccacttccaaagtctcatctgagacaaggcaagtcctttctgcctatgaacctgtaaaataaaaaacaagttagttacttccaagatatgatgggggtacaggcattgggtaaatgcactcattccaaaatggagaaattggcctaaacaaggggctagtggctccatgcaagtctgaaacccagcagggcaatcattaaattttaargctccaaaataatctcctttgactccatgtctcacatccaggccacaatgatgtaaagggtgggctcctaaggtcttgggcagctctggccctgtcactctgtaggttacagccctcatggctactttcacgggctggcattgggtgcctatggcttattcagctgcacagtgcaagctgcctgtggatctaccatactgggtatggaagatggtggccctcttttaacagctccactaggcagtgctccagtggagactctgtgtggggtctctgaccccacatttcccctctgcaactgccctggtaggtagagattctccattagagctctgcccctgtagcagacttctgcctggacatccaggcatttccatacatcctctgaaa

SEQ ID NO: 189099 - DNA, 612 bp, Homo sapiens
attaactcaaaattccacttccaaagtctcatctgagacaaggcaagtcctttctgcctatgaacctgtaaaataaaaaacaagttagttacttccaagatatgatgggggtacaggcattgggtaaatgcactcattccaaaatggagaaattggcctaaacaaggggctagtggctccatgcaagtctgaaacccagcagggcaatcattaaattttaaagctccaaaataatctcctttgactccatgtctcacatccaggccacaatgatgtaaagggtgggctcctaaggtcttgggcagctctggccctgtcactctgtaggktacagccctcatggctactttcacgggctggcattgggtgcctatggcttattcagctgcacagtgcaagctgcctgtggatctaccatactgggtatggaagatggtggccctcttttaacagctccactaggcagtgctccagtggagactctgtgtggggtctctgaccccacatttcccctctgcaactgccctggtaggtagagattctccattagagctctgcccctgtagcagacttctgcctggacatccaggcatttccatacatcctctgaaa

SEQ ID NO: 189100 - DNA, 581 bp, Homo sapiens
tctgtcgcccaggctggagtacagcagtgtgatcatagcttattgtaactttgactctcaagctcaaattatcctcctgtctcagcctcctgagtagctaggactataggcatgtgacactacgccaagctaaatttttaaattttttgtagagatgaggtctcgctatgttgcccaatctggtctcaaactcctggcctcaagtgatcctcgaccttccaaagtgctgggtttacaggcatgagccactgcgcccagcttgaacccacattgcttacttcaaagcctaatgaccaatttcgtgaaggaggtaagacatgtaacccaagcattttaatgcaatatgaaaagtgccttaaccagtgtgtgaggggttaaagcagggtaggctttacaaagcaagttgattgagmtgaaatttcagggcgaatgtaaattgaatagaagacaagtaaagagaacaacatttcagcagtgagaaggcgtttcctagtggcacaggtacatggaagtgcatacatattcaggggactacaagtctgcaaaataatggaaacataaaattcatcgttggaagtggc

SEQ ID NO: 189101 - DNA, 595 bp, Homo sapiens
aaggggaagatatcaagtcagaatcttctaatcgtatatatccatgggtcacattttcgagggacaaatacagctgctagtgtcctgggaaacttactttggggatttctaggttgratttcaagatttttcactttgtagtacaatttactattccatacttttcctcactcctcctagcgcttttcatgcttccaccacacagaactaaccccgtttcttgaatacaaggtgctttttaatgctctatgcctccagtgcagagaagacgcaaacaagtaaacaaacctttttaatgcaaagattatctttatgtcttcttgtattaatccgagagcctagcaaagccattagcacttgatcactagaatcaataattagtcaataatagtcaacctagagattattcttatttcttatatttctttttgcttattatgtaggtatctaattttcttaacatcacaatccagatctttcactttgatgaaaaacctacatacagaatcatttttcatgtgaatataagaattagcactcttttgtctgaaaatgtacaatgttaacttttctgcaagatttgattaatttattt

SEQ ID NO: 189102 - DNA, 623 bp, Homo sapiens
cacacaagtccctggcagaggacggagatgcaaataggcaggtcaagatcacaaggcttgcccagtctcagctgctgtgaggttaataggagatcaaaaatactggagaataatcagtcacacagaagagccagctggaagacttyataattcaggccctgtcagactaaagagatcttcttcataccctattaaaatacctgccactcagcagagatcacagaaagctcatgactagacctttctgtcatgccctagaataaaacctatcctagacttatttttacaaagcataaaacaagtcctagaacaatcttctaggaaattgagcctcaacagtattaaatcatttgagaaacactgtacacaaattcccacctacaaagtatgaagccaagcctatataagtttaagatgatcagacagtaattgaactgactgctaaaaaaagagtcaacattctccaggggaaaaatacaaaaatctaaactttccaaaatgtaaaaaaataaaaatataaataaatgaaaaacaaaaatcaaaaatctgtgattcatgataaagaaaaaagtcaacagaaattgaacctgatcgtccatgggggaattagaagacagaatata

SEQ ID NO: 189103 - DNA, 623 bp, Homo sapiens
cacacaagtccctggcagaggacggagatgcaaataggcaggtcaagatcacaaggcttgcccagtctcagctgctgtgaggttaataggagatcaaaaatactggagaataatcagtcacacagaagagccagctggaagactttataattcaggccctgtcagactaaagagatcttcttcataccctattaaaatacctgccactcagcagagatcacagaaagctcatgactagacctttctgtcatgccctagaayaaaacctatcctagacttatttttacaaagcataaaacaagtcctagaacaatcttctaggaaattgagcctcaacagtattaaatcatttgagaaacactgtacacaaattcccacctacaaagtatgaagccaagcctatataagtttaagatgatcagacagtaattgaactgactgctaaaaaaagagtcaacattctccaggggaaaaatacaaaaatctaaactttccaaaatgtaaaaaaataaaaatataaataaatgaaaaacaaaaatcaaaaatctgtgattcatgataaagaaaaaagtcaacagaaattgaacctgatcgtccatgggggaattagaagacagaatata

SEQ ID NO: 189104 - DNA, 623 bp, Homo sapiens
cacacaagtccctggcagaggacggagatgcaaataggcaggtcaagatcacaaggcttgcccagtctcagctgctgtgaggttaataggagatcaaaaatactggagaataatcagtcacacagaagagccagctggaagactttataattcaggccctgtcagactaaagagatcttcttcataccctattaaaatacctgccactcagcagagatcacagaaagctcatgactagacctttctgtcatgccctagaataaaacctatcctagacttatttttacaaagcataaaacaagtcctagaacaatcttctaggaaattgagcctcaacagtattaaatcatttgagaaacactgtacacaaattcccacctacaaagtatgaagccaagcctatataagtttaagatgatcagayagtaattgaactgactgctaaaaaaagagtcaacattctccaggggaaaaatacaaaaatctaaactttccaaaatgtaaaaaaataaaaatataaataaatgaaaaacaaaaatcaaaaatctgtgattcatgataaagaaaaaagtcaacagaaattgaacctgatcgtccatgggggaattagaagacagaatata

SEQ ID NO: 189105 - DNA, 583 bp, Homo sapiens
aatgtaatcatgctattaaaatctgattccaaagaaaaaattccaagaaacttacaatcaatatctctcataaaaatagatgcaaaaatctttaagagtatgttagagaattaaatctaggggtacataaaaaggaacacatattatgaccaggcagsgtttatcccatacatccaagcttattttagtattcaaaaatcaattattataagccaccacactaatagaatagttacatgatcatattaatagaaaaagaatagcatttgatgaagtctaacaccattccttaaaaaataaataaaacctcttggtaaactgtaagtagaataaaattttattaacttgttaaagagcatctataaaaaaatcctacagactacattatacgtaatggttgaagaccaaatgatttctctctaaaattggaaacaagaaaagtatgttcactcttaaaatttgtattcagtattgtattatccattgcaataatacaaaaaaggaatgacatgcataaagattggaaaaaagaaagcaaaacataattgtctgaatagtatatcataaggaacacaccaaaaaa

SEQ ID NO: 189106 - DNA, 583 bp, Homo sapiens
aatgtaatcatgctattaaaatctgattccaaagaaaaaattccaagaaacttacaatcaatatctctcataaaaatagatgcaaaaatctttaagagtatgttagagaattaaatctaggggtacataaaaaggaacacatattatgaccaggcagggtttrtcccatacatccaagcttattttagtattcaaaaatcaattattataagccaccacactaatagaatagttacatgatcatattaatagaaaaagaatagcatttgatgaagtctaacaccattccttaaaaaataaataaaacctcttggtaaactgtaagtagaataaaattttattaacttgttaaagagcatctataaaaaaatcctacagactacattatacgtaatggttgaagaccaaatgatttctctctaaaattggaaacaagaaaagtatgttcactcttaaaatttgtattcagtattgtattatccattgcaataatacaaaaaaggaatgacatgcataaagattggaaaaaagaaagcaaaacataattgtctgaatagtatatcataaggaacacaccaaaaaa

SEQ ID NO: 189107 - DNA, 566 bp, Homo sapiens
atagttacatgatcatattaatagaaaaagaatagcatttgatgaagtctaacaccattccttaaaaaataaataaaacctcttggtaaactgtaagtagaataaaattttattaacttgttaaagagcatctataaaaaaatcctacagactacattatacgtaatggttgaagaccaaatgatttctctctaaaattggaaacaagaaaagtatgttcactcttaaaatttgtattcagtatkgtattatccattgcaataatacaaaaaaggaatgacatgcataaagattggaaaaaagaaagcaaaacataattgtctgaatagtatatcataaggaacacaccaaaaaattgctagacttagtaaatgaaactacaaggagatgtctagaagttcatggaaaaatgaaattaaaagataaaaatgaaaatataaactttatttttaacataagctccatcaaggccaagacacttgtatagcgatgataccagccatttagttcatccctaaagaactgaagatcctggaaatttaaccatgtcaaaagagtctttttta

SEQ ID NO: 189108 - DNA, 566 bp, Homo sapiens
atagttacatgatcatattaatagaaaaagaatagcatttgatgaagtctaacaccattccttaaaaaataaataaaacctcttggtaaactgtaagtagaataaaattttattaacttgttaaagagcatctataaaaaaatcctacagactacattatacgtaatggttgaagaccaaatgatttctctctaaaattggaaacaagaaaagtatgttcactcttaaaatttgtattcagtattgtattatccattgcaataatacaaaaaaggaatgacatgcataaagattggaaaaaagaaagcaaaacataattgtctgaatmgtatatcataaggaacacaccaaaaaattgctagacttagtaaatgaaactacaaggagatgtctagaagttcatggaaaaatgaaattaaaagataaaaatgaaaatataaactttatttttaacataagctccatcaaggccaagacacttgtatagcgatgataccagccatttagttcatccctaaagaactgaagatcctggaaatttaaccatgtcaaaagagtctttttta

SEQ ID NO: 189109 - DNA, 566 bp, Homo sapiens
atagttacatgatcatattaatagaaaaagaatagcatttgatgaagtctaacaccattccttaaaaaataaataaaacctcttggtaaactgtaagtagaataaaattttattaacttgttaaagagcatctataaaaaaatcctacagactacattatacgtaatggttgaagaccaaatgatttctctctaaaattggaaacaagaaaagtatgttcactcttaaaatttgtattcagtattgtattatccattgcaataatacaaaaaaggaatgacatgcataaagattggaaaaaagaaagcaaaacataattgtctgaatagtatatcataaggaacacaccaaaaaattgctagacttagtaaatgaawctacaaggagatgtctagaagttcatggaaaaatgaaattaaaagataaaaatgaaaatataaactttatttttaacataagctccatcaaggccaagacacttgtatagcgatgataccagccatttagttcatccctaaagaactgaagatcctggaaatttaaccatgtcaaaagagtctttttta

SEQ ID NO: 189110 - DNA, 566 bp, Homo sapiens
atagttacatgatcatattaatagaaaaagaatagcatttgatgaagtctaacaccattccttaaaaaataaataaaacctcttggtaaactgtaagtagaataaaattttattaacttgttaaagagcatctataaaaaaatcctacagactacattatacgtaatggttgaagaccaaatgatttctctctaaaattggaaacaagaaaagtatgttcactcttaaaatttgtattcagtattgtattatccattgcaataatacaaaaaaggaatgacatgcataaagattggaaaaaagaaagcaaaacataattgtctgaatagtatatcataaggaacacaccaaaaaattgctagacttagtaaatgaaactrcaaggagatgtctagaagttcatggaaaaatgaaattaaaagataaaaatgaaaatataaactttatttttaacataagctccatcaaggccaagacacttgtatagcgatgataccagccatttagttcatccctaaagaactgaagatcctggaaatttaaccatgtcaaaagagtctttttta

SEQ ID NO: 189111 - DNA, 459 bp, Homo sapiens
gacagctgacagaaagtgcattaaaaattagattttgaattcaaagaatgaaagctttaaatcactacagtcaagtcagtgggacaagactgataccagatgctattttgttcatattattaaggaaktattccagccttgaagagaccttgtcactacacagcttctgtctatgtaaataagaatgaagtgagtatatctgttgtcaatgatagaaacagccatccattgcctcaaaacaacaggctggttcattagaggagaatgctaaaagttagaagaaccctgaaaggtcatatatgcccaattccctcattatgtgtatgggaggactgaaatcccataggagacggttagcaggtgtattagacacacatgaactcttcagtttaaatcgagtggtctaagtaagggttaagccactctgttgataggggtttcgggcaagtcactggacaa

SEQ ID NO: 189112 - DNA, 459 bp, Homo sapiens
gacagctgacagaaagtgcattaaaaattagattttgaattcaaagaatgaaagctttaaatcactacagtcaagtcagtgggacaagactgataccagatgctattttgttcatattattaaggaattattccagccttgaagagaccttgtcactacacagcttctgtctatgtaaataagaatgaagtgagtatatctgttgtcaatgatagaaacagccatccattgcctcaaaacaacaggctggttcattagaggagaatgctaaaagttagaagaaccctgaaaggtcatatatgcccaattccctcattatgtgtatgggaggactgaaatcccataggagacggttagcaggtgtattagacacacatgaactcttcartttaaatcgagtggtctaagtaagggttaagccactctgttgataggggtttcgggcaagtcactggacaa

SEQ ID NO: 189113 - DNA, 469 bp, Homo sapiens
tttgtcctggttactacacctccaaaattccaatgtccgaattttccaatgtttgtattctctttccaatatctgattgtttacgttctccttcagttctatggagctgcctatgaaccttccactaacacccatttttaagttaattgcagtggtctctgttgcttgcaaccaaaaacaaacctaactgatatatcgtacatgtgaaactgtaactaatatattgtacatgtaaaatgggaataattatacttcgctcacaaaggtggtgtcagtttttttttkttttgttttgtttttttgagatggagtgttgctctttttgcccaggctggagtgcagtggcaccatcttggctcacagcaacctccgcctcctgggttcaagtgattctcctgcctcagcctcctgagtagcggggattacaggtatgcgccactacgcctggctaattttgtatttttagtag

SEQ ID NO: 189114 - DNA, 469 bp, Homo sapiens
tttgtcctggttactacacctccaaaattccaatgtccgaattttccaatgtttgtattctctttccaatatctgattgtttacgttctccttcagttctatggagctgcctatgaaccttccactaacacccatttttaagttaattgcagtggtctctgttgcttgcaaccaaaaacaaacctaactgatatatcgtacatgtgaaactgtaactaatatattgtacatgtaaaatgggaataattatacttcgctcacaaaggtggtgtcagttttttttttttttgttttgtttttttgagatggagtgttgctctttttgcccaggctggagtgcartggcaccatcttggctcacagcaacctccgcctcctgggttcaagtgattctcctgcctcagcctcctgagtagcggggattacaggtatgcgccactacgcctggctaattttgtatttttagtag

SEQ ID NO: 189115 - DNA, 426 bp, Homo sapiens
catattaaaatatttataagaagatatttgcttcaaaatattaygggtgggggatactggggtagataagatacacatgaagcaagataggtgtgggcttattaggattattagactctattctctacttttgtatatattcaaaattattccttataaattactattattaaaagtaaaaacaaaggcaagcttgaggatttttttcttcttacagagaggaaatccttataaggcttcttagattttgttgaggaggaactttgggaatcaagaaagaaaattacaatttgttgatgcttattacagtccagaaatttgtgctaggagattgcatgtgttagctcaaattatgtatgacaattaggtttgagtaaaaaacaaggtggctgctttcaatttaaaatatgcctcaatgtatatcta

SEQ ID NO: 189116 - DNA, 488 bp, Homo sapiens
tccactgtgtcaggttggagggagaaaaaggctaagaggaattgcgcctttgccagaatctgacggtgttggtgccctgatctcgaacttccaccatccagaactgtaagcaataaatttctgttgtttataagtgtcaggcctctgagccaaagctaagctgtcatttcccctgtgacctgcacgtatacatccagatggcctgaagcaagtgaagaatcacaaaagaagtgaaaatggccggttcctgccttaactgatgacattaccttgtgaaattccttctcctggctcagaagctccccsactgagcaccttgtgacccctgcccaggcctgcaagagaaaaacccctttgactgtaattttccactacccacccaaatcctataaaactgccccacccctatctcccttccctgactcttgttttcagactcagcccgcctgcacccaggtgaaataaacagccttgttgctcacacaaag

SEQ ID NO: 189117 - DNA, 619 bp, Homo sapiens
gaagaattctgattggccaatttaggccagatgctcatccctggaccaatcaactgaggccagaggggtggagtcatgtgagaacatggcagcccccatgacagccaagtgactggagtaggaagtgtgagtctccatagaggggagggctgctaggctgaaaaagcaatagatgtccgcagtgaaaggaatagattaggagacacattctgttaaacctgttaattattaaaaaaaaaactttcaatatacagttacagtatacgtgagccggtggctcatgcttgtaatcccagcactttgggaggccgaggcgggcagatcagaggtcaggagttcaagaccaacctgaccaacatggtgaaaccctgtctctactaaagaaaatacaaaaattagctgggcatggtggtgcgygtctgtaatcccagttactcaggaggctgaggtgggagaatcgcttgaacccaggagatggagattgcagtgagctgagatcacaccactgcactccagcctgggcaacagagtgagactccgtctcaaaaaaaaaagttacattgtggttccctcagcacgatttatcagaaaggagaaacttactatatgtatatttcct

SEQ ID NO: 189118 - DNA, 619 bp, Homo sapiens
gaagaattctgattggccaatttaggccagatgctcatccctggaccaatcaactgaggccagaggggtggagtcatgtgagaacatggcagcccccatgacagccaagtgactggagtaggaagtgtgagtctccatagaggggagggctgctaggctgaaaaagcaatagatgtccgcagtgaaaggaatagattaggagacacattctgttaaacctgttaattattaaaaaaaaaactttcaatatacagttacagtatacgtgagccggtggctcatgcttgtaatcccagcactttgggaggccgaggcgggcagatcagaggtcaggagttcaagaccaacctgaccaacatggtgaaaccctgtctctactaaagaaaatacaaaaattagctgggcatggtggtgcgtgtctgtaatcccagttactcaggaggctgaggtgggagaatcgcttgaacccaggagatggagattgcagtgagctgagatcacaccactgcactccagcctsggcaacagagtgagactccgtctcaaaaaaaaaagttacattgtggttccctcagcacgatttatcagaaaggagaaacttactatatgtatatttcct

SEQ ID NO: 189119 - DNA, 569 bp, Homo sapiens
aatggttatgtagtttgggatcctctagctgaaaagtgaatattctgagaatttgtccttatttctcttgtgtaaatcagcatgctgcttttcaagagcaagggtcaagtggagttgctatggatcatttgacatttaaggacagaatttaacatttctatatgattttccttttggatttttaaaaggggaaatatacatattatttttatctctgttgtatgttcttactgctattattttaaaattaatattttatttacttattttaatatgctttggtatatcctgatgatggtaacagtggtttacatctacacagtttgttccatacatttccttatctaaggcttgaagcagccaccagagrccagcaaggcaggttctcatgattagcccaacttacatatgaggaaactgaggctcagaatgatttatgactctcccactcaaccaacagcagatccagttcttaaatctaggtctacttagtcaaaatgaatggtgtctctactttttcacaatgttgtctctcggaagagtatcttggcttgtcaatgaatatttag

SEQ ID NO: 189120 - DNA, 567 bp, Homo sapiens
tgagccaatgagacaaactgtataattgcccaagattttactctaagagcactggcactgggagtaagaccactaggaaactcagctctgccactttccagctgtaggacttcaggcaaattaattaaataggatggtggtgaagaattaagtgagatactgtatctaacactcagggtacctaggtagagcacagggaagatgaggagctgttaattgtgatagttatgattttgtatttttttttttttagatttctgagttgaggaatatttgcaagcaggtacagtaattacccaattcagatgtttatagaaaaagaaacacatcttaaaaataaaggtaccmcaaaaaacaagaagtagaaaattggaagatggagagatgaaagaaaaatgaagaaatttcagagaaaaatgaaaaaacaaagcagattttaaaaagaaaaagaaaaaaaggtaggaaatacaaattaagaaatttcagagaaaaatgaaaaaacaaagcagatttttttaaaaaaagaaaaaaggtaggaaatacaaatctaagaggagggtttgaatt

SEQ ID NO: 189121 - DNA, 471 bp, Homo sapiens
aaaaagaattccatgatatgttcttggagttattaataaaaataactgctggttgacaggaaaggcatatggcaaatttaagatgcatggccacagtattttatttaaaaaaaaattctttcctacaccaggggatgagtgtgtgtgtgtgtgtgtgtgtgtgtgtgtgtrtgttttacgcaccagaaaaaccttcaactctgacaagccattgacgaggtgtttcagtcttcactagcttcctatttcattgctctgccattgagcccttgtaatactacgatgaataaagtaatcaaagcaattggctgcctgagatcttttttaatgcactgcttcggacgcagtacatatgctgtgcaaataaatacagaattagtgttcctgttggaagcatttggtgagaatgagtgatttgtcttgcttatgaaaggtgcatacatttccgctcatagctgtttatcagccagc

SEQ ID NO: 189122 - DNA, 569 bp, Homo sapiens
gaatcatttgaaagaaaaacgttaagtcacatattggtgcaggtggtagcagaactggcaggtatccttccgtttctgtgatggggacagggactatcttgctcatggctttatatttctggagtgaatccctattttgtgggcagagtgcaggacactgtcaggaccacaggtcaatgctcatgtggctgatgagaaagacagaggacacacagggagggactccaggcctggctcttttgtctggagtaaaaatgtcaactatgctatcgtctgagtccatttgggctgctatcaccagatgccttagactgggtaacttaaaacagcaaaatatatttctctcagttctggaagcatggaagtccaaggtcaaggcaccagcatatttggagtcttgtgagggccccgttcctcacggatgtctctttcttgctgggtyctcacatggtggaaagagttaaacaagctccctcaggcctctctaattaaggcactaatcccattcatgagcactaggtcctcttatttcagtcacctcccaaatgcaccacctcagtaccaacaca

SEQ ID NO: 189123 - DNA, 633 bp, Homo sapiens
cacaagctgaaccataagccgtgacaaaagcaatctataactgtaatatatatacacacacatacaacacacayttatacttcttctgactatcttctatgtgtggaataagactgattttcatttttgctgcgggaaaagagtttgctttaaatgaaaacatatttaagaaaatattaataacttcaatattgtatgttaaatacagtgactgggagggcagaaatgatattctttttgatctgacatgaggcatggaatcttgtttatacgtttacatccctagtgttagcgaatgtccctttgaccacaggacacatgttcatgtagtagatgagaataacaagatacacaagtgagaacatctggcctggctgctttgtctgtgagtaaataaatatccctcatgctatgtataatgagaaaaaaaaagcaacagttattgttatagatgacttaccccttgccaggcaccattctaagttccttacatgaattaaatcatttaattttacaagccagatactattatcctccagttgataagactgagacacagaggttgtgtcacacacaaagtggcagaggtgggatttgcactcacgcaggctgactgcagcatcgtgcccttac

SEQ ID NO: 189124 - DNA, 633 bp, Homo sapiens
cacaagctgaaccataagccgtgacaaaagcaatctataactgtaatatatatacacacacatacaacacacatttatacttcttctgactatcttctatgtgtggaataagactgattttcatttttgctgckggaaaagagtttgctttaaatgaaaacatatttaagaaaatattaataacttcaatattgtatgttaaatacagtgactgggagggcagaaatgatattctttttgatctgacatgaggcatggaatcttgtttatacgtttacatccctagtgttagcgaatgtccctttgaccacaggacacatgttcatgtagtagatgagaataacaagatacacaagtgagaacatctggcctggctgctttgtctgtgagtaaataaatatccctcatgctatgtataatgagaaaaaaaaagcaacagttattgttatagatgacttaccccttgccaggcaccattctaagttccttacatgaattaaatcatttaattttacaagccagatactattatcctccagttgataagactgagacacagaggttgtgtcacacacaaagtggcagaggtgggatttgcactcacgcaggctgactgcagcatcgtgcccttac

SEQ ID NO: 189125 - DNA, 633 bp, Homo sapiens
cacaagctgaaccataagccgtgacaaaagcaatctataactgtaatatatatacacacacatacaacacacatttatacttcttctgactatcttctatgtgtggaataagactgattttcatttttgctgcgggaaaagagtttgctttaaatgaaaayatatttaagaaaatattaataacttcaatattgtatgttaaatacagtgactgggagggcagaaatgatattctttttgatctgacatgaggcatggaatcttgtttatacgtttacatccctagtgttagcgaatgtccctttgaccacaggacacatgttcatgtagtagatgagaataacaagatacacaagtgagaacatctggcctggctgctttgtctgtgagtaaataaatatccctcatgctatgtataatgagaaaaaaaaagcaacagttattgttatagatgacttaccccttgccaggcaccattctaagttccttacatgaattaaatcatttaattttacaagccagatactattatcctccagttgataagactgagacacagaggttgtgtcacacacaaagtggcagaggtgggatttgcactcacgcaggctgactgcagcatcgtgcccttac

SEQ ID NO: 189126 - DNA, 633 bp, Homo sapiens
cacaagctgaaccataagccgtgacaaaagcaatctataactgtaatatatatacacacacatacaacacacatttatacttcttctgactatcttctatgtgtggaataagactgattttcatttttgctgcgggaaaagagtttgctttaaatgaaaacatatttaagaaaatattaataayttcaatattgtatgttaaatacagtgactgggagggcagaaatgatattctttttgatctgacatgaggcatggaatcttgtttatacgtttacatccctagtgttagcgaatgtccctttgaccacaggacacatgttcatgtagtagatgagaataacaagatacacaagtgagaacatctggcctggctgctttgtctgtgagtaaataaatatccctcatgctatgtataatgagaaaaaaaaagcaacagttattgttatagatgacttaccccttgccaggcaccattctaagttccttacatgaattaaatcatttaattttacaagccagatactattatcctccagttgataagactgagacacagaggttgtgtcacacacaaagtggcagaggtgggatttgcactcacgcaggctgactgcagcatcgtgcccttac

SEQ ID NO: 189127 - DNA, 578 bp, Homo sapiens
ggaagcagatcttttgattctacagattagtaagatttttgtaggctgactcctctatttgctcatacaaccaccatgatcaactagccaacaccacaggtctctgtgactcatactattctttttatttgagatagggtctcactctctcatctaggctggaaagcagtgtcaccaacatggctcactgcagcctcaacctccaaggctcaagtgatcctcccacctcagcccccaaagtagctacaactacaggcaggcaccaacacatccaactgatttttgtatttttggaggggtagagacagggctttcgccatgcttgycaggctggtctcaaactcctgagctcaagtgatccacctgcctcagcctcccaaagtgctaggattataggcgtgatccactgcacctggcctgcaagctcatcctattctgctttgactgtgccatccatgacaataaccaggcccatgctgcctttggcaattaagtgctgtcctttggcccctgccacattggggccaaattattgccattgcatataggattcccaattcagtggcagcagtttccac

SEQ ID NO: 189128 - DNA, 578 bp, Homo sapiens
ggaagcagatcttttgattctacagattagtaagatttttgtaggctgactcctctatttgctcatacaaccaccatgatcaactagccaacaccacaggtctctgtgactcatactattctttttatttgagatagggtctcactctctcatctaggctggaaagcagtgtcaccaacatggctcactgcagcctcaacctccaaggctcaagtgatcctcccacctcagcccccaaagtagctacaactacaggcaggcaccaacacatccaactgatttttgtatttttggaggggtagagacagggctttcgccatgcttgtcaggctggtctcaaactcctgagctcaagtgatccacctgcctcagcctcccaaagtgctaggattataggcgtgakccactgcacctggcctgcaagctcatcctattctgctttgactgtgccatccatgacaataaccaggcccatgctgcctttggcaattaagtgctgtcctttggcccctgccacattggggccaaattattgccattgcatataggattcccaattcagtggcagcagtttccac

SEQ ID NO: 189129 - DNA, 647 bp, Homo sapiens
tcgcatttaagttctgagcggaagggaattcctttacttccttaggtgctttcttcctgatctcccctctgagagcactgccctccctcctgggcctctgggtcagagttaaggatactgagggtcaaggcagtcccgytccacatcacccagttggttagggtcctgctggctgggccccagtgttctcctccaggctctgagcaatcagggtggactgggggctggagacatttgagtcttcagggttcagcacagaaggttctggctggcaatctcagtattcctgggttgggtgtgcccctgggaccttcctggtagggtaaaacaggagggtgcttgcccttcccagcgttagtggagaggacaggggctttccctgagtgggaaaggagctctgagggctggccctgcacaaaggagggggcactggagactcattgacccattgctgtaccttcttcatctcactcactgcccactgcgtttttctcttccttgcaggtgtctcctgcgcctgcaccggctcctgcacgtgcaaagagtgcaaatgcacctcctgcaagaagagtgagtgcggggccatctccaggaatctggggctgtggctgagattgggagggaacccaaggctggccctgagtgca

SEQ ID NO: 189130 - DNA, 647 bp, Homo sapiens
tcgcatttaagttctgagcggaagggaattcctttacttccttaggtgctttcttcctgatctcccctctgagagcactgccctccctcctgggcctctgggtcagagttaaggatactgagggtcaaggcagtcccgctccacatcacccagttggttagggtcctgctggctgggccccagtgttctcctccaggctctgagcaatcagggtggactgggggctggagacatttgagtcttcagggttcagcacagaaggttctggctggcaatctcagtattcctgggttgggtgtgcccctgggaccttcctggtagggtaaaacaggagggtgcttgcccttcccagcgttagtggagaggacaggggctttccctgagtgggaaaggagctctgagggctggccctgcacaraggagggggcactggagactcattgacccattgctgtaccttcttcatctcactcactgcccactgcgtttttctcttccttgcaggtgtctcctgcgcctgcaccggctcctgcacgtgcaaagagtgcaaatgcacctcctgcaagaagagtgagtgcggggccatctccaggaatctggggctgtggctgagattgggagggaacccaaggctggccctgagtgca

SEQ ID NO: 189131 - DNA, 647 bp, Homo sapiens
tcgcatttaagttctgagcggaagggaattcctttacttccttaggtgctttcttcctgatctcccctctgagagcactgccctccctcctgggcctctgggtcagagttaaggatactgagggtcaaggcagtcccgctccacatcacccagttggttagggtcctgctggctgggccccagtgttctcctccaggctctgagcaatcagggtggactgggggctggagacatttgagtcttcagggttcagcacagaaggttctggctggcaatctcagtattcctgggttgggtgtgcccctgggaccttcctggtagggtaaaacaggagggtgcttgcccttcccagcgttagtggagaggacaggggctttccctgagtgggaaaggagctctgagggctggccctgcacaaaggagggggcactggagactcattgacccattgctgtaccttcttcatctcactcactgcccactgcgtttttctcttccttgcaggtgtctcctgcgcctgcaccggctcctgcamgtgcaaagagtgcaaatgcacctcctgcaagaagagtgagtgcggggccatctccaggaatctggggctgtggctgagattgggagggaacccaaggctggccctgagtgca

SEQ ID NO: 189132 - DNA, 558 bp, Homo sapiens
gggccatacatgatcgcttttagtgtgattccaaatgtggtacagaaacttcatcccttatttttattttctgattttcctccacaacttgagatccacattggattttaggcttaaaagtggctatagtgctggaacccaacttcttagtttcttgaatcctacacgggtgytatgatttagatattttgtcactgccaaatctcatgttgaaatgtgtcctccactattgcaggtggggtctagtgggagcttttggggccatgaggacagatccctaaagaatggcttggtgccctcccatggtgaagggtgagtttttcctttggtaggtcactccagagctgtctgtcaaagtgattagaaagggacaggtatagactcaatgttatgccttagtcaggtatacttcagagaaataactggatgtcttgctttttaattttatttttttagagacgttgactcactatgtggactaggcaggacatgaagtcctgggctcaagtgatcctcccgcctcagcctcctaagtagctgggacttcagcttcccgcc

SEQ ID NO: 189133 - DNA, 595 bp, Homo sapiens
ccagccccagtactgagggtctctgggtttgaggaggttgcattttaagttctgagcggaaggggactcctttacttccttggggtgctttcttcctgatcgcgcycctgagagcactgccctccctcctgggcctctaagtcagagttaaggatactgaggctcaaggcagtcctgctccacatcacccagttggtcagggtcctgctggctgggccccagtgttctcctccaggctctgagcaatcagggtggatgctgagctagaggcattgagtcttcagggttcaggacagaaggttctggctggcaatctcagaatacctgggttgtatgtgcacgtgggaccttcctgataaggtgaaacaggagggtgcttgcccttcccagtgtgagtggagaggacatggggcttctgttcctctgtcctgagtgggaaaggagctctgagggctggccctgcacagaggagggggcactggagactcattgacccactgctgtaccttcttcatctcactcactgccaactgcgttttcctcttccttgcaggtggctcctgcacgtgcgccggctcctgcaagtgcaaagagt

SEQ ID NO: 189134 - DNA, 595 bp, Homo sapiens
ccagccccagtactgagggtctctgggtttgaggaggttgcattttaagttctgagcggaaggggactcctttacttccttggggtgctttcttcctgatcgcgctcctgagagcactgccctccctcctgggcctctaagtcagagttaaggatactgaggctcaaggcagtcctgctccacatcacccagttggtcagggtcctgctggctgggccccagtgttctcctccaggctctgagcaatcagggtggatgctgagctagaggcattgagtcttcagggttcaggacagaaggttctggctggcaatctcagaatacctgggttgtatgtgcacgtgggaccttcctgataaggtgaaacaggagggtgcttgcccttcccagtgtgagtggagaggacatggggcttctgttcctctgtcmtgagtgggaaaggagctctgagggctggccctgcacagaggagggggcactggagactcattgacccactgctgtaccttcttcatctcactcactgccaactgcgttttcctcttccttgcaggtggctcctgcacgtgcgccggctcctgcaagtgcaaagagt

SEQ ID NO: 189135 - DNA, 533 bp, Homo sapiens
cagtggtggctgtgaatgaaagtgattagaaagggactggtatagactcaatgttatgccttagtcaggtgtactttagggaaataactggatgtcttgctttttaattttatttttttagagaagttgacttgctatgtggactaggcaggactggaagtcctgggcttaagtgatgctcccgcctcagcctcctaagtagcttggactacagcttcccgccacctcccccatcttgctttttagtttaaagcagggtcagcacatcacatgaagtcatctcctttttggggatatcccacatgtccagaactrccagacggtagtggggtggccggctaggctgtggggagcacggagatttatttgcaaaggaggacctggacaaatgtgcccccacatcctctcaggcgaggagaatggacgagagtgagaggccgacccgtgttcccgtgttactgtgtacggagtagtgggtccgagggacctaggtgtggacagggacaggcaaggcgacagcgaggagaaacgaa

SEQ ID NO: 189136 - DNA, 611 bp, Homo sapiens
tctacaaaaaattaaaaaataagctgggtatggtggcaacgcctatagttccagctactcaggaggctgaggcagaggatcacttgagcccaggaagtggatgctgcagtaagccgtgatgtcaccactgcactctagcctgggcaacagaacaagatccgaactctttaaaaaaaaaaaaaagcggctgggcgctgtggctcacgcctgtaatctcagcactttgggaggccaaggcagrtggatcacaaggtcaggagttcaagcagcctgaccaacatgctgaaaccccttctctactgaaaatacaaaaaaaaattggctggttgtggtggcgcgcacctgtaatcccagctactcgggaggctgaggcaggagaatggcttgaacctgggaggcagagtttgcagtgagcagagattgagacactgcactccagcctgggcaacagagggagactccatctccaaaaaaaagaaagaaagaaagcaacctagaagagagtaatccatttttgatggcagctcatatggttactttgtctagtacatttattttaaaatattgggaatcttgacattgaaagaattcaaaatctgttttaaatgaga

SEQ ID NO: 189137 - DNA, 434 bp, Homo sapiens
ttaactttgcttttgctttcatgacattgacatttttaaatagtatagcctcaaattgaattttacactgaaaaattattgtgacctaaatgttttggttataaatttatatttacaattgatagcacatgttagccagaaagtctggcttggaatacctgtccctgccactcacaaacttggtgaccttgggcaggtttcttagcctctttttttccatgtggatacccacttgttcctgcaccatttgatgaaaacacaattcccccttgaattgttttcctgtatctgtcgaaaattgattgatcatataagtgtggttctcyttctgaaatttctactctgttccgatgacttatttgtttatccttgtgccaattccacagtcttgattattgtaaggcactaaatcaggtaatataagtcttatagct

SEQ ID NO: 189138 - DNA, 486 bp, Homo sapiens
taaccattgcaattcatcattctgaaaggcttaggggcagaaaattccatttgctgctttgatcatattttcaattccaaaagtttcccaagtgaaacaaggcatagttggttcaacaaggagaatggtataatgatattgcagttagcagttaggtttaggagaaaaaaaaaatcaaaagtttttgtaaggttaaagacttttggggaaaaattcactcctacaatatgcttgtttgttcagtatctaattcttcacagtcctgttggcagggcatcaaaggagtggccctatggtcttctcaggcattctgatggtgcaggcaatattgattacttttctatttgaaagatagggaaaatgtgaaaaccaagaccacttccttctgctcttcaccataaattggtatatacrcagacagcagtcattaattggctgaatctgacagatttaataatttaattctgctgcaaaaacaattattca

SEQ ID NO: 189139 - DNA, 548 bp, Homo sapiens
tttttcttttctggatgactgtccacactccatagcaggcaagccgatgctccccartaatgtcagctgaggtctggtgcctccattatgtttgattaggcaagtttcttgttctgtgacaatctgcagagaacacacataataaatcagaagtctatggaaagtttaggaatgaaagacatctcttgcagacctgaggagctgagagctcatttttgagaccctgcaggaaacaaaacaaaacaaaacaaagctgcggccttaaaaaacacatttcctttgctttcagaggaacttgtctgtaccatttttttgccacttaatatattctcctttttactggctgagttccaaaagggtggacctccattcaggacccaggctgaggaaatagaaaaaaaaatacaagaagctgggatacaaggaagctaactaagctggacagtcagtgtaggatatcaactgtgtgaatttcagcatcacatgcctaggttcaaatcccaatttctccaccagccagtatatgggaagcttcactgtagaagttt

SEQ ID NO: 189140 - DNA, 548 bp, Homo sapiens
tttttcttttctggatgactgtccacactccatagcaggcaagccgatgctccccagtaatgtcagctgaggtctggtgcctccattatgtttgattaggcaagtttcttgttctgtgacaatctgcagagaacacacataataaatcagaagtctatggmaagtttaggaatgaaagacatctcttgcagacctgaggagctgagagctcatttttgagaccctgcaggaaacaaaacaaaacaaaacaaagctgcggccttaaaaaacacatttcctttgctttcagaggaacttgtctgtaccatttttttgccacttaatatattctcctttttactggctgagttccaaaagggtggacctccattcaggacccaggctgaggaaatagaaaaaaaaatacaagaagctgggatacaaggaagctaactaagctggacagtcagtgtaggatatcaactgtgtgaatttcagcatcacatgcctaggttcaaatcccaatttctccaccagccagtatatgggaagcttcactgtagaagttt

SEQ ID NO: 189141 - DNA, 548 bp, Homo sapiens
tttttcttttctggatgactgtccacactccatagcaggcaagccgatgctccccagtaatgtcagctgaggtctggtgcctccattatgtttgattaggcaagtttcttgttctgtgacaatctgcagagaacacacataataaatcagaagtctatggaaagtttaggaatgaaagacatctcttgcagrcctgaggagctgagagctcatttttgagaccctgcaggaaacaaaacaaaacaaaacaaagctgcggccttaaaaaacacatttcctttgctttcagaggaacttgtctgtaccatttttttgccacttaatatattctcctttttactggctgagttccaaaagggtggacctccattcaggacccaggctgaggaaatagaaaaaaaaatacaagaagctgggatacaaggaagctaactaagctggacagtcagtgtaggatatcaactgtgtgaatttcagcatcacatgcctaggttcaaatcccaatttctccaccagccagtatatgggaagcttcactgtagaagttt

SEQ ID NO: 189142 - DNA, 574 bp, Homo sapiens
atatataaaacgtttttgcagtaattgtagcctcaaggttaaggattctattctataggaaataacaataaaacattatacttaaagaggagaatgttaagaagtctggtcatttttggcaaataaactgcctataaactcaatgtcacattgtccagatatagattatgtttagatgtacctttatcaggatattccctcagccagtgctttgcattctcaaaggtacttgtgtcatccatcttcttattctctaaagatttctcactaactgcaattacgatttctggtcaatgatatcaatacaaatggttttttataattgctgaatacaaaattaggggcttataattttctattttcatactttcttttyagaaaatatcccaaaggtgtagctacttcaattattgagcaacatgctagaaacttgtcaaaaagccaaagttaggctatttattgccttcacctatccttatgtgtactctacaaatgtgttaaccctgctcagagtgtatgcgcagggttcatgtatgtgtgagtgaaaatgtgtgcatgtcttggctagtaaact

SEQ ID NO: 189143 - DNA, 643 bp, Homo sapiens
ttgccactacttctatttttgctcctgtgacactgggcattgatcatgttggatgtacacagcagaaaatctatatcctgcttgacttagttaaggttatctaaccacaggcaagcttccaggggtccaggaagagcccgtgtctaggctttttgactcctggcctttggaaggcaagtacctatctgccaaacctaagaggctcaatggtgggttaactaaaagcaaagacagcaaatggtcactataatgcattgtaatgtggagtccgactcaatttttgatgcctgactactgacagctttgaagcttcatcccttcattgtccctttgtgccctacatttggacaagcagataagaaagcctgggtgctcctgcctttgattcaaascatgaagcccctgccatgaaaaactctcacctcagcgctaccttctaactataataaaaacccaggcagtcacttttccttgctcacttaagccatctcagacctgcttgagagtaatgccgtgctctcccacagacctcaattatgtaagtaataaaccgttttaatactctcttggggtgtgtgtggtatcatcagtcacaacatctgaacaaaacctgggtgaaggtccttctgcctctacagatgac

SEQ ID NO: 189144 - DNA, 643 bp, Homo sapiens
ttgccactacttctatttttgctcctgtgacactgggcattgatcatgttggatgtacacagcagaaaatctatatcctgcttgacttagttaaggttatctaaccacaggcaagcttccaggggtccaggaagagcccgtgtctaggctttttgactcctggcctttggaaggcaagtacctatctgccaaacctaagaggctcaatggtgggttaactaaaagcaaagacagcaaatggtcactataatgcattgtaatgtggagtccgactcaatttttgatgcctgactactgacagctttgaagcttcatcccttcattgtccctttgtgccctacatttggacaagcagataagaaagcctgggtgctcctgcctttgattcaaaccatgaagcccctgccatgaaaaactctcacctcagcgctaccttctaactataataaaaacccaggcagtcacttttccttgctcacttaagccatctcagacctgcttgagagtaatrccgtgctctcccacagacctcaattatgtaagtaataaaccgttttaatactctcttggggtgtgtgtggtatcatcagtcacaacatctgaacaaaacctgggtgaaggtccttctgcctctacagatgac

SEQ ID NO: 189145 - DNA, 561 bp, Homo sapiens
taggtggacatttgggttgtactatagtttgggtgtttgtcgtcccaaacctcaggttgaaatctgatcccctgtgttggagatggggcccactgggacgtgttctgttcattggtgcagatcccctaaaaatagattaatgctctccactgtaagcaggtgagtgagttctctgttggctcctgsgataactggttgttgaaaagagcctggcacctccttcatctccctcttgcttcctctcttgccatggcatctctgcacttactggctacccttcaccttctgccatgagtagaagcaacctgaggcctttaccagacacagatgctggcaccatgctttttgtacagccagctaaatcgtgagccaaataaacctattttctttgtaaattacttagcctcaggtattcctttattacaccacaaaacagactaagacaggttgcttctacacttcagctgttgtgagtaatgcttgtatgaaattgggtatacatatgcttttcaaggtcctgcttttagttcttctgggtatatacccagaagtgaaactgct

SEQ ID NO: 189146 - DNA, 589 bp, Homo sapiens
ttagcatataggaatgcaactgatttttttgtgttsgttttgtatcctgctattttgctgatttcatttcttagttcaaatattttgtgtttgtgtggaatcttcagggtttttctgcatataagagcatatcatctgcaaataaagataatattagtttttccttttgaagttggatgccttttatttatttttcttacctgtttgctctggctagaatttccaatgctttgccaaacagaagtaccaagaacaggcattctttcttaagctttaggtctttcaccattgaaaattatgttaattatggggttttcatatatggcttttattatgttgaagtggtttcttctattcctagtttgttgagtattttttatttgaaagaatgtcgaattttgttaaaagctgtttctgcatcaattgaacagatcatgtggctttttcctttcattttgttaatgtgaggtattacattcataaactttcatatgtcgaagtattcttgcattcaaagaatgaatgccactttgtcatggtatataatttttttaatacacttctgaattcagtttgctagcatttggtt

SEQ ID NO: 189147 - DNA, 561 bp, Homo sapiens
tattccttcctctggaagcttcatcccagaggagcacctgccagatgccagccagtgttctcctgtatgaggtatctgtcagcccctactgtgaggtgtcacccagtcaggatacatgggggtcagggacccacttgaggagagagtctgtcccttatcagagctcgaacactgcactgggagaaatgctgcgctcatcagagctgccaggtggggatgtttacgtctgctgaagctgtgcccacagctgccccttccgccaggtgctttgtcccagtgagatgggggttttatctgtaagtaagtctgtgattggggctgctgtctttctttcagagatgccctgcccaggggaggagtaatccagagaagcagttggccttgctgagctgcagtggactcagccctgtttgaacttcctgctggctttgtttacactgtgagggtaaaacaaacagcctactctagcctcagcaatggcagatgcctctcccctcacsaagctcgaatggcccaggtggacctcagacagctgtactcgcagtgagattttcaagccag

SEQ ID NO: 189148 - DNA, 412 bp, Homo sapiens
atttccaattatcagtagaaagacaatgtttataataaataaattgagagacaaaaattattttggttgccccaaaatttaacaagaaaaatttatttaacaaatggtagcatcatttaatagctcacccagctatgattgagtagtcactaccacataaacattatatgtaattgcatgtcattcccaagatcctytgaggtctgacagtgagctggatcctgtatattgacaaacacagctgaatgcttgcttttttttttttttttttttttacattttcatcaataattttcagtctaaccctatgattacatgcttgccacctgccccccaaaataagtggtctatagccttgttagcaattcttcacaatgatacttatcatcaactggacatacttctacatttc

SEQ ID NO: 189149 - DNA, 382 bp, Homo sapiens
tctagcctgtccagaacaaaaggcagtaagaatatgctaaaagaagtccgacataagtcaaacggggacacctgctactcatttgtctccatgcttgtgcttcactggaaacaaatcactagatctttctttaaaacacataaatttaaacacttgatgtggctttacaaatttagaaactaacaaggaatgatggtccggattatgtccagagtgcactgcatttcaaaaaaaatgawctagcacaagagttattgaaacaaagtcttcatttctccacagagtaaatgtcttatgaggagacacacaagggccacacacttactctgcccatttcacgcagcttggtgagcatcacaactatggtggaattgtgttccca

SEQ ID NO: 189150 - DNA, 382 bp, Homo sapiens
tctagcctgtccagaacaaaaggcagtaagaatatgctaaaagaagtccgacataagtcaaacggggacacctgctactcatttgtctccatgcttgtgcttcactggaaacaaatcactagatctttctttaaaacacataaatttaaacacttgatgtggctttacaaatttagaaactaacaaggaatgatggtccggattatgtccagagtgcactgcatttcaaaaaaaatgatctagcacaagagttattgaaacaaagtcttcatttctccacagagtaaatgtcttatgakgagacacacaagggccacacacttactctgcccatttcacgcagcttggtgagcatcacaactatggtggaattgtgttccca

SEQ ID NO: 189151 - DNA, 408 bp, Homo sapiens
aaagtcatggaattcagagttgtttttattaagacacacttaaaatgaagatttaaagatccaggagcttgatttatcagtttaacattttaaaattgcctactatatatgcaattgcctactgctttargaagtatttgatttttactagggtttttgagcatgtgtaaaacatagattatatctggagaccattcgtggtctctgtttgtccatacaaaaatccaacaaccctagctcttgataaaatttggaggcttaccattgtgaccatttgaggttgcatcttatatacatttatcttctgcattcatttacagtattcactcttagcttggaggacagtataatttaaaaaacccagcatcttcaaataatctgtatttagacaacacataggtcaaatct

SEQ ID NO: 189152 - DNA, 449 bp, Homo sapiens
gtttgcaagtgcaagaaatagcacaaatccaaattgagaaatctgaatggctgtaattgtaacacatctacaatggaatcaagaaggtcatttacattacgttaagaaatacagaagcagagtcttatataagcgtgttacacaaaatggagatttggcacatgggttatcattggacagtgtaccacacacagtttttatttcggttccagcagaaaaacaatattgacaaatttctttctctctttgcttcctactttatcgaatagaagaggtaacaatagcatctgctgcakctggctggagcctgagatgaggaaattgtagctgatgggcctcccaagcatatcgacactaaaaagctcatgctacagccacggcacagccaggctagcactccaacgggagcggcagatacacaaggcagccactgtgaaccagagcagggc

SEQ ID NO: 189153 - DNA, 551 bp, Homo sapiens
gattaaagaatggaaaagactcacatgctagcaattgcctttgatttagaaagagtgaaagaaaggccagaatatagcaatgtggtatggaatcagaaaggaaggagtggctcattctgaccaggtcaccagggaaggcttgacagagaaatcagagaaatgcccccaaagggacagcagaaaggggagctaaaaaccatcatgggacctaaagtctggagaatctgcctgatttatagggccatgcaacatggggaacataatggccttgccaccactagtagtatgagctcaggcaagcaagctgatcttacctggcctctgctgttttttcttctgtgaaatgggagactaaaattactccttgtaaattaccacgggaagcgaaaagcagtaacacatataaagcacttatgacagggcctcttcagttggcaagaaagattatttgatgttgaataagtgctcaactatcctgaactattagtattsctacaaaatggggagctatgtctaaatttaatcatggaatagatggtatgtgggaaaga

SEQ ID NO: 189154 - DNA, 551 bp, Homo sapiens
gattaaagaatggaaaagactcacatgctagcaattgcctttgatttagaaagagtgaaagaaaggccagaatatagcaatgtggtatggaatcagaaaggaaggagtggctcattctgaccaggtcaccagggaaggcttgacagagaaatcagagaaatgcccccaaagggacagcagaaaggggagctaaaaaccatcatgggacctaaagtctggagaatctgcctgatttatagggccatgcaacatggggaacataatggccttgccaccactagtagtatgagctcaggcaagcaagctgatcttacctggcctctgctgttttttcttctgtgaaatgggagactaaaattactccttgtaaattaccacgggaagcgaaaagcagtaacacatataaagcacttatgacagggcctcttcagttggcaagaaagattatttgatgttgaataagtgctcaactatcctgaactattagtattgytacaaaatggggagctatgtctaaatttaatcatggaatagatggtatgtgggaaaga

SEQ ID NO: 189155 - DNA, 565 bp, Homo sapiens
ttctagtgcctccactttaatttacggaaatgggaagaacatttggagaaagcacagattctgtattttgaaatgcaatgtgaaaaaaatcatcatgctgtttttcagtgaaaactcccaaattatgtgtctctaatttttgttccyattattttaaacatataattacacacgtgtctgtgtgtgtgtgtgtgtgtgtgtgtgtgtgtgtgtgtgtaccgtatttttgccattaggcatataagggcaacatttcttctgctagaccaaattttctgtttctctatcctttggccaaactctatctgaaaacaattcatgtgtttcatgtgtgatttttataatcaaggtcagatctgaccaagcagaggcaccatataatcaggtacattggctctttgaggcctgcaaagaactgtgagcatacagactgatcaaactagcacctgaattaaaaccaaaaggcaggagaaccagaagtctactttcatgatgtaaaaccacttgctcaaattaaaaataatttttaatgttttacaatcatgcagaaaactgcaactggagt

SEQ ID NO: 189156 - DNA, 561 bp, Homo sapiens
ggtaagaaaaggagatgaaggaaagaatgagaaggcaaccttcatacaacttttggaaaaatgactctccatctacaaatcttctccattcctaagatgcaggaagaactaaaattatactaatccttacatttctagtaataagtttcaaactgcaactattattggcttagactctgacccctttagaaaaaaaataccaggaagcattactrtaaggagtaaacgctgtgaaaatttctagctaaaagaagaaaaaagttgcttttgaacaatgcatttttagtatttaccaaaagaaaaataaacatttcaaactcaactgcaaaaatcagaggcaattttttaaagcggatatgtctaaatattaccattttctctcaggaaatatttctcaaaaggaccttatgaaaaataaatatcctaacgtatgtggaaatgcacacacatggcctcagcagtgggattagaagcttttcctgagcttatctgaatagtgacagcaatacatttttccctttgctggtaagcacctcagtacttcctttctcgatctcattc

SEQ ID NO: 189157 - DNA, 561 bp, Homo sapiens
ggtaagaaaaggagatgaaggaaagaatgagaaggcaaccttcatacaacttttggaaaaatgactctccatctacaaatcttctccattcctaagatgcaggaagaactaaaattatactaatccttacatttctagtaataagtttcaaactgcaactattattggcttagactctgacccctttagaaaaaaaataccaggaagcattactgtaaggagtaaacgctgtgaaaatttctagctaaaagaagaaaaaagttgcttttgaacaatgcatttttagtatttaccaaaagaaaaataaacatttcaaactcaactgcaaaaatcagaggcaattttttaaagcggatatgtctaaatattaccattttctctcaggaaatatttctcaaaaggaccttatgaaaaataaatatcctaacgtatgtggaaatgcacacacatggcctcagcagtgggattagaagcttttcctgagcttatctgaatagtgacagcaatrcatttttccctttgctggtaagcacctcagtacttcctttctcgatctcattc

SEQ ID NO: 189158 - DNA, 611 bp, Homo sapiens
aggaggaggagtgagtggtcattaggtcagaagtgttccaccagccaaatgtcaagttccctaaactgttaacaaagtgaagttaacaccagcccagtctctttggccctgacagcatctaacctgcattcattagcacaaaccacaaaatttagtagggcaggaattttcccattctttggcctaagatagaactcaagtcacgatgcacaaaacatttgatctgctttactaatatatggyatcatctggtttgtatgattccctatttggaaacagaaaatgggacttaagatagcttggaaaccaagaattaggattcttcatttctagccctatattttcactactaattggcacagcccacattggattacaataaaaatcatgactgatttgttaagtgtcaaaatttcactccccatctccaacatttataacgctaagtacatttacaaacagctctttaagtgaatcaacccccactataaagcttgcaagacaagataaacattgagtctctactatgggcaaggaatgaaggcaagctggtgaggtgaagtaaaagtcagatatattctaaccctgactaagcctttcaactgctaata

SEQ ID NO: 189159 - DNA, 590 bp, Homo sapiens
gctgttaatataggttaagacctagattgcaattttacaacaatgtggcaaaaatgtttactttgcagtctccagaaaaactagaaaacaggaaataggaaagcaaaatctaataaacatttacaagyaaattgattaaattctaaaggacacaggcctttcccccgacccttcacctgttcaatgacagccacacgtggctgcatcagacctggtgacatgaaggattctttctgcaacataccaaataaagcaaacatttattgcaaagacacagtctattgtttgccagggtatcccctggtatagctgcagtctttccaagtttctacaaaacacatagaatttttttttttaaaagcatgcctgttctgtgggcatcgtagctcaaccccacagtgagctaatggagaaacagatgatattcagagtatttgaacccaacctgcaactcctcattaatgtatgtcttcctctacttgattttccatacccccacactgctgaggaggctgagttttgagaatggacacaggaaagtagacggctgattgaactatctttgaatacattgcaagatcagcaacatg

SEQ ID NO: 189160 - DNA, 655 bp, Homo sapiens
aaagaaaagaaaaagatattttacagcatgggtacaatgtgaaattggagaatacgttagcatgtgctcacagctgtttcaaatgaattgctatagacttacccacagaacactctgcagaagagaggctaagacacaactgaaacctagagcactagtgtggtggcaaatggtggataacattacagaaggaatagcagtagtttcttgtctttatttatttatttttaactggatttatcttagaggtggtgattccatgtgagcagctttctcatcttaaaggtgctaaattgcccatctcacaaataatcaagttattgtaacatcatctatattatttatgcttggatttttttgaattgctcctgttttgcaaatcaaacagcagatgatatatatttgaatttccatttaaaagaatagattcttgcccctgttgaaatctgtaatgctcttatgggtctggtttccatttatcaagcaccagtgttttmttttgcattacagagtacttcaaatatatgcagctttctcatttggatattagtttttccatagatcacatatcaaagaaattttgtctgcacttaaaagggcctatctgtagtagtaataaaatgcataacactaaagataatcttaacaattccca

SEQ ID NO: 189161 - DNA, 354 bp, Homo sapiens
agatggaaaacaagtggactgagggtctgccaatgaaagcgacccgtactgaagtccactggctctggttgagacccagaagagtcacacatcagaatagaggtggacaggaaataccctggcctttgtagggactgagcctgcactgatgaccttaattgcagcctgtatggaggacccctgaccatcccccagaagtagactcccatctcttctgcagcaagataacaygctactaggcctcaattcattgctaaatattttttaacaagtatctcacatttaacaaaaagagatcagtcatatggcagcaaaaaacaatgtaatatgaccaaaacatgaaagactgtgaaa

SEQ ID NO: 189162 - DNA, 354 bp, Homo sapiens
agatggaaaacaagtggactgagggtctgccaatgaaagcgacccgtactgaagtccactggctctggttgagacccagaagagtcacacatcagaatagaggtggacaggaaataccctggcctttgtagggactgagcctgcactgatgaccttaattgcagcctgtatggaggacccctgaccatcccccagaagtagactcccatctcttctgcagcaagataacacgctactaggcctcaattcattgctaaatattttttaacaagtatctcacatttaacaaaaagagatcagtcatatggcagcaaaawacaatgtaatatgaccaaaacatgaaagactgtgaaa

SEQ ID NO: 189163 - DNA, 437 bp, Homo sapiens
agcttgggctactcaacaatatcaccaaggaattggcttttctcccatttttctgctctgccatccactgggtcaacttcctattgtcttcgggtccaaaataatagccagtggcccccaggaccacatgcttcctcagtcatattcagaaaggatgagcaactattatttttcctagatttgctagcrgatgtcctgagattggctgtggctggctcaacatacatcacatgtgcacttctggtccaggcaaccatgcaactctgaggttgggaacagagtcagcttccccagaaccacatggatccccaaattagaaattgagagctaatggcaaggagggattgggtgctgcagaggcaaccacagatgtctgctataatcagctaagccccagcaacctctgtgacagggcctgcccggctgtgctaggcatc

SEQ ID NO: 189164 - DNA, 395 bp, Homo sapiens
gtccacagccttacaatattgcgggtatggacaaggaccctgccccctatttgctcatctgggggatgaataaggaccctttacatagctgcagtacaccggggtggattaatactccctcgaccaacaccatgggaaaagactcaacctataggtctcctcatttggaagacacacagaccgcacgtgattagcaatttgatatcccatccaaagcatttgaacttctctatttcccactttagtagagactgacaaacaaggagggcttagcacttttcacccataaatgctgggctttcgcaaaagktactcgctgccaaaagaaaagagttgaatgttattacaataattataagagaataaaggatgtttgcaaacaagtgggaacaaaa

SEQ ID NO: 189165 - DNA, 406 bp, Homo sapiens
gtccacagccttacaatattgcgggtatggacaaggaccctgccccctatttgctcatctgggggatgaataaggaccctttacatagctgcagtacaccggggtggattaatactccctcgaccaacaccatgggaaaagactcaacctataggtctcctcatttggaagacacacagaccgcacgtgattagcaatttgatatcccatccaaagcatttgaacttctctatttcccactttagtagagactgacaaacaaggagggcttagcacttttcacccataaatgctgggctttcgcaaaagttactcgctgccaaaagaaaagagttgaatrttattacaataattataagagaataaaggatgtttgcaaacaagtgggaacaaaacagctgtgcac

SEQ ID NO: 189166 - DNA, 410 bp, Homo sapiens
taaaacagagtttgtagaacatcaccgagcgggacacaagattgcaaaaatgcaacagagaagatactggtgtcactgcacgccacttgggggctaccaacaaggtaatgtctggatgtgagcaccgygagtctaggaaagagaaagcagagggcgtgtgcatgggagacgccactgatagttccaacgggggccaccaggttcaagaaggcggcaggtcaaccgtgttctgacacatttacatgttttaaggggatccatgtgtgttgtctgaatttctagcttttcctagtgttccaacgtttgccttctctttctccacgtgtccacccagaagaccctaagcaacagccccaggctcaccgggatggcagggactcctccccaacagccaaagccaagccaagctg

SEQ ID NO: 189167 - DNA, 392 bp, Homo sapiens
gagtttgtagaacatcaccgagcgggacacaagattgcaaaaatgcaacagagaagatactggtgtcactgcacgccacttgggggctaccaacaaggtaatgtctggatgtgagcaccgcgagtctaggaaagagaaagcagagggcgtgtgcatgggagacgccactgatagttccaacgggggccaccaggttcaagaaggcggcaggtcaaccgtgttctgacacatttacatgttttaaggggatccatgtgtgttgtctgaatttctagcttttcctagtgttccaacgtttgccttctctttctccacgtgtccacccagaagaccctaagcaacagccccaggctcacygggatggcagggactcctccccaacagccaaagcc

SEQ ID NO: 189168 - DNA, 511 bp, Homo sapiens
catataacagtaagtctacatacaaataaacacatttagacatgtatacacgcacacaaatgaagatccaaatggcttttaccttggaactctagccatgagatagcaatacaagctcgccggttttacatggttacactctgtttgccccagtaggtaatccartgaaggctgtgaaccaaaattttggggtaaagcagtttccatgccagtttgatttttaaattccaaagaacaccggggccaaacagcaccaaaagagagtaccacatgctaaccaggcctgaccctgcttagaacagcagcacaaaagcttggatacatacaacaccatcccactttcccattcaacaacaaactccagattccaagcaatattggggacaaactattgcaaaagaatatcaagcatttcctccttagattattggggtcaaattgataccagtggttgaggatgcagccaagcgggggatcaggtagcatagatggagtctttcccgttattgtc

SEQ ID NO: 189169 - DNA, 511 bp, Homo sapiens
catataacagtaagtctacatacaaataaacacatttagacatgtatacacgcacacaaatgaagatccaaatggcttttaccttggaactctagccatgagatagcaatacaagctcgccggttttacatggttacactctgtttgccccagtaggtaatccagtgaaggctgtgaaccaaaattttggggtaaagcagtttccatgccagtttgatttttaaattccaaagaacaccggggccaaacagcaccaaaagagagtaccacatgctaaccaggcctgaccctgcttagaacagcagcacaaaagcttrgatacatacaacaccatcccactttcccattcaacaacaaactccagattccaagcaatattggggacaaactattgcaaaagaatatcaagcatttcctccttagattattggggtcaaattgataccagtggttgaggatgcagccaagcgggggatcaggtagcatagatggagtctttcccgttattgtc

SEQ ID NO: 189170 - DNA, 349 bp, Homo sapiens
tgcagtggtgcaatctcggctcactgcatcctcgacctcttgggctcaagccatcctccccactcagcctccctagtagctgggactacaggcatgtgccaccacgcctagctaatttttgtattttttgtagagatgagtctctctatgttgcccaggctggtctcaaactcctgggctcaagcaatccacctgccttggcctctcaaagtgttgggattacaggcatgagccaccatrtccaaaataagatttgcgtgtgtaataagtacctggatgattctgatgctggtgctgctggtctgggaactacactttgagaaccactggatctgaggaacattcaatc

SEQ ID NO: 189171 - DNA, 349 bp, Homo sapiens
tgcagtggtgcaatctcggctcactgcatcctcgacctcttgggctcaagccatcctccccactcagcctccctagtagctgggactacaggcatgtgccaccacgcctagctaatttttgtattttttgtagagatgagtctctctatgttgcccaggctggtctcaaactcctgggctcaagcaatccacctgccttggcctctcaaagtgttgggattacaggcatgagccaccatatccaaaataagatttgcgtgtgtaataagtacctggatgattctgatgctggtgctgctggtctgggaactacactttgagaaccacyggatctgaggaacattcaatc

SEQ ID NO: 189172 - DNA, 510 bp, Homo sapiens
tactgggcttgaatcccagccgtgatcctttctggatatttgagggaaatttctgtagttacagcaggaacagaggtggggtgattccagattccagtattctaggcagaggcggcacttagcagaactagccctggtggaggtggccctctgataaattcagagctgatttatcagcagtgtcttcaatggcacaatgttagatggaggctgatgggttccagcctaggagcattagcagcttctaaaaatttattatttttatttttttaaacaaattattattattatttttatagaaatggggttgccccatgttgcccaggctggtcttgaactcctgggcttaagcgatcctgcctyggccccccaaagtgctgggattataggcatgagccacagcacccagcccattagcagtttttgatctacggttatcacgtcttctttttgctcctcagacccacccacttttccaattgctcttccatccatctccaaaccttatac

SEQ ID NO: 189173 - DNA, 419 bp, Homo sapiens
aaaaggcaaaactataggtactgaaaagagatgagtggttgtcaggggctgagggtagcaggagaagttgactacaaagggacaagaaaaaaattagggaggggggattgtggaaatgttctatatcccgattatgttggtgagtacacaactgcacgtttatcaaaactcactaaactgtgtacgaaaagggtaccatacccaagttacgtctcaataaccttaaccaaaaaagtaaacaaataaaatattttgctkaagccctgaacccagctacacctgaagtgaaatttactcttggagttttcagctgtataagctaatacattctctctttccttaaccacttgagttggattttctgttgcttgtcactaaaagagacccaactgttacacgggctcggtttacccaatgtt

SEQ ID NO: 189174 - DNA, 364 bp, Homo sapiens
tgtatgctgagaggcatttttcctctctataactgtacagccatctaaatgggtcttttctggttttacaacttgaatatgttaacatgcacccctcagggtcccccttgtatcccagaaacagcacgcttgtaaaaccttattcatgtgatatccttaatagctgctgacatttattaagtgtttaagatgtgccaggcatrgtgctaagtgtcttagaactcttccagcctgtaatccccgagcctccctgtgaaaatacaagcatcttaagaatgccccctactctggcatttaccttcagatgaccgatgaggaaagtgaggatcagaaacatgaacttatcctaggccagcccactagc

SEQ ID NO: 189175 - DNA, 401 bp, Homo sapiens
ttctttctttggggtaggaagccagggaaggtagaaataactggataatgttggagaatgaccattgcaagactttgctcctcacatcccaggtgcatattccaagaaaattctgattccccgggaaaattctccatgcttggcatagtgctggagccatgtgactttggaaaggtctgagggaggcatttaggcagagactcagctggggaaatcactggggggccctgcaccaacagacaggcgcccagagctgaggaggaatggcagyggggcctgctgagttaagcagaggccacagacatcaccttctggaggctccctctaccactgctccatgggcaagcctgctagatacccagaaacaagacaaaagtgctacactgcccaggatttacttt

SEQ ID NO: 189176 - DNA, 491 bp, Homo sapiens
aggatatttctgacctgcagcatatcatattctttgtttttaaaatttattattgttggccaggtgcagtggctcatgcctgtaatcccatcactttagggagaccgaggcaggtggatcacctgaggtcaggagtttgagattaacctggccaacatggtgaaatcccgtttctactraaaatacaaaaattagctggatgtggtggcatgctcctgtaatcccagctactcgggaggctgaggcaggagaattgcttgaacccaggagatggaggttgcagtgagtggagatctcgccactactccagcgtggatgacagagcaagactccatctcaaaacaaacaaacaaacaaacaaaaaccaaaaaaaaaacaaaacaaaacaagaaaaggcagctcagagaggttaagtgtctagcttgaggccatacagctaactggatcagaactgagatttgaacccatatatgtctgacctggtgctgggc

SEQ ID NO: 189177 - DNA, 491 bp, Homo sapiens
aggatatttctgacctgcagcatatcatattctttgtttttaaaatttattattgttggccaggtgcagtggctcatgcctgtaatcccatcactttagggagaccgaggcaggtggatcacctgaggtcaggagtttgagattaacctggccaacatggtgaaatcccgtttctactgaaaatacaaaaattagctggatgtggtggcatgctcctgtaatcccagctactcgggaggctgaggcaggagaattgcttgaacccaggagatggaggttgcagtgagtsgagatctcgccactactccagcgtggatgacagagcaagactccatctcaaaacaaacaaacaaacaaacaaaaaccaaaaaaaaaacaaaacaaaacaagaaaaggcagctcagagaggttaagtgtctagcttgaggccatacagctaactggatcagaactgagatttgaacccatatatgtctgacctggtgctgggc

SEQ ID NO: 189178 - DNA, 491 bp, Homo sapiens
aggatatttctgacctgcagcatatcatattctttgtttttaaaatttattattgttggccaggtgcagtggctcatgcctgtaatcccatcactttagggagaccgaggcaggtggatcacctgaggtcaggagtttgagattaacctggccaacatggtgaaatcccgtttctactgaaaatacaaaaattagctggatgtggtggcatgctcctgtaatcccagctactcgggaggctgaggcaggagaattgcttgaacccaggagatggaggttgcagtgagtggagatctcgccactactccagygtggatgacagagcaagactccatctcaaaacaaacaaacaaacaaacaaaaaccaaaaaaaaaacaaaacaaaacaagaaaaggcagctcagagaggttaagtgtctagcttgaggccatacagctaactggatcagaactgagatttgaacccatatatgtctgacctggtgctgggc

SEQ ID NO: 189179 - DNA, 601 bp, Homo sapiens
cagtcttagcagattaatattacataggttgaatctaacaatggaaaagacaattgttttttgtcttttaaatccatttttctaatcatcaattttaacgaattattgatccacaaaagattggatggcaaaaaaataaaaatctagtttcttctcagataggtcactttagaagcactgtcacagagagcaaggcatggttgaagaaacaatgatcagtcaggtggtggttggagcatgatgttcatgacaagggaggaacagaagataaggtacaatgctagagtgagtccctgtgtttataggscttcagtgtcagcaaacagatttatgctgtgctctattggtgaggaaaattcacagaaaatgcttaattagaggataaaatgagaaaatctgtaattaaaatgatttccttgttgatttcagagagaaatccactgaagacaagaaagctttcttttttaatttttaattttattgataaataataattgtgcatagatatagggttagatgtgatattttgatacatgcgtacaatgtgtaatgatcaaatccaggtcattagaatatcaattatctcaaacacttacgattt

SEQ ID NO: 189180 - DNA, 608 bp, Homo sapiens
caatgtgtaatgatcaaatccaggtcattagaatatcaattatctcaaacacttacgatttctttgtggtgggaacatttcaaatcttctctagaggatgacacattgatatggtttggctgtgtccccacccaaatctcaycttgaattgtagttctcataatccccacgtgcagtgggaggaacccagtgggaggtaattgaattgtggggtggtttcccctatgctgttctcgtgatagtgaataagttctcatgagatctgatggttttataaggggcttcccccttcactcagctcacgttcttctccttcctgccatcatgtgaagaaggacatgtttgcttccctttccaccactattgtaagttttctgaggcctccttagctgtgagtcaattaagcctctttcctttataaattactcagtctcaggcagtccattatagcagcatgagaataaattaatacacacatcttagtcattatcactctcttttaaggtattaatttttcagtatttgtatctacctccaaactttcttttccacctcatttttttactaactccttcctatccattccagccctaccacctcttcctatg

SEQ ID NO: 189181 - DNA, 458 bp, Homo sapiens
atgttgttttactttataaaggccaatttagccaycccgactatcccatactcctgcctctgatgggtctcccagaggcactgtcctgcacagatggatggttgcagggagcaggaacaaaggggtgtgtaatggtaacaagtcaccatgaacaggagagaatgaaaggggccctccagcaggtttaggcccagttggaggctccagagaaagagtcatctttggagcattgcagttgctggttcactttgaggtggtggtgaaccagagcatccaacttggagagaggctcctcctgggtgtgtcccacatctctgtgcccttttggacacatctgggttcaggctggaaatgcctgacatcaccctcaattgctcagtggcctccttccctccctccaacaactgtcagggaatatagggagcatgggaaggcatagcaaggaagggttggtggag

SEQ ID NO: 189182 - DNA, 526 bp, Homo sapiens
aactattgatcattacaaggattgatcaaataatcaaaataaatttcatttaatcgggatttaattggacaatactgaaactgaataaaagtcaatggaaatggataggatggtgtctgagcatatatttgtattaaaagtcttcgtttaaaaacaaaaactgttatttcatgagatactcacgtctttccagatgcttttgcrcacgtttcctttaaatttgtatataagaagaaaagggaggctttaaactgatattaagttttgatcagattcagtagattcaaagtattttaagagttgaatttctatagtactttgaaaaatactctgaacgattcagttataaaaatttctcttgaatgtattacaaccccttagaaggcaaaattctaaaagtgggacatataatattttcatctacttctcatttccttttttattccatcatttttttccccacaagagatacaattttactttaagaattctagattttttcttatcctgtgaaatctaaatctct

SEQ ID NO: 189183 - DNA, 543 bp, Homo sapiens
agggagtctttaacgtaatctgggaacttttgtgcctagatgcatacaagacaagagacaatgagagggagtaaggtaatgaggtttactcagcttcacccttttgtgtgattacagtctttgtagaaattatgacattaatggcagtagtagaacagtggtgatgcctgatgctgatggtacaagtaatagtagtaggtcatatgagctactmttaactccattctcagcgtgtgttaagatcttaacatctattaccttatttaatgcccatgtaatactttgtgctgggcactatttttataccaattaaaagaatctaaattgattccaaaagaaacttatttatctaatttaggcagtttgaccaagcttttcatataataaagagttctatagattgagaagctatctgcagtggagccgccaccaaaatgcagattttcgtgaaaacccttacggggaagaccatcaccctcgaggttgaaccctcggatacgatagaaaatgtaaaggccaagatccagggtaaggaaggaattc

SEQ ID NO: 189184 - DNA, 627 bp, Homo sapiens
gaattttaaatttatctgacagttttcagaccttagttgtgctgaggtatacagagaatggcaaaatttgcgaaccaaatttctctttttgagcatagaatgagaaagaatgaagagaatactaagaaaataaatgaagggaggtcagagagagagagagagagagagagagagattagaacctggaggattatggtattctttcggtgttcagtgcattttaatatgctatcatttcaagagaatttaccacacatatctacattgaccttcaaatgtagtcaaattcacattttgttgttgttgttaccatgagctattagatttcagcaactggtaaaagatgcattataattcagattataggttatctctggggacgttctcataagagcctgtggaacacctcatagaaggtacaattaatttagtccatccttcwtatttatcaaacaagtatgctgaaagccagtgatttgtctatgggcacataatgtttgcatgttctgtgacccagattcacatttggcactaactcctggttcagttccgctaatatcacagttccttttcaatgctccattgcagataatcaatataaaagccttgctttgccaatgacacaga

SEQ ID NO: 189185 - DNA, 597 bp, Homo sapiens
tgactacagaaactatggattgaaatatttcgttcattccttactctaggatccatgttctctgaaagcaaacaataagttatactgcattattaactttattttgttgtctttatatacagggaggtttaatgttgttgttttaacacatgtactatatatatatatatacacacacacacacatacatatatattacaaatagaaaattctatcaaattctatcatgttactaataacaaaattaataaacatgatcaatgtagcatgtgaagatgtgaagcttggttacttattaacatttgttctgatgtaagatggtctgattttaaattttatgatacgttgtttattgataaagaaccagagtgatgtcaacaatttgtgttcttaattccaagaaacagttataggattatattttactcatccattccaatagttattgaggaccttctatgtccattctaggagcaaaatagtgaataaaataaggctgagtgccagcttttggaaactayggtctggtgggtgagaatgacaaccataaatgtatgattatatactgagataagttttatgaaggaaaaagaaaca

SEQ ID NO: 189186 - DNA, 563 bp, Homo sapiens
aaagttctttgaagaacatttaaaaacatattttattctgcaaagcattagagaaatattagctatttttatcattagtgatgctaacaacagttacaaaatataaaggttttaaatgaaaacagtacatttgttggcaatgaataaagtatcagaaggctatttatattgtagatacctttcagtggccctgttatggctagtagggtgcactcacaacagttcaggaagctaagtactattactattagtattgyatgtgtgaggaaaagaaaagcctcagatagtttagtttcctacactggctccataatgatttgcatctagtgagtgtataaccagaaatttaaacaggagtctaatttattgcaaagctcacacttccatcctatgctagtggcctcttttccttaacttttcccatgatggtagctctaaatatatccttagacccctgagctctggtgcagtgtttttatagtgtaggggaaagcagtaaatataactaaaggctcctaggttccttttacactaacttcactctacacttcaaggtgctagtt

SEQ ID NO: 189187 - DNA, 589 bp, Homo sapiens
taatttgcactaagcatgtactcattgtgctgtttccaggtggagtaaggaagggcaactgtcactaattctggtgagccaattgtggtcctgggtactgggaaatgccagttatgtgtcaaagaggttaactgcagactggggaaaacaaaatggcaaactttggcaatgggagggctgaagagcaaagaatgtaaacagagcaagagtggtttggatagaagccagcaatacttgctatcttcctcttaagaaaagttttgcctatcacgccagcccaaggcataggccaaaacgaaggttcagtgctggttatccgctcccattgccacttgctctttgtttacatgttttaaaaagctagttactrttttgaaaatgcatgctgtatttttttgacgtatgctttaaattttaaacattgcattattcgaattttatttttctgtcagtttatattttatataatgattacttgatagactaagagcaatataggtgctgttatttaaatattatattttgtaacttctgtgacaagagaacaaaattagacaattacctttttaaatgactttttttctaccac

SEQ ID NO: 189188 - DNA, 442 bp, Homo sapiens
tcaaattcttatcatactcattttacttaggaactatatttaggaccaacgagaaaaatatatgaaaggtggtcactgacttaaataatcaatatttcaacatatttaacagaatacttgacattgctgccaaattctgttatttatrtgattctcaagttatcacagaagaagcatgaagacagaaatctttgtaagtacttcatgtaagcatctgtgtgagtgggaagataagaaaaggggaaggatgtagtcaggctttcaatgaagccatttcttacagcaacactcagtgaatggagaaaaaagtctaacttggatatactgtttaaataccctggtgaaatttgcaaacacatgagctaaggcctgacattcatttgataatttacttagcaaatatttcctgagcacttcttgtgtgccaggcatttctctcgat

SEQ ID NO: 189189 - DNA, 606 bp, Homo sapiens
gcatgaagtcttccaagaatagtgttctagaactgcaggcaccaccactgccwgggtggttctgcgttaggtgagagtggatcttaacacttctttgactttatgtgtctcagtcctttgagactcaaagtcctagtggagcatactaatggctgaacttaagttaagggttgagctccgattgtgataagacaaaaaagagaaagattctactccctgttcagactgcagatcaggaagcatgcactatatctctggaatgtacacagaatggagttcctccaaattaagagaggaatattaattgcatactggacagtttaaaaaagtaaaatatttctacttccactgactgttttgttattttttttcgtctttctccccaatgaattctgcatgctgggttcagagtaagcattataaaatgaatataaagactggaagctctttttcattctctttgaattgtgctttataggggtataaactctttaggatggtttgcaaaaccttttttccatatgaccctgaaaatgactcctacctaattttttttttttaagacaggtttttcactccagttgtcctggctggagtgcagtggca

SEQ ID NO: 189190 - DNA, 614 bp, Homo sapiens
  misc_feature (1)...(614): n = A,T,C or G
gaataaataactcctctgaaatttacagcatgtgtaaggatttgaacgaaggaaatgaattagggtaacatcatcggatgtgggagaattagatacggtccccagattggagcaatctcttcccggattctaagaaatttgttttgttcctgactttgattcttttatccttaaaatgaaggcgtgaactaaaagtttcttaggtcttttattacaataggcagaatgttcatgtttcccccaaattcttatgttgaaatctaatccccaaagtgatagtgtttggagatggagcttttaggagatgatgacatcattagggctctgcggtcatgaatgataacagagttcttgtaaaggagatcctacataacttgcttggacttttgccacatgaggaccaggaagccaggcccatgccagaancaantgaagatctgtcagagccttgatcttagacttcccagcctccagaactgtgagacatcaatttctatggtttgtaagcaacctcctctatggtattctcttataacagctccagggactaagacacttgcacatacatgattgtataattcaaaaagttrctaaatgaatgaatgttgagtatt

SEQ ID NO: 189191 - DNA, 596 bp, Homo sapiens
cttttttctcattttgagtgcctcaataataaagcttaaatcttttagtcttctaaccatgatcttagactccccctggtttgggggagtttatcttgtcccaacctgtacacatgtaccatctgtacatagtagcttccacgtgtatagaaataagcagactctaagtatgtgctacttgcatttacagtggtttccaggtggctccttgtttgtgtcacattctcttcttaaatttaacatgttgacctaaatcatcctaatcyttttaaccatcattactttctagttttttcattagcttgaatggcactttcaacgttaatgtggctctaatattagaactgattttccttccattttagtgctctttgccctttagcaggtaggagattccttctaattctcatcttgatatcatggcacatctctgctgaaacccatcaaacccaactcaagagtttatgtaatcttgcatctgcttgtttgcctgcctttattttatcccactggttctctctctgttcttggcagaagccaaactcactgctgcctcgggacctttgaattagctggtgatgcttcccagaattacc

SEQ ID NO: 189192 - DNA, 499 bp, Homo sapiens
atcttctttaatttctttcagcaatgttttgtggcttttattgtacaagcttttcacctccttggttaagttagttcttaagtgtcttattcttttacgtgctattataaatggaattattttcataatttccttttcaggttgttaattattagtgtacagacatgcaactgatttttgcacrttgactttgccagtgacatgaacctgtatgtagaaaaccctaaagattgcacaaaaaaaatggttagcttgagacgtaaaccttaggcaaagagaagtttgtgatttgtaagaaatttaaaattaataggattaaaaagagagctgtgggccttgttatgtatttgctttggaagccctctaagaaaatttcaggtcaattttttattctctgccctactggaatgccccctagattatgtgacaatgaggtcttattttaatatgtgcagaatttgttaagactgacattctttgtttcagatttttacatatc

SEQ ID NO: 189193 - DNA, 430 bp, Homo sapiens
ttttgctcgtgaagtttgacagtagtcagaaagtgcctctttaataaagcacacctttaaataactctcacagattcattccagcttttaaagtgagaagatggcttgaactcccactgctgccagctcagctgtggatctgaaatatccagctgtgccctctctgcctctctcatcaccaataacagactttgcagtcagaatctgtctggcacgtgtgttgatgtgtgaggcgagatagcattttgctcaccgtattggcttctccgcgctagaccatagtaaacatttgtctttgtcagcagttamagcagtgtgatttgaggatgtacagggattacggacacttctgctctgttatgcttttgtctaggtctacatagaaatttatattcaaaaagagtcgatttaactgttagaatagaccagt

SEQ ID NO: 189194 - DNA, 568 bp, Homo sapiens
cttaatatatctatttttcagttttttccattatggtcaaatacccataacataaacattaccatcttaattttcaagtatacattcagtaacattcaacacagtacattcacaatgtggagcaaccatcgttaacatctgtcaccacaactcttttcatcttgcgaaaatgaaactccatacccattaaatgtaactcctcattctccctttctttcagcctttacaaccaccattccactttgtttctatgattttgagtactctaagtatctcacataggttaaatcatacaratttgtctttttgtaattggcatatttattttagtatagtgtcctcaacgttcacctacattgtagcatatgtcagaaatttctttcttaaggctgaataatattccattgtatgtgtatatcacattttgcttatccatttatccatcaatggaccatggcttagttcacattttagctattgtgaataatgctgctatgaacatgggcatacacatattcctttaagactctgctttcaatgcttttggtatgtacccagaagtgaaatt

SEQ ID NO: 189195 - DNA, 444 bp, Homo sapiens
ttgattttctttcttgttatgccagagtcagactggaaagtaagtcaccacgtacagggttaaataaaacccatctgacaagaatttacagtctgtagggcatgactccccagacccctyagataggaatttgggcaagattaaaataaaaaatcagagcttagtcctcagtccccactcattggcataaaaggcattccatagaatgcatgtgcaggccaacaaacagcagcaggtcccacggtgctaggaaggctcattcctagagttgtctgatttggccatccggcagggtcccacagtgctaggaagtcttgttcctggagtcctctcatttgacggtaatagttttaagtattagcgatttgaaaatggggggaggacacagcctgacctgatgtactagccaattctttaaggggtaaaatggagtcaggcttatgg

SEQ ID NO: 189196 - DNA, 584 bp, Homo sapiens
aagacacagagttggatgtaacacatgactttaccyggtcgatctcaaaaaaaatattgcttattctgatacaaaaaaattgaaaattaaaagagaaaagatatgcagtcatacatttagatgctgcattagacattagagataattttggcccacctagaaatttcacatataaggcttcacaagatgaattttattaaagtttatcaagcagctatatagactcggagcctggagtagaagccatctctctagacaatctggttagtgctttctctcttgagtcgctcagcttcacacaccaccatatgctcattccaacaaagcacatctatgaatgtatataggcagatttatatgtatgtgtgtgtatatatatattcatagtcatcaacttccagcatttatgcacataatggggtgcctgggaatatcttacttttctccttcaatatgcccacagctgttgattctgaacatctgggataattcaactctaaacaaaatacagtgtgcataatgccaggcacacttaatccctcttttgaaggaattaccaaaattagtgtgaaggaaaaaattca

SEQ ID NO: 189197 - DNA, 652 bp, Homo sapiens
tataattaaatgttgaattttacttaatgaagcataatttctttgagcagttaaatactcagggattttaattttgtggttagaataagtttttacatcagagggtgaagtgtaaggtagtcagactttaagccagacccaagttgaagtccagttcttctattacatgtctgacttgagcaaatctcttaacttattaacttcttggagatttagtttccttatccagatagtaagaccctttgtaggggttgcaaggacaagtaaatagaaggtattaaataaatagcacctattccattgaatttacttccacaaaactctaaaggcaataccaggtagaaaaaagtttcttttgtagaaagaaaagaatgaattttaaatgtctttccatcttcacaccaccaaccccaaccagagtaaatgaatgatagtaaaacctgaggatgaaaactcccaccaggcccatagtctctgcattctctgagacttctgaagctatgtgctatttctgtcaataccaccatcattatgaaatggctccytccccttcctcctccactcttctaccaactgggtttatctttttcctttctcctcctttcctatcttcctttaggctttccaatagcacataactgggacccgggaa

SEQ ID NO: 189198 - DNA, 609 bp, Homo sapiens
aacttattgaagcagttgaagttattttagattgctgtcttatatgcagctgacctaatgccactggctaattctcctgatttaaaatatatgagggttgtgaaatctgcatttttgataaacacctaggacaattcttagacacaatcaaattttgaaaaacctgccatgagatacaagatctataaataattttataattatttcttagagatagaccagagacagggmtggtatacattatacctttacttgtattctgcaggatttagtaccataacaaatagtgagggatggtccatcaaggtctgcagaataaataaattgttaagagaagtcttcttttccacccctaattttcttctgcaagctaccagagaaaatgtttcttaattgtggacagccttgaggaacacctggcggatcatttttctatttctttgaaaggtctaggtatatgaatgaaccacaaaacaatgagcagcagctttgcagtgacaatacggtttcttaaatatggtggctattttgcctctggtgtctcttccagagcttgctaccaggatagcgtgagtccagtaggcgtaccaagtccttcaatactactag

SEQ ID NO: 189199 - DNA, 530 bp, Homo sapiens
tgagaacagcatgggggaaactgcccccatgacccagtcacctgccaccaggaccctccctggactcacagggattacaacttgaaatgagatttgggtggggacacagagccaaaccacattaaccactatgcttacataagagaggggggcyttcatgtcttcatctcttcctgcttggacagagtcttggttacctccttcttggcctgaagtggctcctcggggcactcctgtacttccttggtcttaaccttgggggcctatctggttagccaggggcttcttgcaggccttctctgccttcagcttgcggatgtgtttcaggagaatctgcttgattctcattcacctaaaagataatgtaatttttaagagaaaaaaagtcagatatgttatttttctttgagtaccatggccacagccatacatcttgctcaggcaaccgaagaggcatgcctccagcatcctctgccatgacgaaaaggcctcataggatcccagtgaaaccaaccaaacagtcaatgcca

SEQ ID NO: 189200 - DNA, 530 bp, Homo sapiens
tgagaacagcatgggggaaactgcccccatgacccagtcacctgccaccaggaccctccctggactcacagggattacaacttgaaatgagatttgggtggggacacagagccaaaccacattaaccactatgcttacataagagaggggggccttcatgtcttcatctcttcctgcttggacagagtcttggttacctccttcttggcctgaagtggctcctcggggcactcctgtacttccttggtcttaaccttgggggcctatctggttagccaggggcttcttgcaggccttctctgccttcagcttgyggatgtgtttcaggagaatctgcttgattctcattcacctaaaagataatgtaatttttaagagaaaaaaagtcagatatgttatttttctttgagtaccatggccacagccatacatcttgctcaggcaaccgaagaggcatgcctccagcatcctctgccatgacgaaaaggcctcataggatcccagtgaaaccaaccaaacagtcaatgcca

SEQ ID NO: 189201 - DNA, 530 bp, Homo sapiens
tgagaacagcatgggggaaactgcccccatgacccagtcacctgccaccaggaccctccctggactcacagggattacaacttgaaatgagatttgggtggggacacagagccaaaccacattaaccactatgcttacataagagaggggggccttcatgtcttcatctcttcctgcttggacagagtcttggttacctccttcttggcctgaagtggctcctcggggcactcctgtacttccttggtcttaaccttgggggcctatctggttagccaggggcttcttgcaggccttctctgccttcagcttgcggatgtgtttcaggagaatctgcttgattctcattcacctaaaagataatgtaatttttaagagaaaaaaagtcagatatgttatttttctttgagtaccatggccacagccatacatcttgctcaggcaaccgaagaggcatgcctccagcatcctctgccatgaygaaaaggcctcataggatcccagtgaaaccaaccaaacagtcaatgcca

SEQ ID NO: 189202 - DNA, 580 bp, Homo sapiens
cagtggagagatattgtagccctcggcatgttagggaagtgtgagaacctaaactggccaattgcatccagagagcaactagtaagaagaaagcctgagtgaatcatgtccagtaagagacaaggactgcgaaagatatggaccaatccctgaggccacrtaaagttagatcttctctctctgctatgtcttttaatttctgtttcttattttcagtctaccttttcccttctactgttctctgaatagtttatttgctgggtctaatttgctgttaagtttatccattgagttcttcgttttgattatattgttgttctttctagaatttctaattgtttctttgtcacattcgcttgtcatttgggtcatctcttgctccttgttcatatagtggacccttgaacaatacagatttgaactacatgggtctacttatacacagattttcttctgtctctgccacccctgagacagcaagacgaacccctcatcttgctcctccttttcagccttctcaacatgaagatggggatgaagacctttatgatgattcacttccacttaatgaatagtaaat

SEQ ID NO: 189203 - DNA, 431 bp, Homo sapiens
agtaactggaaggtaagtattgcatatgatttatatggaatgaacattaaaggttgaaaaaactgagattaatttccatataacttctgcttgaaactcgagaaaaaaatatttgcaactatttcaaattctgtttacaaatgctgtcccatatagctgcacaatgagttgattaaaaaaggtaatgtttgctatctgaaagatttctcagacatcaattataaaaactattagcaatcattataaatgtatactaaaatatttaagtsaaaatgacttgaattctttaattattcataactgaaaggcagaaacttcactgggtctattaacaaagtatttctattagtccctgaaaataacttttgttactattttacaaaacaatttatatttcttccaaaaaaaatgggatacatgtgcagaacatg

SEQ ID NO: 189204 - DNA, 552 bp, Homo sapiens
aactttttaaactttgcatttttataaattctayaactccatgttattctgaattatagctgatgtttagtactttggaataaatacctttttaaaaccaaatatgcaaacccgattctaaaataaaacaatattttaatttgcaagttttcatactacaaatttacacaaattttcatactaatgttagtattttcttcagaagaaggaggcctgattggagatacatagccgctgtccaacatggctgccattagcaagtgatattgttggtgacaaaggatagcctggataagaataaggccttgaagtataaggaagcacgctgggagtcccagaagagagggtagcactaacaggggaaagactatttattgagctgcgatggaaattgtagtctgtaaataaatacatgaacaattatgctgtacatctttatggacacaaatttaatttaaagagacaaagcattaaacaataatcacattttaacataatgttctaacactggaaatcttgatgatactatattgctggttaaagattatttca

SEQ ID NO: 189205 - DNA, 580 bp, Homo sapiens
cagtggagagatattgtagccctcggcatgttagggaagtgtgagaacctaaactggccaattgcatccagagagcaactagtaagaagaaagcctgagtgaatcatgtccagtaagagacaaggactgcgaaagatatggaccaatccctgaggccacataaagttagatcttctctctctgctatgtcttttaatttctgtttcttattttcagtctaccttttcccttctactgttctctgaatagtttatttgctgggtctaatttgctgttaagtttatccattgagttcttcgttttgattatattgttgttctttctagaatttctaattgtttctttgtcacattcgcttgtcatttgggtcatctcttgctccttgttcatatagtggacccttgaacaatacagatttgaactacatgggtctacttatacacagattttcttctgtctctgccacccctgagacagcaagacgaacccctcatcttgctcctccttttcarccttctcaacatgaagatggggatgaagacctttatgatgattcacttccacttaatgaatagtaaat

SEQ ID NO: 189206 - DNA, 501 bp, Homo sapiens
caatgacaacaaataattagtcataatatgaactctatacagttgacccttgggcaaaacaagttttgtttgtttttgtttttgagacagggtctctctttgtcttacaggctgcagtgtagggacacaatcctagctcactgtaatctcaaactcctggtctcaagcgttcctcctgcctcagcctcctaagtagctgggactacaggtgcatgccacaatgcccagctaattttcaatttttttgcagagatggagtcttgctatgttgcctgggctggtcttgaactcctggctttaattgaccctcccacctaagcctccaaaagcactaggattatgggtgtgagccaccaggcccagcgacaacatgggttttaactgggtgggtccrtttacgtgcaaaatttttcaaccaaatgtggacagaaaaccaagtattcctaggatctgaaacctgcttatatagggagggccaacttctgtatatgtgggttccag

SEQ ID NO: 189207 - DNA, 608 bp, Homo sapiens
aaaaagccaggcacagcacttcctttaaagtggcttttcaaaaaactagcaaaagaaggcaatagttactacccacaagttcactgaaagcctctttgcctgaagttcctatagtttgcctgttcattttcattcaaaaaatatttatttagtacttactatttgccacacactgtggaaggctttgagcatattagaaagctcacagacaaataaggcaaagagatacataaatataatacaatgcaaaataaattcatgcattgttctttttccccatcacccaaactttaatattgtattcaattaaataccggttaattataaccaatgtccataaacatagattttatttcccaactggcaactaatgcttcattcaaagttgtgtaatgtgaaattcagagtgaaaatttggaccttgaagtttcctgccttcacagggtattrgttaatttgaatgattggctactagttgcctttggacacttaaaacataaaaaagaacattacacagtccattatgctgccaatctgaggcctgaggagaaaagaaagaagagaaaaatgagactaggcattggaagtgaaatgaaagcacagagtcc

SEQ ID NO: 189208 - DNA, 608 bp, Homo sapiens
aaaaagccaggcacagcacttcctttaaagtggcttttcaaaaaactagcaaaagaaggcaatagttactacccacaagttcactgaaagcctctttgcctgaagttcctatagtttgcctgttcattttcattcaaaaaatatttatttagtacttactatttgccacacactgtggaaggctttgagcatattagaaagctcacagacaaataaggcaaagagatacataaatataatacaatgcaaaataaattcatgcattgttctttttccccatcacccaaactttaatattgtattcaattaaataccggttaattataaccaatgtccataaacatagattttatttcccaactggcaactaatgcttcattcaaagttgtgtaatgtgaaattcagagtgaaaatttggaccttgaagtttcctgccttcacagggtattagttaatttgaatgattggctactagttgcctttggacacttaaaacataaaaaagaacwttacacagtccattatgctgccaatctgaggcctgaggagaaaagaaagaagagaaaaatgagactaggcattggaagtgaaatgaaagcacagagtcc

SEQ ID NO: 189209 - DNA, 648 bp, Homo sapiens
atactctctttttgtttggagaagcactacaacagtaggctcttttggttatgcaaataaaaattaagtraacacccaattaagttctgcggggataactcatatggcagcacttccaggttggatgttgttgttaagtgaatatcaaagttgatacacccaagtacctatttgcatatgctaattgacagagagtccgtgaaacaggaagtcatgagaaagagaaaggctaaaggaggggattttaaacttcatttcgtttgtttttgcagatattcttcttggttatagaattctaggttgacagatgttttctttcaatattttaaagatatttcttcactgtcattatatacattaggacaactgaatttttccgatgtgtggttctttttctttttttttaatcctatcttctctgtgtacttttgaataatctctcgtgctgtgttttcgagtttactaatcttttcacatgcctagtgacaccataaaatattagaattgattgaggaacatctacaagaccagattgtaggctcataagaagtctattttaatactcatgcccccaagaaattgataagattggctatctatcagagacatctaaaagcagtttgacatgataatgtcggctttgaaatt

SEQ ID NO: 189210 - DNA, 648 bp, Homo sapiens
atactctctttttgtttggagaagcactacaacagtaggctcttttggttatgcaaataaaaattaagtaaacacccaattaagttctgcggggataactcatatggcagcacttccaggttggatgttgttgttaagtgaatatcaaagttgatacacccaagtacctatttgcatatgctaattgacagagagtcygtgaaacaggaagtcatgagaaagagaaaggctaaaggaggggattttaaacttcatttcgtttgtttttgcagatattcttcttggttatagaattctaggttgacagatgttttctttcaatattttaaagatatttcttcactgtcattatatacattaggacaactgaatttttccgatgtgtggttctttttctttttttttaatcctatcttctctgtgtacttttgaataatctctcgtgctgtgttttcgagtttactaatcttttcacatgcctagtgacaccataaaatattagaattgattgaggaacatctacaagaccagattgtaggctcataagaagtctattttaatactcatgcccccaagaaattgataagattggctatctatcagagacatctaaaagcagtttgacatgataatgtcggctttgaaatt

SEQ ID NO: 189211 - DNA, 648 bp, Homo sapiens
atactctctttttgtttggagaagcactacaacagtaggctcttttggttatgcaaataaaaattaagtaaacacccaattaagttctgcggggataactcatatggcagcacttccaggttggatgttgttgttaagtgaatatcaaagttgatacacccaagtacctatttgcatatgctaattgacagagagtccgtgaaacaggaagtcatgagaaagagaaaggctaaaggaggggattttaaacttcatttcgtttgtttttgcagatattcttcttggttatagaattctaggttgacagatgttttctttcaatattttaaagatatttcttcactgtcattatatacattaggacaactgaatttttccgatgtgtggttctttttctttttttttaatcctatcttctctgtgtacttttgaataatctctygtgctgtgttttcgagtttactaatcttttcacatgcctagtgacaccataaaatattagaattgattgaggaacatctacaagaccagattgtaggctcataagaagtctattttaatactcatgcccccaagaaattgataagattggctatctatcagagacatctaaaagcagtttgacatgataatgtcggctttgaaatt

SEQ ID NO: 189212 - DNA, 648 bp, Homo sapiens
atactctctttttgtttggagaagcactacaacagtaggctcttttggttatgcaaataaaaattaagtaaacacccaattaagttctgcggggataactcatatggcagcacttccaggttggatgttgttgttaagtgaatatcaaagttgatacacccaagtacctatttgcatatgctaattgacagagagtccgtgaaacaggaagtcatgagaaagagaaaggctaaaggaggggattttaaacttcatttcgtttgtttttgcagatattcttcttggttatagaattctaggttgacagatgttttctttcaatattttaaagatatttcttcactgtcattatatacattaggacaactgaatttttccgatgtgtggttctttttctttttttttaatcctatcttctctgtgtacttttgaataatctctcgtgctgtgttttcgagtttactaatcttttcacatgcctagtgacaccataraatattagaattgattgaggaacatctacaagaccagattgtaggctcataagaagtctattttaatactcatgcccccaagaaattgataagattggctatctatcagagacatctaaaagcagtttgacatgataatgtcggctttgaaatt

SEQ ID NO: 189213 - DNA, 466 bp, Homo sapiens
aggagtaggtagaacaatagtccaattatgtatttgtcttgtactcagtaaatcagcactttacataagataatgtgtacatatgtactacctgtggatattttttaactttttatctatagctatctgcttaggaatgaaaggaaaggcagtttcttgcataagtcagctttcagattaattttttccttttagcagcatgaattggggtcctaagattttatttttctttcataacattttggatgattcttctctgtacattgtcctcaatggccacatctgaagtgggtgtcgagaagtatgtcttctttagggtcatatggcttttgtgactgcttcctactcatttaagtttgggaggctgagagttgttaaaaggctcctgacatttgcaatatcatttcttccaatgccttctggactacttatttccagtcatakccatgtgccaataaccacactc

SEQ ID NO: 189214 - DNA, 475 bp, Homo sapiens
ttggttggagatttcaatgtgaacagtttctgaaagtatttaaaaagagggcctagaaataaaagatacaactcgaagagcctgtggcttgagcagagcgtgtgatgattgcaatggcaaggtatgaagcaggagagctaagaagaggcagatgatgycaggttttataaaccaggctaaaaagtcataacctagggtagtagtgagcaaaaggagggctttattcagagctgcatcatcgtcaagttacacctttttatagtctggagaataactttgaaagggggggattttactgagtacattttacttggtaactttaaatatttattgaagtaaacatatatgcaatatttataaaagtaaataaaatgcttatgaatttcaaaatacatatttaatacatcataaattgtattttataagtgaaaataaataatatttattaagtcccttttaaatataaaacatatgt

SEQ ID NO: 189215 - DNA, 586 bp, Homo sapiens
ccccttgcatgtgtattattactgaccatgctatttgtttacattctatgccggccggcccctgcaatgcaaaaggagaccggcaagaaaggtagctaggtattcaactaggaaaggtttgataaagaaatggtatccagtaattgatattttagtcattcctgacttgttgacctaattagatttttttccccagcttctttgctcataggaaacaacacacgagtagttttcacatattgtttgacctacatttgtgtccattataaaactaatcttgatttgatacagaagaactaaacttcatagcaataattttctagcaaatggatctcactcataagaaaataaaaggacatatgtccattttagaaccaacttctggttacagtgagagccatttgtgccaaaaatgactagtaccattaaaaagcaatccactcctaggtatataccyggaagaattgaaaaaatatgtcaacacaaaatcttggacatgagtatttgtagcagtgttatcacaatagtcaaaaggtagaagcaacccaaatgtccattaactgatgaatgaatggataaacaagat

SEQ ID NO: 189216 - DNA, 586 bp, Homo sapiens
ccccttgcatgtgtattattactgaccatgctatttgtttacattctatgccggccggcccctgcaatgcaaaaggagaccggcaagaaaggtagctaggtattcaactaggaaaggtttgataaagaaatggtatccagtaattgatattttagtcattcctgacttgttgacctaattagatttttttccccagcttctttgctcataggaaacaacacacgagtagttttcacatattgtttgacctacatttgtgtccattataaaactaatcttgatttgatacagaagaactaaacttcatagcaataattttctagcaaatggatctcactcataagaaaataaaaggacatatgtccattttagaaccaacttctggttacagtgagagccatttgtgccaaaaatgactagtaccattaaaaagcaatccactcctaggtatatacctggaagaaytgaaaaaatatgtcaacacaaaatcttggacatgagtatttgtagcagtgttatcacaatagtcaaaaggtagaagcaacccaaatgtccattaactgatgaatgaatggataaacaagat

SEQ ID NO: 189217 - DNA, 620 bp, Homo sapiens
ctggttacagtgagagccatttgtgccaaaaatgactagtaccattaaaaagcaatccactcctaggtatatacctggaagaattgaaaaaatatgtcaacacaaaatcttggacatgagtatttgtagcagtgttatcacaatagtcaaaaggtagaagcaacccaaatgtccattaactgatgaatgaatggataaacaagatgtggcatatccatacagcagaatattatacagctataaaaaggaatgaagttctgatacatgctacaacatggatgaaccttgaaaacgctaagycagaaacagaagaccactattacatgattccagttatatgaaatgttcaaaataggcaaatatatgaagacagaaagtagatttgtggttaccagcggctggagagaggaaggaattgggagtgactggtaatgaatatgaggtttgtttttggagtgatgaaagtgttgtgaaattagatgatgatgatgaatgcataactctgtgaatactctgaaaaccctgaattgcacacctaaaaacgggaatttttactttaataaacctattactttttttgagacaggttctcactctgttacccaggctggagtgcagtg

SEQ ID NO: 189218 - DNA, 620 bp, Homo sapiens
ctggttacagtgagagccatttgtgccaaaaatgactagtaccattaaaaagcaatccactcctaggtatatacctggaagaattgaaaaaatatgtcaacacaaaatcttggacatgagtatttgtagcagtgttatcacaatagtcaaaaggtagaagcaacccaaatgtccattaactgatgaatgaatggataaacaagatgtggcatatccatacagcagaatattatacagctataaaaaggaatgaagttctgatacatgctacaacatggatgaaccttgaaaacgctaagtcagaaacagaagaccactattacatgattccagttatatgaaatgttcaaaataggyaaatatatgaagacagaaagtagatttgtggttaccagcggctggagagaggaaggaattgggagtgactggtaatgaatatgaggtttgtttttggagtgatgaaagtgttgtgaaattagatgatgatgatgaatgcataactctgtgaatactctgaaaaccctgaattgcacacctaaaaacgggaatttttactttaataaacctattactttttttgagacaggttctcactctgttacccaggctggagtgcagtg

SEQ ID NO: 189219 - DNA, 573 bp, Homo sapiens
gtactgtttaccttaaattatggtcattgtgcatattttgtcctcaaggaaagatgacagctgattttggttggttggttggttgtttttctcccccatgcctctcaacttccttatggaaaaattactgccataaaagaactcaacatcacaaagataggaataattggagtcctaattttctttggtatatcacctgagttccaaataygaggtcatttaatagtattacacatttataaaatcatgacatgtggagcaaaatgtcacttgctaaaattaaggacttgccaattcttaaaattgttgatagatgtctaaccactgaattatatactttccttgatgttgagattgtctttttggtaaacataacgctggtctacataacctacagcacaactgaatatcaaaggtttatttgatatttgtgcttctctacacccccttcaataaaccagaatattcttaatattcaaccaatgcttccaatattattggatttctgtagtagttttgatttgatgacttatagccctctgaagagaacagaaaggtttataatagtggatc

SEQ ID NO: 189220 - DNA, 503 bp, Homo sapiens
aaattacagcttagacatatttaatatactaaagttcaacaggtaaaatttagccaaatgagaaagagaagaatcttctgaaatagtatgggctgctagcttgccaatacactcagtgagcatgtgcaccagcatgaacaggaaatggagtccctcaatctgccctcactgtctcaggcccccatctctctggggaataagaaataagcagctcccctcacttgtacatgaagctaaaagctaaatgtttgtatctttataccccattttcactacacacaagcacaattaccgcctttggtgtcttccctatgaagcaacaatctggtccaagaggaacctatgtgtgttggactcatggagagatggtgagttgatgcccaattaggtagatggagcctaaagaggagacctgctggtggagttacatacgcaccgaccccatcacytgctcacccaaccatgccgcatcatggcatagaacgtggccacattcaacctag

SEQ ID NO: 189221 - DNA, 520 bp, Homo sapiens
aaataaaaatagacaaaagaggctacatcaaattgtaaaatgtttgcatgtcaaaggaaacaacagagtgaaaaggcaacccatgamatgggagaataactgcaaatcatatgttttttaaatattttgtgggtacatagcaggtgtatatatttatggaatgcatattttgatgcaagcatgcaatgtgtaataatcacatcatgaagaatggggtatccatcccctcaggcatttatccattgtgttacaaacagtccatttacacttttattttaaaatgtacaattcagttattattgactatagtcacactgttgtgctatcaaatagtaagtcttatttattctttctggtttcttgtacccattagccattgaaagtcatatatctgataaatgtttaatatccaggatatataagcaacttctacaactctacacaacacacaaaacacaattataaaatgggcaacggacttgaatatacgtttctccaaagatgatatgcaaatactcaa

SEQ ID NO: 189222 - DNA, 431 bp, Homo sapiens
accagtcaagacatttttattttagagaaaacaaaccttagaggagcttctggttgagttaggtcagaggcgcactctcttacagactaagagtttttaaggattcagggtgggattgtttatcagaggcttggactgcttctgtgtctctttgttgtgcttatctgggagggagagttgtgtgtctattcccatacatctttctgcagttgcaggtatacccctgagtctgcttttagcttcctcatcttagtgcacctgaaggaaaaggaatgtgcttattaaggcccactgttttactgggacccattgtgtgagggtgaagtttggcagttacacaagagatttycccccacctccctctgtgctcaagctgtcttatttgtgttttactgtctgctctttctggctgcttgtagttagaacagaag

SEQ ID NO: 189223 - DNA, 438 bp, Homo sapiens
tttaaggatttttttaaggaacgagcctatatgtcaatagcaattgcttggatcttagaaatcggttcttgtaggtttaaatatagmtacagctaatgacatattgattattgcagtgaagccttgctaaaagcagttttccactcgattgccaatggaaaccagaagaggtcaagcttagtgaggctggggaaactatcggtgccccacaatctttctgaaattccgggattttgaaagagaaccttgaggcaggttccatagaacttatggctacagacacgtggccatgagaatggatctgttctctacaccctgtgaaggcaataagggcaccaggcaccagaaagctatgctgtttatcattgtcccctcttcccaccatctgttcgccctttctcctctcttcctttccctagaatcaagtctttaagatct

SEQ ID NO: 189224 - DNA, 457 bp, Homo sapiens
aaaaaacaaacaaaccaccaaaaaaaaaaagcaaaaaaaatgaggattctttttaaaaagaaaactgaggattcttcttcctttttttttttttttttttttgaggcagggtcttaatctgtcgcccaggctacagtgtagtggcacaatcctggctcactgcaacctccacctcccaggctcaagtgatccgcccacctcaacctcccaagtagccaggactacaggtgtgtgccaccacacctggctaattttttgtatttttggtaaagacagggtttcgccatgttgaccagactgaaattgaggatttttaaaatagctctatttagtgatgagaatatagaaaccaaaaaaattgtcagtacaaaataactctcttaaaagcacctgcaaacatytataaaatagtaaaacatgaatttaatctttttattacagagccagttaatgtcag

SEQ ID NO: 189225 - DNA, 509 bp, Homo sapiens
agcaagccattactaaggttgattgagtcaacctagtcagggtttgagggagatggctgctattgttatctgatacaccaagcatcaaaatcccctagccatgggctgctgtcttgtgcctagtgtgctagacttttttcagtgttcctgatcatcctgtagttccttgacatttatgtcacaaaggtgacacaaattcctctttacattcttgctctccagagatgactgttattgctacgttaccaggtgctaggctccttgctctccctggcccagcctaaattttaggaatgatccatatacctggacctcagagtggggccttctcaggatctgtgcatctcttctccaacrcaactaaactctgcctgatatttgtccctgtcttgggcatgaaagagttcctgtccctcatgcagcagaaagagaactttgctttgcatcagtgaaagattatgagcctaagagtctgtcctgcttttgctattaattacccttcgtcccag

SEQ ID NO: 189226 - DNA, 609 bp, Homo sapiens
tgcagcccaacacaaatttgtaaattttcttagaacattacaagatttttttgtgatttatttattatttacttatttttagctcattagctgtctttagtgttagtgttagtgtattttatgtgtggcccaagacaattcttcttccagtgtggcccagggaagccaaaagattggacacccctgccttagatattgaaaattagaggtgcctgcatttccagtaattaagacaattcttactgtgcatttttttgctttccattatctttcattaaaaaaatctccaacttttaccttttagaatattaggatagaatcttattaatatgaatacgtccaaaagttggcttttgtggttttcttttgtcagaagtgctgtaggataatataacttaaaacacatacagttttctgcttctctcaagatgttcagttgtttttcaraaacacctgaatgaatggtgctaaactttccatgggctttgtctaaaactcgacaagcattagattaatatttcttttgtaggtccaattagcattcaaatattattcctgaagtattggatttcatatgttattttttgttgcttgttgatattttggttt

SEQ ID NO: 189227 - DNA, 610 bp, Homo sapiens
aaatttattttaagccagactttacaaacaacgaagggagttatctggaaatgactgaaccaaagcttatgaggggaactaaaatgcactgcacttatttgaacaaacagtaaataaggtataggataagtctatgttttccaataaggaatttwaaaaaaatcaaaccctgcagtctgatgtagcatatagaccctcccccagtttgttcatccttgtctgggacctatcatgctttcagatccatgtgtaccttgttttcatattattacaaaaattgaatagctattgctccaaattcagttattgtctttatttattgcttgggtattactgttcctaatttgctcctaaaagaaatgtacaacactctcttgcaaagcatactctgcaaaattacctgctgcagttgcctaagattggcttttatctctgtgctgtggtgaggtggagttatataagccacccaggcttttggcaggaagaaaataactcccagagtgatgctacctgaaagacttgccttcattatcaaacattctcctcaaccatcaggcactggggtttttgctggttcaaacattctaagcccaaatccatgtgggttatt

SEQ ID NO: 189228 - DNA, 610 bp, Homo sapiens
aaatttattttaagccagactttacaaacaacgaagggagttatctggaaatgactgaaccaaagcttatgaggggaactaaaatgcactgcacttatttgaacaaacagtaaataaggtataggataagtctatgttttccaataaggaatttaaaaaaaatcaaaccctgcagtctgatgtagcatatagaccctcccccagtttgttcatccttgtctgggacctatcatgctttcagatccatgtgtaccttgttttcatattattacaaaaattgaatagctattgctccaaattcagttattgtcttyatttattgcttgggtattactgttcctaatttgctcctaaaagaaatgtacaacactctcttgcaaagcatactctgcaaaattacctgctgcagttgcctaagattggcttttatctctgtgctgtggtgaggtggagttatataagccacccaggcttttggcaggaagaaaataactcccagagtgatgctacctgaaagacttgccttcattatcaaacattctcctcaaccatcaggcactggggtttttgctggttcaaacattctaagcccaaatccatgtgggttatt

SEQ ID NO: 189229 - DNA, 569 bp, Homo sapiens
  misc_feature (1)...(569): n = A,T,C or G
nnatcccctccatttatggctttgcatttgttcaataggcattttcctggggcagtttcatttttacttagcagagaagcctcaaacacaatgtaacatgtaggcttgctcatgaaaactttctacctgccgttgctaagaaacctcactggaaattctgttctaaggaaaaaaaatcagataacccaatgaaccactacattgattagatcatgataaaatatttgtagtgatttatagttgtagtgatttatagtatgaaaactgatttgactttcacatatatatgtgtgtgtgtgtgtattcagtcttatggaaaataaagcatatctttgactttttyttttttttttttttttgagatggagtctcgctctggcgcccaagttggagtgcagtggggtgatcttggctcactgcagcctttgcctcctgggttcaagcgattctcctgcctcagcctcctgatatctttgactttttaataagtgtgtttaaagatagcagtgccagcccaaatttgctttttcattaatatagcaatatttggggtatataacatataaatt

SEQ ID NO: 189230 - DNA, 579 bp, Homo sapiens
gtccatctttctgacacagaatccaacctgaccagactgcaggcagctgcttctcatgctgtataacactaaggagcacaggatagtaacctagacagctctctgctggctagaagcccatgcacgagcagatgcagtaaataggcaggctggctgcggtggctcatgcctgtaatcccagcactttgggaggctgagacaggtggatcacgaggtcaggagatcgagaccatcctggctaacatggtgaaaccttgtctctactaaaaatacaaaaaaattagctgggcgtggtggcgggtgcctgtagtcccagctacttgggaggctgaggcaggagaatggygtgaacctgggaggcagagcttgcagtgagccgagatggtgccagtgcactctagcctgggtgacagagcgagactccatctcaaaaaaaaaaagaaaatgctcaggcatatgctcacggccagttcccagaccaaaatcccaactgggactcagaagatgcgactcagcttcagcatttgcagaggtaccaaaaggcacttacgcaaaggctaagggatggtggaaaaaagg

SEQ ID NO: 189231 - DNA, 542 bp, Homo sapiens
ctgtataacactaaggagcacaggatagtaacctagacagctctctgctggctagaagcccatgcacgagcagatgcagtaaataggcaggctggctgcggtggctcatgcctgtaatcccagcactttgggaggctgagacaggtggatcacgaggtcaggagatcgagaccatcctggctaacatggtgaaaccttgtctctactaaaaatacaaaaaaattagctgggcgtggtggcgggtgcctgtagtcccagctacttgggaggctgaggcaggagaatggcgtgaacctgggaggcagagcttgcagtgagccgagatggtgccagtgcactctagcctgggtgacagagcgagactccatctcaaaaaaaaaaagaaaatgctcaggcatatgctcasggccagttcccagaccaaaatcccaactgggactcagaagatgcgactcagcttcagcatttgcagaggtaccaaaaggcacttacgcaaaggctaagggatggtggaaaaaaggctatcaatataagaaagatct

SEQ ID NO: 189232 - DNA, 573 bp, Homo sapiens
gaatccaacctgaccagactgcaggcagctgcttctcatgctgtataacactaaggagcacaggatagtaacctagacagctctctgctggctagaagcccatgcacgagcagatgcagtaaataggcaggctggctgcggtggctcatgcctgtaatcccagcactttgggaggctgagacaggtggatcacgaggtcaggagatcgagaccatcctggctaacatggtgaaaccttgtctctactaaaaatacaaaaaaattagctgggcgtggtggcgggtgcctgtagtcccagctacttgggaggctgaggcaggagaatggcgtgaacctgggaggcagagcttgcagtgagccgagatggtgccagtgcactctagcctgggtgacagagcgagactccatctcaaaaaaaaaaagaaaatgctcaggcatatgctcacggccagttcccagaccaaaatcccaactgggactcagaagatgcgactcagcttcagcatttgcagaggtaccaaaaggcacttaygcaaaggctaagggatggtggaaaaaaggctatcaatataa

SEQ ID NO: 189233 - DNA, 394 bp, Homo sapiens
tcaattaaaaaaaaataaaaagccagtgaccttatacaaaggctgggatgtaacaaaagcccatcaagagtttcgcctaggcctttcttgggccttataggattaaacaagttttattgggggtctgaagaaattccccaggcctcyacaaacaggtttattggaggtctgaaggaattcaccaaaccactgtgatttagcaggagacaagataagggtaattaccccagcacctggacccatttagattaagtaaatttactgaggctgcaggggaaggtcttcaagactcagaccttagttacagattaaataaaagaagttaatcacttatctctttagatgaatgcacacttacatgtagacatatagcttagaaggtatataggctctg

SEQ ID NO: 189234 - DNA, 575 bp, Homo sapiens
gcccctgtggtagatctcgtctgacaaaaaaagttgtagtwtgctgaacaccaatcaattatccaacaccaactggctgtccaacaactcaattctgacaccacccagagtcaacacagaatccacaagttcagggctcagtcccaccacactgtcgcaactacagatgccagtcacatggctctggataaccatctatttctgaactactgctaacaagccaaggtcttccacatcttcctcctcaagttcaataatttgaataatttgaaagattactcagagaactcagcaaagcactgagcttacatgttgggaacaggccccccaaaatctggccaaaaagtggccccaaaactggccataaagaaaatctctgcagcactgtaacatgttcatgatggccataacgcccacgctgggaggttgtgggtttaccagaatgagggcaaggaacacctggcccacccaggaaggaaaactgcataaaggcattcttaaaccacaaaaaaaagcatgctcctgctgcagataactagcccaacccatccctttattttggctcatcccttcgt

SEQ ID NO: 189235 - DNA, 588 bp, Homo sapiens
cccctgtggtagatctcgtctgacaaaaaaagttgtagtatgctgaacaccaatcaattatccaacaccaactggctgtccaacaactcaattctgacaccacccagagtcaacacagaatccacaagttcagggctcagtcccacmacactgtcgcaactacagatgccagtcacatggctctggataaccatctatttctgaactactgctaacaagccaaggtcttccacatcttcctcctcaagttcaataatttgaataatttgaaagattactcagagaactcagcaaagcactgagcttacatgttgggaacaggccccccaaaatctggccaaaaagtggccccaaaactggccataaagaaaatctctgcagcactgtaacatgttcatgatggccataacgcccacgctgggaggttgtgggtttaccagaatgagggcaaggaacacctggcccacccaggaaggaaaactgcataaaggcattcttaaaccacaaaaaaaagcatgctcctgctgcagataactagcccaacccatccctttattttggctcatcccttcgtttcccataagggat

SEQ ID NO: 189236 - DNA, 554 bp, Homo sapiens
gagtactggttataaggtttgccacattttttacatttgtagtgttattctccaatatgaattatcttatgtatagtaagggttgaagattggttaaaagctttgccacattcttcacatttgtagggtgtctctccagtatgaattttcttatgtttagtaaggtttgaggaccagttataagctttgccacattcttcacatttgtagggtttctctccagtatgaactctcttatgtctagtaagagttgaggactggttaaaagcttttccacattcttcacatttgtagggtttctctccagtatgagttatcttatgattagtaaggtttgaggatttttaaaaagctttgccacattcttcacatttgtagggtttctctccagtatgaattaycttatgtctagtaatttgtgaggaacagttaaaagctttgccactttcttcatgtttgtagggtctctctccagtatgaatcatcttatgtgtagtaaggtatgagaattggtagaaatctttgccacattctaaacatttgtagggtttctc

SEQ ID NO: 189237 - DNA, 529 bp, Homo sapiens
gacttcaataaagattatgccactaatctaattccacctagaaaaaaatacagtatcctccaaaagactcacaagtctaattccaaggtaacttctcatggtccagcagaggaaatcagactcctggcatcagagcctgcaacatgagcgactcaggcatgctcaatayagtcatgtatctcttaatgacggagacacgttctaagaaatgcatggttaggcaattttgttcttgcatgagtatcctagaatgcactcacacaaaactagatggtttagcctattacacagctaggctatatgatatagcctattgctccttggctataagtttgcacagcatgttcatgttactgtattgaatactgtatgcagttgtaacacagtaataaatatttgtgtatctaaatgtagaaaagatacagtaaaatacggtatgaaagattaaaaacaggatacctatatagggcatttaccatgaatggagcctgcaggactgaaagtagctctgggtgttggcgagtgagtg

SEQ ID NO: 189238 - DNA, 529 bp, Homo sapiens
gacttcaataaagattatgccactaatctaattccacctagaaaaaaatacagtatcctccaaaagactcacaagtctaattccaaggtaacttctcatggtccagcagaggaaatcagactcctggcatcagagcctgcaacatgagcgactcaggcatgctcaatatagtcatgtatctcttaatgacrgagacacgttctaagaaatgcatggttaggcaattttgttcttgcatgagtatcctagaatgcactcacacaaaactagatggtttagcctattacacagctaggctatatgatatagcctattgctccttggctataagtttgcacagcatgttcatgttactgtattgaatactgtatgcagttgtaacacagtaataaatatttgtgtatctaaatgtagaaaagatacagtaaaatacggtatgaaagattaaaaacaggatacctatatagggcatttaccatgaatggagcctgcaggactgaaagtagctctgggtgttggcgagtgagtg

SEQ ID NO: 189239 - DNA, 529 bp, Homo sapiens
gacttcaataaagattatgccactaatctaattccacctagaaaaaaatacagtatcctccaaaagactcacaagtctaattccaaggtaacttctcatggtccagcagaggaaatcagactcctggcatcagagcctgcaacatgagcgactcaggcatgctcaatatagtcatgtatctcttaatgacggagacacgttctaagaaatgcatggttaggcaattttgttcttgcatgagtatcctagaatgcactcacacaaaactagatggtttagcctattacacagctaggctatatgatatagcctattgctccttggctataagtttgcacagcatgttcatgttactgtattgaatactgtatgcagttgtaacacagtaataaatatttgtgtatctaaatgtagaaaagatacagtaaaatayggtatgaaagattaaaaacaggatacctatatagggcatttaccatgaatggagcctgcaggactgaaagtagctctgggtgttggcgagtgagtg

SEQ ID NO: 189240 - DNA, 590 bp, Homo sapiens
ttatcattttggcaccagcgaccagtttcatggaagacagtttctctactgggttgagcaggggaggggatggttttgggattaaactgttccacctcagattccacctcagattatcagacattagttatattctcataaagaacacaacctagatccctcgcatgtgcagttcacaatacggttcattcttctatgagaatctaaagatgctgctgatcaagagttggaactcaggcagtaatgctcactggcccactgctcacctcctgctgtgccgcccagtttccaacagaccactggtatcagtctgtggccaaggggttggagccccttgctttggcaaatgtaactctatttgtgtgttggcacagccttatkaggaagataatccaattacaccattttgtagatttttataagtagcagctgtggtgagtagttcagcgttgggccatgatgccagttcctgaattcaaattccagtttcccctctcataagccatgtgacatggagaagggtaattaaactttcttgcccctcaattttatcacctctaaagtggcagtattgtactatttttagaact

SEQ ID NO: 189241 - DNA, 692 bp, Homo sapiens
acatagtcatttattatcattatcaagtattatgtaatgtacataattgtatatgctatgcttttacatgccaggcaacacaggtttgtttacacaaggatcaccacaaacatgtgagtaatgcattgcactcattatcatacctatgaggtcactaggcaatagaaatttttcggctccattttttggtaatttttattttaggttcaggggtccacgtgaaggtttgttacacagataaacacgtatcatgkggatttgttgtacatattattacatcacccaggtattaagcccagtacccaatagttatcttttctgctcctctccctcctctcaccctccttgctcatgtacaccccagtgtctgctgtttccttctttttaatcatcaagttcttatccttcagtgcccgcttataagtgaaaacatgcagtatttggtttctgttcctgtattagtttgctaaggataataacctccaactccatacttgttcccacaaaagacattatctccttcatttttatggctgcatagtattccacggtgtataggtaccaaatttctttaaccaatctgttattaatgggcatttaaattgattccatgtctttgctattgtgagtaattctgcaataaacatatgcatgcgtgtatctttataatagaatgatttatatttccttgg

SEQ ID NO: 189242 - DNA, 692 bp, Homo sapiens
acatagtcatttattatcattatcaagtattatgtaatgtacataattgtatatgctatgcttttacatgccaggcaacacaggtttgtttacacaaggatcaccacaaacatgtgagtaatgcattgcactcattatcatacctatgaggtcactaggcaatagaaatttttcggctccattttttggtaatttttattttaggttcaggggtccacgtgaaggtttgttacacagataaacacgtatcatggggatttgttgtacatattattacatcacccaggtattaagcccagtacccaatagttatcttttctgctcctctccctcctctcaccctccytgctcatgtacaccccagtgtctgctgtttccttctttttaatcatcaagttcttatccttcagtgcccgcttataagtgaaaacatgcagtatttggtttctgttcctgtattagtttgctaaggataataacctccaactccatacttgttcccacaaaagacattatctccttcatttttatggctgcatagtattccacggtgtataggtaccaaatttctttaaccaatctgttattaatgggcatttaaattgattccatgtctttgctattgtgagtaattctgcaataaacatatgcatgcgtgtatctttataatagaatgatttatatttccttgg

SEQ ID NO: 189243 - DNA, 692 bp, Homo sapiens
acatagtcatttattatcattatcaagtattatgtaatgtacataattgtatatgctatgcttttacatgccaggcaacacaggtttgtttacacaaggatcaccacaaacatgtgagtaatgcattgcactcattatcatacctatgaggtcactaggcaatagaaatttttcggctccattttttggtaatttttattttaggttcaggggtccacgtgaaggtttgttacacagataaacacgtatcatggggatttgttgtacatattattacatcacccaggtattaagcccagtacccaatagttatcttttctgctcctctccctcctctcaccctccttgctcatgtacaccccagtgtctgctgtttccttctttttaatcatcaagttcttatccttcagtgcccgcttataagtgaaaacatgcagtatttggtytctgttcctgtattagtttgctaaggataataacctccaactccatacttgttcccacaaaagacattatctccttcatttttatggctgcatagtattccacggtgtataggtaccaaatttctttaaccaatctgttattaatgggcatttaaattgattccatgtctttgctattgtgagtaattctgcaataaacatatgcatgcgtgtatctttataatagaatgatttatatttccttgg

SEQ ID NO: 189244 - DNA, 692 bp, Homo sapiens
acatagtcatttattatcattatcaagtattatgtaatgtacataattgtatatgctatgcttttacatgccaggcaacacaggtttgtttacacaaggatcaccacaaacatgtgagtaatgcattgcactcattatcatacctatgaggtcactaggcaatagaaatttttcggctccattttttggtaatttttattttaggttcaggggtccacgtgaaggtttgttacacagataaacacgtatcatggggatttgttgtacatattattacatcacccaggtattaagcccagtacccaatagttatcttttctgctcctctccctcctctcaccctccttgctcatgtacaccccagtgtctgctgtttccttctttttaatcatcaagttcttatccttcagtgcccgcttataagtgaaaacatgcagtatttggtttctgttcctgtattagtttgctaaggataataacctccaactccatacttgttcccacaaaagacattatctccttcatttttatggctgcatagtattccacggtgtataggtaccaaatttctttaaccaatctgttattaatgggcatttarattgattccatgtctttgctattgtgagtaattctgcaataaacatatgcatgcgtgtatctttataatagaatgatttatatttccttgg

SEQ ID NO: 189245 - DNA, 624 bp, Homo sapiens
aatgcaaatcaggaaatctctccacatatattgacagcaagttatcttttwaaagatctctcttactgatgttagttcacactttgagttttcccccttctcaattcctggtccctcccaggataaatgcagcataacttaatgactattttacattgtgtgggttatcttcatatattaggaatccaatacttgacagaaaagtaatttaaatttggcagcctgcagacacacatagaaacaattctggataaaatcttgaaagagatgttgatgctgaatatcctcccagccttgaccacctctctccaatctactcatgatgagtgtgaattcttcaataccctcttattcaatacctgttcccgtctttatgataatctgtattctgaactccacttgatttcctcgtgtcgtaacttgatctgtgcacttcccaatggtagaaactatgcctacccatctctaattgacatctgtaatccagagccaagcatatattggacccataatcactacttcttaaatgggtagacatgactgtgagcagattgccaatctgcccagctaattggagctaaagggttaattagtgtaaatgatttcatggattgtgtatcccag

SEQ ID NO: 189246 - DNA, 624 bp, Homo sapiens
aatgcaaatcaggaaatctctccacatatattgacagcaagttatcttttaaaagatctctcttactgatgttagttcacactttgagttttcccccttctcaattcctggtccctcccaggataaatgcagcataacttaatgactattttacattgtgtgggttatcttcatatattaggaatccaatacttgacagaaaagtaatttaaatttggcagcctgcagacacacatagaaacaattctggataaaatcttgaaagagatgttgatgctgaatatcctcccagccttgaccacctctctccaatctactcatgatgagtgtgaattcttcaataccctcttattcaatacctgttcccstctttatgataatctgtattctgaactccacttgatttcctcgtgtcgtaacttgatctgtgcacttcccaatggtagaaactatgcctacccatctctaattgacatctgtaatccagagccaagcatatattggacccataatcactacttcttaaatgggtagacatgactgtgagcagattgccaatctgcccagctaattggagctaaagggttaattagtgtaaatgatttcatggattgtgtatcccag

SEQ ID NO: 189247 - DNA, 620 bp, Homo sapiens
atgtgattattaactatgaaatttagccagataaggagataaataaaaacttcaaagaagcaaaagattaytaaaaccagtaaaataagtaaattggagatcctaatagtgctaaaagatttttggagtcaaaaaactatgggagtgagatgcatagataggaagtagttatcatggagtgtgatgcataaaactgagattatagagaacttgcagtgaagcaaggtccaaggcatgaccatgagagtgagtgactgagatagaggaaagaaggagaatttaagaaattgagaattcaatgttttcagagaagtatctatgtctgtagtataataaacagaattaaaataaacaggagtaatgaagagagttacagtaaaccaggaagtcacaaatggggaaatgatgaggaataacacaggaagctggacaaaacaatgaggaacagcaggtgatttgtagtccaattacatgatattcaaagctaagtattcattatatgaacaaaactaaagacaaaaaacacaggattatctcaataggttctgaaaaggcttttgataaaattcaacatcccttcatgctaaaaattctcaataactaggtgttgaaggaacaca

SEQ ID NO: 189248 - DNA, 620 bp, Homo sapiens
atgtgattattaactatgaaatttagccagataaggagataaataaaaacttcaaagaagcaaaagattactaaaaccagtaaaataagtaaattggagatcctaatagtgctaaaagatttttggagtcaaaaaactatgggagtgagatgcatagataggaagtagktatcatggagtgtgatgcataaaactgagattatagagaacttgcagtgaagcaaggtccaaggcatgaccatgagagtgagtgactgagatagaggaaagaaggagaatttaagaaattgagaattcaatgttttcagagaagtatctatgtctgtagtataataaacagaattaaaataaacaggagtaatgaagagagttacagtaaaccaggaagtcacaaatggggaaatgatgaggaataacacaggaagctggacaaaacaatgaggaacagcaggtgatttgtagtccaattacatgatattcaaagctaagtattcattatatgaacaaaactaaagacaaaaaacacaggattatctcaataggttctgaaaaggcttttgataaaattcaacatcccttcatgctaaaaattctcaataactaggtgttgaaggaacaca

SEQ ID NO: 189249 - DNA, 620 bp, Homo sapiens
atgtgattattaactatgaaatttagccagataaggagataaataaaaacttcaaagaagcaaaagattactaaaaccagtaaaataagtaaattggagatcctaatagtgctaaaagatttttggagtcaaaaaactatgggagtgagatgcatagataggaagtagttatcatggagtgtgatgcataaaactgagattatagagaacttgcagtgaagcaaggtccaaggcatgaccatgagagtgagtgactgagatagaggaaagaaggagaatttaagaaattgagaattcaatgttttcagagaagtatctatgtctgtagtataataaacagaattaaaataaacaggagtaatgaagagagttacagtaaaccaggaagtcacaaatggggaaatgatgaggaataacacaggaagctggacaaaacaatgaggaacagcaggtgatttgtagtccaattacatgatattcaaagctaagtattcattatatgaacaraactaaagacaaaaaacacaggattatctcaataggttctgaaaaggcttttgataaaattcaacatcccttcatgctaaaaattctcaataactaggtgttgaaggaacaca

SEQ ID NO: 189250 - DNA, 566 bp, Homo sapiens
caggagcaatttgaggaagttccgactcgcagccagaggctgcagcataacccctaaaccgtaattactaatcttgcagctaatttgttagtcctgcaaagcagactggtccccattgaagaaaggggtyttttggggaaagggctattatcaattttgtttcagagtcaaatcataaactgaattccttcccaaggttagtttggcctatgcccaggaatgaataaggacaacttaaaggttagaagcaagatggagtcggttaggtctgatctctttcactgtcataatttccttggttataatttttgcaaaggcagtttcaccactttttgacttcagttaccacagattactgtgccattgattatttcttatacttgggagggtttatttgactatattacagatttgccccttatcttttgttttcatcagttttactatgctttacataggtatgctttttttatctatactccttgaggtttgctgaagtctttggctctctggattgaccatctttcattgttgttggaatattcttgtctattattcccttaaac

SEQ ID NO: 189251 - DNA, 566 bp, Homo sapiens
caggagcaatttgaggaagttccgactcgcagccagaggctgcagcataacccctaaaccgtaattactaatcttgcagctaatttgttagtcctgcaaagcagactggtccccattgaagaaaggggtcttttggggaaagggctattatcaattttgtttcagagtcaaatcataaactgaattccttcccraggttagtttggcctatgcccaggaatgaataaggacaacttaaaggttagaagcaagatggagtcggttaggtctgatctctttcactgtcataatttccttggttataatttttgcaaaggcagtttcaccactttttgacttcagttaccacagattactgtgccattgattatttcttatacttgggagggtttatttgactatattacagatttgccccttatcttttgttttcatcagttttactatgctttacataggtatgctttttttatctatactccttgaggtttgctgaagtctttggctctctggattgaccatctttcattgttgttggaatattcttgtctattattcccttaaac

SEQ ID NO: 189252 - DNA, 566 bp, Homo sapiens
caggagcaatttgaggaagttccgactcgcagccagaggctgcagcataacccctaaaccgtaattactaatcttgcagctaatttgttagtcctgcaaagcagactggtccccattgaagaaaggggtcttttggggaaagggctattatcaattttgtttcagagtcaaatcataaactgaattccttcccaaggttagtttggcctatkcccaggaatgaataaggacaacttaaaggttagaagcaagatggagtcggttaggtctgatctctttcactgtcataatttccttggttataatttttgcaaaggcagtttcaccactttttgacttcagttaccacagattactgtgccattgattatttcttatacttgggagggtttatttgactatattacagatttgccccttatcttttgttttcatcagttttactatgctttacataggtatgctttttttatctatactccttgaggtttgctgaagtctttggctctctggattgaccatctttcattgttgttggaatattcttgtctattattcccttaaac

SEQ ID NO: 189253 - DNA, 564 bp, Homo sapiens
ctgctttttgactgtgggtcttcagatgatcaatttctcaatagattcatgcaaattagactttttagagactgacttaaaagcaacaataccagcatatctctttataaagaaaaaagtaatggccacatggaccagatcactggttgtgggcacattgacagtctctgttgcacaccctgagaggataccagggtaaaaccaggaggcttttcattagcctggagagaagctggctggtgataggggaagttagttgatagttttaatatgtaatgctacgaactaatgataacttgatgtagctrtctctgctctagggccatatatatgcgaaggacactggcaacttgaccttgattgatggtattttttcccctcgtcaagcttggagattcaaggttcaatcctacttctatgaaaattttgttttcatttacagaataccattttcttgtaatgttaatgccacagatttgccaacagtcaaaatcttgctcttgcattttactgaagcctatttctaatctcaagccattctgagttgactttcctaatttctct

SEQ ID NO: 189254 - DNA, 437 bp, Homo sapiens
tgtcatcaaggaccttttcaatctgtataagaataatagagtattgtatgttaccaagtttaatggaaaccctgtatgggagattctgtgttttaaaatgttgactaacttcttaatagaacatttgtcttaagtttatcaataggttccagctgtttataggagaaatacaatggtgacaaattatgtggaaatgtatttcttttataaggtcamcctggagatggccattctggggctgggatgttgtttccacagtgttttcagtgacaaatttctatcctcctgctctaccatttttatacatagcttcaatgttccatattacttcataataaataaaatgactgttgaaagaaggaataaaggcaaaaagcaagaagagagcacccatcagctgaatctgccaggctaagagtcccacacagcacgtgaat

SEQ ID NO: 189255 - DNA, 442 bp, Homo sapiens
gtggctatataatgtcatcaaggaccttttcaatctgtataagaataatagagtattgtatgttaccaagtttaatggaaaccctgtatgggagattctgtgttttaaaatgttgactaacttcttaatagaacatttgtcttaagtttatcaataggttccagctgtttataggagaaatacaatggtgacaaattatgtggaaatgtatttcttttataaggtcaacctggagatggccattctggggctgggatgttrtttccacagtgttttcagtgacaaatttctatcctcctgctctaccatttttatacatagcttcaatgttccatattacttcataataaataaaatgactgttgaaagaaggaataaaggcaaaaagcaagaagagagcacccatcagctgaatctgccaggctaagagtcccacacagca

SEQ ID NO: 189256 - DNA, 442 bp, Homo sapiens
gtggctatataatgtcatcaaggaccttttcaatctgtataagaataatagagtattgtatgttaccaagtttaatggaaaccctgtatgggagattctgtgttttaaaatgttgactaacttcttaatagaacatttgtcttaagtttatcaataggttccagctgtttataggagaaatacaatggtgacaaattatgtggaaatgtatttcttttataaggtcaacctggagatggccattctggggctgggatgttgtttccacagtgttttcagtgacaaatttctatcctcctgctctaccatttttatacatagcttcaatgttccatattacttcataataaataaaaygactgttgaaagaaggaataaaggcaaaaagcaagaagagagcacccatcagctgaatctgccaggctaagagtcccacacagca

SEQ ID NO: 189257 - DNA, 562 bp, Homo sapiens
agctctacccagaataacataagccatttaagaatctcttaacagttattattaaaacattactgttttcttaatttgtttatattttattataagcacaaatcataatcccattcttcttagacacaatgcttactgttttcaacggtcaatcccttaagatgaaacataaatggcctgcacctctccctgtgacaaaccaagaagctcatgtaagtcttagaaggaaatggatggattttgtttaactatctcagatgagtctcgggttgtaaataaaagaaagaagttagctactggggactcctagccatcttaattcaatccactttcctttgggaaataccttgggctagactagcagaggggtcttgaagtcttgagataaagtgctgggtgagagagagaagctgatctgtggttccatgtgatgagtgtctaaatgtaaatttaccctggctgataagaatgtgaaagtcaatgaggacarcgtcattggagtatgtggaataggacatgtgtctcagttgtccacgtagctggagaaatcaaagtattggtt

SEQ ID NO: 189258 - DNA, 535 bp, Homo sapiens
tcatgggaaggaaggtatataattacctttctaaaatctgaaaaaagaaggtttcctgaaaaatcctaaatttcaaaatttgtctggtcccaaggtttttggaaaaggtattaggggtttataaattattgttattcaaactttaaggaagagaaaattgacttacagaggttaaataatttgttcttcatgaagtgtttataaaagggtcagctcctttgtcttagtgactttggtccagtacacattttatatgggctttaactatattttaggtttcactggataagtctctaacttctccctctccctggtctcctgagacattactggagagaaaatcattataccacaatacagtggccatataatttacatctaaaatgggaccctcatgagaataaagaggacactattaataagtttattgtgacaaggagcacaaagtagaactgtctggtacaaactgcaacaaatggtwcccctgtatatgtaaaacctttacaacctttaatctaaatgtggacccgagaaa

SEQ ID NO: 189259 - DNA, 551 bp, Homo sapiens
ccagaatgttacctgagtgcccattcccatctctcctctttgggcaggtattccaggcctgggcctccagccacccactgccagagctattgagccagcaccaactcagcaactttctggacagagcctccagggggaacttgaaagcctctctgccactgcytctgcagtggaactgtgcttgccaccctcagactaacgaagaagcaaagaccctaagtgccttatccacaccttcaacaagtagaagttgacccaaggagaggaggccagtccatttcccgtgggtcccatacacccctcacagcttgtcatcagacagggaacatctggcttgggaccacagcacaaaccctccatcttgggctgactgcaccaagtgattgctgatctgcatctgtctgggtggagtccccaggaatcaagcaaatgaccctcggccacaaccactactaagatctcttctgctgcctctaagctggacaagaaacataaacacttagattgccccagagccatagtaggcagcccagaagtgtaaagttgtgaac

SEQ ID NO: 189260 - DNA, 551 bp, Homo sapiens
ccagaatgttacctgagtgcccattcccatctctcctctttgggcaggtattccaggcctgggcctccagccacccactgccagagctattgagccagcaccaactcagcaactttctggacagagcctccagggggaacttgaaagcctctctgccactgcctctgcagtggaactgtgcttgccaccctcagactaacgaagaagcaaagaccctaagtgccttatccacaccttcaacaagyagaagttgacccaaggagaggaggccagtccatttcccgtgggtcccatacacccctcacagcttgtcatcagacagggaacatctggcttgggaccacagcacaaaccctccatcttgggctgactgcaccaagtgattgctgatctgcatctgtctgggtggagtccccaggaatcaagcaaatgaccctcggccacaaccactactaagatctcttctgctgcctctaagctggacaagaaacataaacacttagattgccccagagccatagtaggcagcccagaagtgtaaagttgtgaac

SEQ ID NO: 189261 - DNA, 482 bp, Homo sapiens
aaagtaggggaagagtgaaagacattcaacttggcaattgaagactctattaatattttttgaatgaataagttaaaaaaaagtagatgtgaaaatctatatcagatcatccaagtgatagggttataaaacctgaaattttattgtacttactatacatatttataatttcatatgtagcttatataattttatatttataatttttgtcttaaatctttggctaatctctaagtgtgggagagatttttgagtaaatctgcagtatgatccatttctaaactaaatttctaactatatattctaaatgtttacgtgcagtgtatgcatacatattttataaacatatactrtactatttggatttaataatattttagaagttttgtttttattttggccacatttacaaaaatgtaagtacaaatttaaaataagtttgtgtttgcccattatccagccacaactttaaagcatgccat

SEQ ID NO: 189262 - DNA, 540 bp, Homo sapiens
catctatcctttcctgtcatctccacatattaagatctcatttttttctcatatttttagtgtctcctttcaaattggagtatcttccctgacttctaacatttgaaggtttctccgtcttggaaaaacaaacaaacaaaaaacaaacccaatgccttctatttgaccttgatatcctttctttggacactcatatttcttttgtttcttaaccacgcttttcagacaggatttctctaatgatgatcccatgccttaccacttgctttatctggttatcacttaattgaatcctaagacacctgcaaattgattttttgatgtagtgcaagaggtgtataggagaaatgaaagatgccctaccagacagttcaaaggtgagcagctggcaaaggcagactttacatcctctgggacatcactacccagtatggtagcgactagcctcatgtggctattgaacaactgaaatatgactratgtgactgaggaggtgtattttaaattttactgcattttaattaatttaaatttaatttt

SEQ ID NO: 189263 - DNA, 331 bp, Homo sapiens
cagcaagcatataaaacaatgctcaacattgctaatcattagagaaatgcaaatgaaaaccacaatgagataacawctcacacaagtcagaaaggctattataaaaagtgaaaaaataacagatgctggtgacgttgcagagaaaacaaaatatttatacactgctagtgggaatgtaaactatttcagccactgtgaaaatcagtttagagatttctcaaagaactgagaactaccatttaacccagcaatcccactactgggtatataaccaacagaatataaatcgttctaccaaaaagacacaagcacctgtatgttcatcacaaca

SEQ ID NO: 189264 - DNA, 575 bp, Homo sapiens
ggatctatgattttaaattttgattcaatcccttttatattcacacttctctcaatagctcttattatttccaagtttcctattaatctatacaattttctaggtctcttagactcacctactytcttaaagagcctttccgcctgcttggacgatacttatataaacacaggagaataatagagactatattaaaaccattagaaacacaggagaataatagagactatattaaaaccataataaacacatgataatatagtaccctacattaaaacaataataagacatgaaatcctcgtggaaaaacagctatattaagaatccaatggactctgcaacctctcatctggaactcatgtgtaactaaaatattttcagtagcatatacatacatatttattacaatagattattttgtgtggtgagtaaatttcaagtaaaattttttgcaagttataatatcaaatattcagaaactgagagttctgattattaggactatgtgtccttaaaatcaggcacacaatgaatttaccctgaacagcttaaaatctgatcatttttagtttagg

SEQ ID NO: 189265 - DNA, 575 bp, Homo sapiens
ggatctatgattttaaattttgattcaatcccttttatattcacacttctctcaatagctcttattatttccaagtttcctattaatctatacaattttctaggtctcttagactcacctactctcttaaagagcctttccgcctgcttggacgatacttatataaacacaggagaataatagagactatattaaaaccattakaaacacaggagaataatagagactatattaaaaccataataaacacatgataatatagtaccctacattaaaacaataataagacatgaaatcctcgtggaaaaacagctatattaagaatccaatggactctgcaacctctcatctggaactcatgtgtaactaaaatattttcagtagcatatacatacatatttattacaatagattattttgtgtggtgagtaaatttcaagtaaaattttttgcaagttataatatcaaatattcagaaactgagagttctgattattaggactatgtgtccttaaaatcaggcacacaatgaatttaccctgaacagcttaaaatctgatcatttttagtttagg

SEQ ID NO: 189266 - DNA, 575 bp, Homo sapiens
ggatctatgattttaaattttgattcaatcccttttatattcacacttctctcaatagctcttattatttccaagtttcctattaatctatacaattttctaggtctcttagactcacctactctcttaaagagcctttccgcctgcttggacgatacttatataaacacaggagaataatagagactatattaaaaccattagaaacacaggagaataatagagactatattaaaaccataataaacacatgataatatagtaccctacattaaaacaataataagacatgaaatcctcktggaaaaacagctatattaagaatccaatggactctgcaacctctcatctggaactcatgtgtaactaaaatattttcagtagcatatacatacatatttattacaatagattattttgtgtggtgagtaaatttcaagtaaaattttttgcaagttataatatcaaatattcagaaactgagagttctgattattaggactatgtgtccttaaaatcaggcacacaatgaatttaccctgaacagcttaaaatctgatcatttttagtttagg

SEQ ID NO: 189267 - DNA, 578 bp, Homo sapiens
tattacaatagattattttgtgtggtgagtaaatttcaagtaaaattttttgcaagttataatatcaaatattcagaaactgagagttctgattattaggactatgtgtccttaaaatcaggcacacaatgaatttaccctgaacagcttaaaatctgatcatttttagtttaggcagtaataatacttgctcatatgtcactactaaaatccatatctctcacaaaaattaggttgctttcatcatgaaaaactgtgatttaaaatagtaggcaactatataggtttmacagaagctaaccagtgaccatactacactaaacagatatagctcaatgacacttgcactgggcctacattacataaaaccacgtatttgaaaaaaatttaaaattatcttttctttatttttatcagattggattagttcaaaagaccattctttgagttctgagattctgcttcatccaatctattgacaaagctttcagttgtactttgaaattttttaagtaaattttttaattccagaagctctgaatgatttctaagatgtttatctcttaatttatttcctg

SEQ ID NO: 189268 - DNA, 519 bp, Homo sapiens
gtatacgtatgtaacaaacctgcacgttgtgcacatgtaccctaaaacttaaagtataaaaataataaaatttaaaaaaaaagaaagtagaaattccaagtaaaaaaataaattaaaaaatcattttatatatcaaataaacaaatttcttcatttttcgtttttaaatatataatataaatatattctttgatactcttttacatttattgactttctttcyaaagcctatctatctatgataatttggtcacaaaattcttagccaagaaacaaattttactttcacctatgcaccaataggtaatacagaatgtgagatttgttgtgagagcataatataaatatgcaatgatggtgtaaagttgtgactgaaaatattataatcaatactattgtgcactgacaaagatattttgcttctgttttagacaaaattatattcaataaccatcaataaaatatgccaaaaggcatacattttaaaatgaaatacttatctgttccttgacaaagaaa

SEQ ID NO: 189269 - DNA, 438 bp, Homo sapiens
ccttcatctcactgctccactaggcagtgccccagtggggaccctgtatggggtctccaacccaacatttcctttccggactgccctaacagaggttctccatgagggctctgcccttgcaacaggcttctgcctgggtatccaggcatttccatatatcctctgaaatctaggcagaggttccctaacctcagttcttgccttctgtgcacctgcagttccaacatcatgtggaaactgccaaggcttggggcttccaccctctgaagctatggcccaagctataccttgtccccatttagccatggctggagctggagcagctaggaggcagtattccatgtcctgaggctgcacagaggagcaggccctgggcccagcccmggaaactattcttccctcacaggcctccaggcctataatgggaggggctgccat

SEQ ID NO: 189270 - DNA, 621 bp, Homo sapiens
tatactactatctagaagagtgtctgtctcctaataagattcaatacatatttgttgaatatctaatgtgaagtgattcagtagatgaaggaacwgaaaagtgactgagaataccccattattcttcattgtatgacatatatcaactttctttgatttttaatagtgtactaggatcattagagtttgtaaaaggaaagaaagaagatacagagccagtatacatacatacatacatatatatatatacacccataaccacgttgaacctagctgacaaatgactttcaaatctatatttgatacttgatttttatattcaatggattcaatggaacataaatttctgaggaaattaaatgttctggatgtaatcagaaacttaggttcttatagtttagggagatagagagtggcttgatcacttgagatagatacaagagtaaaaaggccatataagcaaatgtaggtcgtgggattttggatcatttaaaattttttagcttgagtttcagagaaatatttataactaacatctatattattcagtctttattttcaagaattaacttcttaccataaatactcagatgggaatagcaatctagatttaattgtagt

SEQ ID NO: 189271 - DNA, 621 bp, Homo sapiens
tatactactatctagaagagtgtctgtctcctaataagattcaatacatatttgttgaatatctaatgtgaagtgattcagtagatgaaggaacagaaaagtgactgagaataccccattattcttcattgtatgacatatatcaactttctttgatttttaatagtgtactaggatcattagagtttgtaaaaggaaagaaagaagatacagagccagtatacatacatacatacatatatatatatacacmcataaccacgttgaacctagctgacaaatgactttcaaatctatatttgatacttgatttttatattcaatggattcaatggaacataaatttctgaggaaattaaatgttctggatgtaatcagaaacttaggttcttatagtttagggagatagagagtggcttgatcacttgagatagatacaagagtaaaaaggccatataagcaaatgtaggtcgtgggattttggatcatttaaaattttttagcttgagtttcagagaaatatttataactaacatctatattattcagtctttattttcaagaattaacttcttaccataaatactcagatgggaatagcaatctagatttaattgtagt

SEQ ID NO: 189272 - DNA, 581 bp, Homo sapiens
ggaaagtggaaaaattgcataacacattaatgcaggcactcctgcacacaaagtactgaaaaaatcttaactgttttacttaaacaaaatccattaaataaccataatagttatgacctctaagaaccactgcagtgccagttayctgcttccagagaaaacagggatcatcaatttaagtagaaaaacataatcccaagtaaaaagttgttttatggtcctgtatggttctaccggcacaaattcattctttacttattgtttatttattcactgtctattatgtaagaaactctggactaagaaatcaggacagataaaagttgaatacactttggcccccctaacatcaagaagcttacttatattgtaataaagaagcctactgattttcaaaaatctatgattaatggttaaatattttaaaaagttgaaatgagcactatcaaaattagcaatagatatttttaaaaagcagaaaaagtagattattataataccaagagttgcttttaaatggtgaccctgaaatcacaaagttctgggaataatttattccttctataaatgtggtattaaaa

SEQ ID NO: 189273 - DNA, 575 bp, Homo sapiens
ccaggctgaggtttggtttactcttcaagaaaattttaggaaagactagcgtcagccaactctcaaacagtgccataacaaatattgaaattacaaccttaaagtttaccttttaaagaacaaatgcttctttctaaaaagacgagaggcaagtgtcatggcccaccactactgagaaccaactgtaaatcattactgtgtgtctcactcattgaagagtagatgataaacactttcatcttcgagattatgtgtactcaagctgtgggcttattatgtaaaacaaagttgacagcatgtgttgggagaaatttgaaatcaagaagaaaattagtttcctttatccctagaatttscaaacacttgtggctgtaggtgtgttctctattttttatattagggaattcctatcttttctggttgaaagaatatgagaaaattgcctcggaatctttagtgctaaatttccaaagaaaaagtcagagaacagaagcagaaagagtatgacctgtttcattgggctaaataatttattctcctgagatgtatttttgagggactggccacccaaagga

SEQ ID NO: 189274 - DNA, 572 bp, Homo sapiens
atttattctcctgagatgtatttttgagggactggccacccaaaggagtgcttaaagtaaaaccaaaattaatagatgacccaacccccaattgaccagagtcttcaatttaaccaaaatggcctaacagtgccctattttcagagaaagtggtagatggcaagcacatgatgccaacttaagtattttgtgaaaataattcctaaatgtcaagtgtttacttgaggttagtgtttacttgaggtcagcacacactgtttaatcttccattgcacacttctagaaattgaaagttggtakgaagaatgacagctctgcttccattcaaatcctttattaggaaaaaaaggagatttaatcatctttactgtaatgaagtgcacaatagcatccaaagtcatttttaatataaaagttgaacaaaaagcattttttaaattaaacaaaattgactcagaaaaataatcaaccaaagcgttcctcattcctttaacggagaggttctttcattgagcccttttttccggaggggccaagggggttctggagcttcacatgaagaaagttaatag

SEQ ID NO: 189275 - DNA, 572 bp, Homo sapiens
atttattctcctgagatgtatttttgagggactggccacccaaaggagtgcttaaagtaaaaccaaaattaatagatgacccaacccccaattgaccagagtcttcaatttaaccaaaatggcctaacagtgccctattttcagagaaagtggtagatggcaagcacatgatgccaacttaagtattttgtgaaaataattcctaaatgtcaagtgtttacttgaggttagtgtttacttgaggtcagcacacactgtttaatcttccattgcacacttctagaaattgaaagttggtaggaagaatgacagctctgcttccattcaaatcctttattaggaaaaaaaggagatttaatcatctttactgtaatgaagtgcacaatagcatccaaagtcatttttaatataaaagttgracaaaaagcattttttaaattaaacaaaattgactcagaaaaataatcaaccaaagcgttcctcattcctttaacggagaggttctttcattgagcccttttttccggaggggccaagggggttctggagcttcacatgaagaaagttaatag

SEQ ID NO: 189276 - DNA, 445 bp, Homo sapiens
ggacacagaaaacaatacagatgtcagcagattctttctactggataatagtagatattayagataactagtaatagtagatagataactatgctatctactggataatctgtatgcattggtatgaatgctaactatggagccagtagtagctgtagagcttgcacacctagattgaaaagcagcaaggagagttttctctatttgagtcttttctagtagactagccttttaaacttcagtgaattaaaaagcatatattctgagctccaatgcttagcagcttctttaaaaaaaaaaatcagccataacttttaataaggtcctttccaacccaaagattccgtaacttcattataaagcaaaaacctcgttccaggactcataaatcagaattgttactacttacagtaggtcatgttgttactgatgagagaagaaaaag

SEQ ID NO: 189277 - DNA, 445 bp, Homo sapiens
ggacacagaaaacaatacagatgtcagcagattctttctactggataatagtagatattacagataactagtaatagtagatagataactatgctatctactggataatctgtatgcattggtatgaatgctarctatggagccagtagtagctgtagagcttgcacacctagattgaaaagcagcaaggagagttttctctatttgagtcttttctagtagactagccttttaaacttcagtgaattaaaaagcatatattctgagctccaatgcttagcagcttctttaaaaaaaaaaatcagccataacttttaataaggtcctttccaacccaaagattccgtaacttcattataaagcaaaaacctcgttccaggactcataaatcagaattgttactacttacagtaggtcatgttgttactgatgagagaagaaaaag

SEQ ID NO: 189278 - DNA, 445 bp, Homo sapiens
ggacacagaaaacaatacagatgtcagcagattctttctactggataatagtagatattacagataactagtaatagtagatagataactatgctatctactggataatctgtatgcattggtatgaatgctaactatggagccagtagtagctgtagagcttgcacacctagattgaaaagcagcaaggagagttttctctatttgagtcttttctagtagactagccttttaaacttcagtgaattaaaaagcatatattctgagctccaatgcttagcagcttctttaaaaaaaaaaatcagccataacttttaataaggtcctttccaacccaaagattccgtaacttcattataaagcaraaacctcgttccaggactcataaatcagaattgttactacttacagtaggtcatgttgttactgatgagagaagaaaaag

SEQ ID NO: 189279 - DNA, 487 bp, Homo sapiens
gtgctggtctagtggtgatgaattccctcagtttttgcttgtctgggaaagattttatttctcctttatttttgaaggatagattttctgggcatagtattcttggctagcaggatttttcccyttcttttagcactttgaaaataacaactcattcttttctggcctataagatttctgctgagaaatctgctgttagtctgatagggattgtattatatatgacttaacactttgctcttgctgttcatagaattttctctttatctttgacttttgacagttttactataatgtggtttggagaagacctatttgggttaaatctatttggggatctttgtgctttctgtatctggatgtctgtttcttctaggacttgggacgttttcagctactatatagttaaataggttttctatgcctttgcccgttgtttcttcttctaaagctttcaaaattagaatatttgattgcttcatggttt

SEQ ID NO: 189280 - DNA, 531 bp, Homo sapiens
tgctggtctagtggtgatgaattccctcagtttttgcttgtctgggaaagattttatttctcctttatttttgaaggatagattttctgggcatagtattcttggctagcaggatttttccccttcttttagcactttgaaaataacaactcattcttttctggcctataagatttctgctgagaaatctgctgttagtctgatagggattgtattatatatgacttaacactttgctcttgctgttcatagaattttctctttatctttgacttttgacagttttactataatgtggtttggagaagacctatttgggttaaatctatttggggatctttgtgctttctgtatctggatgtctgtttcttctaggacttgggacgttttcagctrctatatagttaaataggttttctatgcctttgcccgttgtttcttcttctaaagctttcaaaattagaatatttgattgcttcatggtttcctatatgtcatacaggcttccttcattctttttcattctctttt

SEQ ID NO: 189281 - DNA, 531 bp, Homo sapiens
gaaattgcaaacagcttatgatgagagagaagagaaaaccacagactaagaaaggaaaggagagcgtccctcataaaaagaataccaatgctctgtccctgaaaatcctacccaaagtattttgctcagttgcacggattatatacaaggaatacagggccatttgtgaagaatgcctttgatggtgttttggataagagaacaataccatcaaggaggcatctgtcatacacaaatatgtgtagcaatgcattacctatattacacctgtgtcttcaaattactgtttccttctagtgaagttcagtaagatcaaaataagscctggattttgctatttaaaatgatatttattactgataaccatggttgttgtagatatttttgactgaaatattgtaagagccatttccattatggaaactgaagaacagaaatatttggcaatttcccagtctgtaggtaagtcagtattcgtccccaaacaaaacttagttctcataaactcctcagatactgttataacactcc

SEQ ID NO: 189282 - DNA, 510 bp, Homo sapiens
tgtctgtgatttttcagctatgcaatgaacaccaccagtttgatttggggctttgtagctatcataatctgtgtgttttacatagtgacaggacaaataatttttgttgagtaactaaatgattaaaacacttgattaaactggttaggagattatgaaacaatcttgtttttgtygtctaaggcttctcagctaatactgcttaaaagtaagttattttcccctttgtcttaaggctgtcttctaaaatagttgaagtctataggtcttagacattaaaaacactataatgcaactatgatcaagttatttgcctttaggccttagtgctatgtgccattggcttctaatttgatatttaatggtgctggtgacccctatttgagcagcccaggttctgagggcctatactgaagcttagccatagtttgcaagtctattttttttaataatagttaactcagatagaataaaaataatgtatttctggcccctcaccagtaactagaa

SEQ ID NO: 189283 - DNA, 641 bp, Homo sapiens
gttttctgtagataacagagcaaaagtgatactttaaaaaaatgtacgtatttattagcacaatctataaaccattttgggtgaaaacaatattctaatagagaggttctaaaagaaattagttactttggctttaatgtgctaattttattacctccatcacttcatgtaaatattcttgtgttgccatctacattcattttcgtaagggaatcctcaagtgtttgcaggcctaagtttggtctgtaaaccactgcctggttacctccctgactgatagctttgaaaatgtgtcaacagttttcgtgttttacattttatcatagtgccaagcataatataatatttatattccctgtacatacaggtttttttttttttcattgtaraaaaaaaaacaaaatctggtttagttaattttgttcttgcagaatttaatcagtttcacatggaacttctttacttatttatgggagacaatgttttgtggtggaaaaatatggacctgaagtcagcggaacctctgtttgagtactagctctgccacttaatgattttggaccttagggaagttacctgtgctttttaaacttttgattcttttttctgtaatagtgggacaataataatagccactttac

SEQ ID NO: 189284 - DNA, 641 bp, Homo sapiens
gttttctgtagataacagagcaaaagtgatactttaaaaaaatgtacgtatttattagcacaatctataaaccattttgggtgaaaacaatattctaatagagaggttctaaaagaaattagttactttggctttaatgtgctaattttattacctccatcacttcatgtaaatattcttgtgttgccatctacattcattttcgtaagggaatcctcaagtgtttgcaggcctaagtttggtctgtaaaccactgcctggttacctccctgactgatagctttgaaaatgtgtcaacagttttcgtgttttacattttatcatagtgccaagcataatataatatttatattccctgtacatacaggtttttttttttttcattgtaaaaaaraaaacaaaatctggtttagttaattttgttcttgcagaatttaatcagtttcacatggaacttctttacttatttatgggagacaatgttttgtggtggaaaaatatggacctgaagtcagcggaacctctgtttgagtactagctctgccacttaatgattttggaccttagggaagttacctgtgctttttaaacttttgattcttttttctgtaatagtgggacaataataatagccactttac

SEQ ID NO: 189285 - DNA, 601 bp, Homo sapiens
ttgaaactctaacatgaaatgtgatagaggcatagtctttggaagccaatcaggtttagatgaggtcatgagcatggagccctcagaatgaaattagartctttatgaggagagaaagaggccagagctcccttcctctctcccaatgtgaggataaaatgagaaggtaacatgtatgtatgcgaatcagaaagacggccatcacctagaaccaaatttattaccaccttgatcctgaatatcttagcctccagaactatgagaaatgtctgttgtttaagccactcaatccacggtattttgttatagcagcttatgctgtacatccacttcatgtacacaactatactacccgataataccatgggaatatgatttgaaatatgacaattattaggaaatactaactctaataccatattcttgactctgctcttaaagaaaaaataacaatacaaaatgctgtaatgttttctgtctcttttaattgcagaatatagtcatttacgtgtaaggtggacatttttaatgacaaaacttggtgtaggacaccaaaaatatttttattaatttatatctaataactattaatgtatatcta

SEQ ID NO: 189286 - DNA, 587 bp, Homo sapiens
tgagctccatcagcaccaaaataggttttaattcaggatgacccaaagtctgaaagatcagacacacacacattgtatctatctatctatctatctatctatctatctatctatctatctatctatcwatcatctatctatctatctatctatcatctttctatctatcaatttatctcgcaaaaggaaaagtcaacccgcattgtctagaaggagcagatgtttcctctggcatccaggctgtaattaagagataattaagagattcatttactctctcaaaaggtatttattatctgctctgtgtcataaaacacactcgcgcatgcacacacacatacacccctgcgagaatacttgtcactttttattggaatatcagaggaatatacacccacagatgcataaagccccaaagtcactcccaagacccaagtgaaaatttaaagttttaactaatttgggtttttaactcaaggtttccagtataggttgactgcaggacttccagggcagtgcaaaaaagtcgagactgaaacagtgaacaccagggcctgggacagcactgaggaatgaatacaccgcat

SEQ ID NO: 189287 - DNA, 582 bp, Homo sapiens
tgagagagactcatatctgtctgtctgctaagagcaaggaaccagggatggtagaaaatattgcctagacgggaccgacggaagctgtttgatgatgtgaggtcttggagacccaagaggacatgggatgcctatgggaggagaaatatcatgttttacaagttgggagagtggagaataaagagggaagaaggtatagataaatctgtgctgactgagtagatgagattgcaatattcccaaagttgagggacttaytaaacttttctgagaggtaagagacaagattttggctgactatgaaagctgaggtgttagggttaatgacttgagggtgtggtgaaggtttgaactactgtgaacaatacaaggagatattgcttaggaagaggcagaagggtagctggacaggttggcagctttgaatgagctgaaggaaactgtaaacttgttgtggcaccactctactcattctttgatgcatagcttcagcctccactgtattataactaactattcccgagaccacagtgatggcaaggaccatatctcatataagctggagaatcttcagtattcaca

SEQ ID NO: 189288 - DNA, 617 bp, Homo sapiens
ctcaatatatttttattgacttgaaatttgtggagctatagagcagtagacatgaaatactgctagaaaacagaactttttgttggtctttttktttttttttttaaattcaagtgcattaaatggcagtaccttggagaacactgaaaagtagaacagtcaatattttaggatgattctcccaggagtgactgttttctgtgtgaacaggtgtatttgaaaagaccaatttgctgccaatagtcacttttctgccatagactcagggtttaatgatttaaggcaaagcagagcacctggcattgtttacagtgctctttcttcacaaagtgacaatctaaaagagtctgcattgtgttttcagggagaaaagtgaagggaactggaaaaagggatagaaagggataatgatggagaagggtgagctgcagctaactgccaattgaaagttgttgattgacacttaagagcgtatgcagtaaggcaaagaacatggagtgaaagaaaacactcaagttctcagtttcggctcagcctctaacttattacatgaccttcagatgtgatctcccaacagttttctgagactcaagttattttcaaagacaaatcatgct

SEQ ID NO: 189289 - DNA, 399 bp, Homo sapiens
agacatctcttaagacagacccggctttctggctttgcactgggrcttaacgccttttaatgcttactacttgattagaggtccagccagcttgcaaattgtctgatcctacctctggaatgtttttgttgctccttctgctgcatgtctccctcttataaacgttttgctcaatacaaaatcctcttgacaccagtacgtctcattagccctagacggttcaatttatttctctcaggtgagacgtatgagttatagtaaacaatagttggttgacttttcagtggcatttcctgacagatgtttacatctgtaagttacgaagtgagcgaataaaaagaatccagtaaatgaaacaagtaaaacaaacagtggaagagtgcatttattttattgtat

SEQ ID NO: 189290 - DNA, 282 bp, Homo sapiens
ccagcttgcaaattgtctgatcctacctctggaatgtttttgttgctccttctgctgcatgtctccctcttataaacgttttgctcaatacaaaatcctcttgacaccagtacgtctcattagccctagacggttcaatttatttctctcaggtgagacgtaygagttatagtaaacaatagttggttgacttttcagtggcatttcctgacagatgtttacatctgtaagttacgaagtgagcgaataaaaagaatccagtaaatgaaacaagtaaaacaa

SEQ ID NO: 189291 - DNA, 552 bp, Homo sapiens
ttcattgagttgggaggaagggaagatgcagttcattctaggtataggaaaccacgtgtgcaaggggatgggggtgagatcatacaacacatacaaggacgtagcagtagctaggcatccctgcattgttgaatatgagcagagactaaagaggtgggtagtatgcctgcctgcctgcctttttttttttttttttaagagtgtctcactctgttgtccaggctagagtgcagtggcacgatctcggctcactgcagtgtctgcctcccagcttcaagtgattctcctgcctcagcctcccragtagctgggactataggcatgggccaccatgcccagctaatttgttttgtatttttagtagatatggggtttcaccatgttggttaggatggtctcgaactcttgacctcaaatgatccacccacctcggcctcccaaagtgctgggattacaggtgtgagccaccacgccctgctggcggtgtgtatttcttaataataatagtttgatttaagctaatgcatgcacaaaaaggaagtgtttataaat

SEQ ID NO: 189292 - DNA, 542 bp, Homo sapiens
aaataatgatcaacatttcttttaaagaaattaaatacacaagtattccattgttagtataaaagtctaaacattattgatacggctgaagtttaccttatcggcaccctaggccactctctatatctcagggaacctgcagttattatttagtaatgtttgtattggacttggaaggatattttagaagccttaaatatgtaacagccatgagtatatagctctggttacccagtaatatgtccatactcctggttttttgtacattgttttttttttaattggttctacagatttaaacttgtgtaggagaccttttctaacttctagaaagtatagatgttattccctattttaactttcttttaaaaaatgtaaatgatttgttttaaatcaatttgatttatcrttactaatacttccccaaagagccatgctttgttttcaagtcattttgtgtgtataacgatattattttatgaattttatagtacttgagttttaataaatgtgcattatgtaatactttatcacgattttga

SEQ ID NO: 189293 - DNA, 542 bp, Homo sapiens
aaataatgatcaacatttcttttaaagaaattaaatacacaagtattccattgttagtataaaagtctaaacattattgatacggctgaagtttaccttatcggcaccctaggccactctctatatctcagggaacctgcagttattatttagtaatgtttgtattggacttggaaggatattttagaagccttaaatatgtaacagccatgagtatatagctctggttacccagtaatatgtccatactcctggttttttgtacattgttttttttttaattggttctacagatttaaacttgtgtaggagaccttttctaacttctagaaagtatagatgttattccctattttaactttcttttaaaaaatgtaaatgatttgttttaaatcaatttgatttatcgttactaatacttccccaaagagccatgctttgttttcaagtcattttgtgtgtataacratattattttatgaattttatagtacttgagttttaataaatgtgcattatgtaatactttatcacgattttga

SEQ ID NO: 189294 - DNA, 521 bp, Homo sapiens
atattctgtctttgctacctgatttccctaacaatttgcaccatctgatctgcttttggttaaccccaatttcaggaagctcttcattagtgtatcagttaaggttgtttggactgatgacttagacttcataggctcagagatgattggattgtgaattggagtgttgggatcatgccttgttcatcttgtgataattaaaagtatttaaccttttggagtatcattttaataatctaaaagtggacacaataataatgaaatatacctcataaggctgttgtgaggatcaaaggcttcatatgtacaaagaatgaacacatatttaagacctttgataagtgttaaccctttagtaagtgtctgagtgtccctggttagtcagtatttggtaagagtctaaataaattartgaatgcatgccttgatgtaaaacagagttatccaatagttagaggctgggaattttagagttagaactttcatgcattggactaattgcaggtgaagtctgcatagac

SEQ ID NO: 189295 - DNA, 549 bp, Homo sapiens
acctccccagtccagggaagtggtgagtaaatatgcaaccccaggaacccatgcttctcccacagatctttgcaaccctcaggtgagtagataccctcatgaacccattccaccaggccttcagtctgacacacagacctacatggaatcccagcagatcatggaatctctgctcagtcacatgcagagacctgggagccttagatacctgggctttccgggcttcctcgcaaaggagctgaaactctggcaaagcaggaggtcagggctccatacrcaccattagaaaaggggcagaatccagtgggctgagaagcaatagtctatgggccctgcttccatggcacctcacaggataagacccactggcttggaactccattcagccactggtagcagtgttacacttccctgaaaaagagctcccagcagcaaggccagccactacctttgctgtttggctgacttcaccgttttagccttcaggctttggagagtctgaggtgactggggcctgaagtgggcccccagcacagcacagtggctata

SEQ ID NO: 189296 - DNA, 615 bp, Homo sapiens
tgttgtagttctactggcccatcctgtatgggccgtagatttcagaccagttgcactgcttgtttagcttgttcaaaagccatgctctctttctctccccagtgaaagtcgtagcgttttctagtgactgcatgcagaggttctaaaatgttacccaagtgggactatgatgtctccagaatccaaacaaggcaataaatttctgggccaccttcttagtggtaggggttgcaaattctagtattktagccttagcctttgttaaaatggactatttcctttattccatagatgccaaggaattttacagtttgtgcaggtccttgaattttactagggttaatttcctggccttcagataggagatggatttttacctgctccaaaccctggctgactagttcttcagttttaccctaaccatgccattcagatagctgcttttttcagcaataagctgatagctttgagcctaatcagtcaagacataggcctggcattgggccagggccagtctggaagtcagattagcattttccttttccagcttacatttctcttgaagcaaccagtccctatcttgacacattaaattataagcagtaagcaagcacc

SEQ ID NO: 189297 - DNA, 637 bp, Homo sapiens
ataagcaaatgatagaataagcaaattaatataataagcaaattgcaatgggaaggggagaagggaaatcagatatatatatatatttacactcaccagaatatggaagattcaccaccagactgggaagcaacagccttggctcctgagttggccactcatccgtgcagacgaggagaggtctcatgaagcttcggcacagtctgggactctagctctttttgtaacgagttgtttggcatgaggcccagtcatgagggcccttcatgactgggctcaaggaacacaaaaagatcaacttgtttttgccagtgtctattgttcttcaataactaaagtatgagaatagattgaaatagagatttctccaaaacagcactggakaaacgcctcaagaagctcacacaacctgtgccgggacttggtgaccgttgtttgtgcccacgttcaattgagttcaaatataatattttaactcttcctccacagctgccataataaagtatcaaagactgtgtggcttaaacaacaaaaatacagttgacccttgaataatttggtggttaggggcaccaaacccccgtgcagtcaaaaatctacatgtaacttttggccttcccaacacttaactactaaa

SEQ ID NO: 189298 - DNA, 637 bp, Homo sapiens
ataagcaaatgatagaataagcaaattaatataataagcaaattgcaatgggaaggggagaagggaaatcagatatatatatatatttacactcaccagaatatggaagattcaccaccagactgggaagcaacagccttggctcctgagttggccactcatccgtgcagacgaggagaggtctcatgaagcttcggcacagtctgggactctagctctttttgtaacgagttgtttggcatgaggcccagtcatgagggcccttcatgactgggctcaaggaacacaaaaagatcaacttgtttttgccagtgtctattgttcttcaataactaaagtatgagaatagattgaaatagagatttctccaaaacagcactggataaacgcctcaagargctcacacaacctgtgccgggacttggtgaccgttgtttgtgcccacgttcaattgagttcaaatataatattttaactcttcctccacagctgccataataaagtatcaaagactgtgtggcttaaacaacaaaaatacagttgacccttgaataatttggtggttaggggcaccaaacccccgtgcagtcaaaaatctacatgtaacttttggccttcccaacacttaactactaaa

SEQ ID NO: 189299 - DNA, 637 bp, Homo sapiens
ataagcaaatgatagaataagcaaattaatataataagcaaattgcaatgggaaggggagaagggaaatcagatatatatatatatttacactcaccagaatatggaagattcaccaccagactgggaagcaacagccttggctcctgagttggccactcatccgtgcagacgaggagaggtctcatgaagcttcggcacagtctgggactctagctctttttgtaacgagttgtttggcatgaggcccagtcatgagggcccttcatgactgggctcaaggaacacaaaaagatcaacttgtttttgccagtgtctattgttcttcaataactaaagtatgagaatagattgaaatagagatttctccaaaacagcactggataaacgcctcaagaagctcacacaacctgtgccgggacttggtgaccgttgtttgtgcccacgttcaattgagttcaaatataatattttaactcttcctccacagctgccataataaartatcaaagactgtgtggcttaaacaacaaaaatacagttgacccttgaataatttggtggttaggggcaccaaacccccgtgcagtcaaaaatctacatgtaacttttggccttcccaacacttaactactaaa

SEQ ID NO: 189300 - DNA, 560 bp, Homo sapiens
gtaacagaatgaaagaaaataatgttgtcatctcaattgatacaaaaaaagtatttaacaaaattcagcactttttcatgatatatactatcaacacactaagaacagaaggaaagtatctcaacataataaagaccatatgtacaaagcccacagctaacatcatagtgaattggaaaagaattaaaaacttttcctctaagatcaggaacaagacaaagattcttgctttcaccacttctattcaacrtaatactggcagtcctagccagagcaattaggcaagaaataaaaggtatacaaattggaaaggaagtaaaattacctctattcaaagatgacatgactgtacatggggaaaactctaaatgaaatcagcaaagctgcaaggtacaaaatcaacatgcaaaaatcagttgcatttctatatgctaacaatgaataatctgaagagaaaattaagagagcaatcccatttatactaacatcaaaaacaataaaataattagaaataaatttaaccaaggaagtgaaagatttgtacactgaaaactgtacca

SEQ ID NO: 189301 - DNA, 548 bp, Homo sapiens
acaacatcattaaccatcaagaaaatgcaagttacaaccaatgaaatattattctgcctctaccagatggctaatactggtgacgatgtggagtagctagaattcatacattgctgatgtgagtggtttaactattttaaacaagtagatgttctatgatctcagcatatatccaagagaaatgagtccttatgtccaccaacagacaaatgtaagaatgttcaatatacaagaatggaagttttgatagtcaaatattagaatatcacaatagaaaaagaatgaattcctgctaaacacagtayggataaatatcatagtgttgaacaaaagaaaacaaacacaaaaaagatgtaagatatacagagtactattctacctgtaaagtgtgcaaacaaaaagtaagctaacatatggtgatggaggttagaatggtggtgacctttggggaacatattgactagagggggtcacaagggagcttgctggagcactggcgatattctacacctgatataggtggtacttaaatgattgttaacatatgt

SEQ ID NO: 189302 - DNA, 591 bp, Homo sapiens
agaattacactgttacttgtgtcaggggctgcctgtactatacmtcagcagtgatggcatccttctttccatctgggtagtcagtaatccaattatattaattcaatgattagactaagtatataatgtatattttccctcaagtgatatcaagaagaaatggaatgctaaatttagctaattggtaaatttcacatattttataccatttggacatgggagattgggagttaaataaagtttgaaagaataatttaggctaacatccagggtgatccccctgtcaccaaggaccctttaggacaaagagaagattagaactgctgtcctaagcgtttaagatgacaacggcaagctgttgtagtgtatatatcagtgcgtgtgttatgcattagaaaaaggctttgcaaactaccacatgctcataataaaaacgtagtggaaagatgatagaaacacaagtttgaagtactactgagctgctgactagctcagtgaccttggtcatttcactcactcactgagcttttcctcactcttacttgaagatgattcaaaccttacagtgttaatatttttgtgcatatgtga

SEQ ID NO: 189303 - DNA, 591 bp, Homo sapiens
agaattacactgttacttgtgtcaggggctgcctgtactatacatcagcagtgatggcatccttctttccatctgggtagtcagtaatccaattatattaattcaatgattagactaagtatataatgtatattttccctcaagtgatatcaagaakaaatggaatgctaaatttagctaattggtaaatttcacatattttataccatttggacatgggagattgggagttaaataaagtttgaaagaataatttaggctaacatccagggtgatccccctgtcaccaaggaccctttaggacaaagagaagattagaactgctgtcctaagcgtttaagatgacaacggcaagctgttgtagtgtatatatcagtgcgtgtgttatgcattagaaaaaggctttgcaaactaccacatgctcataataaaaacgtagtggaaagatgatagaaacacaagtttgaagtactactgagctgctgactagctcagtgaccttggtcatttcactcactcactgagcttttcctcactcttacttgaagatgattcaaaccttacagtgttaatatttttgtgcatatgtga

SEQ ID NO: 189304 - DNA, 658 bp, Homo sapiens
attataaattacagtcataagctatgtataaaatttttgagaaaggaaaaagtgattaatgcatagcataaaatgtacatatacaattattttatatgtaatttatagttacatataattgctaatacatatacagttgaagccatttcatagtctagctctgttgttagtagaaaagtgataggtgatcatggctacaaatatgtccataattttcacaaataataaagggggaaattgagaatttttattgcaatctcatgatgaaacattgggactaaacraagacagaaggaaagatataaactatgcagagaagtgcttttgggcataaaaaggtactatgcagagaagtacttttatgcataaagtgcttttatgcactgtgtcatcagttcttaaaacagggccttgtacgtaggtgcttactgagtggttctttaatgaataaccaatgcaagatccagtgcggccattaagagtgaataacagtttcacttacatacattatctcatttaagtctctcaaaatcttgtcacataagcaagtgtgattttataatttaaaaggagaaggtgtgaggaataatattatgtagatttgatctgttttttgtactgtaatgttaattattccacaagtatcaaatggcactta

SEQ ID NO: 189305 - DNA, 658 bp, Homo sapiens
attataaattacagtcataagctatgtataaaatttttgagaaaggaaaaagtgattaatgcatagcataaaatgtacatatacaattattttatatgtaatttatagttacatataattgctaatacatatacagttgaagccatttcatagtctagctctgttgttagtagaaaagtgataggtgatcatggctacaaatatgtccataattttcacaaataataaagggggaaattgagaatttttattgcaatctcatgatgaaacattgggactaaacgaagacagarggaaagatataaactatgcagagaagtgcttttgggcataaaaaggtactatgcagagaagtacttttatgcataaagtgcttttatgcactgtgtcatcagttcttaaaacagggccttgtacgtaggtgcttactgagtggttctttaatgaataaccaatgcaagatccagtgcggccattaagagtgaataacagtttcacttacatacattatctcatttaagtctctcaaaatcttgtcacataagcaagtgtgattttataatttaaaaggagaaggtgtgaggaataatattatgtagatttgatctgttttttgtactgtaatgttaattattccacaagtatcaaatggcactta

SEQ ID NO: 189306 - DNA, 654 bp, Homo sapiens
ccactgtatgcctgaaagcatatccgtagaatatttttttaaaaatatcatttctacctcaagtactagtattggactctaagaaatgtacttatgtgcttatttaaacattaaaccagcataaaattagaatagtttctaaattttctccatgaaggttcatattgaatagaaaaagctattgttttcttcttttccattacagagcatgaccctttaaatgtttgaaytttttccttgaaatgcactttaaaacagaagtgatatgcatttagcttcatgatggttttaggtgagatttaatagctagccatacaaataaaccctgcaggtggtaagcgacggtccatgcatgaaacaagcatcccagcttccaaaaggctatcaattaaatgaaaatgactattgaactgatcttctgctaccaaaatgctaattaaaatttcattactcttcatcagccactcatactgtagctctgggataatggtgatgcagcgtctcagtatattataatcttagtgatatatttttatatcatcaccataagaaacattgtgttactccagaatatttgagatttctcactgcctgaggcatgtatttatttcatatctttttattttagtttattctgttcaatcctctacttaa

SEQ ID NO: 189307 - DNA, 590 bp, Homo sapiens
tggcatatgaacctctctcacttatgagcagcatatttgttaattgagattattgtagattcacacgtgatagaaggaacgatacagagagatcccttgtatacttcatccagttycccctaatggtgacattttgcgtaaccatagcataatagcataaccaggatattaatatcaataaaatccattgatctaattcagacttacccagttttacttacacacatatatgtgtgtattaaatctgatacaattttaagatgagtaggtgtgtttatccacaaataggagtaaaaatgctaaacactaacaacgtcaggatcctttctattctttgataaccatacacacctcccaccatttctcccactcattttaaatgttgccactaaacttatcctctatttctaaaatttcatcatgaatagaacaatacagaatataaactttggggttagtatttttttactttgtgtgattctctggagacttgcctaagttgatatgtacataaatgatctattccttttaattgttaagtagtattccatggtgcatatgtactgccatttgtttgaccattcacctac

SEQ ID NO: 189308 - DNA, 590 bp, Homo sapiens
tggcatatgaacctctctcacttatgagcagcatatttgttaattgagattattgtagattcacacgtgatagaaggaacgatacagagagatcccttgtatacttcatccagtttcccctaatggtgacattttgcgtaaccatagcataatagcataaccaggatattaatatcaataaaatccattgatctaattcagacttacccagttttacttacacacatatatgtgtgtattaaatctgatacaattttaagatgagtaggtgtgtttatccacaaataggagtaaaaatgctaaacactaacaacgtcaggatcctttctattctttgataaccatacacacctcccaccatttctcccactcattttaaatgttgccactaaacttatcytctatttctaaaatttcatcatgaatagaacaatacagaatataaactttggggttagtatttttttactttgtgtgattctctggagacttgcctaagttgatatgtacataaatgatctattccttttaattgttaagtagtattccatggtgcatatgtactgccatttgtttgaccattcacctac

SEQ ID NO: 189309 - DNA, 590 bp, Homo sapiens
tggcatatgaacctctctcacttatgagcagcatatttgttaattgagattattgtagattcacacgtgatagaaggaacgatacagagagatcccttgtatacttcatccagtttcccctaatggtgacattttgcgtaaccatagcataatagcataaccaggatattaatatcaataaaatccattgatctaattcagacttacccagttttacttacacacatatatgtgtgtattaaatctgatacaattttaagatgagtaggtgtgtttatccacaaataggagtaaaaatgctaaacactaacaacgtcaggatcctttctattctttgataaccatacacacctcccaccatttctcccactcattttaaatgttgccactaaacttatcctctatttctaaaatttcatcatgaatagaacaatacagaatataaactttggggttagtatttttttactttgtgtgattctctggagacttgcctaagttgatatgtacataaatgatckattccttttaattgttaagtagtattccatggtgcatatgtactgccatttgtttgaccattcacctac

SEQ ID NO: 189310 - DNA, 210 bp, Homo sapiens
tttctaataattctatcattattatcagtgttggagtctgcaattacagtagtgaatctctgctttcaactctttatcagtttttgtttcatgttattttgcraatacgctctcgtggtcggtacatatttagaatttttatgtctagttgattgattcttttatcatcattagtataaaagacacaaggatcaaaaacatctaaatgaa

SEQ ID NO: 189311 - DNA, 439 bp, Homo sapiens
ttgctgattttctaataattctatcattattatcagtgttggagtctgcaattacagtagtgaatctctgctttcaactctttatcagtttttgtttcatgttattttgcgaatacgctctcgtggtcrgtacatatttagaatttttatgtctagttgattgattcttttatcatcattagtataaaagacacaaggatcaaaaacatctaaatgaaacgtggttcggacaagaaggcatagacccatttcttcttgctgtctctcacgagacacaaccttaagcattagaagtagtgaaaagacaaatatagaggagaaccctgaaggtagtaaaaataagagagctttctttgtactatccttgagtgtttcactacgtattaaatttccacaatgcatcactagagcctatattgtatctgtggacactctttaa

SEQ ID NO: 189312 - DNA, 173 bp, Homo sapiens
tgtaaaatgcttggatggtcagtgttgtttgacttgtgtctgtatttggttaggatccatttaaactctctaggataatgtcaaaatcaatttcttcctttatactttcttatttycaaagaaatggtgctaaatatttctatgaatatatggaaatatctatgcgaatatgt

SEQ ID NO: 189313 - DNA, 173 bp, Homo sapiens
tgtaaaatgcttggatggtcagtgttgtttgacttgtgtctgtatttggttaggatccatttaaactctctaggataatgtcaaaatcaatttcttcctttatactttcttattttcaaagaaatggtgctaratatttctatgaatatatggaaatatctatgcgaatatgt

SEQ ID NO: 189314 - DNA, 173 bp, Homo sapiens
tgtaaaatgcttggatggtcagtgttgtttgacttgtgtctgtatttggttaggatccatttaaactctctaggataatgtcaaaatcaatttcttcctttatactttcttattttcaaagaaatggtgctaaatatttctatgaatatatrgaaatatctatgcgaatatgt

SEQ ID NO: 189315 - DNA, 598 bp, Homo sapiens
gctctctagaattgttgagataattaattatttttttgagacagtctcactgtgtcaccaggctggagtacagtggcccgtgatctcatctcactgcaacctctacctcccaggttcaactgattctcctgcctcagyctcccaaatagctgggcctacaggctaatttttgtatttttactagagacagggtttcaccatgttggccaggatggtcttgatctcctgacctcataatccgcccgcctcagtctcccaaagtgctggaattacaggcgtgagccaccgctcctggcccactttgtgttgttatacccaaatttgtggtaatttgctacagcagcaatagaaaaccagtatagataccgtaatataggcttttttgtttgtttcctccttttctgctggtgccaatggtgaagtcatgggcaggatctctcaatgtcagaagaagtataaccataatatttcctgattgaatgtacttcttggaagtttagtaatgaaaattcattgagtttagagattgcatggctctgattcctagcccaacacatttgtgaccttgggcaaatcacaaaactgtactgaatgtttt

SEQ ID NO: 189316 - DNA, 577 bp, Homo sapiens
ttctgctctctagaattgttgagataattaattatttttttgagacagtctcactgtgtcaccaggctggagtacagtggcccgtgatctcatctcactgcaacctctacctcccaggttcaactgattctcctgcctcagtctcccaaatagctgggcctacaggctaatttttgtatttttactagagacagggtttcaccatgttggccaggatggtcttgatctcctgacctcataatccgcccgcctcagtctcccaaagtgctggaattacaggygtgagccaccgctcctggcccactttgtgttgttatacccaaatttgtggtaatttgctacagcagcaatagaaaaccagtatagataccgtaatataggcttttttgtttgtttcctccttttctgctggtgccaatggtgaagtcatgggcaggatctctcaatgtcagaagaagtataaccataatatttcctgattgaatgtacttcttggaagtttagtaatgaaaattcattgagtttagagattgcatggctctgattcctagcccaacacatttgtgaccttgggcaa

SEQ ID NO: 189317 - DNA, 598 bp, Homo sapiens
gctctctagaattgttgagataattaattatttttttgagacagtctcactgtgtcaccaggctggagtacagtggcccgtgatctcatctcactgcaacctctacctcccaggttcaactgattctcctgcctcagtctcccaaatagctgggcctacaggctaatttttgtatttttactagagacagggtttcaccatgttggccaggatggtcttgatctcctgacctcataatccgcccgcctcagtctcccaaagtgctggaattacaggcgtgagccaccrctcctggcccactttgtgttgttatacccaaatttgtggtaatttgctacagcagcaatagaaaaccagtatagataccgtaatataggcttttttgtttgtttcctccttttctgctggtgccaatggtgaagtcatgggcaggatctctcaatgtcagaagaagtataaccataatatttcctgattgaatgtacttcttggaagtttagtaatgaaaattcattgagtttagagattgcatggctctgattcctagcccaacacatttgtgaccttgggcaaatcacaaaactgtactgaatgtttt

SEQ ID NO: 189318 - DNA, 614 bp, Homo sapiens
gaaacccattgagattcaggagaaagtgaaattcagtgcaaggaattcaaataatttagtaaagcaatccaagagctgaatgataaaatagccattttcagaaataaccaaacttaaattctagagctgaaaaactcaytatcagaattttatcaaataatcagtagtattagcagcagaatagaccaagctgaggaaataatctcaaaacttgaagacttgttctttaagtcaactcagacaaaaataaggaaaaaaatgggaaaaaaaagtgaaacctccaagaatatgggattttgtaaagcgaaaaaatctatgactcattgtcattcctgagagaggagagagaatacgcaacttggaaaatatatttgaagatacacttcatgaaaattcctcttatctctttagggagatttacatacaaatccaagaaacacgcagaaccccagatagatatgacatgaaatgactacctccaaggcacatagtacaatattcatcaaggtcaacactaaagaaaaaagtcttaaaggcagggtaaagtcacatacaaggaacttcatcaggctagcagcagacctctcagcaggtatcttacaagtcagaagaga

SEQ ID NO: 189319 - DNA, 603 bp, Homo sapiens
agcagcaatagaaaaccagtatagataccgtaatataggcttttttgtttgtttcctccttttctgctggtgccaatggtgaagtcatgggcaggatctctcaatgtcagaagaagtataaccataatatttcctgattgaatgtacttcttggaagtttagtaatgaaaattcwttgagtttagagattgcatggctctgattcctagcccaacacatttgtgaccttgggcaaatcacaaaactgtactgaatgtttttatctgtttaatggagaccataacatacactttgcaggggcaccatgaacactaaatgatctgctaaaggccatcgtacacagtcaaagtgaaataaatgcactatggcagagataatcattttgcatgctgatgaagaatgtaataaggcataagcaccaaatgtgtgttgagaactgtgatggtatttcttgggggtgttagagctgacattggccttgtatgaagggaaaggttcacacatgtggacacagcacagaaagggcactccaggctgttcaagttgtgttcaggataagacattaggagcagcccagagcagctgctggtgacaccacttagt

SEQ ID NO: 189320 - DNA, 586 bp, Homo sapiens
agacacagagtggcaggctggataaatgacccaaccatctgttatcttcaagagacctatttcacattaagaacaaccacaggctcacagcaaaagaatggagaaagagctaccatgtgaacagaaagcaaaaaagagcagaagttgctattcttatataaaatagactttaaaccaataaaaattaagaacaatgaagggcattacataatgataaagggtacaatcaaacaagaaaccttaactgtactaaatatatatacactcaatattggagcacccagattcataaaacaagttcttcattgcccatgaaaacacttagacaaccaaacaataacagcaggagacttcaccaccccactgacagcactaaacagatcaytaaggaagaaaactaacaaactctggacataaactcaacactttaacaattggacctaatagacatctacaaaataccccaggtaatatccacagaatatatattcttcccagctgcacatggaacatattctaagatcaaccacgtgcttaatcataaagcaagtctcaataaattcaaaaaattgaaattataccaagc

SEQ ID NO: 189321 - DNA, 586 bp, Homo sapiens
agacacagagtggcaggctggataaatgacccaaccatctgttatcttcaagagacctatttcacattaagaacaaccacaggctcacagcaaaagaatggagaaagagctaccatgtgaacagaaagcaaaaaagagcagaagttgctattcttatataaaatagactttaaaccaataaaaattaagaacaatgaagggcattacataatgataaagggtacaatcaaacaagaaaccttaactgtactaaatatatatacactcaatattggagcacccagattcataaaacaagttcttcattgcccatgaaaacacttagacaaccaaacaataacagcaggagacttcaccaccccactgacagcactaaacagatcattaaggaagaaaactaacaaactctggacataaactcaacactttaacaattggacctaatagacatctacaaaataccccaggtaatatccacagaatatatattcttcccakctgcacatggaacatattctaagatcaaccacgtgcttaatcataaagcaagtctcaataaattcaaaaaattgaaattataccaagc

SEQ ID NO: 189322 - DNA, 561 bp, Homo sapiens
tcttaggtgaacatcaaaataaaggtagatttaagaaaaattctttgaaatattgaaaacaggaatatgacttaccaaaatctttgagatgcagccaaagcagtgttaagaggaaagtttatttccctaaatrcagtaatcgagaagttagaaagatctcaatttagcaatctaactttgcacctaaaggaactagaaaagaaaaagctagcagaagaaaaaaataactaaaattagagaacttactgaaattgagatagaaaaatccgtagaaaaaataataaaaaagcaagagtttgttctttgaaaagatgaatagactgctatttaacggctagatttacaatgaaaaaaagagaagataagtatagtcagaaataacaaagataatataactgatcccacagaattacaaaagtttcccatagaataccatgaacaactctatgcatacaaattagaaaatctgtagatgaaattgataaattcttagaaacacacagtctctaattgaatcaggaaaagattgaagcattgaatagtgaaatatctcactctgaa

SEQ ID NO: 189323 - DNA, 561 bp, Homo sapiens
tcttaggtgaacatcaaaataaaggtagatttaagaaaaattctttgaaatattgaaaacaggaatatgacttaccaaaatctttgagatgcagccaaagcagtgttaagaggaaagtttatttccctaaatacagtaatcgagaagttagaaagatctcaatttagcaatctaactttgcacctaaaggaactagaaaagaaaaagctagcagaagaaaaaaataactaaaattagagaacttactgaaattgagatagaaaaatccrtagaaaaaataataaaaaagcaagagtttgttctttgaaaagatgaatagactgctatttaacggctagatttacaatgaaaaaaagagaagataagtatagtcagaaataacaaagataatataactgatcccacagaattacaaaagtttcccatagaataccatgaacaactctatgcatacaaattagaaaatctgtagatgaaattgataaattcttagaaacacacagtctctaattgaatcaggaaaagattgaagcattgaatagtgaaatatctcactctgaa

SEQ ID NO: 189324 - DNA, 561 bp, Homo sapiens
tcttaggtgaacatcaaaataaaggtagatttaagaaaaattctttgaaatattgaaaacaggaatatgacttaccaaaatctttgagatgcagccaaagcagtgttaagaggaaagtttatttccctaaatacagtaatcgagaagttagaaagatctcaatttagcaatctaactttgcacctaaaggaactagaaaagaaaaagctagcagaagaaaaaaataactaaaattagagaacttactgaaattgagatagaaaaatccgtagaaaaaataataaaaaagcaagagtttgttctttgaaaagatgratagactgctatttaacggctagatttacaatgaaaaaaagagaagataagtatagtcagaaataacaaagataatataactgatcccacagaattacaaaagtttcccatagaataccatgaacaactctatgcatacaaattagaaaatctgtagatgaaattgataaattcttagaaacacacagtctctaattgaatcaggaaaagattgaagcattgaatagtgaaatatctcactctgaa

SEQ ID NO: 189325 - DNA, 646 bp, Homo sapiens
ttttaatgtttcatagaaatgaaaaatcaatatcactgaaatggccatactgcccaaagcaatttacagatgcaatgctattcctatcaacctatcatagaattagaaaaactattctaaaatttatgtggaaccaaaaaagagcccaaatagccaatgcaaacctaagcaaaaagaacaaagctggaggccttacactatcaacttcaaacaataaggctacagtgaaaaaacagcatagtrctgatacaaaaacagacacatagactaatggaacagaatagaaagctaaaatataaagctgctcacttacaaccatctgattttcgacaaggtcaatgaaaacaagcaatagggaaaggatttgccatttgataaatgtttcaggttaactggcttgccataagcagaaaaatgaaaccaaattcttatctttcactaatacaaatatttactcaagatggattaaatatttaaatgtaagatctcaaactataaaagcactagagtaaaacctaggaaatactcatgtcaacactggccttggcaaataatttttggctaagtccccaagcaattgcaacaaaaacaaaaattgacaagtgatacctaattaaactaaacagcttctgcacagcaacagaat

SEQ ID NO: 189326 - DNA, 624 bp, Homo sapiens
ttacctcctcttgggccatattggactcttatctaggattgtatgtatcaataagcttttccacttctaccactgtattcttttctttagatgaccttcatctttgttttggtataaagtctcctcatactatgcaagcagccactttctgctgaatgctccccacttactcagtcaactgcccccctcactcccagtttgtgttagatagtgccttctctcattacaccctgtgtttaagttgactacttcttatatgaaaatatacatcagctgcctttttcatgtctttctgctcaattagattttgaaatcccagagaaaaataagtcatattctcaactttcgcctgtgtttattgccctagtctatacatctgactgcttcattgtgtgcccaacacacaatccaaactaacctaataatagacgtggaattctactacacaaccagtgagtttaatgagctgcaaataaaaggaccatgttgcttcttccccccattaaatttcatcctttatagctgttttggctatcrctgattttcatgtgttcaaattcagatgtttgcatagtaaaatgaaaatgttccataaaaggattactttattcttaattggttgtt

SEQ ID NO: 189327 - DNA, 624 bp, Homo sapiens
ttacctcctcttgggccatattggactcttatctaggattgtatgtatcaataagcttttccacttctaccactgtattcttttctttagatgaccttcatctttgttttggtataaagtctcctcatactatgcaagcagccactttctgctgaatgctccccacttactcagtcaactgcccccctcactcccagtttgtgttagatagtgccttctctcattacaccctgtgtttaagttgactacttcttatatgaaaatatacatcagctgcctttttcatgtctttctgctcaattagattttgaaatcccagagaaaaataagtcatattctcaactttcgcctgtgtttattgccctagtctatacatctgactgcttcattgtgtgcccaacacacaatccaaactaacctaataatagacgtggaattctactacacaaccagtgagtttaatgagctgcaaataaaaggaccatgttgcttcttccccccattaaatttcatcctttatagctgttttggctatcactgattttcatgtgttcaaattcagatgtttgcrtagtaaaatgaaaatgttccataaaaggattactttattcttaattggttgtt

SEQ ID NO: 189328 - DNA, 451 bp, Homo sapiens
atgtgttcaaattcagatgtttgcatagtaaaatgaaaatgttccataaaaggattactttattcttaattggttgtttccattttagtcagmgatgagtgaagaggcaatgcccactaaactttctctgctactgaagaagacaactaggctgaggtggcaggattgttgggtccagaagtttgaggctgcagtgagccagattacaccactgcactccagcctaggagacaaagcaagaccttgtctcaaaaaaaaaaaaaaaagtctttttatatatcaacatgtatgttaatttttgcaaaaggtttattaaaccacattattcttattttatggataagaaaactgatagagagtttagataacttctaagtatcctcccattcatagattgggacgctactatctgaatttagatcttttgatacaaagtttatttcttcagtca

SEQ ID NO: 189329 - DNA, 507 bp, Homo sapiens
agcctcaccagcttcccttcacactgatcccctgtaaacgtgtgtccggcctcgacgtaggaggaacagggagaaactgattttctattcataaaatgtgcgcctctctgcgcctgcgcyggcgctgtgcgcctttgcgagggcggagctgcgttctcctcaacacagacccggattgcatcgtgagggcgagctgagttctcctctgcacagacttcagagatacagcgaaggcggagcagtgttctcctcagcacagacccgggcggacgggtgggccgggggcaccgcaagggcggagctgcgttctgctcagcacagacccgggggacacagcgaaggcagagcagcgttctcctcagcacagaccttgggagcactgcatcgctttgggcagaataggtgaatgaatgaatgaatgaatgagtgtaatcacatgccctccctttccctgtttatcaagcctggcatcactttagaatctcttgttagaatttatgacaccta

SEQ ID NO: 189330 - DNA, 507 bp, Homo sapiens
agcctcaccagcttcccttcacactgatcccctgtaaacgtgtgtccggcctcgacgtaggaggaacagggagaaactgattttctattcataaaatgtgcgcctctctgcgcctgcgctggcgctgtgcgcctttgcgagggcggagctgcgttctcctcaacacagacccggattgcatcgtgagggcgagctgagttctcctctgcacagacttcagagatacagcgaaggcggagcagtgttctcctcagcacagacccgggcggacgggtgggccgggggcaccgcaagggcggagctgcgttctgctcagcacagacccgggggacacagcgaaggcagagcagcgttctcctcagcacagaccttgggarcactgcatcgctttgggcagaataggtgaatgaatgaatgaatgaatgagtgtaatcacatgccctccctttccctgtttatcaagcctggcatcactttagaatctcttgttagaatttatgacaccta

SEQ ID NO: 189331 - DNA, 662 bp, Homo sapiens
gaataagaaattaagccacaaaagcctcttatccaacatatataaacaaattagcatttcacatttgaaaagtgagacaaatgctagaacatgcactttataaaataggacatccaaatgtccaataaacatatgaaagggtactgaccttcacagtaaatataattgtacatttaaatacaaattataaccaaagtataaaacccttacataacagaaaaatagaagcacagagaacactacatctttatgagaatgtggaataattgaaacactcataattaccgctggcttcaacaaatgrtgctacagtaactgaatttccacatgcagaaaaaaaaagttaagctgtattaaaaaatgaactcaaaatgggtcaaggacttaaatataagagacaaaatcataaaattcttaaaggaaatcatgcagataaatattcttaaccttagatttgtcaaggaaatcttagatatgacaccaaaagtacaagaaacaaaagaattaacaaattatttaacaaaattagaatctggttgtgcaacaaaggacattatcaagaaagtgaaaagactacctacaagatgggagaaaatatttgaaaatcatatatctgataaatattcaatatccagaatatataaagaattacaattcaacaa

SEQ ID NO: 189332 - DNA, 545 bp, Homo sapiens
ttcttggtctagtctgctattaatactgtgattgcactatgaagttcttgtagtgtgtctttcagctctgtcaggttggtcatgttcctctgtattgcacctattttggctttcagttcctccattgttagatcatgattcttagcttttttgcactgggttacaacatatacctttagctcagcaaagtttgtttttatccacattctgaagcctgcttctgtcatttcagccatctcagcctcagtccagttctgagcccttgctggaaaggtgttgtggtcatttggaggaaaggagccactctggctttaaaggtcaacattgctaatcattagagaaatgcatatcaaaaccataataaaataccatctcataccagtcacaatggcgattattgaaaagtcaagaaacaacatatgctgccrtggtctgaagaaaaaggaatgcttttacactgtttatgggagtgtaaattagttcaaccattgtggaagacaatatagtgattcctcaaagacctagaagcagaaatgccgttcaat

SEQ ID NO: 189333 - DNA, 444 bp, Homo sapiens
ctgtgcagcaaaccaccatggcacatgtttatctatgtaataaacatgcacatcctgcacatgtatccctgaacttaaaataaacattggaaagaaaaaagagaaaaaaaagagaaattatacatcttcataattgagatagaaagtaaattatcattaatcaatgcaccttaatacaaaaatactgaattataaataagaaaaatatacttacaaaaatttgttataataatatagaaaatgtcttatttacagtattcactgtaaataaagctggagtttctttcagattcagtacttaagctccttgataactacttcatctgcacctgcaatttactgtaactaacttgccttgtgatataaaatatgtttgctcttattttatcatatatacatatwttttgagttggagtctcgctttgctgcccaggctggagtgca

SEQ ID NO: 189334 - DNA, 589 bp, Homo sapiens
gctgtaatgacttatattctcatcaacagagtgcaagggttccctttgcttcacatccttgccaacacttgccatctttcatctttttggtaataggcattctaacaggtgtcattattgtttttataaattgcatttccctgataatttttgtacttaagcattttttatatatctatttgccatttgtatgtcttttcttgagaactgtctattcatgtactttgtttatttttaaatagggttatttgctttcttgttattgagtaatttgagtctcttatatattttagatattaactcctcatgagatgggttatatgtaatttttttttcccaatctatgggttgtctcttcattytactgatttttttcctttgctgtgctgatgctgtttagtttgatgtaatcccatttgtctatttttgtttttgttgcctgtgcctttgtggtcatatcgaataaatcactgcctaaaccaatgccatgggtatttgggctcttttttggttccatataaattttaaaatattttttctagttctgtgaagaatatcattggcggtttgataggaatagcattgaaac

SEQ ID NO: 189335 - DNA, 589 bp, Homo sapiens
gctgtaatgacttatattctcatcaacagagtgcaagggttccctttgcttcacatccttgccaacacttgccatctttcatctttttggtaataggcattctaacaggtgtcattattgtttttataaattgcatttccctgataatttttgtacttaagcattttttatatatctatttgccatttgtatgtcttttcttgagaactgtctattcatgtactttgtttatttttaaatagggttatttgctttcttgttattgagtaatttgagtctcttatatattttagatattaactcctcatgagatgggttatatgtaatttttttttcccaatctatgggttgtctcttcattctactgatttttttcctttgctgtgctgatgctgtttagtttgatgtaatcccatttgtctatttttgtttttgttgcctgtgcctttgtggtcatatcgaataaatcactgcctaaaccaatgccatgggtatttgggctcttttttggttccatataaattttaaaatattttttctagttctgtgaagaatatcattggyggtttgataggaatagcattgaaac

SEQ ID NO: 189336 - DNA, 544 bp, Homo sapiens
ctttcgttcaaatgctcaaatttttatacttacttttgtatgtaatgttctcatctctgtcccccaaatttggatacggtrtatcggttccctactattagctataatgaactttaccagtcaactcttcttcctccttttctccttttcctccaagatttaatgtgaagtaaaaatcttttatacccatagttttgtagttcaactctatcttctttatgagacatatacaatacctttttcattatgatgttcattttatttcagtttaccagaaaaaaacaatattaatttactactcatggctaaatttttatgttggtgtcctccttttttttaaattatatgaagcttgctttctaatagatatttctctttttaagttatctctttagtatttgcttggctaaatgtcatcttactgaaaaccaaaaactaaattcaaattttcacaaaaatagctaaccccagtaatgatttctgtatctgatgttatatagatttttattgaggggaatttcactagaatggaaagttttttctc

SEQ ID NO: 189337 - DNA, 593 bp, Homo sapiens
gcaagaataattgagatcctaagtaaagccgtgagagggtggggagaggaatccagatgagcttgctgctgtcaaatggcaatggggagctacactgagaaactcaaaacatggtgaactcaagtgttctgccctgccttggcctcccaaagtgctgggattacaggtgtgagccactgtgcctggtccttctttctttctctttattcctccttccttccccctcccctctcctccattcctttttcctcccctctttcatcccccctccctttttccttccttgcttctttccttccttccttcctcagggtcttgctgtctcacmtaggctggagtgcagtggcatgatcactgcaccatgactttcaggctcaagtgatcctcctgccccagcctcccaagtagctgagactacaggtgcatgccaccatgtctggctaatttaatttttttttttttttttggagacagagtcgtactcttttgcccaggctggagtgcagtggtgtgatcctgtcttactgcaacctccgcctctcgagttcaagtgattctcctgcctcagcctcctgagtagctgggattacagg

SEQ ID NO: 189338 - DNA, 593 bp, Homo sapiens
gcaagaataattgagatcctaagtaaagccgtgagagggtggggagaggaatccagatgagcttgctgctgtcaaatggcaatggggagctacactgagaaactcaaaacatggtgaactcaagtgttctgccctgccttggcctcccaaagtgctgggattacaggtgtgagccactgtgcctggtccttctttctttctctttattcctccttccttccccctcccctctcctccattcctttttcctcccctctttcatcccccctccctttttccttccttgcttctttccttccttccttcctcagggtcttgctgtctcacataggctggagtgcagtggcatgatcactgcaccatgactttcaggctcaagtgatcctcctgccccagcctcccaagtagctgagactacaggtgcatgccaccatgtctggctaatttaatttttttttttttttttggagacagagtcgtactcttttgcccaggcyggagtgcagtggtgtgatcctgtcttactgcaacctccgcctctcgagttcaagtgattctcctgcctcagcctcctgagtagctgggattacagg

SEQ ID NO: 189339 - DNA, 531 bp, Homo sapiens
aagcatgaatttcctgatcatgacaattactgccacaatcttatattcacacactctgtggtgacccatttctgggttggaaatccaaaacagagtatgaatcatataaatacacatgatttcaagattaaggaggttttatcccgacttccttggggtgggaagcatcaaggaggagttaatcttactgtgcatcagcctctaaccatattcatgaaagtgaaaatttgattgtcctaattacaaatgaggttgtcatggttgttatttttctgatttattgcctgtcaatgacagacaccaacaatagaycttgaattcttgaaatataacacagataccccctcttaccttttaaatggaaaatactttatttttcttccctagaaaagggtatgctgtttaggattgtgcctgtgtgcatgtgtgagtgtgcatatccaaacatgcttgttcacatgttgattgtgggaagtggttgacatgtatcaactaatttaaaattcacaacaatgggaaggattgtatttc

SEQ ID NO: 189340 - DNA, 531 bp, Homo sapiens
aagcatgaatttcctgatcatgacaattactgccacaatcttatattcacacactctgtggtgacccatttctgggttggaaatccaaaacagagtatgaatcatataaatacacatgatttcaagattaaggaggttttatcccgacttccttggggtgggaagcatcaaggaggagttaatcttactgtgcatcagcctctaaccatattcatgaaagtgaaaatttgattgtcctaattacaaatgaggttgtcatggttgttatttttctgatttattgcctgtcaatgacagacaccaacaatagatcttgaattcttgaaatataacacagatascccctcttaccttttaaatggaaaatactttatttttcttccctagaaaagggtatgctgtttaggattgtgcctgtgtgcatgtgtgagtgtgcatatccaaacatgcttgttcacatgttgattgtgggaagtggttgacatgtatcaactaatttaaaattcacaacaatgggaaggattgtatttc

SEQ ID NO: 189341 - DNA, 580 bp, Homo sapiens
tcaacctcactaatcatcagagaaatgcaaatcaaaaccacaatgagatattatctcactccagttaaaaagacttttatccaaaatatagaaaataacagatgctagcaaggatgtggagaaaggggaaacctcacacattgttggtaagactataaattagtacagccattatggaaaactctatggaggtttctcaaaaaaagtaaaactagatttaccgtatgatccagcaattctactactgggtgtgtatccaaaagaaaggaagtcaatatatctaagagatagctgcattttcatgtttattgcagtactattcacaatagccaagatatggaatcaacgtaagtacccatcaatgtatgaagggataaagaaaatgtggtatayacagacaacggaatattattcaaccataaaaaaaagaaaccctgtcatttaccgtaacatgaataaaactggaggacattatgtcaagtgaaatgagtcaggcacagatagataaataccacatgttctcactcatatatgggagctataaaaatggtgagctcatagaagtcaagagtagaatttc

SEQ ID NO: 189342 - DNA, 607 bp, Homo sapiens
gagaaagttctggagagggctggtgtggatggaggtagagttagacatccaggatgatactgcactcaaggctaggtgttactaagtcaaccccagagtaggaaaaaggaaatgagagcaggtacaaggtggcagtcaggcaccaagtgagcatgagacaattgagagttttcatcttgaagatgcaaactgtttctgattataaaaatagtatatggctgcayagtattccaaggtgtataagtgccacattttctttatccagtctaagctggaaaccatcatcttcagcaaattagcccaggaacagaaaaccaaacagtgcatgttctcactcataagtgggagttgaacagtgagaacacatggacatagggaggggaacatcacacacaggggcctgctagagggttgggggaaaggggagggagagcattagggcaaatactaatttccctgaatgaaagaaaaaatagcatatgttcattgcaaaattaaaataaaaaataaccactttttaatagattttgtccttcagacctgtttatgcataaatgaacatagatttcttccacatcactaaggtcatgctataaatactgcccca

SEQ ID NO: 189343 - DNA, 560 bp, Homo sapiens
caggttgggcaaattaacctcagcattaacccacatttctaggaggaattagttgcgctactaaacaatgayttagaggtcaaacttgacttaatctaattacagaaactttttattctagttaagaatttcatgtctactgtgtagcataagtagcttattatagcatttttggctacacagtcaggtggaaagggttcagagcaataattcagttactgcaaaatattgctcatatataaaagaacagatttgagacttgggagagatgaaacgcagggatcttactaagttttattaatgaaagttgttttaagacatttaatactatttccaatctacatactagaaataactagaacagttttgtaatataatgagaagtttttatcgtgaaaattaaatgctgaaataatgtacttttggattgctggttcaaatccactgtacagctttgaaacaactgcccagtgacctacagtagaacttttctgtgtcctcttgggttctgagttctttttccaggctgttctccgtgcctatcacctgttaaaggatat

SEQ ID NO: 189344 - DNA, 440 bp, Homo sapiens
ccaatcactcagtctggctgggactcaccagtcttcagatctgtgagaaataaatttctgttcattataaattacaggttcattactctcaggttttattatagcagcacaaaatgaactaagataattggccccctgtgttttctaattacatcagtaatgcaaactcataattgcacagcaaaygctcattctagaaaatgcagctatggaaaactaatattaaaaataattcatcacaccatcatccagagacggccctggaaacattctgagacgtatatactcacacttttaaaacatgtataatcatactttaaattatataatatatactttttaaatgcacacataatacaggtttataacctttttgtattaaacagatcatatagaattttgatatcaataattacacttcttcaaaattgttgccaata

SEQ ID NO: 189345 - DNA, 440 bp, Homo sapiens
ccaatcactcagtctggctgggactcaccagtcttcagatctgtgagaaataaatttctgttcattataaattacaggttcattactctcaggttttattatagcagcacaaaatgaactaagataattggccccctgtgttttctaattacatcagtaatgcaaactcataattgcacagcaaatgctcattctagaaaatgcagctatggaaaactaatattaaaaataattmatcacaccatcatccagagacggccctggaaacattctgagacgtatatactcacacttttaaaacatgtataatcatactttaaattatataatatatactttttaaatgcacacataatacaggtttataacctttttgtattaaacagatcatatagaattttgatatcaataattacacttcttcaaaattgttgccaata

SEQ ID NO: 189346 - DNA, 440 bp, Homo sapiens
ccaatcactcagtctggctgggactcaccagtcttcagatctgtgagaaataaatttctgttcattataaattacaggttcattactctcaggttttattatagcagcacaaaatgaactaagataattggccccctgtgttttctaattacatcagtaatgcaaactcataattgcacagcaaatgctcattctagaaaatgcagctatggaaaactaatattaaaaataattcatcacaccatcatccagagacggccctggaaacattctgagacgtatatactcacacttttaaaacatgtataatcatactttawattatataatatatactttttaaatgcacacataatacaggtttataacctttttgtattaaacagatcatatagaattttgatatcaataattacacttcttcaaaattgttgccaata

SEQ ID NO: 189347 - DNA, 521 bp, Homo sapiens
cataggatacataccataaagacaaagcttacttcaggcgatgttaaagtggtagaagatggggaaataagagtctttgatcttctctaaaaaattcagcacagagaaaagtcttttctgaaattttttttttttttttttagggatgcagaggacggaaggatataaatatgaatttcatcattaatttaaattgttcttaatctcattatttaaaagaataaaacttgtktcttagaccatatatttataaggcagatatgactcctatgtaaataaatgttatcctgatataatttcatttatagagttagcctttgaaagtagtctataccaaataaatatgttatgataaaagatatgactttttttgtgacccatgtctataatatggccatttttccagcattccttccactttgtcaggaaaatagtagcagggcaactgtatgctatcctatcagtgacttccttaggtattcagaggtgaccactcaaaaataggtactgactaacgtcaa

SEQ ID NO: 189348 - DNA, 521 bp, Homo sapiens
cataggatacataccataaagacaaagcttacttcaggcgatgttaaagtggtagaagatggggaaataagagtctttgatcttctctaaaaaattcagcacagagaaaagtcttttctgaaattttttttttttttttttagggatgcagaggacggaaggatataaatatgaatttcatcattaatttaaattgttcttaatctcattatttaaaagaataaaacttgtttcttagaccatatatttataaggcagatatgactcctatgtaaataaatgttatcctgatataatttcatttatagagttmgcctttgaaagtagtctataccaaataaatatgttatgataaaagatatgactttttttgtgacccatgtctataatatggccatttttccagcattccttccactttgtcaggaaaatagtagcagggcaactgtatgctatcctatcagtgacttccttaggtattcagaggtgaccactcaaaaataggtactgactaacgtcaa

SEQ ID NO: 189349 - DNA, 521 bp, Homo sapiens
cataggatacataccataaagacaaagcttacttcaggcgatgttaaagtggtagaagatggggaaataagagtctttgatcttctctaaaaaattcagcacagagaaaagtcttttctgaaattttttttttttttttttagggatgcagaggacggaaggatataaatatgaatttcatcattaatttaaattgttcttaatctcattatttaaaagaataaaacttgtttcttagaccatatatttataaggcagatatgactcctatgtaaataaatgttatcctgatataatttcatttatagagttagcctttgaaagtagtctataccaaataaatatgttaygataaaagatatgactttttttgtgacccatgtctataatatggccatttttccagcattccttccactttgtcaggaaaatagtagcagggcaactgtatgctatcctatcagtgacttccttaggtattcagaggtgaccactcaaaaataggtactgactaacgtcaa

SEQ ID NO: 189350 - DNA, 572 bp, Homo sapiens
acttaaggctgtaaagttttggtgaaaagatttatgtcttaacctttttttcttttttttttggagacagggtctctgttgcccaggctggagtacagtggcacaatcacagcttactgcagtctcagcctcctgggttcaagggatcctccctcctcagcctctggaatagctgggactagcagcatgcaccacaactcccagctaatttttgtattctcatggagacgggggttttttcatgtttcccaggctggtctcaaacacccatgctcaagcaatccacctgcctcagcctcccaaagtgctggaatttttgcacctggcctgattgtgcatctccaatatctaacacagggctggacactgaatgttttttaaaccagacaatgagaggaagtgaacagaagaaaattgttttgatggtaattacctacattgatacacatgaaggcagatgaaaatgaaatttagctaagatatgggragaatatgatgtcatacatatgaaagggaaaaaaaagaggaacattactctcacagtggcatcctcacgtgttgtggaaaacata

SEQ ID NO: 189351 - DNA, 417 bp, Homo sapiens
tactttaaaataataaaggccatatatggcaaacccactgtcaaacttatattgaatgggaaaaagttgaaaacatttgctctacgtgctacaacaagacagggatgctcactttcatcacttctattcawcatagcactggaagtcctagtcagagcaattaggaaagggaaaaaatacaaggcatccaaataggaaaagagaaagtcaaattgtccctgtttgctgatgatatgaccttatatctagaaaaacttgaagaatccacgaaaaagctctcagatttgatcaataagttagtaaagttgcaggatacaaaagtcaaactacaaaatcagtaacatttccatataccaataatgatctagctgggtgcaaaatcaagaaggctatgccatttacaatagccaccaaaaa

SEQ ID NO: 189352 - DNA, 417 bp, Homo sapiens
tactttaaaataataaaggccatatatggcaaacccactgtcaaacttatattgaatgggaaaaagttgaaaacatttgctctacgtgctacaacaagacagggatgctcactttcatcacttctattcatcatagcactggaagtcctagtcagagcaattaggaaagggaaaaaatacaaggcatccaaatrggaaaagagaaagtcaaattgtccctgtttgctgatgatatgaccttatatctagaaaaacttgaagaatccacgaaaaagctctcagatttgatcaataagttagtaaagttgcaggatacaaaagtcaaactacaaaatcagtaacatttccatataccaataatgatctagctgggtgcaaaatcaagaaggctatgccatttacaatagccaccaaaaa

SEQ ID NO: 189353 - DNA, 330 bp, Homo sapiens
agacccccatgtccatgaagccttgttgattcttatgtgggtgatatggtttggatctctgacccrcctgaatcttatgttcaattgtagtcctcagtgttggaaatggggcctggcagaaggtgactggatcatgggggtggatccatcaggagtgatttagaacaggattgtgctaaaccattcatgaatgaaccaccctcacggcttccctgggccacattggaagaagaaaaattgccttgggccatacataaaatatactaacactaatgataggtgatgagctaaaaaaaatcacacagaaaacttcataatgttttaagaaag

SEQ ID NO: 189354 - DNA, 330 bp, Homo sapiens
agacccccatgtccatgaagccttgttgattcttatgtgggtgatatggtttggatctctgacccayctgaatcttatgttcaattgtagtcctcagtgttggaaatggggcctggcagaaggtgactggatcatgggggtggatccatcaggagtgatttagaacaggattgtgctaaaccattcatgaatgaaccaccctcacggcttccctgggccacattggaagaagaaaaattgccttgggccatacataaaatatactaacactaatgataggtgatgagctaaaaaaaatcacacagaaaacttcataatgttttaagaaag

SEQ ID NO: 189355 - DNA, 546 bp, Homo sapiens
agcagttaataatctatatcattctttctaaaagtctttgtcttttgaatgacttaatttatccagccttttgttaaatcatgtttaatttgtcaattataaacaagctctacttcataatgtttcacatatgtaattttattcacatgcaagttaccagtagaataaattatgaaaaaaagaaattgctagattgcacatttaaaattttgatagatattgctaaattgactgtcatagacatttttctgatttatattcagcaacatgtaagtgaacctatttctcactctaacacagactttttgttctttgatgatctgaagagacagaacatagtatcagagtgtaattttaatttgcatatctcttcytgtaaatgaggctgaaaatcttttaatgttcaagagccatttgtatttttagtgttctgtttatatcattcatttttctttctatggagctagatgtccttgtaagaaatatatgtgccggagtgtaagaaataaacttcatgaaaattcagatgcatgatacattgatgaa

SEQ ID NO: 189356 - DNA, 538 bp, Homo sapiens
ccctaatgtaaagcagtcactatgaatgtacatgggaaaaaatgattcaatatttatcctagataaatacaatgttctacttggtatataagacatatttttaatgttatttgatgcaaacgtttgttatggtagtgatcataggtttaagttattttcttttaaatatgtaaaactgagacctttgtcctttaagatgttagtgctaaattaaaaaaaaatcgtacttgaatggctaaggaaggaatgttttcagtgaaatctggattcttctcagactaaaatatttcacagagaatagagctgctagtgaaagtctaatgtgaacacatgacatttaatttctatcaaagttttaatagtctaagtaaaatgtggctatgagtaaaataataaaatacaagtggaatggcatgacaatagtgccctactgggactcaggcagcagcagyggaaggggatgtttcaagagcatctgtctctttggcagaattcaaaggcagctgctctggttactttcgtaatgctcatgagattt

SEQ ID NO: 189357 - DNA, 561 bp, Homo sapiens
gtgctaggcctgttgtcttttctctgatgagcaggttgagaagatccaattacaagtcaacttccccatcaaattgcacaattaaaagtaatataagtgttattaatttactaaatgtattcttaatagatgacacraacatataattttcaaaaatgttcccaaaagccacagaaggaattgattttgtggctaaaactctacaggtagtccaagtgagctgattttttaatgcctcctttctgattatagaatcagaaatgtgtatgtttgttggtttgtatattgaaatttggggtaagaaaagctccaggctagaaacattagttatagataatactaatcggctggaattttagatttttgcatacttttgatttttgcaagccttttgattcttgtgtgctctccctgctcatgttagaaagcagacagcactaatacttgcaattttgtcccccaaactggtagtttttacttttttaactattgtattcttttatgttgagtccaaggaagtcagctgcactgccacttcagacagtcacaatcaaatcaatt

SEQ ID NO: 189358 - DNA, 546 bp, Homo sapiens
taaagtatcaactgccctttatgtgatataactagatttcttggttacttacttgttggttagtgactgaagttttcagatatcagtttgaaaattttttattctttttgggaaacacaagtgttagccaactaaaaatttgtgaatattaaattgtacctaatataaatatttaataatatwcataagctatgtattttaaaatatagacaaatcatgcatatgaactactttttattcaaatgattgatgaagagaaagcaaaagatagtaatcaatgaaatttattaaatttagtctttatgggtctttaatttctcttgggtatatccccagaagaggaattgctggatcatatggtaattctattttaaatttctataggaacctccatactgttttgcacaatggccatgccaacttacagttccaccaagagtgtacaaaaattcccttttctccacatcctgcaaaaatgaaattacctattaaagatatttgaatgttcatgttcattgagacaatagccaagatatggaaacaact

SEQ ID NO: 189359 - DNA, 532 bp, Homo sapiens
aggatgaaacataatttttcttaatatatgaaagacaatgtattcttcacttgagacagaakaatattatgctctcttaacctatgctttcagcacagccactcacaaagaattattaagagacagttatttgaagatgattactggaatctaagtgatcgtacaagctaaagcacatactaaaaaatattgttaattttggcaatttgaattcagttgaaatcagattgaaggaattgcccaaaaaggaaattaaaactcccaaatacaagaaaatagtgcattgttgaaggaagtgttcaaggaagatatagcaacaagatatggcaacattagaatctgccacatcttctcatgtttcttgtaagaaaactcactctctaagacaatttccatcagtttttaagcatctcatccctatttactcattcatttcttctttctctactaagccctttcatttgtatccttggagcacaaagtttatgttgagccataatctccctgggtacatttccttctcctagcctca

SEQ ID NO: 189360 - DNA, 607 bp, Homo sapiens
ttacagtggtttaattaagtcctaattaatgatacaaagcccctcccctaaagtgtctaatcatcagcattagtattacggcacgtatatttgcctgggtcattgaaatagaagaggttgaaatgagaattctggatgaaactaaacatgtgggggaatagatatgtgtcactgctacaggaaaatacattggatgatctttatatgcatatgatgttggctgctattcatgcctaggcacctatatatacatatacatttatatatatatacacacacatatacatttatayacacacacacacacacacacacacacacacacacacatatatatatttcctttgaaaaagaactgggtgatctctagaagctcattctactcgactcccattaaactataagtatgggttacttaaggtgttttttggttggaggctgtgtggtccttgatgctgatcttgggccttccagggtcagctgcaggcatcagggccctaatgatctatcatctggtcattttccacttgatggctatctcttctttccagctggttaaattttattttattatgggttatagaaacttcatttatcatgcattctt

SEQ ID NO: 189361 - DNA, 602 bp, Homo sapiens
tggtttaattaagtcctaattaatgatacaaagcccctcccctaaagtgtctaatcatcagcattagtattacggcacgtatatttgcctgggtcattgaaatagaagaggttgaaatgagaattctggatgaaactaaacatgtgggggaatagatatgtgtcactgctacaggaaaatacattggatgatctttatatgcatatgatgttggctgctattcatgcctaggcacctatatatacatatacatttatatatatatacacacacatatacatttatatacacacacacacacacacacacacacacacacacayatatatatatttcctttgaaaaagaactgggtgatctctagaagctcattctactcgactcccattaaactataagtatgggttacttaaggtgttttttggttggaggctgtgtggtccttgatgctgatcttgggccttccagggtcagctgcaggcatcagggccctaatgatctatcatctggtcattttccacttgatggctatctcttctttccagctggttaaattttattttattatgggttatagaaacttcatttatcatgcattcttc

SEQ ID NO: 189362 - DNA, 575 bp, Homo sapiens
ctttcaacaccttataaggcatatacctatggtgaatacccaaaaagttagcattattttaattttacagatgaagaaactaagcttacagagggtaatttaccaattattgactgataaaattactgagcaaaaccaagtacctgaaaatatcaagcaaaatatctaatttttttactgattttatttggattttaagaaagtgtgtgtgtgaacatctaagtgtgtatataacatatttcgtgttgtgcagatacagcttgatgrctgccttttaattttgtcttgtgtatattgtcttctatagttgggatgccttaattcacacgaactatttattttaatattgcatttccatataaaaacaataattattatattaacagtctgcctatgccacatattttttttttatgaagataaaatggccaagtgtttagggtgccattctctgaagtaacattgcagccttgagctgttaaaatgtgctgtggcaaatttctggttgagataatgaagcttaagtttccgagcctcttacttgcatatatctcgtccaatgacatacgatggtc

SEQ ID NO: 189363 - DNA, 302 bp, Homo sapiens
tccagtgtttatatagaatattgtttgtacttatctttataaatattttacctaaatattgggcttggttattttccttaaggagaaggacccacctaagttgccatttctaaacataattattatgcagatgaatyaatcgatatttcctcttccaatcaacttcacagaaatattttcatccttatgtctgattgtaaataattatctgagatccaaagacaatttagcttcttggataggctcaacagtctcatatctaaaactatcactattagttgctcaaaatcttaacacaaatc

SEQ ID NO: 189364 - DNA, 463 bp, Homo sapiens
cagatctctttctgggtattatttcagttgaatatgaatctacaatgatctamaaataaagtttaattttaaaatacacctctgagaacagtgtttgtgttgggatcaatttcaaacaggtgatacacagcagaagtccatttagtgcaggcctcaggtgtgccacttaatctctcatctcctgccttcacacctgcaaaatgttggggttggaccataaagaagcttcaggacctcctctttgcttctacaattccatgaccttactgagctatacacatttgtggaacctttgttttggccttatatttatcagagaccctctgaaaatctttatggaaacagcagtaactacctttctggcattacaacaaaagaagtaaattctgccttccaccctcctgaaaactgctttgcatgctacagcaagattactggaattacaaaaggagaaacaccaagc

SEQ ID NO: 189365 - DNA, 609 bp, Homo sapiens
aggccaaaatcctgactggtaaaaaaggacttttacccttttgccagsatgtcagtcttctgggttccattccccaggcccaatcctaagccaaccagtttaaggtttgggaaattgagttttcccagtttggaggatgcatctgaggggagtgtcgcatagtatggagacatgattacctatcagtgaagtgaggacagaggaggaagaaggaaaaaaggaggttttttcaaaggagtcccaggggttcaggatgcatccgaaaggggtaaagtctgaaggtgaatagctactcatctagaaagaagggagcaggtctccctggttcccttctcttcctagcaaatacccgaggtacatgagggagagaaagtgagatattcctctttctttcttctgttcttatatccctgagtcccagtgaccattacagggtgcttgctactcatgggcatcaaagtggctttcactcatattaatggaaaggcctaggtggtgggaatatccactctgacccatgtacgtcctacctccactgctgtcaatagtatttgcatttcctagacctcatttatgccatggatactagcatgacctttatccatgaaa

SEQ ID NO: 189366 - DNA, 406 bp, Homo sapiens
ctttgttgcttacattaaaagcttcaaccccagtaacagcatgactattataatggcatcttcagccatgacctagttatgagtaccttcttcttgaatttggagggaatggaggaaagccttgaaattttctgagtttggttggtgttccaaaagtccacattccttctgttgatttcattgtctacatatgttggaatctggtaacaaccaccaactcttacctaccctctgtcartaacttactaattagaatccctgtctcttccctggccccctgcaccaattcttcatattgcagcagaagcatttttaaaaaatatgttgaagtaatcatgttatctcccttgcttttaactttccatgtcttactattggctctaggataacaaacctcttaccatga

SEQ ID NO: 189367 - DNA, 525 bp, Homo sapiens
acagatactgtggaggtgctggaattacaaaacccaaaataaaacgcagtttcttactaaagagatggcagtgatctggagacagggggcaggaagcttaagaaactcatctgtaggtctgaaacaatcctaaatggaagatcctgcttgcacaactgcactgtgtaacaggggaggcagtcagagtgtgggtgagcctgcaggttgtgtgaggctatgtatcatttccattccattttctttctttccttctttctttttctttctttctttctttctttctttctttctttctttctttctttctttctttcttycttccttccttccttccttccttccttccttccttcctttcttttttttttttttgagatggagtctcgctctttcacctaggctggagtacagtggggcgatctcagctcactgcaacctctgcctcctgggttcaaatgattctcctgcctcagcctccagagtagctggcattacaggtgcgtgccaccacacctggctaatttt

SEQ ID NO: 189368 - DNA, 483 bp, Homo sapiens
cagctagagtcaagggaacaaaccaggaagtgggaagagatggggctgcactttttctttgatctcttactaggttttagatactgtgctttagaccacttacgtcatttgattctggtgacaacgctgtgagttgagccagattattactcccagtttacagataaggaagataaagcacaaagaggttatgtaacttgccccagagtctcagtgccaagcttcaagcccggggtctgctagcatcttctagtcatgagagagggagggtcaagaagcataaagccacgcaagtcttcaaagagatttgaggtgacagaacagtgagtacctaacccgagtgtaaagtacgcccrcccactcatgcttggtttgagggccagcctactaggtggacggagacaaagtgggggacagcttagagaaaattcagggcttcctcctttgcgctcattaagatagcaccaacctccaagaagttat

SEQ ID NO: 189369 - DNA, 467 bp, Homo sapiens
caaagctgcagcagagagaattcgtaagactgatcttgcagcaatttctcctggttctctgaacaacactgatcatggttctttcctggcagctctggtcccttagacgaggctgacagtttcctagaaagaaacaatccctcaggtcattaccgttttcatttcagagttaatcaaattcatcaaaaaagatttaccagatgkttattatttgcaaaatacagtgacaaatgtggctggagacatgaaagtattaaaaaactattcctgccctcaaaaaaaaaaaactaatttaattgtgaatacaacacaaaaatctgcaggatgaaaaaagcctaagtaataataaaactgacacagagggcaagcgtttaaaaaatcgcaactcagaatatgattaattgcaaatatatccttggaaaaagagtggcttttagactcagaaaattcattttgttttgtttttt

SEQ ID NO: 189370 - DNA, 637 bp, Homo sapiens
tttgcttcttgttgaccaaacacaattagctgccaaaagcaaaatcctcagtcagaaaacagggtaggaaaagatggcaagtaaatacggaggagcagagatttctagtacaggttcttttcctcctggctgttagtgctcaaccaagttagagaatttggcaagcaacgcatgggtgactttcagcctgacttctacttccttggtgggcattcttatacatggtacacttatctgtttcatcacttactaacattgtaaaattgagcaaattactcctacatycaaaataaacgtaaagatatttttcctcatgggtgtgttgtgaagacaatgtaattaactatttgaaaggaaattacaaatctacagaaatatgaaaatacattacaatttttattattgaaaaaagcaagccatttttcagatagttgttatataaaaagctcagagattgattaatcactctctaatatgaattttccataagagttttattgctaatttttagtcagatattctcacgacctatctcccctatcatgttgacactcagctgtctaaagttactccagttgtttctctgtcctgaaatcttttaaccattctttcacctatgttcctagtacttgcaaaa

SEQ ID NO: 189371 - DNA, 562 bp, Homo sapiens
gtatcatacatttctcattgaatccttttttttttttttttttttttttgagatggagtctcactctgcacccaggctggagtgcagtggcacaatctcggctcattgcaacctctgcctcacaggttcaagctattctcctgcctcagcctcccacagttggtagtttttgttatctgcctatgggcagtagattttgtgagcctcagtttctctcctctacaaaatagggtcaataatatctacaattgccattttaaaatactgagatattcagatgaaaaaatatcattaaaagagattgagaaaattgaattatattacacttatcttaractgactttaagcagaacaggccaccaaaatggaaagtttgtgtattagataatttttttcctgctcttttgttctgtggaaatgcagcatgttgaaaagagcaacctcctctaagattattattgactgtgtatagataactctactacttctctctactccattccctcctaccactctgatcctttcttctcttaatcatgaaggaggaatgtttctcttatta

SEQ ID NO: 189372 - DNA, 572 bp, Homo sapiens
tacttgctttcttgttgtttttgtaattttttaaaattccacttaataaattcacatttgagggtattctgctytgagtactttacaattaatcactatttttgaaataacatttcacttatcataatagtttcaaggcctatctatgttgcatcatgttgtttacattaggattgctgacctcagcctgtcaacattcatccttgattattttagttttatggattgacagtttccttgttgcttgcccatcaacattgccaccagaggtgtcatattcattttatcagatgtgtagttctatatggctcaagaactgcactgacagtccaaattatatatgtatctcattttataataatgtgtcttatcataataattacacatttttatgtttcttatatataaatgtgtctatttgatctacattattttttgatattatcattcccattataactgagaagccatttctgaataagcatatactattatcagccctggcctacagagaacagccactgctgatttctcaacaatgcttatgcctgtacttactagctcagttatta

SEQ ID NO: 189373 - DNA, 572 bp, Homo sapiens
tacttgctttcttgttgtttttgtaattttttaaaattccacttaataaattcacatttgagggtattctgctctgagtactttacaattaatcactatttttgaaataacatttcacttatcataatagtttcaaggcctatctatgttgcatcatgttgtttacattaggattgctgacctcagcctgtcaacattcatccttgattattttagttttatggattgacagtttccttgttgcttgcccatcaacattgccaccagaggtgtcatattcattttatcagatgtgtagttctatatggctcaagaactgcactgacagtccaaattatatatgtatctcattttataataatgtgtcttatcataataattacacatttttatgtttcttatatataaatgtgtctatttgatctacattattttktgatattatcattcccattataactgagaagccatttctgaataagcatatactattatcagccctggcctacagagaacagccactgctgatttctcaacaatgcttatgcctgtacttactagctcagttatta

SEQ ID NO: 189374 - DNA, 527 bp, Homo sapiens
aacagccactgctgatttctcaacaatgcttatgcctgtacttacyagctcagttattatctctttgttgaaaaacctggtctgattatggattttctggtcttacatattacattgattctagtatgcccacttctctgagcttttcatctctttctcaactatttcatttggcagttgtcatttctacttcatttagtgtcatctattacttttgtgaatcatagaagaggtatcttaacatcattatgaattgttttccacagcccttgtcagatttaggcagattacagtatatatacacatcaaatttacattttaattctcccttgatcttgtgccctcaggattcattcccccaatacatttccagctctcattgctatatgctgtcccagttctgcaacttacctgaggtgtagtcccttcctaacttacaagtgcagaatttttccagtattatttaaattgtgacatcatcttaaatattgttctggattttaggaggggatgaggagtaaagcatt

SEQ ID NO: 189375 - DNA, 365 bp, Homo sapiens
taagataatgtctaattaattaagcaatacaaatttgtgattattatacccacatttgtttctctaatagatattttaaattgattgagagtgaatgaaccctgctattgaacacatccttatttatccagataatttgcctttctttgctacgaaaattgatttgtgcctttcttattcactgagcaaattaagaagaaaatatacttgctgaaatgataaaaattccaataattcattataaacgttatgatattgtatcacaacacttctaactcatgtctctgacacctgtctctaattcttacwctccctttctttctaatattaaaagtctactagattgatcatccaaaattaattat

SEQ ID NO: 189376 - DNA, 365 bp, Homo sapiens
taagataatgtctaattaattaagcaatacaaatttgtgattattatacccacatttgtttctctaatagatattttaaattgattgagagtgaatgaaccctgctattgaacacatccttatttatccagataatttgcctttctttgctacgaaaattgatttgtgcctttcttattcactgagcaaattaagaagaaaatatacttgctgaaatgataaaaattccaataattcattataaacgttatgatattgtatcacaacacttctaactcatgtctctgacacctgtctctaattcttactctccctttctttctaatattaaaagkctactagattgatcatccaaaattaattat

SEQ ID NO: 189377 - DNA, 527 bp, Homo sapiens
atagatctaaatgtaaaaaatacatcagttcaagtactagaagcaagcatgagtgaactcttctataacttgggtgtagggaagagtatgactaaaagtcatatattaaaatatgactaaaagtctagacgtcataaaataaaagactggtaagtcttgccacacaaaatttaaaatatttgcatggcaaagagaaacaaaagccccccataagcaaactcaaaaaacaaaaaataaattgggaggacatattcataacacatatcacgaataaaggactcatatcctttcaaactttataaagaacttttaaattttaagggaaaaaaaaaaaaaaccaccagaaatgctaaggaaaaagaagcagcacgcatccccctcttccggaacagggaagtcagtgtagtcggcgccccctaaaaragagggttgtgcgtggcgtggggtctctgcgcccgctcgggctgctgggtcttgcgggccccaggctcagccctgctgtccccttcccgcacccgtcccccgcg

SEQ ID NO: 189378 - DNA, 517 bp, Homo sapiens
gctgggaaggtgcctggttaacctgctctccaggtgattcagatgcaggtcagacctacttctaaggataatggaatctaaaggagaaagaagcatccttaagggccagatcgatggtgatgctgacctctgaagtcaaagtggggaaaaccctcaaggaaaagtgacacccaaaagagaaatgactaatatcacacagttgcccttctgagcactccttggtaaaattaatcctaggaaaacatggtattttgttttcataagggccatgagccaagcatatctcctgtccccctccttccttccttstgtgcgccattctttttctgtttcatttttcctttttggatccctgcttgggcactctaattgcatggcctcagcctcagcctccttgcctctcctctggcccgaatgcttctccaaatctagcgacatgaaagcggaattaggggttgactagatcccgataggtcatcatccataagatgccagtggaaaaggtgcccattctggg

SEQ ID NO: 189379 - DNA, 517 bp, Homo sapiens
gctgggaaggtgcctggttaacctgctctccaggtgattcagatgcaggtcagacctacttctaaggataatggaatctaaaggagaaagaagcatccttaagggccagatcgatggtgatgctgacctctgaagtcaaagtggggaaaaccctcaaggaaaagtgacacccaaaagagaaatgactaatatcacacagttgcccttctgagcactccttggtaaaattaatcctaggaaaacatggtattttgttttcataagggccatgagccaagcatatctcctgtccccctccttccttccttctgtgcgccattctttttctgtttcatttttcctttttggatccctgcttgggcactctaattgcatggcctcagcctcagcctccttgcctctcctctggcccgaatgcttctccaaatctagcgacatgaaagcggaattakgggttgactagatcccgataggtcatcatccataagatgccagtggaaaaggtgcccattctggg

SEQ ID NO: 189380 - DNA, 562 bp, Homo sapiens
aaggaataaatgcattttcccctgataaaagaaaggacctaaggaaatggggattgcagattagccctttcacaggaactgactgggcctgtaacagccatccgagtcctgctaaccagcagataaactagataagagtttacattagctttggctgctgtgaggatgcctctgctctcttggactccagaacagttggttcattaaagtaccagggtcggcaagtgccagggtcataagtctgagtatttatgttttataatcctccattcgatgttcttttttgtatgtgtctagagataacggtttctctctagatccatccttctaggtaactgtatggcattcaggaaggcatctgtacaatttctcctctcttcagaaatcaaaactactgctgactgcagcaaagagtaaggaacacttagagagatggagcaatatttcaaaaatacttcttagaaaagaattggaagtctttgcawttctaaatcctacgtttttatgttttcaaatgaatcagatgatattgtgtcaacaaaagcatatcttatttcaacac

SEQ ID NO: 189381 - DNA, 327 bp, Homo sapiens
gttaggaagtctgggctgagtatagctggatgtgagctggcttctgctactggagcggttcctgccgctgatgactccagcacaagcttgagagcttgatggctttgctgggtaccttggcaaataktgcctggcagtggatggtcattgagtccctggtgagaactgcaggttctcttttctctgatgtccagatttctgagtcctatgagaacttgcatggtgcttttctgggaaaggaatgaaaagcctcaccatcgtgtagcacacagtgtcaaaatcttgtcacaaatatcccaggtactacctcctgatatgcatacctag

SEQ ID NO: 189382 - DNA, 603 bp, Homo sapiens
cacagttgaaaacatctggtaatttttatttgagaaggatgaataacacagtagttgtatatgttggctctgaattgtgattgggctagagctctagcactaccactttctgctyagcaaccttgggcaattcatttcacttccagtacctcagtttcctcatctgtaatatatggatataataatcctattacatcatagggttgattgggtgattagacaggataatacatagaacaggctgatcctgtacctggcttagactaagtattcagttaatgatagcttttattactagaatattatggatggatcatgagatccttcgaacaatatccagaaatattgcttcattataatattcttggataaattgtggaattctactaaattttggggtaattaggtgagatcaaagcagatacaaacattcccttaatgtcaaaccacagaatgtagtatccaaaaacagaagcctacctctgatcatcatccctctgtaaatgtacaaaaataattaactaaaattcaggttattagagaatctcactttgtataagcacaaaccttttgtcagagttgaagctaacatcttggcatact

SEQ ID NO: 189383 - DNA, 483 bp, Homo sapiens
aaaaatttaaagattgtacatgaatcgcatttcacaaaagtatgtgctgatttactctatcctcaatggaattcacatcagctttggacaccatcaaatgttagtaaaacggtaaggtaacaattctgccttcttttttttcttttttttttgagacggagtctccttttgtcgccaggctggagtgcagtgacgcagtctcggctcactgcaagctccgcctcccgggttcacgccattctcctgcctcagcctcccgagcagctgggactacaggcgcccgccaccacattyggctaatttttttgaatttttagtagagacggggtttcaccgtgttagccaagatggtctcgatctcctgaccttgtgatccacccacctcggcctcccaaagtgctgggattacaggagtgagcctccgtgcctggccaattctgccttattttaacttgcatttctttttattatgaatggggctga

SEQ ID NO: 189384 - DNA, 518 bp, Homo sapiens
cgctgttgccacctgctggtgacatatcatgattgacatacatacatagttgggggaggaatttttatgggaagcacaaattgcaaacttaaggccacatcaawagtcttcattccctggggactcagtctttctggagatgggaaaatatgtgtccagaaagcaaaagaagaggatgctacttatactttcccttcaagaagttcaatatgtttcagtcctattattccaccaacacaagagattcctttactatctttctatggggcaagttgggcatgtatcctcgtgaccactacagatgtgctatcttaatcgtgtatgttgaagactaaatgttttcagtgtaatagaacttgacctcaaatagaagattgcttttagtttcccttaagcaaacacggaaggcaaaagagaaacccccctgcctgtttcaaggtgcctggagctgagaggttgcagcacatcccatcatttatgaaagagctctcagaagtatacagccctacgttcccaga

SEQ ID NO: 189385 - DNA, 518 bp, Homo sapiens
cgctgttgccacctgctggtgacatatcatgattgacatacatacatagttgggggaggaatttttatgggaagcacaaattgcaaacttaaggccacatcaatagtcttcattccctggggactcagtctttctggagatgggaawatatgtgtccagaaagcaaaagaagaggatgctacttatactttcccttcaagaagttcaatatgtttcagtcctattattccaccaacacaagagattcctttactatctttctatggggcaagttgggcatgtatcctcgtgaccactacagatgtgctatcttaatcgtgtatgttgaagactaaatgttttcagtgtaatagaacttgacctcaaatagaagattgcttttagtttcccttaagcaaacacggaaggcaaaagagaaacccccctgcctgtttcaaggtgcctggagctgagaggttgcagcacatcccatcatttatgaaagagctctcagaagtatacagccctacgttcccaga

SEQ ID NO: 189386 - DNA, 518 bp, Homo sapiens
cgctgttgccacctgctggtgacatatcatgattgacatacatacatagttgggggaggaatttttatgggaagcacaaattgcaaacttaaggccacatcaatagtcttcattccctggggactcagtctttctggagatgggaaaakatgtgtccagaaagcaaaagaagaggatgctacttatactttcccttcaagaagttcaatatgtttcagtcctattattccaccaacacaagagattcctttactatctttctatggggcaagttgggcatgtatcctcgtgaccactacagatgtgctatcttaatcgtgtatgttgaagactaaatgttttcagtgtaatagaacttgacctcaaatagaagattgcttttagtttcccttaagcaaacacggaaggcaaaagagaaacccccctgcctgtttcaaggtgcctggagctgagaggttgcagcacatcccatcatttatgaaagagctctcagaagtatacagccctacgttcccaga

SEQ ID NO: 189387 - DNA, 518 bp, Homo sapiens
cgctgttgccacctgctggtgacatatcatgattgacatacatacatagttgggggaggaatttttatgggaagcacaaattgcaaacttaaggccacatcaatagtcttcattccctggggactcagtctttctggagatgggaaaatatgtgtccagaaagcaaaagaagaggatgctacttatactttcccttcaagaagttcaatatgtttcagtcctattattccaccaacacaagagattcctttactatctttctatggggcaagttgggcatgtatcctcgtgaccactacagatgtgctatctyaatcgtgtatgttgaagactaaatgttttcagtgtaatagaacttgacctcaaatagaagattgcttttagtttcccttaagcaaacacggaaggcaaaagagaaacccccctgcctgtttcaaggtgcctggagctgagaggttgcagcacatcccatcatttatgaaagagctctcagaagtatacagccctacgttcccaga

SEQ ID NO: 189388 - DNA, 474 bp, Homo sapiens
caggcacatgccatcatgcctggctaattttttgtagtttttgcagagacagtgtttcaccatgttgctcaagctggtcttgaactcctgaactcaagtgctccacctgcctcagcctcccaaagtgctaggattacagggttgagttactgtggccagccaactgttaatattttaatgtttctttctcatcttatgtctaccactgcatattatagagtctatattactttgtgtttgactttttacttcatattattgttttgtatattatgagctttgcatattatgagctctttctaaatatattttgtcatattctgacaggatattatcaayggataactgatagcacaaattaccaaatctttctataacaacattgtttagaaaaaacatactttagatgttttcaggaaaaacgtgaaacctaaaatgcaaagcttcattattattgatcactattacgaaaat

SEQ ID NO: 189389 - DNA, 523 bp, Homo sapiens
gtcaccacgtgccctccagaagagcaaaaatagacactgaaaatatgaagtactggcaaggatgtggagcaactggaactstcagacattgcttgcaggagtatacattggttatggccactttggaaaattatctggcaagttttactaaaataattcacatgcataccataaatccagcaatttctttcctagaattaagcccagcaaagatgtgtacacgtgtttaccaaaagatatgtaccaaaatgttcataacagcactattcatagtagtccaactggaagttgccctaatgtccaccaacagcagaatggatatacaattttttggtgtataatggaatattaatagcaaagagaatgaactacctacaactacacacaaaaacaatggtgactttctcaaacactgagtgaaagaagccagacacaaaagtatatatgctatgattccatttatatggccaaaaccacattaaaacagatgatatattcaaaagcagattaatttataatatca

SEQ ID NO: 189390 - DNA, 605 bp, Homo sapiens
caactgcctgggtagcgcgccagctggaggaaggcagcaattggataactggatttgtgtcaggaaaatgagagagaggaggaagggagtgagagagacagacagagggagggagagaaagagagattgagctttcttcttcctcccttctatttggccttggaataccctgcagacaaagatggacttcctttagccgtgtcctctggcccaggctaccatcaccccccaaagccctgagcttgaaactggggtcaaggtatggttattaatgagagaacagctccctgctcctcctcctcatcagtgagcttaagtaagtatagctggtgccagtgctggctatagatggaggccaagagagaaatcagccttccctagagagtcaatggcttttaaaatttggttaaaactggttgagttgggtgagcagagcttctcatggaaagagagagcagcttagaccttaagacagatatttcagaaaccatatccagaggaacaaccratttacaaaggaaatcctcacatccttgtgttaagtgaaagctctccctgatgagtgacagtggaaatgtggacaaccgtgtggatttggagctcat

SEQ ID NO: 189391 - DNA, 523 bp, Homo sapiens
gaattcccacatgttgtgggaaggacctggtgggaggtaattgaatcctggggtcaggtctttyccatgctgttcttgtgatagtgaataagtctcgcgagatctgatggttttaaaaagaggaatttccctgcacaagctctcttctctcgtctgctgccacgtgagacatgcctttcaccttgagccatgattgtgaggcttccccaaccacgtggaattgtaagtccattaagcctctttcttttgcaaattgcccagtcttgggtatgtctttatcagcagtgtgaaaacagactaataacactttttgtgatagattaaattttccatgtactaagaagacataaaaaagaatagtgcaaattgtaaggaaatttaaaatataagttaaccaatgtgatgaaaataaacagaagcctagatctccccatagaagaaggtgctttgggattgctggtttctgtagtcttcttttaccagcaggatggagacagggtccctgatgagaatggggtgattg

SEQ ID NO: 189392 - DNA, 523 bp, Homo sapiens
gaattcccacatgttgtgggaaggacctggtgggaggtaattgaatcctggggtcaggtcttttccatgctgttcttgtgatagtgaataagtctcgcgagatctgatggttttaaaaagrggaatttccctgcacaagctctcttctctcgtctgctgccacgtgagacatgcctttcaccttgagccatgattgtgaggcttccccaaccacgtggaattgtaagtccattaagcctctttcttttgcaaattgcccagtcttgggtatgtctttatcagcagtgtgaaaacagactaataacactttttgtgatagattaaattttccatgtactaagaagacataaaaaagaatagtgcaaattgtaaggaaatttaaaatataagttaaccaatgtgatgaaaataaacagaagcctagatctccccatagaagaaggtgctttgggattgctggtttctgtagtcttcttttaccagcaggatggagacagggtccctgatgagaatggggtgattg

SEQ ID NO: 189393 - DNA, 563 bp, Homo sapiens
caagtcatttcaccctctagtctcagttttctcagctgtaaaatgaatacattgaatattctttctgaattttgtcttagacacattgtgaaattgatgtggatttttttcagtgctcctatccccctgaattggactccgccaggcgcttattagaaatacataatctttattcaaccatcattttgactagagactcatagtttttcttccaaaacccattctccccatttcctttactagcagacttgctgaacttgcctggtcacatagcactcagaataaagcctgtgtcctttgcagtcaaatgtgaccatgtgactaattttggctaccaagatgtgagtggatacaatgtttgcagcttccgggttatagccatacagggaaagagtgcgggctacattgtggctttgccctgtgcctgccagtacaaaaagtagtgagacaacttcattcaatcaatctctttctctctttctgtgtctctckctctctcttgattgtgtgcccagccagtcagccaaatggcctgtacagacaaggagctctgagacttggtt

SEQ ID NO: 189394 - DNA, 590 bp, Homo sapiens
tgtgcatcagaatgccctggagaacttgctaaaacacaggttgctgggccctacyccccacagtctctaattccttaggtcaagggtagggcctaagactttgcatttctaacaagcttgcaggtggtgctgctctaaggaccacactttgagaaccatcgcctttggtgattctccaaatctgaaatctggaccaaatgtgactctttgaaaaggactcagttgtgtttctcagtcctcgcattacaacactgctctacgtgaagactccatccttgtgtcttgagcatctttctataatccagaaacagtggcatttgtcatcaatcaagctttgacttgagatattatgaaggcggagtagagcctggggttttgtttttaaacacagttaaatgcagataaatccactgccattttacccttattaagtaaagcaaggattttaaaaggacatgggatttcaggcaccacttaaacaaagggcaaagcattatttgatgagctggcctcaagctgggaaaggctttagataatacacaatgatagaattatggtgagtggagaataacaataagcacatttgatgg

SEQ ID NO: 189395 - DNA, 590 bp, Homo sapiens
tgtgcatcagaatgccctggagaacttgctaaaacacaggttgctgggccctactycccacagtctctaattccttaggtcaagggtagggcctaagactttgcatttctaacaagcttgcaggtggtgctgctctaaggaccacactttgagaaccatcgcctttggtgattctccaaatctgaaatctggaccaaatgtgactctttgaaaaggactcagttgtgtttctcagtcctcgcattacaacactgctctacgtgaagactccatccttgtgtcttgagcatctttctataatccagaaacagtggcatttgtcatcaatcaagctttgacttgagatattatgaaggcggagtagagcctggggttttgtttttaaacacagttaaatgcagataaatccactgccattttacccttattaagtaaagcaaggattttaaaaggacatgggatttcaggcaccacttaaacaaagggcaaagcattatttgatgagctggcctcaagctgggaaaggctttagataatacacaatgatagaattatggtgagtggagaataacaataagcacatttgatgg

SEQ ID NO: 189396 - DNA, 590 bp, Homo sapiens
tgtgcatcagaatgccctggagaacttgctaaaacacaggttgctgggccctactccccacagtctctaattccttaggtcaagggtagggcctaagactttgcatttctaacaagcttgcaggtggtgctgctctaaggaccacactttgagaaccatcgcctttggtgattctccaaatctgaaatctggaccaaatgtgactctttgaaaaggactcagttgtgtttctcagtcctcgcattacaacactgctctacgtgaagactccatccttgtgtcttgagcatctttctataatccagaaacagtggcatttgtcatcaatcaagctttgacttgagatattatgaaggcggagtagagcctggggttttgtttttaaacacagttaaatgcagataaatccactgccattttacccttattaagtaaagcaaggattttaaaaggacatgggatttcaggcaccacttaaacaaarggcaaagcattatttgatgagctggcctcaagctgggaaaggctttagataatacacaatgatagaattatggtgagtggagaataacaataagcacatttgatgg

SEQ ID NO: 189397 - DNA, 175 bp, Homo sapiens
catgctaatgaatacagatgaccgtgtgtctgcagaccttcctaggaaattattgagtccttcattgaatactaaactgtgaatacatgagagaaaataacwgaagcctggggtaaaatgccaacacaaagggtttgaagaacaattctcaaagctcaagaaagctctgcaaata

SEQ ID NO: 189398 - DNA, 566 bp, Homo sapiens
ggtaatatatgagctattaggtagaatctttggaagaatcctgcttttgtgatggaactcactcattcctaaacctaaagcaactctacatcttctctaagaaaattttatagcaatctctaaaagcatcaaactgattccaaataatttaactgtgtttgagaacaaaatacaaatatacaaaaggaattcaacaaaatccatcacataacaatatagaattcacaatatctggttttgatgaacataataattagtgttgaaacatgttaattcagktgttaaaaatatgctttattttttcaaataagatgggaaaatatgtatattatgagaaaataaaaatggaagaaataaaaacaagcagactcctaaaacagaaaaaataagtatattagattaaaaatgtatgaataaatttaacagcactttaaccattgtagaaaaaataccagtgattttgataacataacaatataaactatccaaaacagaaaacatagacacatttgaaaaaacaaccacactgtgttggacaatatcaagcagcataatacaagaagaga

SEQ ID NO: 189399 - DNA, 566 bp, Homo sapiens
ggtaatatatgagctattaggtagaatctttggaagaatcctgcttttgtgatggaactcactcattcctaaacctaaagcaactctacatcttctctaagaaaattttatagcaatctctaaaagcatcaaactgattccaaataatttaactgtgtttgagaacaaaatacaaatatacaaaaggaattcaacaaaatccatcacataacaatatagaattcacaatatctggttttgatgaacataataattagtgttgaaacatgttaattcagttgttaaaaatatgctttattttttcaaataagatgggaaaatatgtatattrtgagaaaataaaaatggaagaaataaaaacaagcagactcctaaaacagaaaaaataagtatattagattaaaaatgtatgaataaatttaacagcactttaaccattgtagaaaaaataccagtgattttgataacataacaatataaactatccaaaacagaaaacatagacacatttgaaaaaacaaccacactgtgttggacaatatcaagcagcataatacaagaagaga

SEQ ID NO: 189400 - DNA, 566 bp, Homo sapiens
ggtaatatatgagctattaggtagaatctttggaagaatcctgcttttgtgatggaactcactcattcctaaacctaaagcaactctacatcttctctaagaaaattttatagcaatctctaaaagcatcaaactgattccaaataatttaactgtgtttgagaacaaaatacaaatatacaaaaggaattcaacaaaatccatcacataacaatatagaattcacaatatctggttttgatgaacataataattagtgttgaaacatgttaattcagttgttaaaaatatgctttattttttcaaataagatgggaaaatatgtatattatgagaaaataaaaatggaagaaataaaaacaagcagactcctaaaacagaaaaaataagtatattagattaaaaatgtatgaataaatttaacagcactttaaccattgtagaaaaaataccagtgattttgataayataacaatataaactatccaaaacagaaaacatagacacatttgaaaaaacaaccacactgtgttggacaatatcaagcagcataatacaagaagaga

SEQ ID NO: 189401 - DNA, 461 bp, Homo sapiens
gaagaacaaaaccaaaaatacgaagaaatgattgccaaaatgttattagaatcacaaataaagacaaaatggcaaggtaaactattgtctaatttctgaaaatcagtgataaagagaaaaatcttaaaaggcatcagagatgacaaaataatccacatcaaaagaaatacacacacacacacacacacaaatacgggcaattttcttcagaaactatgaaarcttggagacaatggagcaatcataaataattaaataataaaaaacagctttatctacatttttataacaagtagaaaattttaagcactaaagtaaaatagggctcgtttatttttagaaaattaaaaataggtttggaactagggtaaagtaaatgacacaactaggtcccaaaacctaaagagctactcactttcagagttatatatttgagattgagagtgcaagacttgtgcctt

SEQ ID NO: 189402 - DNA, 461 bp, Homo sapiens
gaagaacaaaaccaaaaatacgaagaaatgattgccaaaatgttattagaatcacaaataaagacaaaatggcaaggtaaactattgtctaatttctgaaaatcagtgataaagagaaaaatcttaaaaggcatcagagatgacaaaataatccacatcaaaagaaatacacacacacacacacacacaaatacgggcaattttcttcagaaactatgaaaacttggagacaatggagcaatcataaataattaaataataaaaaacagctttatctacatttttataacaagtagaaaattttaagcactaaagyaaaatagggctcgtttatttttagaaaattaaaaataggtttggaactagggtaaagtaaatgacacaactaggtcccaaaacctaaagagctactcactttcagagttatatatttgagattgagagtgcaagacttgtgcctt

SEQ ID NO: 189403 - DNA, 461 bp, Homo sapiens
gaagaacaaaaccaaaaatacgaagaaatgattgccaaaatgttattagaatcacaaataaagacaaaatggcaaggtaaactattgtctaatttctgaaaatcagtgataaagagaaaaatcttaaaaggcatcagagatgacaaaataatccacatcaaaagaaatacacacacacacacacacacaaatacgggcaattttcttcagaaactatgaaaacttggagacaatggagcaatcataaataattaaataataaaaaacagctttatctacatttttataacaagtagaaaattttaagcactaaagtaaaatagggctcrtttatttttagaaaattaaaaataggtttggaactagggtaaagtaaatgacacaactaggtcccaaaacctaaagagctactcactttcagagttatatatttgagattgagagtgcaagacttgtgcctt

SEQ ID NO: 189404 - DNA, 461 bp, Homo sapiens
gaagaacaaaaccaaaaatacgaagaaatgattgccaaaatgttattagaatcacaaataaagacaaaatggcaaggtaaactattgtctaatttctgaaaatcagtgataaagagaaaaatcttaaaaggcatcagagatgacaaaataatccacatcaaaagaaatacacacacacacacacacacaaatacgggcaattttcttcagaaactatgaaaacttggagacaatggagcaatcataaataattaaataataaaaaacagctttatctacatttttataacaagtagaaaattttaagcactaaagtaaaatagggctcgtttatttttagaaaattaaaaataggtttggaactagggtaaagwaaatgacacaactaggtcccaaaacctaaagagctactcactttcagagttatatatttgagattgagagtgcaagacttgtgcctt

SEQ ID NO: 189405 - DNA, 559 bp, Homo sapiens
  misc_feature (1)...(559): n = A,T,C or G
nnnnnnnnnnnnnnnnnnnnnnnnnnnnnnnnnnnnnncaccatttcaattaaatgttcctttcaaatcrctaattattttcatgttccaaaatttaaaggttaattttttattctcattttattgatctatcagtagtctctttttctttaattaaaaaacaaacaaacaaaaacacataaacaaacaaacaaaaaaacccagctttttttctttggcttccagaacacgtcctcttggctttcttcttatgtctttgtatgctatttcttagtctttggaacacttctgtgtccacccccactcccttgatgagttctcacagagccatggtttacaatattgtttatgctaagaacttgcaaatttgtacctctacctcttacttctcttctaaatgccaggctcttacatccaacttcttatgctgtcttcttttgagaagctaataaacatctcaactttgaaatgcacattctcacctacgaccatttgtctcaaagcaaaaatcttagagtcaatcctacttattttctttgtcaagaattgcacatcccac

SEQ ID NO: 189406 - DNA, 559 bp, Homo sapiens
  misc_feature (1)...(559): n = A,T,C or G
nnnnnnnnnnnnnnnnnnnnnnnnnnnnnnnnnnnnnncaccatttcaattaaatgttcctttcaaatcactaattattttcatgttccaaaatwtaaaggttaattttttattctcattttattgatctatcagtagtctctttttctttaattaaaaaacaaacaaacaaaaacacataaacaaacaaacaaaaaaacccagctttttttctttggcttccagaacacgtcctcttggctttcttcttatgtctttgtatgctatttcttagtctttggaacacttctgtgtccacccccactcccttgatgagttctcacagagccatggtttacaatattgtttatgctaagaacttgcaaatttgtacctctacctcttacttctcttctaaatgccaggctcttacatccaacttcttatgctgtcttcttttgagaagctaataaacatctcaactttgaaatgcacattctcacctacgaccatttgtctcaaagcaaaaatcttagagtcaatcctacttattttctttgtcaagaattgcacatcccac

SEQ ID NO: 189407 - DNA, 442 bp, Homo sapiens
ttttcatgttccaaaatttaaaggttaattttttattctcattttattgatctatcagtagtctctttttctttaattaaaaaacaaacaaacaaaaacacataaacaaacaaacaaaaaaacccagctttttttctttggcttccagaacacgtcctcttggctttcttcttatgtctttgtatgctatttcttagtctttggaacacttctgtgtccacccccactcccttgatgagttstcacagagccatggtttacaatattgtttatgctaagaacttgcaaatttgtacctctacctcttacttctcttctaaatgccaggctcttacatccaacttcttatgctgtcttcttttgagaagctaataaacatctcaactttgaaatgcacattctcacctacgaccatttgtctcaaagcaaaaatcttagagtc

SEQ ID NO: 189408 - DNA, 559 bp, Homo sapiens
  misc_feature (1)...(559): n = A,T,C or G
nnnnnnnnnnnnnnnnnnnnnnnnnnnnnnnnnnnnnncaccatttcaattaaatgttcctttcaaatcactaattattttcatgttccaaaatttaaaggttaattttttattctcattttattgatctatcagtagtctctttttctttaattaaaaaacaaacaaacaaaaacacataaacaaacaaacaaaaaaacccagctttttttctttggcttccagaacacgtcctcttggctttcttcttatgtctttgtatgctatttcttagtctttggaacacttctgtgtccacccccactcccttgatgagttctcacagagccatggtttacaatattgtttatgctaagaacttgcaaatttgtacctctacctcttacttctcttctaaatgccaggctcttacatccaacttcttatrctgtcttcttttgagaagctaataaacatctcaactttgaaatgcacattctcacctacgaccatttgtctcaaagcaaaaatcttagagtcaatcctacttattttctttgtcaagaattgcacatcccac

SEQ ID NO: 189409 - DNA, 442 bp, Homo sapiens
ttttcatgttccaaaatttaaaggttaattttttattctcattttattgatctatcagtagtctctttttctttaattaaaaaacaaacaaacaaaaacacataaacaaacaaacaaaaaaacccagctttttttctttggcttccagaacacgtcctcttggctttcttcttatgtctttgtatgctatttcttagtctttggaacacttctgtgtccacccccactcccttgatgagttctcacagagccatggtttacaatattgtttatgctaagaacttgcaaatttgtacctctacctcttacttctcttctaaatgccaggctcttacatccaacttcttatgctgtcttcttttgagaagctaataaacatctcaactttgaaatgcacattctcaccwacgaccatttgtctcaaagcaaaaatcttagagtc

SEQ ID NO: 189410 - DNA, 317 bp, Homo sapiens
taattaaaataattctgatagaaaatcctaacaatgtacattattgtctagatttataattccgtaaattaaatatacatccccctgcaagtggcaatacttcaaaaattaattctagtttacaatttagtataaaataatgtattaraagtgtccctgaaagatggagtttaatggagaaaaatgaggaatattatgagtatcaggacatggagaagagtaaaaagtcaatattgtgggacaaattaaatgacattaaaaaatcaccttttttcatttgatataatgtaatggttataaaatatctcctcagagtt

SEQ ID NO: 189411 - DNA, 529 bp, Homo sapiens
catttgaatatgcacaggtttaattaacatagtttagttaaatagcactagtctcccaacaacctggttacaatttcggttaccaccatatgctaactgtgagcaactgcataaaatccaaacttcattcccagctcttaattccacaaatgcctgtgtgagtaaataacagacaagcatcatgatcagggactgtattaatcttgtggggatgctgcaacaaagtacaaaaaaccgggttgcttaaaacaacagaaatgtattgactcgtagttgtggaggctagaagtcaaaaakcaatgtgttggtaggttcatgctctctgctggctctaggggagaatccttcttcccctctccttcctgtttgggtttgccagccatccttggtgttgtttgacctacagatatgtcactgcattttctcagtgtgtcttcacatcgtcttttttgtgtgtgtgtctggagctgtatccaaattctccttcactataagacaccagttagtctattggattaggacccaccct

SEQ ID NO: 189412 - DNA, 566 bp, Homo sapiens
ataccagtaagtttggggtatagtattatgcaacaatacaacctgatgcacaaaaaatctcttctttgttacataaactctatataaactggcatatgcttagttcttaaacctctctccaatctccttctctttccccatactcaaactaatctttttttttctgctccttcaacaaaccagcacttgtatttacacattagataaattgcaccattaacttaaaaaacacaatttccaagatttttacaaaactgtgtcttatagtttaaagtatctcagcctttaagtatcacttgttagataacatttagttgccaatctttataattgctttctcttactctactccttagcttayagtcctttctgccatatttatcgtatttgtataacagatcaaaatctgtggttatctatttatttacctaattttcagctctctccacttattatcatataagttacaaacatttcaggtcatatcttcagtttaccacactataccagtagcttaaatatcacattacccatactagccactcaaaaatatttattatggaatt

SEQ ID NO: 189413 - DNA, 529 bp, Homo sapiens
catttgaatatgcacaggtttaattaacatagtttagttaaatagcactagtctcccaacaacctggttacaatttcggttaccaccatatgctaactgtgagcaactgcataaaatccaaacttcattcccagctcttaattccacaaatgcctgtgtgagtaaataacagacaagcatcatgatcagggactgtattaatcttgtggggatgctgcaacaaagtacaaaaaaccgggttgcttaaaacaacagaaatgtattgactcgtagttgtggaggctagaagtcaaaaatcaatgtgttggtaggttcatgctctctgctggctctaggggagaatccttcttcccctctccttcctgtttgggtttgccagccatccttggtgttgtttgacctacagatatgtcactgcattttctcagtgtgtcttcacatcgtcttttktgtgtgtgtgtctggagctgtatccaaattctccttcactataagacaccagttagtctattggattaggacccaccct

SEQ ID NO: 189414 - DNA, 590 bp, Homo sapiens
tacccactacgtaataagcaactaattaaatttgactaatattaataatttcattattattcatcttaatatcatggcatgacttctaaggtatattattaaatagaaaaagataagttttaaactgagccatagtttagaacttgacttaaagcagactcacaaagcaaatgctcatatctaggacaggtaaatctacacgtgtttatacacacattcactgtattggggaaaatacacaccaaactggaaacactggttgtctctgaagaagagacagggctttggcaatattcaaattaggctttaactgtttctgaaagtttcagttctctataaggagaaggtrttacttatgtaatttttaaaaattacatattaagtactaaatgactgaagcttcttagaattgatgggtgcaggcatcacatgggcagcaaggcattcacataatggagaatcatggtctcctgtagatgtctaggagtgataaaattaactaccttttaggtggtgtagtttcctggttgagctgataattattaagttaatgattagtaggttatttctcaacaccgaagagattatta

SEQ ID NO: 189415 - DNA, 419 bp, Homo sapiens
ttaaaaacaggattttctctgcacaagctctttttttgcctgctgccacccacataagatgtgtcttgctcctttttgccatgattgtgagtcctccccagccatgtggaactgtatgtccaataaacctttttcttttgtaagttgtccagtcgtgggtatgtctttatcagcagtgttaaaatggactaatacaatcactctatcaaatgagataatatttattcctttaccactgacaactctctctcggctcttctattcaatcatgttactgatagaygctttgctttttgtttttgttgtttaacctgattgttatagcttattttatgaatttctgttcttcttttaattttacaacaattttactatttctccttacatgtttataagtcatatggagactccttctcatc

SEQ ID NO: 189416 - DNA, 433 bp, Homo sapiens
gacacttcctatattcctgtattcatccatttttatgctactgataaagatataccccagcctgggaaatttacaaaagaaagaggtttaatggacttatgtttccacatggctgggraaacctcacaatcatggcagatggccaggaagagcaagtcacatcttacatggatggcggcaggcaaagagagagcttgttcagaaaaactccctcttctttaaccataagatcttgtgggacttattcactatcatgaggatgggatggcctgccaccatgattcaattatctcccacctggtccctcccacaacacatgggaattcaagatgagatgtgggtggggacaaagccataccatatcaccatctctgtgcaaatgctctctctcttctatttacctctgcaattctagctaaattttcctttctaa

SEQ ID NO: 189417 - DNA, 433 bp, Homo sapiens
gacacttcctatattcctgtattcatccatttttatgctactgataaagatataccccagcctgggaaatttacaaaagaaagaggtttaatggacttatgtttccacatggctgggaaaacctcacaatcatggcagatggccaggaagagcaagtcacatcttacatggatggyggcaggcaaagagagagcttgttcagaaaaactccctcttctttaaccataagatcttgtgggacttattcactatcatgaggatgggatggcctgccaccatgattcaattatctcccacctggtccctcccacaacacatgggaattcaagatgagatgtgggtggggacaaagccataccatatcaccatctctgtgcaaatgctctctctcttctatttacctctgcaattctagctaaattttcctttctaa

SEQ ID NO: 189418 - DNA, 433 bp, Homo sapiens
gacacttcctatattcctgtattcatccatttttatgctactgataaagatataccccagcctgggaaatttacaaaagaaagaggtttaatggacttatgtttccacatggctgggaaaacctcacaatcatggcagatggccaggaagagcaagtcacatcttacatggatggcggcaggcaaagagagagcttgttcagaaaaactccctcttctttaaccataagatcttgtggracttattcactatcatgaggatgggatggcctgccaccatgattcaattatctcccacctggtccctcccacaacacatgggaattcaagatgagatgtgggtggggacaaagccataccatatcaccatctctgtgcaaatgctctctctcttctatttacctctgcaattctagctaaattttcctttctaa

SEQ ID NO: 189419 - DNA, 433 bp, Homo sapiens
gacacttcctatattcctgtattcatccatttttatgctactgataaagatataccccagcctgggaaatttacaaaagaaagaggtttaatggacttatgtttccacatggctgggaaaacctcacaatcatggcagatggccaggaagagcaagtcacatcttacatggatggcggcaggcaaagagagagcttgttcagaaaaactccctcttctttaaccataagatcttgtgggacttattcactatcatgaggatgggatggcctgccaccatgattcaattatctcccacctggtccctcccacaacacatgggaattcaagatgagatgtgggtggggayaaagccataccatatcaccatctctgtgcaaatgctctctctcttctatttacctctgcaattctagctaaattttcctttctaa

SEQ ID NO: 189420 - DNA, 578 bp, Homo sapiens
cagcttcttgtcaatggttaaaaaatcactgttgattatattttgtctgcagttagtttttatttgtgtgtgtgtgtttttgttttttgtttgtttgttttgtaaagaatttagtttagttcctcttactgtatcatggtgaagtacagctatcttcaacctattttttctgaccaatctttgtctttatattgatttaacattactttttaaatttagtcttaaaattcttactttaaatagtagttttagactacttatatttaatattgttatctatattttggccttaaatctactatcataaaatttattttccataaaatttaatctgttctttattactattttccacttttgatgctttaycttggattaagtgtttaattttgaattttattttatttcaattaataagattattagtcatatgtttttgtttattttgtcctgttaggtgctctaaggtttatactatgtaccttaactttccaataacattaaggtgactgaatatttttgccctgatacctagaaaaagacaagcatgcttgctctgataaattcttttgaagctt

SEQ ID NO: 189421 - DNA, 578 bp, Homo sapiens
cagcttcttgtcaatggttaaaaaatcactgttgattatattttgtctgcagttagtttttatttgtgtgtgtgtgtttttgttttttgtttgtttgttttgtaaagaatttagtttagttcctcttactgtatcatggtgaagtacagctatcttcaacctattttttctgaccaatctttgtctttatattgatttaacattactttttaaatttagtcttaaaattcttactttaaatagtagttttagactacttatatttaatattgttatctatattttggccttaaatctactatcataaaatttattttccataaaatttaatctgttctttattactattttccacttttgatgctttatcttggattaagtgtttaattttgaattttattttatttcaattaataagattattagtcatatgtttttgyttattttgtcctgttaggtgctctaaggtttatactatgtaccttaactttccaataacattaaggtgactgaatatttttgccctgatacctagaaaaagacaagcatgcttgctctgataaattcttttgaagctt

SEQ ID NO: 189422 - DNA, 578 bp, Homo sapiens
cagcttcttgtcaatggttaaaaaatcactgttgattatattttgtctgcagttagtttttatttgtgtgtgtgtgtttttgttttttgtttgtttgttttgtaaagaatttagtttagttcctcttactgtatcatggtgaagtacagctatcttcaacctattttttctgaccaatctttgtctttatattgatttaacattactttttaaatttagtcttaaaattcttactttaaatagtagttttagactacttatatttaatattgttatctatattttggccttaaatctactatcataaaatttattttccataaaatttaatctgttctttattactattttccacttttgatgctttatcttggattaagtgtttaattttgaattttattttatttcaattaataagattattagtcatatgtttttgtttattttgtcctgttaggtgctctaaggtttatactatgkaccttaactttccaataacattaaggtgactgaatatttttgccctgatacctagaaaaagacaagcatgcttgctctgataaattcttttgaagctt

SEQ ID NO: 189423 - DNA, 578 bp, Homo sapiens
cagcttcttgtcaatggttaaaaaatcactgttgattatattttgtctgcagttagtttttatttgtgtgtgtgtgtttttgttttttgtttgtttgttttgtaaagaatttagtttagttcctcttactgtatcatggtgaagtacagctatcttcaacctattttttctgaccaatctttgtctttatattgatttaacattactttttaaatttagtcttaaaattcttactttaaatagtagttttagactacttatatttaatattgttatctatattttggccttaaatctactatcataaaatttattttccataaaatttaatctgttctttattactattttccacttttgatgctttatcttggattaagtgtttaattttgaattttattttatttcaattaataagattattagtcatatgtttttgtttattttgtcctgttaggtgctctaaggtttatactatgtaccttaactttccaataacattaaggtgactgaatatttttgcccygatacctagaaaaagacaagcatgcttgctctgataaattcttttgaagctt

SEQ ID NO: 189424 - DNA, 563 bp, Homo sapiens
tgttttcaaaaattgaatgtttttacttgtaagttattctttcaataatartaaagagatgatcactagtcagtttatttttcatagttgaattgatttagttgaacttcattgggtgttcttatgttttagtcatgagtccatgctctttaacaagctaaaggaaaccatattatatgctaaaagatgtcagtttgtgaacaatttaatgaatatatagagttacaacatttttcccgattggatgttggggtttactataattctttgttactttatatgtgaatatactcactactcactatgtttatgtatgtaggaaacatgctagtgatgaaaattcaagcagttattaccctagttttctttcattaacaaaatacagaatagaaattatctacttattcttggaggtcttaaaatatcttttcagttgactgataattctgctatcaagagctacaagtaggtgctctggccgtctatatctgtatttccatatattcaattccttactatatatttctcatttgatattctatacccaattcaaacaaaaccat

SEQ ID NO: 189425 - DNA, 563 bp, Homo sapiens
tgttttcaaaaattgaatgtttttacttgtaagttattctttcaataataataaagagatgatcactagtcagtttatttttcatagttgaattgatttagttgarcttcattgggtgttcttatgttttagtcatgagtccatgctctttaacaagctaaaggaaaccatattatatgctaaaagatgtcagtttgtgaacaatttaatgaatatatagagttacaacatttttcccgattggatgttggggtttactataattctttgttactttatatgtgaatatactcactactcactatgtttatgtatgtaggaaacatgctagtgatgaaaattcaagcagttattaccctagttttctttcattaacaaaatacagaatagaaattatctacttattcttggaggtcttaaaatatcttttcagttgactgataattctgctatcaagagctacaagtaggtgctctggccgtctatatctgtatttccatatattcaattccttactatatatttctcatttgatattctatacccaattcaaacaaaaccat

SEQ ID NO: 189426 - DNA, 563 bp, Homo sapiens
tgttttcaaaaattgaatgtttttacttgtaagttattctttcaataataataaagagatgatcactagtcagtttatttttcatagttgaattgatttagttgaacttcattgggtgttcttatgttttagtcatgagtccatgctctttaacaagctaaaggaaaccatattatatgctaaaagatgtcagtttgtgarcaatttaatgaatatatagagttacaacatttttcccgattggatgttggggtttactataattctttgttactttatatgtgaatatactcactactcactatgtttatgtatgtaggaaacatgctagtgatgaaaattcaagcagttattaccctagttttctttcattaacaaaatacagaatagaaattatctacttattcttggaggtcttaaaatatcttttcagttgactgataattctgctatcaagagctacaagtaggtgctctggccgtctatatctgtatttccatatattcaattccttactatatatttctcatttgatattctatacccaattcaaacaaaaccat

SEQ ID NO: 189427 - DNA, 563 bp, Homo sapiens
tgttttcaaaaattgaatgtttttacttgtaagttattctttcaataataataaagagatgatcactagtcagtttatttttcatagttgaattgatttagttgaacttcattgggtgttcttatgttttagtcatgagtccatgctctttaacaagctaaaggaaaccatattatatgctaaaagatgtcagtttgtgaacaatttaatgaatatatagagttacaacatttttcccgattggatgttggggtttactataattctttgttactttatatgtgaatatactcactactcactatgtttatgtatgtaggaaacatgctagtgatgaaaattcaagcagttattaccctrgttttctttcattaacaaaatacagaatagaaattatctacttattcttggaggtcttaaaatatcttttcagttgactgataattctgctatcaagagctacaagtaggtgctctggccgtctatatctgtatttccatatattcaattccttactatatatttctcatttgatattctatacccaattcaaacaaaaccat

SEQ ID NO: 189428 - DNA, 545 bp, Homo sapiens
gggaattcttgcagatctctgtattattgatagycattttgctctgacattttatacaaagctgaatcagcaacagtatgactaaacacaaccaaaaaagaaagctagaaagattatattagacacttacgtgtatggatcattatggtgaggactgctaaaaaaaacaaaacaaaacaaaaaaaaccttcagccaaaatagatttacagtttaatcgagtaatgaatgattcataaattggaaagcccccacaatcacagcagattcagagagactccaggggtgtctcatggtcagaatgaatttatagacaatacaaagtaaagtgacccatagaaatcagaagtgaggtacagaaacagctggattggttatggcttggcacttgccttatttgaacactcagctgtatgcgactagttgaagtatggctgctggaattggccaagactcagcgattgttacaggcgcatattcctaagttaggttttagtcttgtgtacctattgagttaggttgcagttcattcacaaggactgaaata

SEQ ID NO: 189429 - DNA, 409 bp, Homo sapiens
ctttgccttaagaattgcctctttccaccatgcatatttcacctgtgtgggaattcttgcagatctctgtattattgatagtcattttgctctgacattttatacaaagctgaatcagcaacagtatgactaaacacaaccaaaaaagaaagctagaaagattatattagacacttacgtgtatggatcattatggtgaggactgctaaaaaaaacaaaacaaaamaaaaaaaaccttcagccaaaatagatttacagtttaatcgagtaatgaatgattcataaattggaaagcccccacaatcacagcagattcagagagactccaggggtgtctcatggtcagaatgaatttatagacaatacaaagtaaagtgacccatagaaatcagaagtgaggtacagaaac

SEQ ID NO: 189430 - DNA, 409 bp, Homo sapiens
ctttgccttaagaattgcctctttccaccatgcatatttcacctgtgtgggaattcttgcagatctctgtattattgatagtcattttgctctgacattttatacaaagctgaatcagcaacagtatgactaaacacaaccaaaaaagaaagctagaaagattatattagacacttacgtgtatggatcattatggtgaggactgctaaaaaaaacaaaacaaaacaaaaaaaaccttcagccaaaataratttacagtttaatcgagtaatgaatgattcataaattggaaagcccccacaatcacagcagattcagagagactccaggggtgtctcatggtcagaatgaatttatagacaatacaaagtaaagtgacccatagaaatcagaagtgaggtacagaaac

SEQ ID NO: 189431 - DNA, 409 bp, Homo sapiens
ctttgccttaagaattgcctctttccaccatgcatatttcacctgtgtgggaattcttgcagatctctgtattattgatagtcattttgctctgacattttatacaaagctgaatcagcaacagtatgactaaacacaaccaaaaaagaaagctagaaagattatattagacacttacgtgtatggatcattatggtgaggactgctaaaaaaaacaaaacaaaacaaaaaaaaccttcagccaaaatagatttacagtttaatygagtaatgaatgattcataaattggaaagcccccacaatcacagcagattcagagagactccaggggtgtctcatggtcagaatgaatttatagacaatacaaagtaaagtgacccatagaaatcagaagtgaggtacagaaac

SEQ ID NO: 189432 - DNA, 298 bp, Homo sapiens
gcccccacaatcacagcagattcagagagactccaggggtgtctcatggtcagaatgaatttatagacaatacaaagtaaagtgacccatagaaatcagaagtgaggtacagaaacagctggattggttayggcttggcacttgccttatttgaacactcagctgtatgcgactagttgaagtatggctgctggaattggccaagactcagcgattgttacaggcgcatattcctaagttaggttttagtcttgtgtacctattgagttaggttgcagttcattcacaaggactgaaa

SEQ ID NO: 189433 - DNA, 298 bp, Homo sapiens
gcccccacaatcacagcagattcagagagactccaggggtgtctcatggtcagaatgaatttatagacaatacaaagtaaagtgacccatagaaatcagaagtgaggtacagaaacagctggattggttatrgcttggcacttgccttatttgaacactcagctgtatgcgactagttgaagtatggctgctggaattggccaagactcagcgattgttacaggcgcatattcctaagttaggttttagtcttgtgtacctattgagttaggttgcagttcattcacaaggactgaaa

SEQ ID NO: 189434 - DNA, 298 bp, Homo sapiens
gcccccacaatcacagcagattcagagagactccaggggtgtctcatggtcagaatgaatttatagacaatacaaagtaaagtgacccatagaaatcagaagtgaggtacagaaacagctggattggttatggcttggcacttgccttatttgaacactcagctgtatgcgactagttgaagtatggctgctggaattggccaagactcagcgattgttacaggygcatattcctaagttaggttttagtcttgtgtacctattgagttaggttgcagttcattcacaaggactgaaa

SEQ ID NO: 189435 - DNA, 415 bp, Homo sapiens
tagctgaacagtgttaacattaaagtagagacttaagaatgacaaaacagacycttcgtagcaataagatatcaacatgacagatagcaggccttgaaagaaatcaaagtatttcaccacaaaaatacatttctttgacatattttgaaatggccctacaaggctgtttctgtggggaaaatctccattttgtagagaatccccttctctttccaagtctttttcctgatttttcctgattccaagtcctttttcctttttatgtctgataaaaatcatttacaatctattctcagtgaagcctgctacctgcaagcttcatctgcataagaaccttggtctctaaaacaccttatcttaacccatacactcctgtctattgattccggtctttagataaattattttagccagt

SEQ ID NO: 189436 - DNA, 415 bp, Homo sapiens
tagctgaacagtgttaacattaaagtagagacttaagaatgacaaaacagactcttcgtagcaataagatatcaacatgacagatagcaggccttgaaagaaatcaaagtatttcacyacaaaaatacatttctttgacatattttgaaatggccctacaaggctgtttctgtggggaaaatctccattttgtagagaatccccttctctttccaagtctttttcctgatttttcctgattccaagtcctttttcctttttatgtctgataaaaatcatttacaatctattctcagtgaagcctgctacctgcaagcttcatctgcataagaaccttggtctctaaaacaccttatcttaacccatacactcctgtctattgattccggtctttagataaattattttagccagt

SEQ ID NO: 189437 - DNA, 408 bp, Homo sapiens
aattcatgcatagctgaacagtgttaacattaaagtagagacttaagaatgacaaaacagactcttcgtagcaataagatatcaacatgacagatagcaggccttgaaagaaatcaaagtatttcaccamaaaaatacatttctttgacatattttgaaatggccctacaaggctgtttctgtggggaaaatctccattttgtagagaatccccttctctttccaagtctttttcctgatttttcctgattccaagtcctttttcctttttatgtctgataaaaatcatttacaatctattctcagtgaagcctgctacctgcaagcttcatctgcataagaaccttggtctctaaaacaccttatcttaacccatacactcctgtctattgattccggtctttagat

SEQ ID NO: 189438 - DNA, 423 bp, Homo sapiens
tgttaacattaaagtagagacttaagaatgacaaaacagactcttcgtagcaataagatatcaacatgacagatagcaggccttgaaagaaatcaaagtatttcaccacaaaaatayatttctttgacatattttgaaatggccctacaaggctgtttctgtggggaaaatctccattttgtagagaatccccttctctttccaagtctttttcctgatttttcctgattccaagtcctttttcctttttatgtctgataaaaatcatttacaatctattctcagtgaagcctgctacctgcaagcttcatctgcataagaaccttggtctctaaaacaccttatcttaacccatacactcctgtctattgattccggtctttagataaattattttagccagttgtcaaatgccaatcagaa

SEQ ID NO: 189439 - DNA, 420 bp, Homo sapiens
tgttaacattaaagtagagacttaagaatgacaaaacagactcttcgtagcaataagatatcaacatgacagatagcaggccttgaaagaaatcaaagtatttcaccacaaaaatacatttctttgacatattttgaaatggmcctacaaggctgtttctgtggggaaaatctccattttgtagagaatccccttctctttccaagtctttttcctgatttttcctgattccaagtcctttttcctttttatgtctgataaaaatcatttacaatctattctcagtgaagcctgctacctgcaagcttcatctgcataagaaccttggtctctaaaacaccttatcttaacccatacactcctgtctattgattccggtctttagataaattattttagccagttgtcaaatgccaatca

SEQ ID NO: 189440 - DNA, 408 bp, Homo sapiens
aattcatgcatagctgaacagtgttaacattaaagtagagacttaagaatgacaaaacagactcttcgtagcaataagatatcaacatgacagatagcaggccttgaaagaaatcaaagtatttcaccacaaaaatacatttctttgacatattttgaaatggccctacaaggctgtttctgtggggaaaatctccattttgtagagaatccccttctctttccaagtctttttcctgatttttcctgattccaagtcctttttcctttttatgtctgataaaaatcatttacaatctattctcagtgaagcctgctayctgcaagcttcatctgcataagaaccttggtctctaaaacaccttatcttaacccatacactcctgtctattgattccggtctttagat

SEQ ID NO: 189441 - DNA, 415 bp, Homo sapiens
tagctgaacagtgttaacattaaagtagagacttaagaatgacaaaacagactcttcgtagcaataagatatcaacatgacagatagcaggccttgaaagaaatcaaagtatttcaccacaaaaatacatttctttgacatattttgaaatggccctacaaggctgtttctgtggggaaaatctccattttgtagagaatccccttctctttccaagtctttttcctgatttttcctgattccaagtcctttttcctttttatgtctgataaaaatcatttacaatctattctcagtgaagcctgctacctgcaagcttcatctgcataagaacctyggtctctaaaacaccttatcttaacccatacactcctgtctattgattccggtctttagataaattattttagccagt

SEQ ID NO: 189442 - DNA, 408 bp, Homo sapiens
aattcatgcatagctgaacagtgttaacattaaagtagagacttaagaatgacaaaacagactcttcgtagcaataagatatcaacatgacagatagcaggccttgaaagaaatcaaagtatttcaccacaaaaatacatttctttgacatattttgaaatggccctacaaggctgtttctgtggggaaaatctccattttgtagagaatccccttctctttccaagtctttttcctgatttttcctgattccaagtcctttttcctttttatgtctgataaaaatcatttacaatctattctcagtgaagcctgctacctgcaagcttcatctgcataagaaccttggtctctaaaacaccttatcttaacccrtacactcctgtctattgattccggtctttagat

SEQ ID NO: 189443 - DNA, 426 bp, Homo sapiens
ggaattcatgcatagctgaacagtgttaacattaaagtagagacttaagaatgacaaaacagactcttcgtagcaataagatatcaacatgacagatagcaggccttgaaagaaatcaaagtatttcaccacaaaaatacatttctttgacatattttgaaatggccctacaaggctgtttctgtggggaaaatctccattttgtagagaatccccttctctttccaagtctttttcctgatttttcctgattccaagtcctttttcctttttatgtctgataaaaatcatttacaatctattctcagtgaagcctgctacctgcaagcttcatctgcataagaaccttggtctctaaaacaccttatcttaacccatacactcctgtctattgattccrgtctttagataaattattttagccag

SEQ ID NO: 189444 - DNA, 305 bp, Homo sapiens
atcaacatcgtagagctatcgtgacatcactggacttctcctaaaacttttacatgaaaaatatgtgaattatttcaagctgctctacttgtttttcatagactctgtcattaattaattttttatgtaccactaaaaagcattttmaaatgcctctaaactatggcacactgctaaatattttctagatgcctcaaaaaagtttttatatgcagtaattttgttttacatacacatgcacacttaactgatttcaagttttttcaactttcatatgaaattgaaagttgaaaaggcacatgaaa

SEQ ID NO: 189445 - DNA, 629 bp, Homo sapiens
catctttttaaagctaattgcaatgcacctagtcatttttattgcagcactatgtatgatagccaagatacagaataagcctaagtgtctggcaacagatgaatgcaaaaagaaaatgcactatctgtatacaatgaagtactctttagccataaaaaataaaatcttgccatttatgacaatatggatgaatctagaggacatcatggtaagtgaaataagccagacacagacagacaagtacagcatgatctcactcataagtggagtctaaaaaaaaaagaaaatacaaacatttaaaaaagttaatagcatagaagcagagagtagaaaaatgttaccagagactaaagacaggaggacgaaaagaaggatgaggaaactttgattggtggtataaaattacaactagataagagcaaaaaattctggtgttstgttgcacgtagagtaagtatggttaacagtgaaatatcgtatattacaaaatagcttgaagagttgtcttcgaatgttctcaccacaaagaaatgataaatatgtaagataatagattcactctgaatggatcattatacaacatggataggtatccaggtatgaaattataccccatgaatatgtacaat

SEQ ID NO: 189446 - DNA, 449 bp, Homo sapiens
aaataattttgataatgaaaaatgttcaatcttaaatcgtgtaaataagtaaatagagaggtaaaataaagagcttgatgtttatgtgatattgagaaaaaatcttttttaaaartaaaatacagattaaaatacaactttgtgctttaactgaagggtgtccctactccctgatgtgtttgagactgtcacaaacctgaacccatttggacaatacatcaaataatcattttgcatcatttcactattggggaaatgaataacttcttacattaaatgcaaaaaagctgaaacagtagtatttctttgttttttaagtggcaagatagggttgatatgattccgaagtacaaacagtagggactaagtgagcatggaggatatatgaataaatgtatcaaaagtcaagagaaatgataaaacagacaattctggggatcagtagtaga

SEQ ID NO: 189447 - DNA, 449 bp, Homo sapiens
aaataattttgataatgaaaaatgttcaatcttaaatcgtgtaaataagtaaatagagaggtaaaataaagagcttgatgtttatgtgatattgagaaaaaatcttttttaaaagtaaaatacagattaaaatacaactttgtgctttaactgaagggtgtccctactccctgatgtgtttgagactgtcacaaacctgaacccatttggacaatacatcaaataatcattttgcatcatttcactattggggaaatgaataacttcttacattaaatgcaaaaaagctgaaacagtagtattwctttgttttttaagtggcaagatagggttgatatgattccgaagtacaaacagtagggactaagtgagcatggaggatatatgaataaatgtatcaaaagtcaagagaaatgataaaacagacaattctggggatcagtagtaga

SEQ ID NO: 189448 - DNA, 503 bp, Homo sapiens
ttattgctttctttttgagtttgccttagtttgtatcttttgagggatttatacacttaatctaaattaactaatttacatttataaatttcatcatggtattcatttagttatccttaaactgttgtaggacaatggaaatgttacttctatcattctttttttgttgtttatttgttttgagacagagtcccgttctgtcgcccgggcttgagtgcagtggcctcatctctactcactgcaaattccacctcccagcttcaagcaattcttgtgcctcagcctcccgagtagctgggaatacaggcakgcgccatcacgctcagctaatttttgtatttttagtagagacagggcttcactatgttggccaggctggtctggaactcctgacctcaaacgatccgcctgcctcggcctcccaaagtgctgggatcacaggcatgagccaccaaccccagccacttctgtcattcttaaaatttgtaaattatttatttcct

SEQ ID NO: 189449 - DNA, 503 bp, Homo sapiens
ttattgctttctttttgagtttgccttagtttgtatcttttgagggatttatacacttaatctaaattaactaatttacatttataaatttcatcatggtattcatttagttatccttaaactgttgtaggacaatggaaatgttacttctatcattctttttttgttgtttatttgttttgagacagagtcccgttctgtcgcccgggcttgagtgcagtggcctcatctctactcactgcaaattccacctcccagcttcaagcaattcttgtgcctcagcctcccgagtagctgggaatacaggcaggcgccatcacgctcrgctaatttttgtatttttagtagagacagggcttcactatgttggccaggctggtctggaactcctgacctcaaacgatccgcctgcctcggcctcccaaagtgctgggatcacaggcatgagccaccaaccccagccacttctgtcattcttaaaatttgtaaattatttatttcct

SEQ ID NO: 189450 - DNA, 503 bp, Homo sapiens
ttattgctttctttttgagtttgccttagtttgtatcttttgagggatttatacacttaatctaaattaactaatttacatttataaatttcatcatggtattcatttagttatccttaaactgttgtaggacaatggaaatgttacttctatcattctttttttgttgtttatttgttttgagacagagtcccgttctgtcgcccgggcttgagtgcagtggcctcatctctactcactgcaaattccacctcccagcttcaagcaattcttgtgcctcagcctcccgagtagctgggaatacaggcaggcgccatcacgctcagctaatttttgtatttttagtagagacagggcttcactatgttggccaggctggtctggaactcctgacctcaaacgatccgcctgcctcggcctcccaaagtgctgggatcacaggcatgagccaccamccccagccacttctgtcattcttaaaatttgtaaattatttatttcct

SEQ ID NO: 189451 - DNA, 566 bp, Homo sapiens
ttactaatttacacattggggaaagggtcaagagaactccaaatttttgttgacttgatattaacctgaaaggggaatgttaataaatgacaaaatatatccacagtagttagayatcaagttgtgtttatttttttaatctactgcatattattgaattatttagatagatagatagatagatagatagatagatagatagatagatagatagattgatttattagatgtacaggaaatagaattcactggtgggcatgcgtaaagagggggcagctcttttctaatgcagggctagctgcttgtccaggggcccatgattccagggctatatttggccccacagccatccaggatgagttgtttctcagccaccaagtcttaaaatgtatatgcattaaacttagtaaaatcgcacttctttgagatgtggctttttgggcattcactgaacttgaatttggccctaaataaggcctcagtcacatgctccagggtttgcagcttggtatggatgaacatggccaatgtgaactctgacctctgggtcctgaggctttccaaag

SEQ ID NO: 189452 - DNA, 582 bp, Homo sapiens
aaaggggaatgttaataaatgacaaaatatatccacagtagttagacatcaagttgtgtttatttttttaatctactgcatattattgaattatttagatagatagatagatagatagatagatagatagatagatagataratagattgatttattagatgtacaggaaatagaattcactggtgggcatgcgtaaagagggggcagctcttttctaatgcagggctagctgcttgtccaggggcccatgattccagggctatatttggccccacagccatccaggatgagttgtttctcagccaccaagtcttaaaatgtatatgcattaaacttagtaaaatcgcacttctttgagatgtggctttttgggcattcactgaacttgaatttggccctaaataaggcctcagtcacatgctccagggtttgcagcttggtatggatgaacatggccaatgtgaactctgacctctgggtcctgaggctttccaaaggcatactacatccggtcttaaacctagactagggaaagcactagatccaagacataaatgtccaatggcaaaggctgttgtacg

SEQ ID NO: 189453 - DNA, 594 bp, Homo sapiens
ttttgttgacttgatattaacctgaaaggggaatgttaataaatgacaaaatatatccacagtagttagacatcaagttgtgtttatttttttaatctactgcatattattgaattatttagatagatagatagatagatagatagatagatagatagatagatagatagattgatttattagatgtacaggaaatagaattcactggtgggcatgcgtaaagaggggrcagctcttttctaatgcagggctagctgcttgtccaggggcccatgattccagggctatatttggccccacagccatccaggatgagttgtttctcagccaccaagtcttaaaatgtatatgcattaaacttagtaaaatcgcacttctttgagatgtggctttttgggcattcactgaacttgaatttggccctaaataaggcctcagtcacatgctccagggtttgcagcttggtatggatgaacatggccaatgtgaactctgacctctgggtcctgaggctttccaaaggcatactacatccggtcttaaacctagactagggaaagcactagatccaagacataaatgtccaatggcaaa

SEQ ID NO: 189454 - DNA, 566 bp, Homo sapiens
ttactaatttacacattggggaaagggtcaagagaactccaaatttttgttgacttgatattaacctgaaaggggaatgttaataaatgacaaaatatatccacagtagttagacatcaagttgtgtttatttttttaatctactgcatattattgaattatttagatagatagatagatagatagatagatagatagatagatagatagatagattgatttattagatgtacaggaaatagaattcactggtgggcatgcgtaaagagggggcagctcttttctaatgcagggctagctgcttgtccaggggcccrtgattccagggctatatttggccccacagccatccaggatgagttgtttctcagccaccaagtcttaaaatgtatatgcattaaacttagtaaaatcgcacttctttgagatgtggctttttgggcattcactgaacttgaatttggccctaaataaggcctcagtcacatgctccagggtttgcagcttggtatggatgaacatggccaatgtgaactctgacctctgggtcctgaggctttccaaag

SEQ ID NO: 189455 - DNA, 594 bp, Homo sapiens
ttttgttgacttgatattaacctgaaaggggaatgttaataaatgacaaaatatatccacagtagttagacatcaagttgtgtttatttttttaatctactgcatattattgaattatttagatagatagatagatagatagatagatagatagatagatagatagatagattgatttattagatgtacaggaaatagaattcactggtgggcatgcgtaaagagggggcagctcttttctaatgcagggctagctgcttgtccaggggcccatgattccagggctatatttgkccccacagccatccaggatgagttgtttctcagccaccaagtcttaaaatgtatatgcattaaacttagtaaaatcgcacttctttgagatgtggctttttgggcattcactgaacttgaatttggccctaaataaggcctcagtcacatgctccagggtttgcagcttggtatggatgaacatggccaatgtgaactctgacctctgggtcctgaggctttccaaaggcatactacatccggtcttaaacctagactagggaaagcactagatccaagacataaatgtccaatggcaaa

SEQ ID NO: 189456 - DNA, 412 bp, Homo sapiens
ttatgcaatggtgcattgattaatgcaytggaacttgttaagcagtttgcatgtctgaaaaaccaaggttcagaggtatgtaggttaaatccggcaatcaaatatcagagagatatttcagaatattatttttgtgtaccagaaaacacttttcaaaaaaaaaaaaaagtaagggcattaggaaggcattgtaaggttaatcttttccagcaaagctattacatttatttttctggagttctttagttataaaaagtagaatgtagttataggatctagtcagcattaaattgattgaaaaaatgaaaaacactgtttcatttttaaatagattaacaattaagcaagttgtttatgttgtcccactgatatactagaatatgctacattcttttgggcatcttttagacca

SEQ ID NO: 189457 - DNA, 412 bp, Homo sapiens
ttatgcaatggtgcattgattaatgcattggaacttgttaagcagtttgcatgtctgaaaaaccaaggttcagaggtatgtaggttaaatcyggcaatcaaatatcagagagatatttcagaatattatttttgtgtaccagaaaacacttttcaaaaaaaaaaaaaagtaagggcattaggaaggcattgtaaggttaatcttttccagcaaagctattacatttatttttctggagttctttagttataaaaagtagaatgtagttataggatctagtcagcattaaattgattgaaaaaatgaaaaacactgtttcatttttaaatagattaacaattaagcaagttgtttatgttgtcccactgatatactagaatatgctacattcttttgggcatcttttagacca

SEQ ID NO: 189458 - DNA, 412 bp, Homo sapiens
ttatgcaatggtgcattgattaatgcattggaacttgttaagcagtttgcatgtctgaaaaaccaaggttcagaggtatgtaggttaaatccggcaatcaaatatcagagagatatttcagaatattatttttgtrtaccagaaaacacttttcaaaaaaaaaaaaaagtaagggcattaggaaggcattgtaaggttaatcttttccagcaaagctattacatttatttttctggagttctttagttataaaaagtagaatgtagttataggatctagtcagcattaaattgattgaaaaaatgaaaaacactgtttcatttttaaatagattaacaattaagcaagttgtttatgttgtcccactgatatactagaatatgctacattcttttgggcatcttttagacca

SEQ ID NO: 189459 - DNA, 412 bp, Homo sapiens
ttatgcaatggtgcattgattaatgcattggaacttgttaagcagtttgcatgtctgaaaaaccaaggttcagaggtatgtaggttaaatccggcaatcaaatatcagagagatatttcagaatattatttttgtgtaccagaaaacacttttcaaaaaaaaaaaaaagtaagggcattaggaaggcattgtaargttaatcttttccagcaaagctattacatttatttttctggagttctttagttataaaaagtagaatgtagttataggatctagtcagcattaaattgattgaaaaaatgaaaaacactgtttcatttttaaatagattaacaattaagcaagttgtttatgttgtcccactgatatactagaatatgctacattcttttgggcatcttttagacca

SEQ ID NO: 189460 - DNA, 451 bp, Homo sapiens
gacaattaggtgctcagcacaaagcaaaatgttatgaatcaggaaaataaatagaacagagatcaaaattagatagatgcagaattggaatgatactgaaaacaagagatggaactgcagaaaatactatggcagatcattcattcctttgaatggtgaaagtagttaatacaatggctaacaattgaaatggaaaaccagacccagatgaaaaaatgcaaaccagtaaacttacctagtcctattattttactcaattgtaggaaatacatgaaaaaaaaagttgttcattatgaatccttttttctracatgggaagaagtcaccactaaacctttctcatttttttactcaaatgtttgtgttttctcatagaacttataattttaatttatttttcaatatatgtttcccatacagtctagttggattcatagttgcgatgtttcat

SEQ ID NO: 189461 - DNA, 451 bp, Homo sapiens
gacaattaggtgctcagcacaaagcaaaatgttatgaatcaggaaaataaatagaacagagatcaaaattagatagatgcagaattggaatgatactgaaaacaagagatggaactgcagaaaatactatggcagatcattcattcctttgaatggtgaaagtagttaatacaatggctaacaattgaaatggaaaaccagacccagatgaaaaaatgcaaaccagtaaacttacctagtcctattattttactcaattgtaggaaatacatgaaaaaaaaagttgttcattatgaatccttttttctaacatgggaagaagtcaccactaaamctttctcatttttttactcaaatgtttgtgttttctcatagaacttataattttaatttatttttcaatatatgtttcccatacagtctagttggattcatagttgcgatgtttcat

SEQ ID NO: 189462 - DNA, 570 bp, Homo sapiens
taccccttcaaaaattttgaaaattaagagaaatcggtagaacagctgtattatcatttacaaaaatgtttctctacctatagaacaaacaattactttgtcctctaatttccaaataacttacagaacatttatttcctactgtcactggaatggcaggctggcagsctgagttggtagcccaattggttcctcacatcaaaagattccctttattatttccttattttctctttaattctggcactccttcatgattgaacttacagatgttcttttgtctactaattttcgagtaagcctgtgctctctataactttcagtctcaatatccttctaccatcagccttttgtctaaacattcttattctggtttgtttccctgaactcttgacatcaatctctgttccttcaatattctgtttcttctactggaagcattctttcccagatttcacccactttactcttctcaatctctgtgtctgagttaaatgcttccttaggtttctatgtaggattgtctgtccatctgtaatttttctatatctctcatgttaacatacttat

SEQ ID NO: 189463 - DNA, 570 bp, Homo sapiens
taccccttcaaaaattttgaaaattaagagaaatcggtagaacagctgtattatcatttacaaaaatgtttctctacctatagaacaaacaattactttgtcctctaatttccaaataacttacagaacatttatttcctactgtcactggaatggcaggctggcaggctgagttggtagcccaattggttcctcacatcaaaagattccctttattatttccttattttctctttaattctggcactccttcatgattgaacttacagatgttcttttgtctactaattttcgagtaagcctgtgctctctataactttcagtctcaatatccttctaccatcagccttttgtctaaacattcttattctggtttgtttccctgaactcttgacatcaatctctgttccttcaatattctgtttcttctactggaagcattctttcccagatttcacccactttactcttctcaatctctgtgtctgagtwaaatgcttccttaggtttctatgtaggattgtctgtccatctgtaatttttctatatctctcatgttaacatacttat

SEQ ID NO: 189464 - DNA, 605 bp, Homo sapiens
gttggaggtggggcctgttgggaggcaattggatcatcgggcggtttctcttaaatggtttagcaccatctccttggtgctgttcttgtgacagtgagtgagttattgtgagtctggttgttaaaagtgtatagcacctccccacctctcactcttcttcctgcttccagccatgtgaagtgctggctcccccttcaccttctgccatgattgttagcttactgaggcccccgcagaagcccagcagatgcatcatgctttctgtataacgtgcagaaccatgagccaattaaactgyttttctttataaattacccagtctcaggtatttctttagagcaatgtaagaaaggactaatatagaaaattggtagaggaatatgatattgttgtaaacataccggaaaatgtgaaagtggctttgaaactggatagtgggcagagattggaagggtttggagagatcagaagaagacaggaagatgagggcaagttttgaacttactagagtcttgttacattgttgtgaccaagctactgatagagactcacaatgaagtccaggctgaggaggtctcagatggagataaggaacttaatgggaa

SEQ ID NO: 189465 - DNA, 605 bp, Homo sapiens
gttggaggtggggcctgttgggaggcaattggatcatcgggcggtttctcttaaatggtttagcaccatctccttggtgctgttcttgtgacagtgagtgagttattgtgagtctggttgttaaaagtgtatagcacctccccacctctcactcttcttcctgcttccagccatgtgaagtgctggctcccccttcaccttctgccatgattgttagcttactgaggcccccgcagaagcccagcagatgcatcatgctttctgtataacgtgcagaaccatgagccaattaaactgcttttctttataaattacccagtctcaggtatttctttagagcaatgtaagaaaggactaatayagaaaattggtagaggaatatgatattgttgtaaacataccggaaaatgtgaaagtggctttgaaactggatagtgggcagagattggaagggtttggagagatcagaagaagacaggaagatgagggcaagttttgaacttactagagtcttgttacattgttgtgaccaagctactgatagagactcacaatgaagtccaggctgaggaggtctcagatggagataaggaacttaatgggaa

SEQ ID NO: 189466 - DNA, 605 bp, Homo sapiens
gttggaggtggggcctgttgggaggcaattggatcatcgggcggtttctcttaaatggtttagcaccatctccttggtgctgttcttgtgacagtgagtgagttattgtgagtctggttgttaaaagtgtatagcacctccccacctctcactcttcttcctgcttccagccatgtgaagtgctggctcccccttcaccttctgccatgattgttagcttactgaggcccccgcagaagcccagcagatgcatcatgctttctgtataacgtgcagaaccatgagccaattaaactgcttttctttataaattacccagtctcaggtatttctttagagcaatgtaagaaaggactaatatagaaaattggtagaggaatatgatattgttgtaaacataccggaaaatgtgaaagtggctttgaaactggatagtgggcagagattggaagggtttggagagatcagaagaagacaggaagatgaggrcaagttttgaacttactagagtcttgttacattgttgtgaccaagctactgatagagactcacaatgaagtccaggctgaggaggtctcagatggagataaggaacttaatgggaa

SEQ ID NO: 189467 - DNA, 652 bp, Homo sapiens
tgcatcatgctttctgtataacgtgcagaaccatgagccaattaaactgcttttctttataaattacccagtctcaggtatttctttagagcaatgtaagaaaggactaatatagaaaattggtagaggaatatgatattgttgtaaacataccggaaaatgtgaaagtggctttgaaactggatagtgggcagagattggaagggtttggagagatcagaagaagacaggaagatgagggcaagttttgaacttactagagtcttgttacattgttgtgaccaagctactgatagagacwcacaatgaagtccaggctgaggaggtctcagatggagataaggaacttaatgggaactggagcaaaggtcactttagttaggcattagcaaaaaggttggctgcactgtgggcctgccctagggatctgtggaattttgaacttgagagtatctcaagttctggtgggtatctggtggaaaaaatttctaagcagcaaagcattcaggaggtaagctcactacttctgacaaactattttgatgtgtgtgagcaaagaaatgacctcaaactgaaacttatatttagaagggaagcagagtgtagaaacttgaaaaatttgcagcctggccatgtggtagaacaaaaagcc

SEQ ID NO: 189468 - DNA, 650 bp, Homo sapiens
caatgtaagaaaggactaatatagaaaattggtagaggaatatgatattgttgtaaacataccggaaaatgtgaaagtggctttgaaactggatagtgggcagagattggaagggtttggagagatcagaagaagacaggaagatgagggcaagttttgaacttactagagtcttgttacattgttgtgaccaagctactgatagagactcacaatgaagtccaggctgaggaggtctcagatggagataaggaacttaatgggaactggagcaaaggtcactttagttaggcattagcaaaaaggttggctgcactgtgggcctgccctagggatctgtggaattttgaacttgagagtayctcaagttctggtgggtatctggtggaaaaaatttctaagcagcaaagcattcaggaggtaagctcactacttctgacaaactattttgatgtgtgtgagcaaagaaatgacctcaaactgaaacttatatttagaagggaagcagagtgtagaaacttgaaaaatttgcagcctggccatgtggtagaacaaaaagcccattttcaggagagaaattcaagcaagctgcagaaacttgcttaactaaaaggaaggcacatgctgatagccaagaaaatgagggatac

SEQ ID NO: 189469 - DNA, 570 bp, Homo sapiens
aaggttggctgcactgtgggcctgccctagggatctgtggaattttgaacttgagagtatctcaagttctggtgggtatctggtggaaaaaatttctaagcagcaaagcattcaggaggtaagctcactacttctgacaaactattttgatgtgtgtgagcaaagaaatgacctcaaactgaaacttatatttagaagggaagcagagtgtagaaacttgaaaaatttgcagcctggycatgtggtagaacaaaaagcccattttcaggagagaaattcaagcaagctgcagaaacttgcttaactaaaaggaaggcacatgctgatagccaagaaaatgagggataccctccagggcatttcagagacctttgtggcagctcctcccatcacaggctcagaggacaacgaaggaagaatgggacactactacatgcatctcatctgttgcagctctagccatggctccaagtggcccaggtacagctcaggatgctgctccagagggttcaagccataagtcttgatggcttccatgtggcattaagcctgagggtgcacagagtacaa

SEQ ID NO: 189470 - DNA, 570 bp, Homo sapiens
aaggttggctgcactgtgggcctgccctagggatctgtggaattttgaacttgagagtatctcaagttctggtgggtatctggtggaaaaaatttctaagcagcaaagcattcaggaggtaagctcactacttctgacaaactattttgatgtgtgtgagcaaagaaatgacctcaaactgaaacttatatttagaagggaagcagagtgtagaaacttgaaaaatttgcagcctggccatgtggtagaacaaaaagcccattttcaggagagaaattcaagcaagctgcagaaacttgyttaactaaaaggaaggcacatgctgatagccaagaaaatgagggataccctccagggcatttcagagacctttgtggcagctcctcccatcacaggctcagaggacaacgaaggaagaatgggacactactacatgcatctcatctgttgcagctctagccatggctccaagtggcccaggtacagctcaggatgctgctccagagggttcaagccataagtcttgatggcttccatgtggcattaagcctgagggtgcacagagtacaa

SEQ ID NO: 189471 - DNA, 570 bp, Homo sapiens
aaggttggctgcactgtgggcctgccctagggatctgtggaattttgaacttgagagtatctcaagttctggtgggtatctggtggaaaaaatttctaagcagcaaagcattcaggaggtaagctcactacttctgacaaactattttgatgtgtgtgagcaaagaaatgacctcaaactgaaacttatatttagaagggaagcagagtgtagaaacttgaaaaatttgcagcctggccatgtggtagaacaaaaagcccattttcaggagagaaattcaagcaagctgcagaaacttgcttaactaaaaggaaggcacatgctgatagccaagaaaatgagggatacyctccagggcatttcagagacctttgtggcagctcctcccatcacaggctcagaggacaacgaaggaagaatgggacactactacatgcatctcatctgttgcagctctagccatggctccaagtggcccaggtacagctcaggatgctgctccagagggttcaagccataagtcttgatggcttccatgtggcattaagcctgagggtgcacagagtacaa

SEQ ID NO: 189472 - DNA, 570 bp, Homo sapiens
aaggttggctgcactgtgggcctgccctagggatctgtggaattttgaacttgagagtatctcaagttctggtgggtatctggtggaaaaaatttctaagcagcaaagcattcaggaggtaagctcactacttctgacaaactattttgatgtgtgtgagcaaagaaatgacctcaaactgaaacttatatttagaagggaagcagagtgtagaaacttgaaaaatttgcagcctggccatgtggtagaacaaaaagcccattttcaggagagaaattcaagcaagctgcagaaacttgcttaactaaaaggaaggcacatgctgatagccaagaaaatgagggataccctccagggcatttcagagacctttgtggcagctcctcccatcacaggctcagargacaacgaaggaagaatgggacactactacatgcatctcatctgttgcagctctagccatggctccaagtggcccaggtacagctcaggatgctgctccagagggttcaagccataagtcttgatggcttccatgtggcattaagcctgagggtgcacagagtacaa

SEQ ID NO: 189473 - DNA, 393 bp, Homo sapiens
tcacgcaatcaattaacaaaatcctctgtgtgaaatggctggcttccttttattggtggttaactgctaaacaatatttttggcrtttcaattttgttgttattattgttcaaagcttgtacaaagcctccatcaagtagtccaattctccagcttctgtcactcctggacaacatttgtatttaaaaatacctttcagccaggtgacacacacctgttgtcccagctactcaggatgctgaggcgggaggaacacttgagcccaggatttctgggttgtatgcactatgctgaggaagtgtctgcactaagtttggcatcaatatgttagcttccagggagcagaggaccaccaggttgcctaaggagtggtcaactcaaaaattgagcaga

SEQ ID NO: 189474 - DNA, 393 bp, Homo sapiens
tcacgcaatcaattaacaaaatcctctgtgtgaaatggctggcttccttttattggtggttaactgctaaacaatatttttggcatttcaattttgttgttattattgttcaaagcttgtacaaagcctccatcaagtagtscaattctccagcttctgtcactcctggacaacatttgtatttaaaaatacctttcagccaggtgacacacacctgttgtcccagctactcaggatgctgaggcgggaggaacacttgagcccaggatttctgggttgtatgcactatgctgaggaagtgtctgcactaagtttggcatcaatatgttagcttccagggagcagaggaccaccaggttgcctaaggagtggtcaactcaaaaattgagcaga

SEQ ID NO: 189475 - DNA, 393 bp, Homo sapiens
tcacgcaatcaattaacaaaatcctctgtgtgaaatggctggcttccttttattggtggttaactgctaaacaatatttttggcatttcaattttgttgttattattgttcaaagcttgtacaaagcctccatcaagtagtccaattctccagcttctgtcactcctggacaacatttgtatttaaaaatacctttcagccaggtgacacacacctgttgtcccagctactcaggatgctgaggcgggaggaacacttgagcccaggatttctgggttgtatgcactatgctgakgaagtgtctgcactaagtttggcatcaatatgttagcttccagggagcagaggaccaccaggttgcctaaggagtggtcaactcaaaaattgagcaga

SEQ ID NO: 189476 - DNA, 601 bp, Homo sapiens
agaataaaactcctctgcttatcagtagtgggatgacccctttgaatagtcactgcactacaacctgggcaacatagtgagaccctatttcttaacaaaaaaaagaaagaactaccttccatatttctgcaagtatgtgagttatctttgatgtagtgttaccttttckcagtgaatgaagtgtaataacctcttgctcattttgtttacaaaaataaataaataaataaaagcagggacattctaagtggaatcaagttccaagtaatacagacttaatactatttatagaataattcaattttatgatatatttcatgtgttgctatcctcagttatatttactcatgtatagttacacttgtcaatgtcctagctataatcacctatttttagattttaataaatgtaattaaattaatagcatttctatttttataacaagttctaaaattaagccacagtagaaaattcatgataagattaagtttgatttttatttcacttttatatgtatgaatcttaagaatttggtatttcctatctaatatttgtctttctgttcttggaaactaatttcaaattatttacaagtttcaga

SEQ ID NO: 189477 - DNA, 290 bp, Homo sapiens
ttgaatagtcactgcactacaacctgggcaacatagtgagaccctatttcttaacaaaaaaaagaaagaactaccttccatatttctgcaagtatgtgagttatctttgatgtagtgttaccttttcgcagtgaatgaagtgtaataacctcttgctcrttttgtttacaaaaataaataaataaataaaagcagggacattctaagtggaatcaagttccaagtaatacagacttaatactatttatagaataattcaattttatgatatatttcatgtgttgctatcc

SEQ ID NO: 189478 - DNA, 619 bp, Homo sapiens
gctgaggaagtgtctgcactaagtttggcatcaatatgttagcttccagggagcagaggaccaccaggttgcctaaggagtggtcaactcaaaaattgagcagaataaaactcctctgcttatcagtagtgggatgacccctttgaatagtcactgcactacaacctgggcaacatagtgagaccctatttcttaacaaaaaaaagaaagaactaccttccatatttctgcaagtatgtgagttatctttgatgtagtgttaccttttcgcagtgaatgaagtgtaataacctcttgctcattttgtttacaaaaataaataaataaataaaagcagggacattctaagtggaatcaagttccaagtaatacagacttaatactatttatagaataattcaattttatgatatatttcatgtgttgctatcctcagttatatttactcatgtatagttacacttgtcaatgtcctagctataatcacctatttttagattttaataaatgtaattaaattaatagcatttctatttttataacaagttctaaaaktaagccacagtagaaaattcatgataagattaagtttgatttttatttcacttttatatgtatg

SEQ ID NO: 189479 - DNA, 577 bp, Homo sapiens
taaaagtcaaacaatgcaaagatgtgatatttagaatactagttacataataatggataatgacttagcttttaaaacaactgctttaaacatgacacatttaaagctaattwgtaactttcatatgtttctgaaacttttacagtcactaaataatttgagtaaagcaaatgggtttcagaccgattacaatttggaaagattgattataaatttttaataatatgtaacaaagaaaaatgtggtcacttgattatatacctcttccccaagatcaagtaaatactttatcaatagaaaaaagaaagaaaagcaaaaagaaaagaaaaagaaagcaacactgctatatagaacattttttttttctaaatggaatccagcagcaaaaaaaaagataattgaagatactattaaaagatacaatttaatattaatattgaccacatttataaattcacataattttataaaacatatgcacttctgagtataaaacacacataatacaaaaaagattattacattttaaattgttaaaatttcctcaatagtttttccacacctgatgattactctc

SEQ ID NO: 189480 - DNA, 553 bp, Homo sapiens
actttgttatttcatttcatttaaatttagcataaactttacttcggcagccaattccttagttgttcttctccattaactcatgactactttagctcttgatgctaagcatgatgatgtttggtttcagaagttgccacattaacaataggatccttgaagctacaatcatgctaascaattttgacaattttatattttatagggcctagttctaacattctattgttatttaattttataaatatttttaaaaatcttgttactaaattaaaaatagacctctggaaaataaatcgaaaggtttttttgttttttgttttttgagacagagtctcactcactctatcactcaggctagagtgcagcagcctgatcttggctcactgcaacctctgcttcctgggttcaagcgattctgctgcctcagtctcccaagtacctgagaatacaggtgcccacaaccatgcccagataatttttgtacttttagtagagatggggttttgccatgttggccaggctggtctcaattcctgacctacatgatcca

SEQ ID NO: 189481 - DNA, 603 bp, Homo sapiens
ccacattaacaataggatccttgaagctacaatcatgctaagcaattttgacaattttatattttatagggcctagttctaacattctattgttatttaattttataaatatttttaaaaatcttgttactaaattaaaaatagacctctggaaaataaatcraaaggtttttttgttttttgttttttgagacagagtctcactcactctatcactcaggctagagtgcagcagcctgatcttggctcactgcaacctctgcttcctgggttcaagcgattctgctgcctcagtctcccaagtacctgagaatacaggtgcccacaaccatgcccagataatttttgtacttttagtagagatggggttttgccatgttggccaggctggtctcaattcctgacctacatgatccactcatctgggcctcccaaagttctgggattacaggcatgagccactattccctgccaaattaaaagtttttatatgaaaaagatatacacaaagcaaagatacttttacagtatgaaagtgaattataattgagaaaaatatctgcaggccataatagaatagttctatttcaatagttcgcaaac

SEQ ID NO: 189482 - DNA, 609 bp, Homo sapiens
cttgatgctaagcatgatgatgtttggtttcagaagttgccacattaacaataggatccttgaagctacaatcatgctaagcaattttgacaattttatattttatagggcctagttctaacattctattgttatttaattttataaatatttttaaaaatcttgttactaaattaaaaatagacctctggaaaataaatcgaaaggtttttttgttttttgttttttgagacagagtctcactcactctatcactcaggctagagtgcagcagcctgatcttggctcactgcaacctctgcttcctgggttcaagcgattctgctgcctcagtctcccaagtacctgagaatacaggtgcccacaaccatgcccagataatttttgtacttttagtagagatggggttttgccatgttggccaggctggtctcaaytcctgacctacatgatccactcatctgggcctcccaaagttctgggattacaggcatgagccactattccctgccaaattaaaagtttttatatgaaaaagatatacacaaagcaaagatacttttacagtatgaaagtgaattataattgagaaaaatatctgcaggccat

SEQ ID NO: 189483 - DNA, 603 bp, Homo sapiens
ccacattaacaataggatccttgaagctacaatcatgctaagcaattttgacaattttatattttatagggcctagttctaacattctattgttatttaattttataaatatttttaaaaatcttgttactaaattaaaaatagacctctggaaaataaatcgaaaggtttttttgttttttgttttttgagacagagtctcactcactctatcactcaggctagagtgcagcagcctgatcttggctcactgcaacctctgcttcctgggttcaagcgattctgctgcctcagtctcccaagtacctgagaatacaggtgcccacaaccatgcccagataatttttgtacttttagtagagatggggttttgccatgttggccaggctggtctcaattcctgacctacatgatccactcrtctgggcctcccaaagttctgggattacaggcatgagccactattccctgccaaattaaaagtttttatatgaaaaagatatacacaaagcaaagatacttttacagtatgaaagtgaattataattgagaaaaatatctgcaggccataatagaatagttctatttcaatagttcgcaaac

SEQ ID NO: 189484 - DNA, 609 bp, Homo sapiens
cttgatgctaagcatgatgatgtttggtttcagaagttgccacattaacaataggatccttgaagctacaatcatgctaagcaattttgacaattttatattttatagggcctagttctaacattctattgttatttaattttataaatatttttaaaaatcttgttactaaattaaaaatagacctctggaaaataaatcgaaaggtttttttgttttttgttttttgagacagagtctcactcactctatcactcaggctagagtgcagcagcctgatcttggctcactgcaacctctgcttcctgggttcaagcgattctgctgcctcagtctcccaagtacctgagaatacaggtgcccacaaccatgcccagataatttttgtacttttagtagagatggggttttgccatgttggccaggctggtctcaattcctgacctacatgatccactcatctgggcctcccaaagttctgggattacaggcatgagccactattccctgccaaattaaaagtttttatatgaaaaagatatacacaaagcaaagatactttyacagtatgaaagtgaattataattgagaaaaatatctgcaggccat

SEQ ID NO: 189485 - DNA, 609 bp, Homo sapiens
cttgatgctaagcatgatgatgtttggtttcagaagttgccacattaacaataggatccttgaagctacaatcatgctaagcaattttgacaattttatattttatagggcctagttctaacattctattgttatttaattttataaatatttttaaaaatcttgttactaaattaaaaatagacctctggaaaataaatcgaaaggtttttttgttttttgttttttgagacagagtctcactcactctatcactcaggctagagtgcagcagcctgatcttggctcactgcaacctctgcttcctgggttcaagcgattctgctgcctcagtctcccaagtacctgagaatacaggtgcccacaaccatgcccagataatttttgtacttttagtagagatggggttttgccatgttggccaggctggtctcaattcctgacctacatgatccactcatctgggcctcccaaagttctgggattacaggcatgagccactattccctgccaaattaaaagtttttatatgaaaaagatatacacaaagcaaagatacttttacwgtatgaaagtgaattataattgagaaaaatatctgcaggccat

SEQ ID NO: 189486 - DNA, 603 bp, Homo sapiens
acttatgatttggccatgagcattcctatgtttacttagtttggaggagtggactcagcagcatgtatgttatgggaaaaaaagagatttggaaaaattacttacataagtttgaaaggcaagatgaatctggccatatggtaaaatccaacagaactcttctggttatgagtaatttgtaaaataattcatacattgcccattatatgcrttagatatatgtaaattttaccatgcttattcttcagaacagaaaaagtgaaatacaaaggcaaacatggtaaagcaatttattttagtttttgtgagttgttcttctagagtatgttatatgactctatgccctcagtttgaaactctcattgaaccatatctaaattaactaataaaatgaactttgaattatatatgccactgtgtgcaaattaacattcattgactgtatgtgtatgtaaatattggccagtaaacagagccatttacatcttcataaagagaataacacttccaactaaaattccttctaaaattggactcatatcaattggaagtatttcaaacaattactaaactgatttacttgaacaaatatagaaaatatta

SEQ ID NO: 189487 - DNA, 603 bp, Homo sapiens
acttatgatttggccatgagcattcctatgtttacttagtttggaggagtggactcagcagcatgtatgttatgggaaaaaaagagatttggaaaaattacttacataagtttgaaaggcaagatgaatctggccatatggtaaaatccaacagaactcttctggttatgagtaatttgtaaaataattcatacattgcccattatatgcattagatatatgtaaattttaccatgctyattcttcagaacagaaaaagtgaaatacaaaggcaaacatggtaaagcaatttattttagtttttgtgagttgttcttctagagtatgttatatgactctatgccctcagtttgaaactctcattgaaccatatctaaattaactaataaaatgaactttgaattatatatgccactgtgtgcaaattaacattcattgactgtatgtgtatgtaaatattggccagtaaacagagccatttacatcttcataaagagaataacacttccaactaaaattccttctaaaattggactcatatcaattggaagtatttcaaacaattactaaactgatttacttgaacaaatatagaaaatatta

SEQ ID NO: 189488 - DNA, 390 bp, Homo sapiens
tatgactctatgccctcagtttgaaactctcattgaaccatatctaaattaactaataaaatgaactttgaattatatatgccactgtgtgcaaattaacattcattgactgtatgtgtatgtaaatattggccagtaaacagagccatttacatcttcataaagagaataacacttccaactaaaattccttctaaaattggactcatatcaattrgaagtatttcaaacaattactaaactgatttacttgaacaaatatagaaaatattatctaagctatgtgtacctatttttttatattcctagaaattagggggaacttttatttcctttgattgaatatgagtttctaacttaacaaaatatataatagtgagtcagtaaaat

SEQ ID NO: 189489 - DNA, 544 bp, Homo sapiens
atagactgataactacaaattaactgaaattgtatataccccgcctcctcatgattaggcaggtgaagatggggtgagcaaaatagtagcaacccattgaaagggctgttgaaggggttatattttccagacatatcaggagttcaagttgttattaaaaatgcaaaaagagtttgctaatcagaacataagcattcaatatctatcactatcaagttgtgagataagggataggtaattgattctgttggaaaagcagagtcatayaatgatgacagtctgataatacctctgtgacttgaaagtgacagaagtaaacaggaacatgaagcaaagagttttagttctgatagtctctttgaggaggaggaataatggcactattgtcattttttgaatatttcccctagtatttttagggatttcacaaatcgttttaatgccttaaaggactaccactctggaacatcgctcaaagcaatgttcttgtgaggattaggcttaatgaaaagtcctgtaatgcttggacacatgggaaagctga

SEQ ID NO: 189490 - DNA, 544 bp, Homo sapiens
atagactgataactacaaattaactgaaattgtatataccccgcctcctcatgattaggcaggtgaagatggggtgagcaaaatagtagcaacccattgaaagggctgttgaaggggttatattttccagacatatcaggagttcaagttgttattaaaaatgcaaaaagagtttgctaatcagaacataagcattcaatatctatcactatcaagttgtgagataagggataggtaattgattctgttggaaaagcagagtcatacaatgatgacagtctgataatacctctgtgacttgaaagtgacagaagtaaacaggaacatgaagcaaagagttttagttctgatagtctctttgaggaggaggaataatggcactattgtcattttttgaatatttcccctagtatttttagggatttcacaaatcgttytaatgccttaaaggactaccactctggaacatcgctcaaagcaatgttcttgtgaggattaggcttaatgaaaagtcctgtaatgcttggacacatgggaaagctga

SEQ ID NO: 189491 - DNA, 574 bp, Homo sapiens
tatagattttgtctactgcattgaaatttgctagaatgctgcatatgtagagcttaatgtaatcacttcctaactataatctctggagccaacccagttacaataaaattaactctaattttgtgtcttttatttgtttctacttctaggttaaatgtggtttgagaaaagtgttttagaaaactttgaaaaatcactggcttgttagaatgcatgttctattaaaagatatgagtcctatctccaggttacttaaaatattagttttactccaaattgtattctagtttccctatctttaaaatatgttcatgaaacatttctcttctcttatgaagttaaatgttcttttaagtttgaaatttattagagaactctgatatatgatttttaaaaaataacactctgaattactttctaaaatggaaagcaaccctamaacaaaaagatattaccaatattcagttttacctctggcttcaacttatttttctctcaagatcttattattctgttctccagctacccaaggtgcgaaaaagaaagaaggccaaagggaagaaggtggtgctga

SEQ ID NO: 189492 - DNA, 574 bp, Homo sapiens
tatagattttgtctactgcattgaaatttgctagaatgctgcatatgtagagcttaatgtaatcacttcctaactataatctctggagccaacccagttacaataaaattaactctaattttgtgtcttttatttgtttctacttctaggttaaatgtggtttgagaaaagtgttttagaaaactttgaaaaatcactggcttgttagaatgcatgttctattaaaagatatgagtcctatctccaggttacttaaaatattagttttactccaaattgtattctagtttccctatctttaaaatatgttcatgaaacatttctcttctcttatgaagttaaatgttcttttaagtttgaaatttattagagaactctgatatatgatttttaaaaaataacactctgaattactttctaaaatggaaagcaaccctaaaacaaaaagatattaccaatattsagttttacctctggcttcaacttatttttctctcaagatcttattattctgttctccagctacccaaggtgcgaaaaagaaagaaggccaaagggaagaaggtggtgctga

SEQ ID NO: 189493 - DNA, 574 bp, Homo sapiens
tatagattttgtctactgcattgaaatttgctagaatgctgcatatgtagagcttaatgtaatcacttcctaactataatctctggagccaacccagttacaataaaattaactctaattttgtgtcttttatttgtttctacttctaggttaaatgtggtttgagaaaagtgttttagaaaactttgaaaaatcactggcttgttagaatgcatgttctattaaaagatatgagtcctatctccaggttacttaaaatattagttttactccaaattgtattctagtttccctatctttaaaatatgttcatgaaacatttctcttctcttatgaagttaaatgttcttttaagtttgaaatttattagagaactctgatatatgatttttaaaaaataacactctgaattactttctaaaatggaaagcaaccctaaaacaaaaagatattaccaatattcagttttacctctggcttcaacttatttttctctcaagatcttattattctsttctccagctacccaaggtgcgaaaaagaaagaaggccaaagggaagaaggtggtgctga

SEQ ID NO: 189494 - DNA, 574 bp, Homo sapiens
tatagattttgtctactgcattgaaatttgctagaatgctgcatatgtagagcttaatgtaatcacttcctaactataatctctggagccaacccagttacaataaaattaactctaattttgtgtcttttatttgtttctacttctaggttaaatgtggtttgagaaaagtgttttagaaaactttgaaaaatcactggcttgttagaatgcatgttctattaaaagatatgagtcctatctccaggttacttaaaatattagttttactccaaattgtattctagtttccctatctttaaaatatgttcatgaaacatttctcttctcttatgaagttaaatgttcttttaagtttgaaatttattagagaactctgatatatgatttttaaaaaataacactctgaattactttctaaaatggaaagcaaccctaaaacaaaaagatattaccaatattcagttttacctctggcttcaacttatttttctctcaagatcttattattctgttctccagctacccaaggtgcgaaaaagaaagaaggccraagggaagaaggtggtgctga

SEQ ID NO: 189495 - DNA, 417 bp, Homo sapiens
tcttaaacattgttttaggcagtaaaacaacattgaaaaaagaggatcttgtaaagcctgatacttgattcctataggataactraatcaaatcaggtgttttagaggtaatggtcacctgattgttttctcttgagttttttcatataataggtgcagtggttcttgcaatgaggattttttttatggaaatgtgaaataaagtacagaaattcctaatgaaaacctgtcttttaagtggatctctaaattctaagaaagtgcttatattatcttagttatttagctattagcctgtcaatcattaggaaagtaagagcaatttacaaagcatctaccactgtgctagtacttgctcacatgttctcatccacctaagggaatattcaaagcatcttaatagttgctactaattca

SEQ ID NO: 189496 - DNA, 504 bp, Homo sapiens
ctctcatctacctctgcttggacaaaccagtgatgtgatttgcaaataggctgtaacttcaccgaaaacacatcacagtaaagaaaggtagtgactttcagagaatttgacctaacttagaatttgtaaaagagaaaagcattgtccttatgcctaaagtacatgactgtttctttttaagttacatgtatatttacctgaccaatttgttttactctgtattttaagttatcaggtgaaatggttttggaataaattaatgagttgtttcttctgaataaatgtgcatgttacaaatgcaaacacgtgtatgtattatacaactatgcagcttcaagagctgacttatttctatcagctttttattcmcttaaaaaaatcaggctactgaagcatattagaatttaattacaccaattagtactgccacatcagacatatgatgtgccttcaattaagaagtacctaatgggtattagtacaatttagcttcataattaaagt

SEQ ID NO: 189497 - DNA, 417 bp, Homo sapiens
tcttaaacattgttttaggcagtaaaacaacattgaaaaaagaggatcttgtaaagcctgatacttgattcctataggataactgaatcaaatcaggtgttttagaggtaatggtcacctgattgttttctcttgagttttttcatwtaataggtgcagtggttcttgcaatgaggattttttttatggaaatgtgaaataaagtacagaaattcctaatgaaaacctgtcttttaagtggatctctaaattctaagaaagtgcttatattatcttagttatttagctattagcctgtcaatcattaggaaagtaagagcaatttacaaagcatctaccactgtgctagtacttgctcacatgttctcatccacctaagggaatattcaaagcatcttaatagttgctactaattca

SEQ ID NO: 189498 - DNA, 564 bp, Homo sapiens
cactcagaccatattttctctggctgttcctggccaatgactgagcatgctcggagtattgatgaaggccatttttaagatttgtgataaccttccaacagaagactttggactggagactcctattgtccgggccaaaacttcctaaactgtgtttcaggctgtgactctttcattctcatccttctycccctcctttgacagaagccaggcttgcatcactgaagactccctgcacttagatctgctttttcttcttaatctttaactaacgttcctctcataaccttttgagtgacttataattgcatagtatcagcttcttggaaaacctgacttgataaactatcctatttgaaatacagatatatacgcatttaacaatttttgacattattagcacattgagtattaaatagtatctgaagagagatacctttaaaaatgaaaacaccttcctattggggttttcttcaaaacaaatagattatttttaaaaagattacaactatagcaacttcagtctctcctgttttatctactagagtgatttgcttcctctgc

SEQ ID NO: 189499 - DNA, 417 bp, Homo sapiens
tcttaaacattgttttaggcagtaaaacaacattgaaaaaagaggatcttgtaaagcctgatacttgattcctataggataactgaatcaaatcaggtgttttagaggtaatggtcacctgattgttttctcttgagttttttcatataataggtgcagtggttcttgcaatgaggattttttttatggaaatgtgaaataaagtacagaaattcctaatgaaaacctgtcttttaagtggatctctaaattctaagaaagtgcttatattatcttagttatttagcyattagcctgtcaatcattaggaaagtaagagcaatttacaaagcatctaccactgtgctagtacttgctcacatgttctcatccacctaagggaatattcaaagcatcttaatagttgctactaattca

SEQ ID NO: 189500 - DNA, 232 bp, Homo sapiens
agcaatatggtttgattctttcttttaaagttatgttattataagtatataagcaattcagataatagatcctgggttatgaygcatatcctatttgcataagcttaatatattttaaagataaccaaaaaagataatgtctaattaaaactataaataaacacattactcaacataattactccttaaatattcagtccatttaatataggtctttgctgccgtaaatgaa

SEQ ID NO: 189501 - DNA, 654 bp, Homo sapiens
tcactgcaagctccgcctcctgggttcacaccattctcctgcttcagtctcccgagtagctgggactacaggcgcccgccaccacgcccggcttattttttgtatttttagtagagatggagttacaccgtgttagccaggatggtctcgatctcctgacctcatgatccgccagcctcagcctcccaaagtgctgggattasaggtgtgagccactgcgcctggccagtgtatgccttctaaaagcagagtctgtagtaaatatatatataaatggtaacacaagcatataaaataaaatgtggcaattgctattcaatgaaaaatacagggacatttgggagagcataacaagggagtacatacgtgctgagataaatacatttttgttacatgagtcaggagttaaagaaataaatgaaagatgagagattaggatatagagtatatagggtgccagttcatataacactttatattaaaggaatttgagcttttggttgaaacaatggaagctattgggagttttaaggggattgatatgaaggaggtaaaataggagtctatagcactaatctaaagtggtaagtgaatggaagtcaaagctatttagtggagtaggttgaaccaaaattgatgactaagtaggtggta

SEQ ID NO: 189502 - DNA, 472 bp, Homo sapiens
gagtcttgggtatctggcatgcatagtatactaacagtgatatacacagttactttcaggctcactgaatgagtagtggtcaatgaaayacagaacaaagtcatgcaattcactttcaagttgtgttcttgaaacttcccatggcacccatgaagatttcaagagtcatttgttattatatcccatcttgactaataccaagttgttagaaaaaaatgaaatactattgtaacaataagctaaaataagtggtattgtcttaacaatgagaaagagcatgaggaaacttaagatcatagatgatgaaaactgtttcccctatccccactcccaagaagggagaggttgggattatacaaagtgattaatctatgtgttcttcccagaaaaaaaaaaggcagagtttaatcaaataacttttccaacctttagtatatggttcattcaaactgtctgacctgtagtgtttcag

SEQ ID NO: 189503 - DNA, 472 bp, Homo sapiens
gagtcttgggtatctggcatgcatagtatactaacagtgatatacacagttactttcaggctcactgaatgagtagtggtcaatgaaacacagaacaaagtcatgcaattcactttcaagttgtgttcttgaaacttcccatggcacccatgaagatttcaagagtcatttgttattatatsccatcttgactaataccaagttgttagaaaaaaatgaaatactattgtaacaataagctaaaataagtggtattgtcttaacaatgagaaagagcatgaggaaacttaagatcatagatgatgaaaactgtttcccctatccccactcccaagaagggagaggttgggattatacaaagtgattaatctatgtgttcttcccagaaaaaaaaaaggcagagtttaatcaaataacttttccaacctttagtatatggttcattcaaactgtctgacctgtagtgtttcag

SEQ ID NO: 189504 - DNA, 606 bp, Homo sapiens
agacggtgcaaaagcccaagacagccccatatctggcttgtttgaaggggttcaaggaaaccagtgtggctggagatgagtgaggaaggggagttaacgatgagcacacagaagtaatttgggccttgatatacgtttttaatttttaaaaatatatattatatttaaatgacataataattgtacatatttacagggtattttaaaactcacactgccttagaattttaccatcaatgaaagagagggtcactacaggtcctaagaagagaagtgacacgctcttttatgtaaaaaggatgactgtggatattgtgttggtaactgactgtaagaggacacttttaggaaaagtcccctctttagatattgactttatccaagaggaaaacagtagtaattcacacctcagtagacatggtgagaagtagtwgattctacatattataaagtctttgggtttaagcaaccagaggaaggacttgccatcaaatgaaatggataagcataaacaggtttggtagtagctgggagatggaaatcaacaatttctcttgagtcatactttctttgagatttccattaggtatctgaagtaatcagaaa

SEQ ID NO: 189505 - DNA, 412 bp, Homo sapiens
gaaggacttgccatcaaatgaaatggataagcataaacaggtttggtagtagctgggagatggaaatcarcaatttctcttgagtcatactttctttgagatttccattaggtatctgaagtaatcagaaactagccaggaaaactgaaatcattgagaatttaaaacaaagggaattgatacaggtaattgatggtagaaataactttaaaaaaattaaagccaaccaggggacagtgaggcaacctacaatttagcaacaatgggaggctactatcaccttcccttggagaacagggataggaggctgtactactggagctgcagggagggatatttgggggaagctggaaccacagtgggcctatgtaaaggagcaggagcctgtaaaaaatgtaactgttattaggga

SEQ ID NO: 189506 - DNA, 407 bp, Homo sapiens
gaggaaggacttgccatcaaatgaaatggataagcataaacaggtttggtagtagctgggagatggaaatcaacaatttctcytgagtcatactttctttgagatttccattaggtatctgaagtaatcagaaactagccaggaaaactgaaatcattgagaatttaaaacaaagggaattgatacaggtaattgatggtagaaataactttaaaaaaattaaagccaaccaggggacagtgaggcaacctacaatttagcaacaatgggaggctactatcaccttcccttggagaacagggataggaggctgtactactggagctgcagggagggatatttgggggaagctggaaccacagtgggcctatgtaaaggagcaggagcctgtaaaaaatgtaactgtt

SEQ ID NO: 189507 - DNA, 407 bp, Homo sapiens
gggtttaagcaaccagaggaaggacttgccatcaaatgaaatggataagcataaacaggtttggtagtagctgggagatggaaatcaacaatttctcttgagtcatactttctttgagatttccattaggtatctgaagtaatcagaaactagccaggaaaaytgaaatcattgagaatttaaaacaaagggaattgatacaggtaattgatggtagaaataactttaaaaaaattaaagccaaccaggggacagtgaggcaacctacaatttagcaacaatgggaggctactatcaccttcccttggagaacagggataggaggctgtactactggagctgcagggagggatatttgggggaagctggaaccacagtgggcctatgtaaaggagcaggagcctgta

SEQ ID NO: 189508 - DNA, 408 bp, Homo sapiens
tgggtttaagcaaccagaggaaggacttgccatcaaatgaaatggataagcataaacaggtttggtagtagctgggagatggaaatcaacaatttctcttgagtcatactttctttgagatttccattaggtatctgaagtaatcagaaactagccaggaaaactgaaatcattgagaatttaaaacaaagggaattgatacaggtaattgatggtagaaataactttaaaaaaattaaagccaaccaggggacagtgaggcaacctacaatttagcaacaatgggaggctactatcaccttcccttggagaacagggataggaggctgtactactggagctgcagggagggatrtttgggggaagctggaaccacagtgggcctatgtaaaggagcaggagcctgta

SEQ ID NO: 189509 - DNA, 415 bp, Homo sapiens
gaaggacttgccatcaaatgaaatggataagcataaacaggtttggtagtagctgggagatggaaatcaacaatttctcttgagtcatactttctttgagatttccattaggtatctgaagtaatcagaaactagccaggaaaactgaaatcattgagaatttaaaacaaagggaattgatacaggtaattgatggtagaaataactttaaaaaaattaaagccaaccaggggacagtgaggcaacctacaatttagcaacaatgggaggctactatcaccttcccttggagaacagggataggaggctgtactactggagctgcagggagggatatttgggggaagctggaaccacagtgggcctatgtaaaggagcaggagcctgtaaaaaatgyaactgttattagggatga

SEQ ID NO: 189510 - DNA, 645 bp, Homo sapiens
tacagagaaagatgatggtggggggaaataaaatactgaggcctggagcattccaacattgagtctgaggaatagaagaaaacactaaaagagagagagagagagagagggagacagagagagagagaagtatacaaataatataaaaccagggagtcaaatgaagatagtattatgagaataatctacttcaaatgctgctgataaatcaagtaaggtgagaaaaataactataagattaacaaagtggaggacaggtttaattagagtagtggggggcaaaaatctgtatggaaatgaaatgattaaagagaaaatgcaaggagcaaatgacacrgtgactataaattatccttttaaagagtttgggtgaaaaagggatcaaattccctggtggtatctgacaatgaaaatggggaaaatgaagaatactggttgcttatttgcttttattttctagtatgacagaagtaatagcttatttgtatgatcatgaaatgacccaataaagaggaaaatttgattatgtataagaggggtaagtattgaaaagtatctgtctatagcctgtgtagtcagaaagagttgatgaacaagtaaaggcgtaagcttgaggtaggtgtataaacatttcatttctggcag

SEQ ID NO: 189511 - DNA, 645 bp, Homo sapiens
tacagagaaagatgatggtggggggaaataaaatactgaggcctggagcattccaacattgagtctgaggaatagaagaaaacactaaaagagagagagagagagagagggagacagagagagagagaagtatacaaataatataaaaccagggagtcaaatgaagatagtattatgagaataatctacttcaaatgctgctgataaatcaagtaaggtgagaaaaataactataagattaacaaagtggaggacaggtttaattagagtagtggggggcaaaaatctgtatggaaatgaaatgattaaagagaaaatgcaaggagcaaatgacacggtgactataaattatccttttaaagagtttgggtgaaaaagggatcaaattccctggtggtatctgacaaygaaaatggggaaaatgaagaatactggttgcttatttgcttttattttctagtatgacagaagtaatagcttatttgtatgatcatgaaatgacccaataaagaggaaaatttgattatgtataagaggggtaagtattgaaaagtatctgtctatagcctgtgtagtcagaaagagttgatgaacaagtaaaggcgtaagcttgaggtaggtgtataaacatttcatttctggcag

SEQ ID NO: 189512 - DNA, 645 bp, Homo sapiens
tacagagaaagatgatggtggggggaaataaaatactgaggcctggagcattccaacattgagtctgaggaatagaagaaaacactaaaagagagagagagagagagagggagacagagagagagagaagtatacaaataatataaaaccagggagtcaaatgaagatagtattatgagaataatctacttcaaatgctgctgataaatcaagtaaggtgagaaaaataactataagattaacaaagtggaggacaggtttaattagagtagtggggggcaaaaatctgtatggaaatgaaatgattaaagagaaaatgcaaggagcaaatgacacggtgactataaattatccttttaaagagtttgggtgaaaaagggatcaaattccctggtggtatctgacaatgaaaatggggaaaatgaagaatactggttgcttatttgcttttattttctagtatgacagaagtaatagcttatttgtatgatcatgaaatgacccaataaagaggaaaatttgattaygtataagaggggtaagtattgaaaagtatctgtctatagcctgtgtagtcagaaagagttgatgaacaagtaaaggcgtaagcttgaggtaggtgtataaacatttcatttctggcag

SEQ ID NO: 189513 - DNA, 590 bp, Homo sapiens
gtatctgtctatagcctgtgtagtcagaaagagttgatgaacaagtaaaggcgtaagcttgaggtaggtgtataaacatttcatttctggcagtggttttctttaaggagagatttcactctgcaaggagccaattggcaatgtttggagatgttttctgttgtcacaacttgtgaatggagttactactagcatcgaattggagaggccagggatgttgctaaacatcctgcaacatacaaggcaacctttccaacaccccatcccaaacatagaattatctggctcagtttgtccatagtaccagagaaaagaccctgctctattaatatgcaggatgagtagtgygtaattttagatactggcgttaagtatatgtagtagtgggagtctgcatacatttcctcttgattgttatttatctatctatgtatttattttttgacacaggaaacaaggtcatcagctggcattgagattgaagaaaagtatgtgaggggtgtgaaatgaggaaagaatccataagttaatcttacataagaggaagaaggcaatggctaacaaaagaaaaatgggcttgtttggccgcc

SEQ ID NO: 189514 - DNA, 535 bp, Homo sapiens
ttttcaaaaggaaataatggaaaaatatgagaatttgttctcaggatagttggctgtacatttttggtatgaggtagtggaatctttgaggcaggttaagggaaataagtcttaccattgaaatctgggggccatagactacagtctgggagtacgggtctagggagtacatggacaaagggaaattgggtgcaaatcccattgactgactcctgctagcatacctgtaaaagctaaccttttaataggttagtttttaataggaggagatgatagtgggagaaaaagctgcgagattacattttattcactggaaaaccttcttatccctccctggtttcttggagaaatttcaygtatccttagaaatgactcaaaatattgattattggacaaactatttatgtaaccggagtccaaggacaggtgatgagtgaaaactatattttattaaagaacagagtattcactaacagaagactggtgaattaacattggcatggattcttcaaattaatgatggaggacatgttgc

SEQ ID NO: 189515 - DNA, 632 bp, Homo sapiens
gattattggacaaactatttatgtaaccggagtccaaggacaggtgatgagtgaaaactatattttattaaagaacagartattcactaacagaagactggtgaattaacattggcatggattcttcaaattaatgatggaggacatgttgcaattctattattatctgatgcaaaggactattcatggtcatggctaatcattaaatggctgtaaacttttgagaaaacacttccaaatactgtgacagcatatcggctgcagttgttaaggtgagatttgtcagtcctatactgagaagggtaactgctactactcctctccaaattgccaattggattctccttttcacatgataggaatgatacaagtgtaaatgttgacaggctttatattttccagagagaaaacaccttagttaatgctattgatacaaataataagagatagagtgaatgggataagctaatgattctctgtcttacaagacttatataaccttgagggccaaatatatatattcagagaacagtaacaaacatacaggtttagttactatacatgggattatacggagaaaaagcatttatatcatgtgcacaacagggagaaattaaaaatcagaagagaaa

SEQ ID NO: 189516 - DNA, 632 bp, Homo sapiens
gattattggacaaactatttatgtaaccggagtccaaggacaggtgatgagtgaaaactatattttattaaagaacagagtattcactaacagaagactggtgaattaacattggcatggattcttcaaattaatgatggaggacatgttgcaattctattattatctgatgcaaaggactattcatggtcatgrctaatcattaaatggctgtaaacttttgagaaaacacttccaaatactgtgacagcatatcggctgcagttgttaaggtgagatttgtcagtcctatactgagaagggtaactgctactactcctctccaaattgccaattggattctccttttcacatgataggaatgatacaagtgtaaatgttgacaggctttatattttccagagagaaaacaccttagttaatgctattgatacaaataataagagatagagtgaatgggataagctaatgattctctgtcttacaagacttatataaccttgagggccaaatatatatattcagagaacagtaacaaacatacaggtttagttactatacatgggattatacggagaaaaagcatttatatcatgtgcacaacagggagaaattaaaaatcagaagagaaa

SEQ ID NO: 189517 - DNA, 632 bp, Homo sapiens
gattattggacaaactatttatgtaaccggagtccaaggacaggtgatgagtgaaaactatattttattaaagaacagagtattcactaacagaagactggtgaattaacattggcatggattcttcaaattaatgatggaggacatgttgcaattctattattatctgatgcaaaggactattcatggtcatggctaatcattaaatggctgtaaacttttgagaaaacacttccaaatactgtgacagcatatcggctgcagttgttaaggtgagatttgtcagtcctatactgagaagggtaactgctactactcctctccaaattgccaattggattctccttttcacatgataggaatgatacaagtgtaaakgttgacaggctttatattttccagagagaaaacaccttagttaatgctattgatacaaataataagagatagagtgaatgggataagctaatgattctctgtcttacaagacttatataaccttgagggccaaatatatatattcagagaacagtaacaaacatacaggtttagttactatacatgggattatacggagaaaaagcatttatatcatgtgcacaacagggagaaattaaaaatcagaagagaaa

SEQ ID NO: 189518 - DNA, 635 bp, Homo sapiens
tgtaaatgttgacaggctttatattttccagagagaaaacaccttagttaatgctattgatacaaataataagagatagagtgaatgggataagctaatgattctctgtcttacaagacttatataaccttgagggccaaatatatatattcagagaacagtaacamacatacaggtttagttactatacatgggattatacggagaaaaagcatttatatcatgtgcacaacagggagaaattaaaaatcagaagagaaaatagaaaggcagctcacttgaattaatttacttttgaagaaaatataaataggatttaaaaagtaagccttgatagaatttttaataagaaaataaaagcacattatcaacttttgaatcagaggagaggagtactgtagcccccaccaatcccttaaagaatcatagaaaatttgctttatttattgtggctgaaagagttcaaatccaattatgaggatagtgatatagaacagaacatacttgaacagggggctgagtttactgccttaattaaagccgtagaatctgaaaacaattaaataaagaactgaggtctgttcattccagccccagtcatggatctgaggccatatatataatttgaacaaagt

SEQ ID NO: 189519 - DNA, 635 bp, Homo sapiens
tgtaaatgttgacaggctttatattttccagagagaaaacaccttagttaatgctattgatacaaataataagagatagagtgaatgggataagctaatgattctctgtcttacaagacttatataaccttgagggccaaatatatatattcagagaacagtaacaaacatacaggtttagttactatacatgggattatacggagaaaaagcatttatatcatgtgcacaacagggagaaattaaaaatcagaagagaaaatagaaaggcagctcacttgaattaatttacttttgaagaaaatataaataggatttaaaaagtaagccttgatagaatttttaataagaaaataaaagcacattatcaacttttgaatcagaggaraggagtactgtagcccccaccaatcccttaaagaatcatagaaaatttgctttatttattgtggctgaaagagttcaaatccaattatgaggatagtgatatagaacagaacatacttgaacagggggctgagtttactgccttaattaaagccgtagaatctgaaaacaattaaataaagaactgaggtctgttcattccagccccagtcatggatctgaggccatatatataatttgaacaaagt

SEQ ID NO: 189520 - DNA, 635 bp, Homo sapiens
tgtaaatgttgacaggctttatattttccagagagaaaacaccttagttaatgctattgatacaaataataagagatagagtgaatgggataagctaatgattctctgtcttacaagacttatataaccttgagggccaaatatatatattcagagaacagtaacaaacatacaggtttagttactatacatgggattatacggagaaaaagcatttatatcatgtgcacaacagggagaaattaaaaatcagaagagaaaatagaaaggcagctcacttgaattaatttacttttgaagaaaatataaataggatttaaaaagtaagccttgatagaatttttaataagaaaataaaagcacattatcaacttttgaatcagaggagaggagtactgtagcccccaccaatcccttaaagaatcatagaaaatttgctttatttattgtggctgaaagagttcaaatccaattatgaggatagtgatatagaayagaacatacttgaacagggggctgagtttactgccttaattaaagccgtagaatctgaaaacaattaaataaagaactgaggtctgttcattccagccccagtcatggatctgaggccatatatataatttgaacaaagt

SEQ ID NO: 189521 - DNA, 534 bp, Homo sapiens
ttattactccaatttctgctttcattttcaatctcttctccatgtgtcctctcttcttataaaaacacctccagtcattggaattaggaccctccttaatctagtaggagctcatcttaactaattgtatgtgcaaatttctaaagaaggtcaccttctgagattctgaatgaataataatttcagaagagcactacttaactcactgcaggtactgaacagaaataagcatgaaaagtatygtggtaggtggtagcacaggcaataacattaggcccttatgatcccatccaactggtcagatgatattagggcatacccaaactagagccctttaggaaaagttaaatgagaccaccaatttagactccttaggattttgactcaaaatatgcctgtggcagctgtttgctataatccatttgaaagacacatgctgttgcactgaatgacacagccaatgtcaacaggaaggaccagctacataacttctgtaacccagtgaaaaatgaaaagcaaggccccttgctcaaa

SEQ ID NO: 189522 - DNA, 384 bp, Homo sapiens
ctcagcttgtgtgtagttgactacagttatcactcagtttctaggctttgtttaccattctagattatttttttccagagaaactaccaatgaattgtacagagcagaggatgctgtagaatagaatttctgcaccctatatrgccataaatcaaaatgatacattgctaagacagctccctggttatgatagaaagcagatagtggctgcctgtctggtatgtcacagcttgatctggtctgttgctttgaacatatcagtgtgaatgtaaatggaattaatttaaataatataaaactagaacctagaaagcctcagagaatgtgattttatgtttgctttaatgctttaaaattataaataactccctcaagaggtaagta

SEQ ID NO: 189523 - DNA, 548 bp, Homo sapiens
tgcaggaattcataaagaaacaagctcaacgtcgggcgcagtggctcacacttgtaaaatcccagcacttakgtaggctgaggagtgtggatcacctgaggtcaggagttcaagacaagcctggtcaatatggcgaaaccccgtctctactaaaaatacaaaattagccaggcatggtggcaggtgcttgtaatcccagctactcgggaggctaaggcaggagaattgcttgaacctgtgaggtgaaggttgcagtgagccgagattgtgccactgcactccagccaggtgacaagagtgaaaccctgtcaaaaaaaaaaaaaagaaagaaaaagaaaaagagagagagagagagagagaaagaaaaggagaaagagagaaagaaagagaaagaaagaaaaagaaagaaagaaagaaagaaagaaagagaaagaaagaaaaagaaagaatttgaagaagtaaaattatgggaaaaacgtgtttagtctaagttatggcaaggtttcactgaacactgtgaccttcagtgttgctccctgacaaccctg

SEQ ID NO: 189524 - DNA, 579 bp, Homo sapiens
aaatactcccataggcccatggaaaatgatgcaaataattgaggttgatggaggaaaaaggtaattgagtytgtgaatgaacatcaagagacttgtaaaggaagatgttaatgagtaacatgctttgtggagggaattcctactctctgttggatggttcaaatcaaggtcagagtattagttggcttaagtgaaacactgcagaaaatggtgtaagacaataatgataatacaccagcaatatttggcactaagatgttgaccaaggccagagcagattgggaaggaaagggtctttgattctttctgattactgagatgccctgccaggatccacagaaggaaggaagcccattttgcttatataaacatactaatgacagctcctgacaaacaatttgtttttttgctggcaggagagtgattatctatcacagaaatgcttttagcagaatgtacttggtcgtttagaattgcttatggttaacaaagtagaaggttgtggatttatggggctccctggaaaatgtcacatataccacatatgtaactatctgcataaaaattaagatatttgat

SEQ ID NO: 189525 - DNA, 579 bp, Homo sapiens
aaatactcccataggcccatggaaaatgatgcaaataattgaggttgatggaggaaaaaggtaattgagtttgtgaatgaacatcaagagacttgtaaaggaagatgttaatgagtaacatgctttgtggagggaattcctactctctgttggatggttcaaatcaaggtcagagtattagttggcttaagtgaaacactgcagaaaatggtgtaagmcaataatgataatacaccagcaatatttggcactaagatgttgaccaaggccagagcagattgggaaggaaagggtctttgattctttctgattactgagatgccctgccaggatccacagaaggaaggaagcccattttgcttatataaacatactaatgacagctcctgacaaacaatttgtttttttgctggcaggagagtgattatctatcacagaaatgcttttagcagaatgtacttggtcgtttagaattgcttatggttaacaaagtagaaggttgtggatttatggggctccctggaaaatgtcacatataccacatatgtaactatctgcataaaaattaagatatttgat

SEQ ID NO: 189526 - DNA, 579 bp, Homo sapiens
aaatactcccataggcccatggaaaatgatgcaaataattgaggttgatggaggaaaaaggtaattgagtttgtgaatgaacatcaagagacttgtaaaggaagatgttaatgagtaacatgctttgtggagggaattcctactctctgttggatggttcaaatcaaggtcagagtattagttggcttaagtgaaacactgcagaaaatggtgtaagacaataatgataatacaccagcaatatttggcactaagatgttgaccaaggccagagcagattgggaaggaaagggtctttgattctttctgattactgagatgccctgccaggatccacagaaggaaggaagcccattttgcttatataaacatactaatgacagctcctgacaaacaatttgtttttttgctrgcaggagagtgattatctatcacagaaatgcttttagcagaatgtacttggtcgtttagaattgcttatggttaacaaagtagaaggttgtggatttatggggctccctggaaaatgtcacatataccacatatgtaactatctgcataaaaattaagatatttgat

SEQ ID NO: 189527 - DNA, 523 bp, Homo sapiens
attaggttacaataaactataaacattaaagtcacatcctcaaagtgaaaaaaaaaagtgaaaaatcacagtcaaatcaaaaaataaattcaaaaataattagaagatatagtctcaaaagtaattagaagatatactctatccaaatgagaagaaaccagaaaaataattccggcaataggacaaaatagggttctataacacctcaaaaagaacacactaagtccccagcaatggatcccaaccaagatgaaatctttgaaatgccagaaaaakaattcaaagaaataagcaaagtctcttagaaataggtgactatgtaaaatggccaaatatagcaattgctgttctagagggagaagaaacagcaaaactttttgaatacttatttgagggcataattgaagaaaactttgctagccttgctagatatttagatgtccaaatacaagaaactcaatgagctctggggaggttcactgcaaaactgacattacaaagccatatagtaatcaagctatct

SEQ ID NO: 189528 - DNA, 527 bp, Homo sapiens
ctaacaattagttagaacattagttagaacaattaagaagatagaagtttaaattagctcaattagaaatgaaaatggaaacattttaaccaatatcacagaaatataaaagatcatttgagactactatgtaacctctatgcacataaaaataaaagtaaagaaaatagatagattccaggaaacatacaaccctaccagcttaaaccaggaagaaataggtatccttacagaccaataacaagcagtgagattgtataagtaagaaaaaaaaaatgccgactaaaaaacccagacagatcacagccaaattctatcagacattcaaagaagaactggtaccaagcctactgaarctactctaaaagactgagaaaaagggaatcctccttaactcattctatgaagccagtatcaccctgataccaaaaccagaaaaaggcatatcataaaaaaagaaaactacaaatgaacatctctgataaagacatacgcaaaaattcttaacagatactggcaaatcaaat

SEQ ID NO: 189529 - DNA, 532 bp, Homo sapiens
gggaatcctccttaactcattctatgaagccagtatcaccctgataccaaaaccagaaaaaggcatatcataaaaaaagaaaactacaaatgaacatctctgataaagacatacgcaaaaattcttaacagatactggcaaatcaaatccaaaarcatatcaaaaagacaattcactataatcaagtgagtctcatcccagggaggcaaggatgactcaacatacgcaaggtaataaatgtgatgtattttataaacagaattaaaaaccaaatacgtatgatcatctcaatagatgcataaaaacattcagtaaaatccagcattgctttatgataaaaaccctaaacaaactagacatagaataaacatatctcaaaataataaaagctatatatgacaaacccatggccaacatcatattgaatggggaaaagttgaaagtcttcccactgagggctagaacaagttaaggatgcccattttcaccacttctacttaacatagtactggaagtcctacccagagcaatc

SEQ ID NO: 189530 - DNA, 491 bp, Homo sapiens
aaatacacttaaccaaataagtgaaagatctccataaggagagctacaaaaactgctgaaataaattagagatgatataaacaaatggaaatacatcccatgctcatggatargaagaatcatatttgtgaaaatgaccttactgctaaaagcaatctacagattcaatgcacttcctatcaaaatactgacatcatttttcatagaattagagaaagcaattctaaattcttatgaaaccagaaataagcttgaattaaaaaagcaactctaagcaaaaagaacaaatccagaggcatagttttaagagacttcaagttataatacaaggttttagtaatcaaaacagcatgcatggtactggtataaaggtagataaataaaccaaaggaaaggaatagagaaaccagaaataaagccaaatgtatacaaccaactgatcctccacaaagcattcaaaaacataaataggaaaggacaccctattcaat

SEQ ID NO: 189531 - DNA, 491 bp, Homo sapiens
aaatacacttaaccaaataagtgaaagatctccataaggagagctacaaaaactgctgaaataaattagagatgatataaacaaatggaaatacatcccatgctcatggataagaagaatcatatttgtgaaaatgaccttactgctaaaagcaatctacagattcaatgcacttcctatcaaaatactgacatcatttttcatagaattagagaaagcaattctaaattcttatgaaaccagaaataagcttgaattaaaaaagcaactctragcaaaaagaacaaatccagaggcatagttttaagagacttcaagttataatacaaggttttagtaatcaaaacagcatgcatggtactggtataaaggtagataaataaaccaaaggaaaggaatagagaaaccagaaataaagccaaatgtatacaaccaactgatcctccacaaagcattcaaaaacataaataggaaaggacaccctattcaat

SEQ ID NO: 189532 - DNA, 540 bp, Homo sapiens
gtcacattgacttttttttcaaaagttagttttaagctatttgataacatatggatmtacttcactaaagttgtatttttgtgtgtaattctttaatccatctggagatattttggttgtttttcgatcagatagccagttaaaccagaaagaaaaatcttaccaaaaagtttccacttagaaaatttaatagccaaaaaaactaatatatgcaagaatgaacaaaaacatattgataaaagttatacatcatatttttattgaaatatttcataatgaaatgtttcacatggttaaagaactacaaattcatccagtgtaaataaaaacttcatgggaaatgtataatatatgagggattatttgatatctgaaaaaactagatagaaaataaatgcttaaaaacttctagaaggtaatccagtagagtatttatcagcttaggctaacaaatgatataaacatgattaaagaagagctaaacttgaataaaaatattaagttgatgacaagtgtaaaacaccattcttcaaaatatgc

SEQ ID NO: 189533 - DNA, 540 bp, Homo sapiens
gtcacattgacttttttttcaaaagttagttttaagctatttgataacatatggatctacttcactaaagttgtatttttgtgtgtaattctttaatccatctggagatattttggttgtttttcgatcagatagccagttaaaccagaaagaaaaatcttaccaaaaagtttccacttagaaaatttaatagccaaaaaaactaatatatgcaagaatgaacaaaaacatattgataaaasttatacatcatatttttattgaaatatttcataatgaaatgtttcacatggttaaagaactacaaattcatccagtgtaaataaaaacttcatgggaaatgtataatatatgagggattatttgatatctgaaaaaactagatagaaaataaatgcttaaaaacttctagaaggtaatccagtagagtatttatcagcttaggctaacaaatgatataaacatgattaaagaagagctaaacttgaataaaaatattaagttgatgacaagtgtaaaacaccattcttcaaaatatgc

SEQ ID NO: 189534 - DNA, 540 bp, Homo sapiens
gtcacattgacttttttttcaaaagttagttttaagctatttgataacatatggatctacttcactaaagttgtatttttgtgtgtaattctttaatccatctggagatattttggttgtttttcgatcagatagccagttaaaccagaaagaaaaatcttaccaaaaagtttccacttagaaaatttaatagccaaaaaaactaatatatgcaagaatgaacaaaaacatattgataaaagttatacatcatatttttattgaaatatttcataatgaaatgtttcacatggttaaagaactacaaattcatccartgtaaataaaaacttcatgggaaatgtataatatatgagggattatttgatatctgaaaaaactagatagaaaataaatgcttaaaaacttctagaaggtaatccagtagagtatttatcagcttaggctaacaaatgatataaacatgattaaagaagagctaaacttgaataaaaatattaagttgatgacaagtgtaaaacaccattcttcaaaatatgc

SEQ ID NO: 189535 - DNA, 540 bp, Homo sapiens
gtcacattgacttttttttcaaaagttagttttaagctatttgataacatatggatctacttcactaaagttgtatttttgtgtgtaattctttaatccatctggagatattttggttgtttttcgatcagatagccagttaaaccagaaagaaaaatcttaccaaaaagtttccacttagaaaatttaatagccaaaaaaactaatatatgcaagaatgaacaaaaacatattgataaaagttatacatcatatttttattgaaatatttcataatgaaatgtttcacatggttaaagaactacaaattcatccagtgtaaataaaaacttcatgggaaatgtataatatatgagggattatttgatatctgaaaaaaytagatagaaaataaatgcttaaaaacttctagaaggtaatccagtagagtatttatcagcttaggctaacaaatgatataaacatgattaaagaagagctaaacttgaataaaaatattaagttgatgacaagtgtaaaacaccattcttcaaaatatgc

SEQ ID NO: 189536 - DNA, 551 bp, Homo sapiens
tggcaagcaataataatagctaccacttatttatcaagtgtttactaatgtactaagcattgccatatatggtttattacttctatccyatttagtattcaaatcaatatgatgtctatttttgttctgttttaaaaataaagaagctaacatgtccaagccacatatttagtaagtattggaactacatcaaaacaagaaagaaacatttcaatggtttatcctactgtctacttcctaaaggaaaattataaatttacagtaactgatccaaatacatttccagagttactttagctttcacagtgttggccagcacaatgtgttttttgtttgtttgtttgcttgcttccttgttttttaattgagaacattcccatagttgactatttcaatatttaattctccaatcttgtatttttggtttatcttgataaacatcaaataaggtggaggcagtttacactgaatagacttaagaagctgatcttcacaagaaagttcagatgcttcattttaccacaatttctccactgcttagttttattaca

SEQ ID NO: 189537 - DNA, 551 bp, Homo sapiens
tggcaagcaataataatagctaccacttatttatcaagtgtttactaatgtactaagcattgccatatatggtttattacttctatcctatttagtattcaaatcartatgatgtctatttttgttctgttttaaaaataaagaagctaacatgtccaagccacatatttagtaagtattggaactacatcaaaacaagaaagaaacatttcaatggtttatcctactgtctacttcctaaaggaaaattataaatttacagtaactgatccaaatacatttccagagttactttagctttcacagtgttggccagcacaatgtgttttttgtttgtttgtttgcttgcttccttgttttttaattgagaacattcccatagttgactatttcaatatttaattctccaatcttgtatttttggtttatcttgataaacatcaaataaggtggaggcagtttacactgaatagacttaagaagctgatcttcacaagaaagttcagatgcttcattttaccacaatttctccactgcttagttttattaca

SEQ ID NO: 189538 - DNA, 551 bp, Homo sapiens
tggcaagcaataataatagctaccacttatttatcaagtgtttactaatgtactaagcattgccatatatggtttattacttctatcctatttagtattcaaatcaatatgatgtctatttttgttctgttttaaaaataaagaagctaacatgtccaagccacatatttagtaagtattggaactacatcaaaacaagaaagaaacatttcaatggtttatcctactgtctacttcctaaaggaaaattataaatttrcagtaactgatccaaatacatttccagagttactttagctttcacagtgttggccagcacaatgtgttttttgtttgtttgtttgcttgcttccttgttttttaattgagaacattcccatagttgactatttcaatatttaattctccaatcttgtatttttggtttatcttgataaacatcaaataaggtggaggcagtttacactgaatagacttaagaagctgatcttcacaagaaagttcagatgcttcattttaccacaatttctccactgcttagttttattaca

SEQ ID NO: 189539 - DNA, 551 bp, Homo sapiens
tggcaagcaataataatagctaccacttatttatcaagtgtttactaatgtactaagcattgccatatatggtttattacttctatcctatttagtattcaaatcaatatgatgtctatttttgttctgttttaaaaataaagaagctaacatgtccaagccacatatttagtaagtattggaactacatcaaaacaagaaagaaacatttcaatggtttatcctactgtctacttcctaaaggaaaattataaatttacagtaactgatccaaatayatttccagagttactttagctttcacagtgttggccagcacaatgtgttttttgtttgtttgtttgcttgcttccttgttttttaattgagaacattcccatagttgactatttcaatatttaattctccaatcttgtatttttggtttatcttgataaacatcaaataaggtggaggcagtttacactgaatagacttaagaagctgatcttcacaagaaagttcagatgcttcattttaccacaatttctccactgcttagttttattaca

SEQ ID NO: 189540 - DNA, 381 bp, Homo sapiens
agaacctaaataaatgctattcatctattcagagctgtttcaaaaaattaagtraatgttttcttcagtattctcagtcaaatcttgcttcatacttattataaataccctgaaggagtcataccaatgtgttctctgtaaatgccatgaacaacactttgtttttgtataacggttttcatgactattgtattaatagcacattcaataatatttcaataggtcaaaattatgtcatatgttttcttacaaatttttgtcattttttagaattaatgctacagcccagaaaataaatattattatgaaagcttgtttgtaaaaaatttcagtaattttatatctttttggtaagattagtggcttctattgtatatattt

SEQ ID NO: 189541 - DNA, 381 bp, Homo sapiens
agaacctaaataaatgctattcatctattcagagctgtttcaaaaaattaagtgaatgttttcttcagtattctcagtcaaatcttgcttcatacttattataaataccctgaaggagtcataccaatgtgttctctgtaaatgccatgaacaacactttgtttttgtataacggttttcatgactattgtattaatagcacattyaataatatttcaataggtcaaaattatgtcatatgttttcttacaaatttttgtcattttttagaattaatgctacagcccagaaaataaatattattatgaaagcttgtttgtaaaaaatttcagtaattttatatctttttggtaagattagtggcttctattgtatatattt

SEQ ID NO: 189542 - DNA, 587 bp, Homo sapiens
ctttaaacatttttagataaatagtctggcctatgcagaacaaaatgaaatggtgataatgaacaggatagtgaagttttgtactgacataaatggcgagttgattaatgcttaggatagtgtgaaagaagaactgaatgaaaaatgmaaatcgaaagaagaaatacccagacagaccctttcctaaaacatgcatcataaaatatttaaaagcatctgctttaatgcatgggctgagtcaaagtaaggcaaattttcagatatctagaagagcaaaaaaagtctgaatccagaggtgtgagtgtctcatctggcatttgccctgcggtgtctcccaggacctactggcccagacccatgagcacctaattcaggaaacagagactgatgcccatgcagggaggaatataggctaaaatgcctcctgcataaatctaggatttctaaaaagaagcacgttaagtgcctgggctaggaaaatcccacccccataagaaagtgaaaatatgtgcttgtcttggtcccaatagggtagacaaaaaaatgaaaaataaaaaacgtatgataatttctaaatacaaaacaat

SEQ ID NO: 189543 - DNA, 587 bp, Homo sapiens
ctttaaacatttttagataaatagtctggcctatgcagaacaaaatgaaatggtgataatgaacaggatagtgaagttttgtactgacataaatggcgagttgattaatgcttaggatagtgtgaaagaagaactgaatgaaaaatgcaaatcgaaagaagaaatacccagacagaccctttcctaaaacatgcatcataaaatatttaaaagcatctgctttaatgcatgggctgagtcaaagtaaggcaaattttcagatatctagaagagcaaaaaaagtctgaatccagaggtgtgagtgtctcatctggcatttgccctgcggtgtctcccaggacctactggcccagacccatgagcacctaattcaggaaacagagactgatgcccatgcaggraggaatataggctaaaatgcctcctgcataaatctaggatttctaaaaagaagcacgttaagtgcctgggctaggaaaatcccacccccataagaaagtgaaaatatgtgcttgtcttggtcccaatagggtagacaaaaaaatgaaaaataaaaaacgtatgataatttctaaatacaaaacaat

SEQ ID NO: 189544 - DNA, 569 bp, Homo sapiens
ggtatcccgtaatgattcaaagaggatcgtttgtgtgaaggtagggccaaggatctgagagtcagtgtgatgggtaatatctgtggccatggcaagttctttcttcagacagtttagccagttcagcttgaggatgctgttggctctttgtatagaactttatcactgaggatggtaagtccagtggaatatttggctggtgtgtgtaacctttcctatttcctgaataattttgccagtgaaatgtgatcctctgtcactagaggcagtagaggggataacccatgtggggaagattcactcttaataaaccttggcaaccgatgtccttgaggagtttcaacagggaaagcctcccattctattttccagtgaaggaagcctattttccagtgaaggaaggatgtagagggagccacttcccytttttgccccacctttatgctttttggaggattatgttgttggtagatgcagcaaatggcaacagcttggtccaaataaaatctaaagagtccaagccatattgttttgtttaatatatactacatgttatcctttctgtggta

SEQ ID NO: 189545 - DNA, 385 bp, Homo sapiens
tagaggattaggagagactccaccacctatgtcctcacagttaattatcgatttgtgtcasttgcccattttctcacttcctgtttgtgtgtcaaggagtattaataaatctttgcctatttaaagatattagccttggattttcaaatattgcatattttgacatgtaaaaatttgttagttttattttttcaaccgatctgacctgtatagttgggcttgaggaagcttcctcattctacatgttactatggattttctaatattaacacagggttgtattttttccatataactttctattgaatttctttttccatatgataggtggtgaaggtttagcccagtaaagcagagaggttaagaggttagattgggggctctg

SEQ ID NO: 189546 - DNA, 357 bp, Homo sapiens
gactccaccacctatgtcctcacagttaattatcgatttgtgtcagttgcccattttctcacttcctgtttgtgtgtcaaggrgtattaataaatctttgcctatttaaagatattagccttggattttcaaatattgcatattttgacatgtaaaaatttgttagttttattttttcaaccgatctgacctgtatagttgggcttgaggaagcttcctcattctacatgttactatggattttctaatattaacacagggttgtattttttccatataactttctattgaatttctttttccatatgataggtggtgaaggtttagcccagtaaagcagagaggttaagaggttag

SEQ ID NO: 189547 - DNA, 385 bp, Homo sapiens
tagaggattaggagagactccaccacctatgtcctcacagttaattatcgatttgtgtcagttgcccattttctcacttcctgtttgtgtgtcaaggagtattaataaatctttgcctatttaaagataytagccttggattttcaaatattgcatattttgacatgtaaaaatttgttagttttattttttcaaccgatctgacctgtatagttgggcttgaggaagcttcctcattctacatgttactatggattttctaatattaacacagggttgtattttttccatataactttctattgaatttctttttccatatgataggtggtgaaggtttagcccagtaaagcagagaggttaagaggttagattgggggctctg

SEQ ID NO: 189548 - DNA, 537 bp, Homo sapiens
ctatctcaaagagatatgtatacttacatgttcattgcagtgttatgtacacagccaagatatggaaactacctgtgtccattgacagatggatgttttaaatgtattacacacacacacacacacacacaaggaatatcatttagcctttaaaaatgaggaaatactgccatttgtaacaaaatggacaaacctggagtttattatggtaagtaaaataagccaggaacacacacacacaaatatcctgcatgatttcacttatatgcatactaagaaaatgtcaaactcatggtaacagagtaaaatagtgcttaccagggcctgggagttgggggaaaagaaaaaatgtttgtcagaargtacaaactttcagttataagatgaataagttctggagatctaatgtacagcatagtgactaaagtcaataataatgtatacttgaaatttgctgaaagagtagatctcaagtgttctccaccacacaaacacaaataaaaaggtaaccaggtgaggtgatgaatatgttagctt

SEQ ID NO: 189549 - DNA, 385 bp, Homo sapiens
tagaggattaggagagactccaccacctatgtcctcacagttaattatcgatttgtgtcagttgcccattttctcacttcctgtttgtgtgtcaaggagtattaataaatctttgcctatttaaagatattagccttggattttcaaatattgcatattttgacatgtaaaaatttgttagttttattttttcaaccgatctgacctgtatagttgggcttgaggaagcttcctcattstacatgttactatggattttctaatattaacacagggttgtattttttccatataactttctattgaatttctttttccatatgataggtggtgaaggtttagcccagtaaagcagagaggttaagaggttagattgggggctctg

SEQ ID NO: 189550 - DNA, 537 bp, Homo sapiens
ctatctcaaagagatatgtatacttacatgttcattgcagtgttatgtacacagccaagatatggaaactacctgtgtccattgacagatggatgttttaaatgtattacacacacacacacacacacacaaggaatatcatttagcctttaaaaatgaggaaatactgccatttgtaacaaaatggacaaacctggagtttattatggtaagtaaaataagccaggaacacacacacacaaatatcctgcatgatttcacttatatgcatactaagaaaatgtcaaactcatggtaacagagtaaaatagtgcttaccagggcctgggagttgggggaaaagaaaaaatgtttgtcagaaagtacaaactttcagttataagatgaataagttctggagatctaatgtacagcatagtgactaaagtcaataataatgtatacwtgaaatttgctgaaagagtagatctcaagtgttctccaccacacaaacacaaataaaaaggtaaccaggtgaggtgatgaatatgttagctt

SEQ ID NO: 189551 - DNA, 385 bp, Homo sapiens
acagaagaaaactaaagataatatttgactatttatagttgtacagttatttgtaccttatttggtaccaaagttgtacgttattaggtctatcccactggaaagtcttcagttrtatgattatgtgtgttggctacttctgattggttgaacttaagttctgtttttctttaatatagaaattgataatagctcaagtttcccttatatctgtagatcaaacaaggtttagatcacttatgatgcctaactggttttgtctgctcagaaattcttcaggcctggactccattttaatttactttaatgattgttactttaaatttggattaaacagtggattcatatgtactgagtgaaaaaaaaatggaaatagatgttataa

SEQ ID NO: 189552 - DNA, 494 bp, Homo sapiens
gggctgcagatgattggttactcacctaagaagaggggagcaaggcatccctagtttcttctttttcctagtaaatacctgaggtacatgagggagaggagaaaagtgtcctctttctttcttctgttcttatatccctgagtcctggtgatcttggcaggttaccacccatgggtgccagtgcagctttcacctatgttaacagggggcttacagggtgcgagttatccaccattacccatgcgctgcttgtcccactgttgtcgataacttttgagttctctrgatttcatacatgccgtggatactagaatgacctctatccacgagatggaagggggcctaatcggcagcaatgagtcatgctaacctaaagctttggagctgggtcttccttaaacaagggagagaaaaggctgtcttgggaattggggtcctggcctaataagaaaaaacaaaaacaaaaaccaacaaaaaacctctcataaaagtta

SEQ ID NO: 189553 - DNA, 568 bp, Homo sapiens
agaatcgcttgaaccggggagttggaggttgcagtgagccaagatcgcgccacaggactccagcctagcgacagagccagactccgtctcaaaacaaacaaaaaacaaaaaaaattcctcactcatctcactcatgtaatcatgacaataacattaattgtattatccctacattacagatgacaggtgacaaaaatatgcagagaggggttaaactgcataacattactcagagaatgcattctttttattccataggttttttgtattacagtactacattcacagaggscttccattggaaataacttataggaattattgtaggtctctttgcactttcttcagctcttggtttaggtctcaaattgtgagtgatttctctctttagtgaagttgtaatgcaattcattaccatagcagaaagcacagaaaatattacctatttattaactggaaatgcactcacatgttgtattagtccattctcatgctgctatgaagaaatatccaagactgggtaatttataaagaaaagaggtttaattgattcacagttccacatggc

SEQ ID NO: 189554 - DNA, 604 bp, Homo sapiens
aactaagacagggtgactggctaagtccacaacccattagaaacccagaaataatcaaatcatggtgagtagtaataacacttatttataatactatacggtataaagacaagaaccaattatgttgagtagctgtaacaaatagctctatcattcgtaataactttttctgtaataaaactgaattgtaacatgatcatactgcaatatgacattacactagcattgttggtaagattcaactatcttatgtagagaagttatataatgcttatattgataatcaaatgtattaagatattgagttaaagcctcttcagaatgtaatctgggtgaataataaatggcctgagaaaacagaattcagctaaccattatctaatttcaatgctaaatagttctgcacagatttatcaaaaagtaaaaataaaagcagattgagaggaggaatgartaattttgtttgtacaaaatattaaagtgtatgtaatgggcttgtaggatgcattagtaatttttaaaaatcaatctttaccctacactgtgtccataaaatgctaggcatattcatgttaatattactgttgttactgtcatataaatg

SEQ ID NO: 189555 - DNA, 604 bp, Homo sapiens
aactaagacagggtgactggctaagtccacaacccattagaaacccagaaataatcaaatcatggtgagtagtaataacacttatttataatactatacggtataaagacaagaaccaattatgttgagtagctgtaacaaatagctctatcattcgtaataactttttctgtaataaaactgaattgtaacatgatcatactgcaatatgacattacactagcattgttggtaagattcaactatcttatgtagagaagttatataatgcttatattgataatcaaatgtattaagatattgagttaaagcctcttcagaatgtaatctgggtgaataataaatggcctgagaaaacagaattcagctaaccattatctaatttcaatgctaaatagttctgcacagatttatcaaaaagtaaaaataaaagcagattgagaggaggaatgaataattttgtttgtacaaaatattaaagtgtatgyaatgggcttgtaggatgcattagtaatttttaaaaatcaatctttaccctacactgtgtccataaaatgctaggcatattcatgttaatattactgttgttactgtcatataaatg

SEQ ID NO: 189556 - DNA, 427 bp, Homo sapiens
gactgaagtgtatctgcatgtgattctgctgtgatggacacttgtaagtttgtkcctggagtctcctggactttgccctgagaatctttttcctttgttgatacgactctgcatccttttgttttaataaactgtaaacatgagtataattgcttctctgagttctgagagttttttaaataaataatcaaagctgaagagcaatggagacccccaccaaaacatctttacacatttcaattttgtattgaagtaaattttattttcttttttatacctcccatatatattctatttttctcattattatttattttatcccaaatcttttatctgtgatcattttcctttgtttgaaatttgtcttttgacgtttctttggaaggtgcttttggatgataaattttctgttattctttgtctaaaa

SEQ ID NO: 189557 - DNA, 525 bp, Homo sapiens
ctttaggagtaattaggccatgacgactctgtactcatagatgggattagtgcattacaaaagggctgaagggaactagctaatgtaaggacacagcattcaagttaccattttagaagcagaaactgggacctcacttggtgccaaamctgccagaaccatggttttgaacttttcagcctcctggactgtgagaaacaagtttctgttcttatcagtctcagctattttgttacagaagcacaagcgaactgagacctgagatgggagtgtttatgtgctaggtatggagctaatttctgaataaataaagatgaatacattctatgacctcatcatctagtgcctgttacagtcatgcagtggatattttttcttgccttcttattactcatttttgctctcctcactaaatattgaggaaaacatgaatgcatcatcagtttttccactgatacaactgtttaagaagtacatatgacattatattttttctttctgtattctgtagacttacctgtaaag

SEQ ID NO: 189558 - DNA, 567 bp, Homo sapiens
gctcgctcacttccttgaagctttctttggcccttggttcaaatttaatcatctcaatgaggtggccttccctgaccacctgtttgcttctgcatccctcatcttctgccaatatttccttctgctccccattttatttcacagcacttaacacaatttaacacaccatatattatattttatttattatgattaatgtctctctatccccgtgctctatctggatagagatatttgttttgttcactgataaatcccaagatcctagcacagtgctgagtgcatgtaggcaatcaataaattgaatcacatgaatacattttaggctagttattgactgtgatacattaatgtagaagcttcttaagtygtattgatagtacaaacgcctcttgaatttccacaatttattgatcttcagtttttggtattttgttcattttttcacaaatattttagagagaagctgagaatggttgaattgggtaatgttagatgccattttataccaggtatgttaggtagtctttaaatgtgataaatcactaaccaaaacactgacaaaaa

SEQ ID NO: 189559 - DNA, 560 bp, Homo sapiens
ctcttgtctataagctttggtgttaattaaaaggaacaacttggaagctcccaatgattgcagggaagtatttgtgtgtaacaatcttcaggcgggaaaagtttccaagaagttgtcttaaccaactaaaacctcatcttcctggtcttcatctgttcagcagttgcctatccaaagcctctgatttatctgactgttctactgatcaagggagcttaagaggcccatatgaataccatgttttagcagtttttttctcattaagtcatctggggagattcagctggtcacctcccaccacgagaaactttctaccatagcgcctcactcatctgtttctaacaagtgatgctcttgcgaacagtctctgagttttytaggcttagagggattgcgctggaaactaaattgggaactctcccaataacgctctctggataccacgacttagcttcagagggaggttctaggaaaagcaaaaaaaaaaaaaaaaaaaaaaaaagaaaaaagagaaaaaagtctttgtcatactcccaagcacaaagttacggtggttgaat

SEQ ID NO: 189560 - DNA, 560 bp, Homo sapiens
ctcttgtctataagctttggtgttaattaaaaggaacaacttggaagctcccaatgattgcagggaagtatttgtgtgtaacaatcttcaggcgggaaaagtttccaagaagttgtcttaaccaactaaaacctcatcttcctggtcttcatctgttcagcagttgcctatccaaagcctctgatttatctgactgttctactgatcaagggagcttaagaggcccatatgaataccatgttttagcagtttttttctcattaagtcatctggggagattcagctggtcacctcccaccacgagaaactttctaccatagcgcctcactcatctgtttctaacaagtgatgctcttgcgaacagtctctgagttttctaggcttagagggattgcgctggaaactaaattgggaactctcccaataacgctctctggataccmcgacttagcttcagagggaggttctaggaaaagcaaaaaaaaaaaaaaaaaaaaaaaaagaaaaaagagaaaaaagtctttgtcatactcccaagcacaaagttacggtggttgaat

SEQ ID NO: 189561 - DNA, 544 bp, Homo sapiens
ggtggctcatcatttcactcaaccagcggactattagaattctgggtattaaatagcgggtgccacaggagcacataggaagagcatccaacctactttggagccctraggagtttttagagaaagctggagcccgaaggaccagtagtaggaggtagccagaccaaaagggaggaaggagtgggaaagaaagagcactgtagccagagaacatattatgttcaaaggccatgaacccagggaaaacatggctcctgggggagccacaggaagcttagtataactagggaagtggcaagaattgagagggaacaggggctagatcataaagcatcagcctcaggatgtagggcgctatcctaagggcaacatctattgcagcgttttaagtggggaagtgaaatgcccttttggaagaccaaccactgtggctacaaggttgagaagcggtggaatggactaacaaagaagaccagttaggaaagtgttgcaatagtccaggagaaaggattgttgcagtaatccaggaagcctgaactggagt

SEQ ID NO: 189562 - DNA, 544 bp, Homo sapiens
ggtggctcatcatttcactcaaccagcggactattagaattctgggtattaaatagcgggtgccacaggagcacataggaagagcatccaacctactttggagccctgaggagtttttagagaaagctggagcccgaaggaccagtagtaggaggtagccagaccaaaagggaggaaggagtgggaaagaaagagmactgtagccagagaacatattatgttcaaaggccatgaacccagggaaaacatggctcctgggggagccacaggaagcttagtataactagggaagtggcaagaattgagagggaacaggggctagatcataaagcatcagcctcaggatgtagggcgctatcctaagggcaacatctattgcagcgttttaagtggggaagtgaaatgcccttttggaagaccaaccactgtggctacaaggttgagaagcggtggaatggactaacaaagaagaccagttaggaaagtgttgcaatagtccaggagaaaggattgttgcagtaatccaggaagcctgaactggagt

SEQ ID NO: 189563 - DNA, 544 bp, Homo sapiens
ggtggctcatcatttcactcaaccagcggactattagaattctgggtattaaatagcgggtgccacaggagcacataggaagagcatccaacctactttggagccctgaggagtttttagagaaagctggagcccgaaggaccagtagtaggaggtagccagaccaaaagggaggaaggagtgggaaagaaagagcactgtagccagagaacatattatgttcaaaggccatgaacccasggaaaacatggctcctgggggagccacaggaagcttagtataactagggaagtggcaagaattgagagggaacaggggctagatcataaagcatcagcctcaggatgtagggcgctatcctaagggcaacatctattgcagcgttttaagtggggaagtgaaatgcccttttggaagaccaaccactgtggctacaaggttgagaagcggtggaatggactaacaaagaagaccagttaggaaagtgttgcaatagtccaggagaaaggattgttgcagtaatccaggaagcctgaactggagt

SEQ ID NO: 189564 - DNA, 658 bp, Homo sapiens
acatattatttggtgcattgatacctacatgtatgttcattaaaaattagggcctaatacatttcttccatttattgaagaaatagtggctttttcaaagacagttaaactgaaaaacagagataaaagcattcttatttctcaaggatggcaaaamttgttttgaagagtcagcagcatctagcttccaaaagaaaatgggattgacttgtatgtgtcatgccctggaggttttctgtgtgattttggaggaatctctcgatctctctgtttcatctgcaaatgtgctaacagctttggaatgagtacttgaacaagcatggagtaatcactggctaaataaaagaggttttgatgaatgctctatatttccagccaaactgaaccactcaatgtttctataaacatcacacattttcctgactccacactttttcttatgccatttctctcactaggaatgccacggtcctgtcttgttcttattttacctgttctccaaggacaaggtcaattgtcttttgtgttttcagcttttccgccttctttacgtggaagtactattccttcttccaaacctgcaaagatagctcttgttctctatctcttatagatttgtcgaataacatttttaatgtctttaattaaatgacttatg

SEQ ID NO: 189565 - DNA, 658 bp, Homo sapiens
acatattatttggtgcattgatacctacatgtatgttcattaaaaattagggcctaatacatttcttccatttattgaagaaatagtggctttttcaaagacagttaaactgaaaaacagagataaaagcattcttatttctcaaggatggcaaaacttgttttgaagagtcagcagcatctagcttccaaaagaaaatgggattgacttgtatgtgtcatgccctggaggttttctgtgtgattttggaggaayctctcgatctctctgtttcatctgcaaatgtgctaacagctttggaatgagtacttgaacaagcatggagtaatcactggctaaataaaagaggttttgatgaatgctctatatttccagccaaactgaaccactcaatgtttctataaacatcacacattttcctgactccacactttttcttatgccatttctctcactaggaatgccacggtcctgtcttgttcttattttacctgttctccaaggacaaggtcaattgtcttttgtgttttcagcttttccgccttctttacgtggaagtactattccttcttccaaacctgcaaagatagctcttgttctctatctcttatagatttgtcgaataacatttttaatgtctttaattaaatgacttatg

SEQ ID NO: 189566 - DNA, 658 bp, Homo sapiens
acatattatttggtgcattgatacctacatgtatgttcattaaaaattagggcctaatacatttcttccatttattgaagaaatagtggctttttcaaagacagttaaactgaaaaacagagataaaagcattcttatttctcaaggatggcaaaacttgttttgaagagtcagcagcatctagcttccaaaagaaaatgggattgacttgtatgtgtcatgccctggaggttttctgtgtgattttggaggaatctctcgatctctctgtttcatctgyaaatgtgctaacagctttggaatgagtacttgaacaagcatggagtaatcactggctaaataaaagaggttttgatgaatgctctatatttccagccaaactgaaccactcaatgtttctataaacatcacacattttcctgactccacactttttcttatgccatttctctcactaggaatgccacggtcctgtcttgttcttattttacctgttctccaaggacaaggtcaattgtcttttgtgttttcagcttttccgccttctttacgtggaagtactattccttcttccaaacctgcaaagatagctcttgttctctatctcttatagatttgtcgaataacatttttaatgtctttaattaaatgacttatg

SEQ ID NO: 189567 - DNA, 658 bp, Homo sapiens
acatattatttggtgcattgatacctacatgtatgttcattaaaaattagggcctaatacatttcttccatttattgaagaaatagtggctttttcaaagacagttaaactgaaaaacagagataaaagcattcttatttctcaaggatggcaaaacttgttttgaagagtcagcagcatctagcttccaaaagaaaatgggattgacttgtatgtgtcatgccctggaggttttctgtgtgattttggaggaatctctcgatctctctgtttcatctgcaaatgtgctaacagctttggaatgagtacttgaacaagcatggagtaatcactggctaaataaaagaggttttgatgaatgctctatatttccagccaaactgaaccactcaatgtttctataaacatcacacattttcctgactccacactttttcttatgccatttctctcactaggaatgccacggtcctgtcttgttcttattttacctgttctccaaggacaaggtcaattgtcttttgtgttttcagcttttccgccttctttacstggaagtactattccttcttccaaacctgcaaagatagctcttgttctctatctcttatagatttgtcgaataacatttttaatgtctttaattaaatgacttatg

SEQ ID NO: 189568 - DNA, 580 bp, Homo sapiens
aaaaacaaaaactgaagtttgtagaagaaattctgcaacatcaactcctgcaaacctgccctatagttttcagacttgcctgccctacagattttgaactcgtcagtcctcacaactgcataaattagtttaaaaaataaatctttcgggytccagtaggatgaaaatgtttgctttgttcaccgccatatcctcactgtcaagaacaatgcccgacacataaaagagattcaataaatatgttttcagtgaatgaagacataaaaagacaactttatgaaaaatgccatattaactaggttatgaaaatttactagactatttactaggtttttgctaaatttggctatttatagttttgtagtatatagctatggactgcaaacatatagctatggactgcaacatgcagccatttattggcaattgatgcacaggccctcacattctttggcttttgtgctgacatgtggaaaaaaaattccagtcctgccattctgtgtgttcccataagcaagtcacttctgttctcttcaccttatcttgttcaactgtattattaagattttgatgttatgat

SEQ ID NO: 189569 - DNA, 580 bp, Homo sapiens
aaaaacaaaaactgaagtttgtagaagaaattctgcaacatcaactcctgcaaacctgccctatagttttcagacttgcctgccctacagattttgaactcgtcagtcctcacaactgcataaattagtttaaaaaataaatctttcgggctccagtaggaygaaaatgtttgctttgttcaccgccatatcctcactgtcaagaacaatgcccgacacataaaagagattcaataaatatgttttcagtgaatgaagacataaaaagacaactttatgaaaaatgccatattaactaggttatgaaaatttactagactatttactaggtttttgctaaatttggctatttatagttttgtagtatatagctatggactgcaaacatatagctatggactgcaacatgcagccatttattggcaattgatgcacaggccctcacattctttggcttttgtgctgacatgtggaaaaaaaattccagtcctgccattctgtgtgttcccataagcaagtcacttctgttctcttcaccttatcttgttcaactgtattattaagattttgatgttatgat

SEQ ID NO: 189570 - DNA, 580 bp, Homo sapiens
aaaaacaaaaactgaagtttgtagaagaaattctgcaacatcaactcctgcaaacctgccctatagttttcagacttgcctgccctacagattttgaactcgtcagtcctcacaactgcataaattagtttaaaaaataaatctttcgggctccagtaggatgaaaatgtttgctttgttcaccgccatatcctcactgtcaagaacaatgcccgacacataaaagagattcaataaatatgttttcagtgaatgaagacataaaaagacaactttatgaaaaatgccatattaactaggttatgaaaatttactagactatttactaggtttttgctaaatttggctatttatagttttgtagtatatagctatggactgcaaacatatagctatggactgcaacatgcagccatttattggyaattgatgcacaggccctcacattctttggcttttgtgctgacatgtggaaaaaaaattccagtcctgccattctgtgtgttcccataagcaagtcacttctgttctcttcaccttatcttgttcaactgtattattaagattttgatgttatgat

SEQ ID NO: 189571 - DNA, 438 bp, Homo sapiens
atatactgatttgacatttgtatgtcttattttaaaaaatgagtattcaggtcctttttccatttttaattgggttatttgttattttgctatttgatttctatgaattccttatatatttcagatattaattccttatcagatatattgtttgctaatattttctcccattctatawgtcgcctttcattttgtttcttcctttgacatacagaaactttttagcttaatgtagtttcacttgtttattttgcttatattgccttgcttttggaattatatttataaaataatttccaagctcaatctcaaggaatttttctttcacttattttttctgtagttttatgatttccagtcttacatctaagtctttaattcattgatatgttttgcctgtgtttccatttaaatttcatcttgaattgtaattcccat

SEQ ID NO: 189572 - DNA, 409 bp, Homo sapiens
aaagaaatcaaggtcgtttcatttacaagagagatgaaacaacatcaagcaaaatgatgaaagggtgaaggcacaccrtactcagacactttttgctgtctgcctctgagcattgattttcttatgtatgaaataaagtggttggctaacacttattatgttatgtataaataatacacttattagtttgacaacaatgtgaatactgtactttacaaaaaagtaaaatacttccaacttaaaccatagtaaaaatggtgatgttcctcctttcttcccttatttcttctttccatgtgtaggaaaagacagctccaggtcatggaacatctcgcttaaatttaaactttcaaaaccaagcataatgatggcacatggcaagttctcaaatgttggttgaattaatcta

SEQ ID NO: 189573 - DNA, 403 bp, Homo sapiens
acctaacatgatgtgacattaaatatatggtacaaaataatatagacactatgctcgcattttgtctatatgtgtgtacagatgtatgtgtgcagattttggtgyatagtactataggtgggtatgtaccaagcatttactctttgtaccttaggttgtgctatatcaattttaattttgtttgaccattgttacattctaattttgccataatcaatatatattactttgatattttaaaaacctatgaatttccaagagaaatggaactagataggtttcagaaaaaaaaaaaagtcaattatgattaagttatcatgataatcaaagaataatattataactttattttggccatattttccaaacagtgtaattttattactgggtgttagtaatgtga

SEQ ID NO: 189574 - DNA, 479 bp, Homo sapiens
gcactcattttttttttgttacctctgttccccccttatttttcawtcctttctttttaaatttcaacttttttttatattccaggggtacatgtgcaggtttgttacaaagacatatcgtgtgatgctcaggtttggagtatgatcgaacccacccccccaggaagtgagctttgtacccaataagtagtttttcaatctctcctcttgtattccccagtatcagttgtcccatctttataaccacgtataaccaatgtttagttcccacttataagtgagaacacatggtatttggttttctgtttctgctttagttcacttagaataatggcctctggctgcacccgtgttgctacaaataacacagttttgttcttctttatggctgtatagtattacatgttgtgtaggtaccacattttgtttatccaatccactgctgatgggcacttggtttggttccatgtctttgctat

SEQ ID NO: 189575 - DNA, 479 bp, Homo sapiens
gcactcattttttttttgttacctctgttccccccttatttttcaatcctttctttttaaatttcaacttttttttatattccaggggtacatgtgcaggtttgttacaaagacatatcgtgtgatgctcaggtttggagtatgatcgaacccacccccccaggaagtgagctttgtacccaataagtagtttttcaatctctcctcttgtattccccagtatcagttgtcccatctttataaccacgtataaccaatgtttagttcccacttataagtgagaacacatggtatttggttttctgtttctgctttarttcacttagaataatggcctctggctgcacccgtgttgctacaaataacacagttttgttcttctttatggctgtatagtattacatgttgtgtaggtaccacattttgtttatccaatccactgctgatgggcacttggtttggttccatgtctttgctat

SEQ ID NO: 189576 - DNA, 343 bp, Homo sapiens
gaattctgggtttctacaaaatgtatgtctactctaatgtttctatcaccatatgtaaattactgtggattccacactaaactctcacctctccgaaagttttactgcatttggctcttttaatataattccaattcacttaaatgttatttcctcaraatttaatgtgatctatttgtctttcaggcaaaatctcattcactgtttttttctacataatgaatgttcagacatatggtagcctgttaagtgacaagtatattaaatttcagctttttatctgtcatttacatatatatatatttattgggatttgcaaccagatttgtgagtttgtcataaa

SEQ ID NO: 189577 - DNA, 479 bp, Homo sapiens
tataaagtagagtgatttccaagacatattgttcagggaaaaagtgaagtgttaaagaatatctgcagtatgatactcttcatgtgaaaaagaaaatcgaatataaaatattgttcatttgagcagaaagaaatgcatccagaaagacaaagaaaagtattgtgtaatctcacttgtatgcgaaatctaacaacaaaaaaaatcaaatatacagagayagagaacccaacagtggttaccaggggtgggtgtttgggaaggaaatgagaagatataagtcagaagttacaaagtagcagaaacatatgacagacaagattagagatctaatgtacaacatgaggaatataggtaataaaattgtactatatttgagattcatgctcaatgattagattttagctgctcttgccacatgtacaaaaaaaatggggaactatgtcagatggtaatatacgttgaattgtttcagtataata

SEQ ID NO: 189578 - DNA, 589 bp, Homo sapiens
aatttctgggacactaatacgtgctattactattattactttttttttttgagacggagtctcccactgtcgcccaggctggagtgcagtgatgtggtctcagtccactgcaacctctgcctttcaggttcaagcaattctcgtgcctcagcctcctgagtagcaggcattacaggcgcccaccaccaaacctggctaatttttgtgttttcagtagagatggggtttcatcatattggtcaggctagtcttgaactcctgacttcaagtgatctgtccaatttggcctcccaaagtgctgagattacagaggtgagccaccaagccccacccatgctacttaatcctatcaagttctgcaaattttattttaaaaaatataatcaatttacaatcctgctatgatttaaygtcatttaccagatccccaacatttggtattcttttaatttttgccaaccaggttttcttaaaagatcttctatctcattattatattaatatcaatttctgttactgtaaatttactaattctgttttaattacatctaaatttttctagtttagtttattttctcatcatattcat

SEQ ID NO: 189579 - DNA, 595 bp, Homo sapiens
atatatgtatatgtatatgtatgtgtatacgtatatgtatatgtatatataaaattgcctacttgacatctcaactgggatatgtcataggcatctcaactgggacatgtcataggcatctcaaagttaatatgtccaatatttgaatttttattcttctgtaggacacttttccgtcccaggcttagtcatatccataaagggtgccagtatccccagctgcttaaggcaaaattcttagcgcctttcttggctccctgccttcactgtctcctcacatcccacccatcagcagttcttgacttggtcattgccactctagtacaggaaaaatttaagtaaggaaatcctaaactacgacagagagagtaaaatggagtaacgagggcatgtcttacggcttgataactgtacagagaggacgagggagagacaagagttgaaggtattagttgcatgggcggatacaagggtcgcccaaatgaatactaygggagaagccgattcgggcacattgcatgtgaagaatatgagtgacctacagacacaggcatttatcaggcagttatacagccatgcctgctactaaaaggga

SEQ ID NO: 189580 - DNA, 511 bp, Homo sapiens
ctttacttttgttacctaggatctgctcagttatactggggaaactgaagaaacatagctgattcagttagtcacaaaatgccaacaagattcttaactctaggcccggtgcagtggctcaygcctgtaatccccgcactttaggaggctgaggcgggcagatcacttgaggtcaggagttcgagactagcctggccaacgtggtaaaacctcatctatactaaaaatacaaaaattagccaggcaggctacaggctcacacctgtagtcccagctacttcggaggctgaggcacaagaatcacttaaacctgggaggcagaggttgcagtgagctgagatcactccactgcactccagcctgggtaacagagggagacttggtttaaaaaaaaaaaattcttaacttttggattctctttgtcctagcagtctcatctgactcatgagaatcttaactagtttcagataaagatgagctatcaaccacaggtagatttaatagaaaaaat

SEQ ID NO: 189581 - DNA, 511 bp, Homo sapiens
ctttacttttgttacctaggatctgctcagttatactggggaaactgaagaaacatagctgattcagttagtcacaaaatgccaacaagattcttaactctaggcccggtgcagtggctcacgcctgtaatccccgcactttaggaggctgaggcgggcagatcacttgaggtcaggagttcgagactagcctggccaacgtggtaaaacctcatctatactaaaaayacaaaaattagccaggcaggctacaggctcacacctgtagtcccagctacttcggaggctgaggcacaagaatcacttaaacctgggaggcagaggttgcagtgagctgagatcactccactgcactccagcctgggtaacagagggagacttggtttaaaaaaaaaaaattcttaacttttggattctctttgtcctagcagtctcatctgactcatgagaatcttaactagtttcagataaagatgagctatcaaccacaggtagatttaatagaaaaaat

SEQ ID NO: 189582 - DNA, 576 bp, Homo sapiens
ggaattctaaaagctggaaaagaaggcatgtgttatacccattgcctgcagcaaagacaagtgagggacaattcttttgttgtttgtttgttcttaacaattgtaacaaagtcaaattatttgatctcaggagtttttctttctargcaatagaatggttaaagatcatgaaatgagataatgtaaattagatacatgtaaatctagggagcgtgaccactacaaccagagattttgagttcttctaagttaatggcatgataatcaacatcctcaagaaggagcacagtagggacacacgctcttaaatgccagctgatgtgttattcttattattatcagtattcattattttggttgaaatggtcattagtttctccctataggtaaccctataattgttagcattagccacctgagctgtgtttaggggagattccagtgtgtttagttattcaggtaactgtgtcacaacagcacatttctaaggatgccagacttctctgtgtattcctcctagcaaagtcagctgcagatggaggtaggttaactttacagaatacacaaagccctgct

SEQ ID NO: 189583 - DNA, 576 bp, Homo sapiens
ggaattctaaaagctggaaaagaaggcatgtgttatacccattgcctgcagcaaagacaagtgagggacaattcttttgttgtttgtttgttcttaacaattgtaacaaagtcaaattatttgatctcaggagtttttctttctaagcaatagaatggttaaagatcatgaaatgagataatgtaaattagatacatgtaaatctagggagcgtgaccactacaaccagagattttgagttcttctaagttaatggcatgataatcaacatcctcaagaaggagcacagtagggacacacrctcttaaatgccagctgatgtgttattcttattattatcagtattcattattttggttgaaatggtcattagtttctccctataggtaaccctataattgttagcattagccacctgagctgtgtttaggggagattccagtgtgtttagttattcaggtaactgtgtcacaacagcacatttctaaggatgccagacttctctgtgtattcctcctagcaaagtcagctgcagatggaggtaggttaactttacagaatacacaaagccctgct

SEQ ID NO: 189584 - DNA, 561 bp, Homo sapiens
ggagacacaaacttttatattattttccagcaccctactcagagcaatggaggctaacagcaccgggagaacgataayagaatgaacaagggccaacttccaactcacatctacatttttcatgtttcagtttggtttctgacttaaatgttaaggaagacaaagattttgttttgagcgatgactacactggttttaaaagtggaacactaggatggcccataaatatccttgagatcagaccatgtggatggtcatttgcctcttctacttactaattggaattttagtaaattaaattttcttcggaaatttattctttctggtcatagtgttagctaaaatacagataatacaactgttgttaaaatgttactgaaaaattaaatgtactgatgtaggtaaattggaaagtgcttcattaacagaacactctataggaagaaaatataattgctattcatgtcagtatttatatccagatataagaatttcaaaattcatattttggattttgtctctaagtaaatagaaatataatataatcaatagtatctttaa

SEQ ID NO: 189585 - DNA, 561 bp, Homo sapiens
ggagacacaaacttttatattattttccagcaccctactcagagcaatggaggctaacagcaccgggagaacgataacagaatgaacaagggccaacttccaactcacatctacatttttcatgtttcagtttggtttctgacttaaatgttaaggaagacaaagattttgttttgagcgatgactacactggttttaaaagtggaacactaggatggcccataaatatccttgagatcagaccatgtggatggtcatttgcctcttctacttactaattggaattttagtaaattaaattttcttcggaaatttattctttctggtcatagtgttagctaaaatacagataatamaactgttgttaaaatgttactgaaaaattaaatgtactgatgtaggtaaattggaaagtgcttcattaacagaacactctataggaagaaaatataattgctattcatgtcagtatttatatccagatataagaatttcaaaattcatattttggattttgtctctaagtaaatagaaatataatataatcaatagtatctttaa

SEQ ID NO: 189586 - DNA, 561 bp, Homo sapiens
ggagacacaaacttttatattattttccagcaccctactcagagcaatggaggctaacagcaccgggagaacgataacagaatgaacaagggccaacttccaactcacatctacatttttcatgtttcagtttggtttctgacttaaatgttaaggaagacaaagattttgttttgagcgatgactacactggttttaaaagtggaacactaggatggcccataaatatccttgagatcagaccatgtggatggtcatttgcctcttctacttactaattggaattttagtaaattaaattttcttcggaaatttattctttctggtcatagtgttagctaaaatacagataatacaactgtygttaaaatgttactgaaaaattaaatgtactgatgtaggtaaattggaaagtgcttcattaacagaacactctataggaagaaaatataattgctattcatgtcagtatttatatccagatataagaatttcaaaattcatattttggattttgtctctaagtaaatagaaatataatataatcaatagtatctttaa

SEQ ID NO: 189587 - DNA, 603 bp, Homo sapiens
atagccttgatcccaaagatctcttttttactctcattccataatccaggtgatccackgacatgctcaatcatatgttcatgaattaacagctaattgacttgatactggttagttaaaggaatggtcttcttttttttaattttattattattatactttaagttttagggtacatgtgcacaatgtgcaggtttgttacatatgtatacatgtgccatgttggtgtgctgcacccattaactcgtcatttagcaatgctatccctccccgctccctccaccccacaacggtccccaaagtgtgatgttccccttcctgtgtccatgtgttctcattgttcaattcccatctctatgagtgagaacatgcggtgtttggttttttgtaaaggaatggtcttctaacctgtgcatactttcagggggatagtgccctttccagaattaaggtatgtaaaacaatgattactgacaagtgagcactcttctttgccatttgcagagccaggctacccagcactgatttttgtgtgtgcatgtgtgcaattctttgtccatttctaagtcttgtagatcagatctttcacatcttacatgagaa

SEQ ID NO: 189588 - DNA, 603 bp, Homo sapiens
atagccttgatcccaaagatctcttttttactctcattccataatccaggtgatccacggacatgctcaatcatatrttcatgaattaacagctaattgacttgatactggttagttaaaggaatggtcttcttttttttaattttattattattatactttaagttttagggtacatgtgcacaatgtgcaggtttgttacatatgtatacatgtgccatgttggtgtgctgcacccattaactcgtcatttagcaatgctatccctccccgctccctccaccccacaacggtccccaaagtgtgatgttccccttcctgtgtccatgtgttctcattgttcaattcccatctctatgagtgagaacatgcggtgtttggttttttgtaaaggaatggtcttctaacctgtgcatactttcagggggatagtgccctttccagaattaaggtatgtaaaacaatgattactgacaagtgagcactcttctttgccatttgcagagccaggctacccagcactgatttttgtgtgtgcatgtgtgcaattctttgtccatttctaagtcttgtagatcagatctttcacatcttacatgagaa

SEQ ID NO: 189589 - DNA, 603 bp, Homo sapiens
atagccttgatcccaaagatctcttttttactctcattccataatccaggtgatccacggacatgctcaatcatatgttcatgaattaacagctaattgacttgatactggttagttaaaggaatggtcttcttttttttaattttattattattatactttaagttttagggtacatrtgcacaatgtgcaggtttgttacatatgtatacatgtgccatgttggtgtgctgcacccattaactcgtcatttagcaatgctatccctccccgctccctccaccccacaacggtccccaaagtgtgatgttccccttcctgtgtccatgtgttctcattgttcaattcccatctctatgagtgagaacatgcggtgtttggttttttgtaaaggaatggtcttctaacctgtgcatactttcagggggatagtgccctttccagaattaaggtatgtaaaacaatgattactgacaagtgagcactcttctttgccatttgcagagccaggctacccagcactgatttttgtgtgtgcatgtgtgcaattctttgtccatttctaagtcttgtagatcagatctttcacatcttacatgagaa

SEQ ID NO: 189590 - DNA, 215 bp, Homo sapiens
cctgtgcatactttcagggggatagtgccctttccagaattaaggtatgtaaaacaatgattactgacaagtgagcactcttctttgccatttgcagagccaggctaccsagcactgatttttgtgtgtgcatgtgtgcaattctttgtccatttctaagtcttgtagatcagatctttcacatcttacatgagaattctaaagagaaaaatgca

SEQ ID NO: 189591 - DNA, 460 bp, Homo sapiens
ctcaggtataatatttattccccttccccatcatgatttactctacaatttatagtcacacttgaactgccagttctaaatcaaagagcatttttgagatggtaacacaattctgtagaggactactaaatctctccctacagcatacttgaactttccaggactccttggggaagactcataagatgcaacaccgtggtattcaattcactcgtgtgaaaatattacratttttgctaattggaccattaaagcacaggtttcaataaaatctgaactattccttgaataaacttaagtatgataacttgaaataaatactttttcataccgtaccctgcaaaactgaacctatcatttcattcagccaggcaatagacagatgctagacatgaatgactaacacaaaccaatattggctatcttgtgcccactcactggactgaccaccaaaattaag

SEQ ID NO: 189592 - DNA, 575 bp, Homo sapiens
acacaatacacagagctcaaaccctcgaggagtgaatctgtgtcatgtcaccaagtaagctatgaaagmcagcagtctataaggaatctaggtttaagaagatctgtgaattgccaggagaccaacttcagtgttggaccctaaagtttgttcttcaaatcttccttttataagtcccccttagaaacagagtctcaccagcatcctgaaagagctgcttccagaacttacatgaagaagtgaatacaaacaatatgagtgctatactgtagtggattatataatatgccacttacctctcccttctttttccaggtgctgaagtatttatctcaggccactcttagctgccagtcctccttatgaattacctaaagctaagataattttttcatccaaggtcacactcccttgctggggaagcccacattcaattactggtcagtgtgggagtataaaagctggttctttcccttcaatttggtacaatgtgaggggccatctttgcttcagctcctcatataagttggctgagactttcatggaggtgatgttgtagcccagttgctttgtgt

SEQ ID NO: 189593 - DNA, 547 bp, Homo sapiens
ttcttcttcagcccttaaatatgtcatgccggaattacagaagaattacctgatggagcctcttgatctctttcgttactttccccaaaacaaacggagactctctctctctcctgagctacctggagccgggggaggagtgatacaagcaccccagtggycaccaccaccaggactgtgctgggtcagacccaaagctagcacagcactgggtctcacctaaggcacacagtaacaactctttcctggtctgtaaggtttccactgaaaaatctgatgctagttgtatttgagctccactgtatgttgtttgtttcttttctctttctgctttttggatcttttctttaaacttgacctttgggagtctgagtgttaaatgttttgaagtactcttatttgggttaaatctgtttggtgttttacaaccttcttctacttgagtattgatatctttctctaggtttggaaagttctccattattatccatttgaatgaactttctactatgatctgtttatacctcctctttaaggccaataactc

SEQ ID NO: 189594 - DNA, 508 bp, Homo sapiens
tataaatgggattgcattcctgatttggctctcagcttgaccactgttggtatatagaaatgctagcaatttttgtacattgatttttgtaccctgagactttgctgaagttgtttatcagctgaaagagctttttggccgagactgtgggattttctagatataggatcatgttatctacagacaggcataacaaaggtgacagggaagagcagaggtaaacatagatggactgggaatatcaaaggttaagagaaggcaggcactsccagggtatttatgagcaattcatagcagtagaagcatatgacatcagctagaacagaggggaggtagaactacaggcagtggcacacatgtattcctcccctttcttggaaatttctttagaaactagtgaaagaataaggtcctgccactcaatggctggaaggtattaatccaatggatttaggggccaattatgaaattgtttaccttaatacctcagaccagtggggctgagtga

SEQ ID NO: 189595 - DNA, 458 bp, Homo sapiens
tttggctgacagttatttttacttttagccctttaagtatgtcaccccactgctttctgacctccattgtttctgttgcaaagtcagctattaattttagtggaatctcctggtacttgagtacttttcctcttaccagtttcaaaatattatgtttatctctgggttttaacgtgttgactatgatgtgtgtgggtgttgatatatctctgcatttatcctccttctagttcattaattgatcttggatgtttagataatgtcttcatcaaattttggaagttttcattcattwtttctttgaatatttatttgtccttttctctcttgcctatacttctggtaactccattatatgtatgttaatgtatttattgttatcccacatttttctgaggctgcctgcatgtttttattatttttttctctactcttcagattgcatgatctcttttgaa

SEQ ID NO: 189596 - DNA, 406 bp, Homo sapiens
aatatacaaccatcctagattaaaccaggaagcaatagaaactctgagcagatcaataacaagcagtgagaytaaaatgataataacaaatcgcaaacaaaagatgttccaggaccagaggaattcaccgctgaattctatcagacattcaaggaaaaactggtaccaatcctattaacattattccaaaagataaacagggaatcctccctaaatcattctatgaagccagtatcaccctaataccaaaaccagaaaagggtatttgaaacaaaagaaaacaaaaaaccaatatcccttatgaacatagatgcaaaaatcctcaacaaaatactagttaactgaatccaaaagcacatcaaaaaggtaatccaccatgatcaagtgggtttcataccagggatgc

SEQ ID NO: 189597 - DNA, 563 bp, Homo sapiens
gtagagctgcagttttcaatacaacagacagcggttgctgtaagtggtttgtaagtggtttttgctataggggatgtgaactccagttttccaaattcacaggtattatatcttgtttccatcctctttgtttcttgtgccctcacataagagaagcctcaggtgtttgactgggtcagacagaatgggaaaatcattggctaagttggtcaaaggaatttcggagccaaagccacaatttgatggtgtgcatggtttgcgcacttgaaagctactagagtgcttaccacacmcatgcacacaaagacagagactcctgagttaggataagcgggacacaaaatgggctaattgacattaggttacacactagcctcaagaaaatgcccatgcaacaaggtacattgtgaaaatgttgtatgacccaactatgggatgttgtcctcttaggcttttacctcagctctaagagacccaaaacccaatgtaataatgggatcagctggttattttgaatggactcctgaatttttgcctaggctcatttatgtactttttgtacc

SEQ ID NO: 189598 - DNA, 688 bp, Homo sapiens
aatgtttataaatgaacttgtcatagtttaaaaattctttttggtaacttgaaaccttatagtgaaattaagtaatagagatactcattaattgtctgagttatttctaagtaagttaaaatatgaaaacatatatgattattcataagtttatgtactttggcgtcttctttttataagatatagagaagctaaatatatttggatctattaataaatgtaaaaaattgaggaaatgcatgtctctagaaataatgaaatcatttgtactaatatgagacagttcacaaagtttgctacttttaactagaaattaagttactaaaagttataaattatagttaatacatgtaattaaaatactagaaattataaaggaaacaactctwtgtgaggaagtaaaatgtttcataatgaataaagaacacatttttgttaaaaaataggaaaaatgcttatgttataccaaaaaacatttgtaaactatgcatctgacaaggggttaataatgagaatatataaggaaaccagacaactcaataggaaaaaagcatataatttcactaaaaaaaatgggtgaaagatctgaatagacatttctcaaaggaagacatacaaatggccaagaagtatatggaaaaatgctcaacatcactaattaccagagaaatgtaaatagaaaccacga

SEQ ID NO: 189599 - DNA, 624 bp, Homo sapiens
gtgtcaaaaaaataactgcacacttgtgcttattatagcagtattcacaaaagccaagacattgaatcaactgaaatgtcaatcaatggatgaatggatttagaaaatatttggcatatttacacaattaattctgttcaactataaaaaagaatacaatcctgtcatttctagcaacatggatgaggctggaaaacattatgttatgtgaaataagccagacacagaaagacaaatgctacatattctcactcatatgtgggagctaaaaaagttgatctcatagaactagagagtggaatagttgttaccagaggttgggaagggtagaggggagaggaaaatgaggagaggttggtcagtgggttcaaagttacaactagataggatgaataatttccagtattccattgcacagtagaatgattgtagttaacaataatrtattatatatttgaaaatagctagaagagaggatttttaatgttttcactgcaaacaaatgataagtatctgaggataatgtatatgctaattatcctaatttgattatgttgcattgtatatatgcaatgtacactccataagtatgcataattctgtatcaatttttaaaagtttaaa

SEQ ID NO: 189600 - DNA, 624 bp, Homo sapiens
gtgtcaaaaaaataactgcacacttgtgcttattatagcagtattcacaaaagccaagacattgaatcaactgaaatgtcaatcaatggatgaatggatttagaaaatatttggcatatttacacaattaattctgttcaactataaaaaagaatacaatcctgtcatttctagcaacatggatgaggctggaaaacattatgttatgtgaaataagccagacacagaaagacaaatgctacatattctcactcatatgtgggagctaaaaaagttgatctcatagaactagagagtggaatagttgttaccagaggttgggaagggtagaggggagaggaaaatgaggagaggttggtcagtgggttcaaagttacaactagataggatgaataatttccagtattccattgcacagtagaatgattgtagttaacaataatgtattatatatttgaaaatagctagaagrgaggatttttaatgttttcactgcaaacaaatgataagtatctgaggataatgtatatgctaattatcctaatttgattatgttgcattgtatatatgcaatgtacactccataagtatgcataattctgtatcaatttttaaaagtttaaa

SEQ ID NO: 189601 - DNA, 630 bp, Homo sapiens
tatttaatagaagtgttaggattgctgagtgctagagatcctttcatgtgccttgatctccattttataggcgccattcgatgtttttgaaagtccatttgatatttttggtatttttattatagaaaccatttgatataggattaactgatttgataataaacattttatctatgagaaaatcagtaaaaatcatcatcagaaaagtctattgtcattaaaatcaccttttggacattctgctaaaataataatgttcatttcttttccctgaggacacttaaatgcagcattactttgtactttattctattgcaaatgtcctttaaagaaaatgaagtacttagttgagagaacgtcttacatgattgctttaaagatcagaagtacatggaggaaatacttcacaggttgatggcttgtatataatsttgggctttgtttaatcttagttgaatttccacaaaattcttcattcataagggaaaatgtccaaatttcacaaaactatttagtaaaaggtataacagtgtgtgtacatttaatgtagtgtgttgtaatttttgcttctctctgtctctctctctctctctccctcagacattaaatgttgtaaaggcaagtattatg

SEQ ID NO: 189602 - DNA, 630 bp, Homo sapiens
tatttaatagaagtgttaggattgctgagtgctagagatcctttcatgtgccttgatctccattttataggcgccattcgatgtttttgaaagtccatttgatatttttggtatttttattatagaaaccatttgatataggattaactgatttgataataaacattttatctatgagaaaatcagtaaaaatcatcatcagaaaagtctattgtcattaaaatcaccttttggacattctgctaaaataataatgttcatttcttttccctgaggacacttaaatgcagcattactttgtactttattctattgcaaatgtcctttaaagaaaatgaagtacttagttgagagaacgtcttacatgattgctttaaagatcagaagtacatggaggaaatacttcacaggttgatggcttgtatataatgttgggctttgtttaatcttagttgaatttccacaaaattcttcattcataagggaaaatgtccaaatttcacaaaactatttagtaaaaggtataacagtgtgtgtacatttaatgtrgtgtgttgtaatttttgcttctctctgtctctctctctctctctccctcagacattaaatgttgtaaaggcaagtattatg

SEQ ID NO: 189603 - DNA, 534 bp, Homo sapiens
ttttacttagaaatttcttctgccacatactctagttcatcactgttgatttttgccttccccaaagccctcagcattaacatagttcagccaagttctttgcccatttatgacaagaatgacctttgctctggtttccactcccttgttcctcagttacatttgaaacctcatcgaaatggcctttactgtgcatatttctatcagcactctggtcatgactacttaaccaatctctaaggacttccaaactttccctagttgtcttgtcttctaaaccctcaccagaatctaggctttttctagcctgctcctccaaattcttccagcttctgcccattatctrgttccaaagctgcttccacaattttagttattcattatcagcaacactccacttctcggtaacaattttctgtattaattcattttctgttacttataacagaatacctgaaactggggaatttataaagaaaataaatttgtattttatggttctggaggctgagaagtccaagattggataagttt

SEQ ID NO: 189604 - DNA, 568 bp, Homo sapiens
ctcatagatgttttattagtgtgaacattttcactagttctaagaggaaccaatgtaactataacccagattttaatgtcctttgttctctaactccatttgctcccactgtcttccttccatattcaaaataatgtagaaaacagcatctatttgatttcatgaaagaatacatttatgacaaccattggtgcacaatttacattttaccacaaactctatagcggaggtgaatgggctttaaattgcacagcttaactcctccccctcccctatcaatatttttctccttatagtaataattgggtagaagggtgcttttcatctccccttccaccaagaagaatagaattcttggtgtctatttttgcctgcagactgttttcattagctctttaaattcttctcctctttattatgcaagcaatttcacactaggatacatcttatctgcaaayttgcatagccaatctcattacacaagagatcttacatgagaactattattttgtcaatttaaaaggcaacaactatgtaatagcatgatatatcatattttcctttttac

SEQ ID NO: 189605 - DNA, 568 bp, Homo sapiens
ctcatagatgttttattagtgtgaacattttcactagttctaagaggaaccaatgtaactataacccagattttaatgtcctttgttctctaactccatttgctcccactgtcttccttccatattcaaaataatgtagaaaacagcatctatttgatttcatgaaagaatacatttatgacaaccattggtgcacaatttacattttaccacaaactctatagcggaggtgaatgggctttaaattgcacagcttaactcctccccctcccctatcaatatttttctccttatagtaataattgggtagaagggtgcttttcatctccccttccaccaagaagaatagaattcttggtgtctatttttgcctgcagactgttttcattagctctttaaattcttctcctctttattatgcaagcaatttcacactaggatacatcttatctgcaaatttgcatagccaatctcattacacaagagaycttacatgagaactattattttgtcaatttaaaaggcaacaactatgtaatagcatgatatatcatattttcctttttac

SEQ ID NO: 189606 - DNA, 429 bp, Homo sapiens
atttttataacttttaaaataaatgaactataattttgcctttggaaagcctcaattttttaatcattttaggaaagccttatgatgatgatgttaatagtgatgttaataatgatatctaacacttattgagtacctaccacattccaagtgcagtgataarcacttaacgttccttgtctcacttatatttcacagtaattctatggactatttatactttcccatagtccctatggactatttatacttttatagtttgcatatctattgtgtttgagccaaattccatgtgaatatttgatataaaattaaaaaaatagacggaatagcttcttttagcaacaataagggtgtatagtgtctactgttcaatattttttactatggcatttcactgttaaagaggaaatcagtaattgttgatgt

SEQ ID NO: 189607 - DNA, 428 bp, Homo sapiens
atttttataacttttaaaataaatgaactataattttgcctttggaaagcctcaattttttaatcattttaggaaagccttatgatgatgatgttaatagtgatgttaataatgatatctaacacttattgagtacctaccacattccaagtgcagtgataagcacttaacrttccttgtctcacttatatttcacagtaattctatggactatttatactttcccatagtccctatggactatttatacttttatagtttgcatatctattgtgtttgagccaaattccatgtgaatatttgatataaaattaaaaaaatagacggaatagcttcttttagcaacaataagggtgtatagtgtctactgttcaatattttttactatggcatttcactgttaaagaggaaatcagtaattgttgatg

SEQ ID NO: 189608 - DNA, 429 bp, Homo sapiens
atttttataacttttaaaataaatgaactataattttgcctttggaaagcctcaattttttaatcattttaggaaagccttatgatgatgatgttaatagtgatgttaataatgatatctaacacttattgagtacctaccacattccaagtgcagtgataagcacttaacgttccttgtctcacttatatttcacagtaattctatggactatttatacyttcccatagtccctatggactatttatacttttatagtttgcatatctattgtgtttgagccaaattccatgtgaatatttgatataaaattaaaaaaatagacggaatagcttcttttagcaacaataagggtgtatagtgtctactgttcaatattttttactatggcatttcactgttaaagaggaaatcagtaattgttgatgt

SEQ ID NO: 189609 - DNA, 343 bp, Homo sapiens
acttgagggtagagggttggaggactgtgagggttgaaaaattacctaccaggtactatgctcactacctgggtgacaaaatcatttgtacaccaaacaccagcaacacacaatttacccatgtaacaaacctgcacatgcacccctgaacctaaaagttgaaagagaaaaaaaattaaaaattaaaattaataaaatcatttatartatgttcaaaaatatgacctattagggataaatataatgacagaacattgctcaaagaaatttgaaactggagaacattatgttatgtgaaataagccaggcatagaaagacaaatattgcatgtatttactcata

SEQ ID NO: 189610 - DNA, 482 bp, Homo sapiens
gtaagtttacctagactattgaatctataatgctgttttatttctaayaaatattttgaataataatgagactacttttaaaggaaaacacatacatgctggaatatatggacagaatatattttctttccatccacataaaattttacatagtgaatttaattttttaaaaagagaaaatggtcaagataactaaaacacttatttacattaatagattgtttaattattttctgtacttgcaaaagatctaaatagttatttataaaactcaatggattagaaatatgtattagatgagatcattacatattctttgtgccataaaaatttaaaaaatgttttttaacttgggggttcagattttaatcagttttttactttttaaatattttaattgatatgtaatggataaacattttgggggcacgtgtgataatttcatacattcttatagtcaaatcagagtattgggttattca

SEQ ID NO: 189611 - DNA, 607 bp, Homo sapiens
tggtcttcccctggactccggttgctcagcagccaggctctcctccaactgccctcgaccacatttccctcagtgtccgcattgttttgccatagatgacctgctggcatctgtcggtgtgttcttctgccagtgtgttcctctcaatgtccagtcatttgtgcgtgtgcccactaaggtcttggtgtttttataggcacaggatgtggggtgtgctgggccagagtggtctcgaaaaatgcaacatttgggcgtgaaagcaggagtgcctctcctcacttaggtccgtgggcacaggcccgaggctggagcccttgccargtaccctgcccttctctacccagcacttccctgcccccctcccatatcactaatatgaagaagagaaaagagaaatcagcttggagagctttccaagtagaaccccagagactttcttactctggaacatcctgccattttctcaccatgactacttggttcaagttgtataaaatgccccatcattaactaatcactaacaagggagactgagattatctttaaaccaacaaactctatattcctatattcccttgggaatgggaatgagatcaagttctcctgg

SEQ ID NO: 189612 - DNA, 355 bp, Homo sapiens
attccagcattttgtattcactgaatcttcactaaatcctgttaaccaacccagcagacaattaatatttctcccagccaacatatatctgtgtaggttcacccttatcaatattttatgctaatcaagtcctgtatttcatcctgcttgctctracattatcagacttcatttgcatgcatgctttatagacccttgttcatacaaatcagtgacaccttgtgatatgcttagtgtggtgaagctatttcgtcctggataatacttccagcttctccatcagagctatggtggaatgtagttactattatgtatatgaaggttatgaggcgtgatcttttatgggtcttgaaga

SEQ ID NO: 189613 - DNA, 596 bp, Homo sapiens
ggtctagcgtccccataaactttataatcatttttgttaaaatctacaagtaagtgatctacaagtgtcttgcttttgacctgcacttcattccttgtctgcagaaatatatattagaaatgtattacccaatcgtcagctttgccttaagtatatgaataactttatcccagaatcccattgccaggatctgtttctggagctacagtatcaattactgtaatttttggcacaggtgacataatcacatgaagagaatttaataaaaagacttatttaagyttggtagagatggttaagagaactattgaagcaccctgcgctagtcacagaaaagggcagggagaagaaacatttactggaacaccagcgagaataattttatctgaaagccaccattcctgacaagagctatgtcttttgatagagggagacaactcagctagagaagcacagaaggcagccacctagtggaactccttcttcagactttttctttcctcatgccttaatctccaagcagcagatggaaaccatttgaggcaacacacatgcaggttagactccctgggaatatagcagattataaaagcata

SEQ ID NO: 189614 - DNA, 544 bp, Homo sapiens
aggaatgttaaagaaaatgcctcatacagttttcaaatacataataattagtataaaattatatcactgaaatttcactgtacatttttaaaagatatttagttttaaaaaatatatcaatattgttaatatctcataaatatcactttctcaactatttaaacccatagtgaaacacttaagatatcaacttaaaatatctaagtgggattttctaaattaagatgttatgtgagcaaaaaatacttttgcctrtagtgggggactgatcttagaactgatagcagcagaaggcagacaaaccctaggcagatagggatgggccccctgtgaaactccacctacaacccaaagacagtttaaagcctgaacgccaagctacaaatctcagataaatccacagaccagattgacaacctctcttcccatttggtgcactttcctctgattgatccccacctttcaccaattttacctgcacatacccttctttgtttttttttacactgtcatgcccacctctgagtggtgcctttgttttagc

SEQ ID NO: 189615 - DNA, 561 bp, Homo sapiens
actacctttctgatatttcacctaaatcataaaatgtttctcccagtatttattatcataataaaatatcttarctgtaatttcaacaatgtgaggttgcatacaaatttcagttacatagataattaatctgtaatttaataatgtggcttaatgaattttataatttaatgtttaattttttactgtttatttaaaattttaattttatgaattataacatgttaaactcatgtgctgttaagaaacaacattttaaaatgtgtttgtatatgtatttgtatgtgtataattgtcacaattgcaaaaacaaataattatcgggagaatgtgaacagcatttgtatatacctagatggtcagattgtgaatgatgttatattttttgtccatttttaatgtctatttttaaaattttgacaatatgtatgcaatgtgtcagaccaaaaaacataacaacaaaattaaaacgtaaataaggaaggctacaaacaatctgtttattttgttttatattttattttatttatttatttttttccagtcagggtctcgctctgt

SEQ ID NO: 189616 - DNA, 484 bp, Homo sapiens
caccatactatgggaaattctaaccataacarttagacaagaaaaagaaataaaagacatctaaactggaaaggaagaagtaaaattatctctgttcatagatagcacaatcttataagtaggaaattagaaagaaacactcctccccaacaataatgacaacaacaacaacgacaacaacaaaacctgttagaactaataaacaaatacagcaacattgccaggtgcaaaatcaacatgaagaaatcagttgcatttctgtacatgaatagtcatcaatcagtaaaggaaattaacaaaactattttattgtaatagagcaacagagaaaaaaaatacttacatgtaaatctaaccaagaaggtgaaagacttgtgtgctgaaatctacaaaatatttttaaaagaaattacagaagccacaaatatatagaaagatataccaggttcatggcttggaacactaacatagttaagatgtccat

SEQ ID NO: 189617 - DNA, 484 bp, Homo sapiens
caccatactatgggaaattctaaccataacaattagacaagaaaaagaaataaaagacatctaaactggaaaggaagaagtaaaattatctctgttcatagatagcacaatcttataagtaggaaattagaaagaaacactcctccccaacaataatgacaacaacaacaacgacaacaacaaaacctgttagaactaataaacaaatacagcaacattgccaggtgcaaaatcaacatgaagaaatcagttgcatttctgtacaygaatagtcatcaatcagtaaaggaaattaacaaaactattttattgtaatagagcaacagagaaaaaaaatacttacatgtaaatctaaccaagaaggtgaaagacttgtgtgctgaaatctacaaaatatttttaaaagaaattacagaagccacaaatatatagaaagatataccaggttcatggcttggaacactaacatagttaagatgtccat

SEQ ID NO: 189618 - DNA, 469 bp, Homo sapiens
tctgtaatttccttcgatcatttaaccataagtctcatattgcaaaaaaatcagatgcagaatctgtcccttcaaattgccgtttaaagcctagattaattttgcagcttcacaataaatactatgtgaccatcaaggtattaattggaacaacattgaacacggagaattggaattgcattttcagtgaaaattrggaacactatgaataaagcaaactaaagaatccttctgaaccttttgttgacaacaaaaacggatctgttccccttgtcttatgcacccattataattttatttgaaacaacacatatctttatccaaatccaagagtattaccttgcagtaggaattctacaccctctgtcatggttgcattgagacaaatgtcctgacctattaaaagagttagataagagtatgtcccaggggaacagaacaaagtctggcaccaaagtagaagaaagag

SEQ ID NO: 189619 - DNA, 623 bp, Homo sapiens
atgacttggataaattaggctgttcctcatgcaaagtgtcttaatgaacactattctttagagtttgatagtattaaaaagaacctacataatcttttatgacaccttatatcttaaagcacagagagttatcagctagttagctttgttattaatactcagggttttgaacttcaaaattaatgacatgtctaagtcaattctctaattaacttagattgggattattttaaaataaaagttaacatgaatatccacacctaaacatacagtagagtaaaaaaacctaaaataaatatttatggaggctgaaaacatagaaattcagggtctaagttgaaacagaaatcattgagacttcattaagaggaagctgggactatgtagaatttctgagrtagaggaaagctgggcaccgtctgaggcatctgtttccctttgtgatttacttttaggttggtggtagatgaaaagataaatgatcctcagaagtattaaagaagggaatacatgcttttgatttcttatcaaacccatattttccatctgtctgaatttttctttctttttaattcaaacagataatatactgtattgctttaatataaataaacagaaaagat

SEQ ID NO: 189620 - DNA, 262 bp, Homo sapiens
ctactagacctaatgagctattttaaccatgtgatcattatagatcccattagaaaaagagttcaaactaacataaaagagcaacaagtgtttattgatgaagttttcrttttagcgccataattcattgtcctatatatgtacatttgttttttaattgcttttctctagggccaccttcagctcctaggaatgtggtttttaacatcaatgaaacagcccttattttggaatggagcccaccaagtgacacaggagggag

SEQ ID NO: 189621 - DNA, 498 bp, Homo sapiens
tacttaatacacccttgtcaatatcccccaaagtactgtataaaaaataggaacagatcaaggtgtacttacaatattccttagtcataataatggttaaattgaactatagcagtaacaaatgtaaaacaattgtaataggagttatttggtgccagatttgttagtaaaakaataaacaagtaagtatgaggtattggaaaaatctgtgaatttttattgtatttatttcttgcataatatttatcacagagttacttcattcttccaagaaaggataattatgtacacatgaccttatttacaagtggatggctaaaaatgacccagatgccttgtgtattatctaggcaatctgccaggaagttggccacagcagagaggatcagaaagttcccactcagtccagacatgtagagtaataaacattttcatcttgctgtactgttattgctacaaataataagctagaaaatttagatcttgatcaaagtgttt

SEQ ID NO: 189622 - DNA, 548 bp, Homo sapiens
tgctattcattgctttgaccaggggttactgatgatctgaaaagtgattaatggtcagcaacaacaaatttatttcaggagcttatagatttccatgggatgtgattttatgctttagttgacttgccatgttttgtcatttttttattacctcccatgccatatactgtgtaaatatattaaactttttgagatatcttagatgttttgactggatctcrgcttacacttggacaagttagataacctaccaacagtaataaatgtaaatgtgaaatgtcataaagtgcttttgaaatgtattaaagcttaaatgtcaagtggcatgctagcatattttagaaatatgatttacattaaatgttttaaaatattattttaagacatttaaacaaatacgagctaaagaactagtggaaatgtctgttcatacaaaacatttcccaatgccagaccaatgtggaaaaaatatttaaaattttatgaagtatatatgtattaagtacatcatggtcagtaaataaagagaccactggacttgtaaccag

SEQ ID NO: 189623 - DNA, 627 bp, Homo sapiens
gatttacattaaatgttttaaaatattattttaagacatttaaacaaatacgagctaaagaactagtggaaatgtctgttcatacaaaacatttcccaatgccagaccaatgtggaaaaaatatttaaaattttatgaagtatatatgtattaagtacatcatggtcagtaaataaagagaccactggacttgtaaccagatcatttagattctagtcctaaaatatgccaggatagcagcagagtgggaacattttttgaaaactatactaattactatgtgtcaggaaacagaacattaactacactcttaattctacaagtattttcaacaagtttcctgttgtacttacctttatgaaataatcagtctgcttctcttttaggtaagtggaatctgtaatgtatacaagatgtgaaaataaaagtactttgatttartgtatagatttataattattaactatcctgccaaagtaacaaatgacacatttaagtgcaaacatgtaagaggtgtatatagttataaagtacatgagatgttttgacacagggatgcagtgtaaaataagcccatcatggagaatggggtatccatttactcaagcatttatcctttgagttaca

SEQ ID NO: 189624 - DNA, 600 bp, Homo sapiens
tctcaccgtgttatcgaaaagatctgaaactacaactcttcatttggattctgctgttatgaaatgcagtttggggtatcttgttacactttactcccagaagtgttaaaggaagtgcctgtcatcaaaattcaaaaataaatataaaaatgatgctggcagagctcaaaaactaaaaggatcagcattttgcttcagtttcctgttcataaaactttataaaaacaacccacccatttaaaaaaaacctgtaacaatagttcactattcttttcctaaatgcttgcctcatgccactctgaaattaggtgccatcacrtttcctgagttatgggccccaaacaccacatccttttcctccctcccacacccccaccccacctggcatcattcctgaatttagatgcttctccagtttctgagctcagtagacagatgccaacattctccctcctacctgtcctgaagtggccaagcatctgtaccagctggaagcaggaataattgaggcttccttcccccaaattaattctcacttcctagagaagcttttaatatggaaggttaaattataaagtgaagagctagtaaactgaaaaa

SEQ ID NO: 189625 - DNA, 560 bp, Homo sapiens
gggttggatgctcactcaagtccttgtcaggtgtcaaccccaagtgctagagtcaccctagacataatctcacatccagaaaactacagagcacagtgtgctcttccaccttccacgagggagaaccaccaaaatatcaaccatcaagcaagttactcagtctctcagaacttcagtttcctcatctgcaatcaggaccaaatagcacctacttcaaagggtggaggtgaagattagagagaaacctggttaaggggctaccacatagtaataatttcataaacagtagctaggtttattatggtcccaaacagagcgaggagataagtctggaggaggaacgaatctyttcaaaacccaggaaccaaccaaccagttggaaagacagctctgaaactcagatttttaaacaatttctaacagtagactacatgtgtggcacatcatccaagcaaaaagttccatatcagattctctttcaacaaatggagtaataaagacaggtttgagttaacttcagctggaacagaaagaaccattatgacttgggaagttcacac

SEQ ID NO: 189626 - DNA, 594 bp, Homo sapiens
tcaaacatgtttatgtattggtttttacattttaatagtaacatagcatcactgtcacacattcraaccacacagaagtatacacattcaaaccacaaagaagtatataaagtaaaaagtgagtcttcccaaaggccctacttttttttctatcccgatcccatttgctggatgcactggtgttaaaaagccagacgtagacagaggttcataaacccaaaaggatttaggagcaggggtcaggtacctgaaagaaaaggccaggtgggcactggggcaccactgagagtttttgtcttaggtcagttccagcttttcgggttcctaaggggttaatcatccagggtgagcagacattctaattttttcaatagaagcctgaaattcagggttttatgtaaaatctctcaatttgtaaatgctggcaactattcatcaccataagaagtactgtatgggccacataacacagttgctggctacatttggcccaggggccaccagtttgcaccctctggtggtaatccttccagacatttccttctgtctaaaaacacgagttgctgggtgtaacatcttatttttttcaaaaat

SEQ ID NO: 189627 - DNA, 502 bp, Homo sapiens
gaaagcaagtttattaggaaagtaaaggaataaaagaatggctactccatagacggttgcccatttttacagttatttcttgattatatgttaaacaagaggtggatgattcatgcctcccctttatagaacatatagggtaacttcctgacgttgccaaggcrtttgtaaactgtcatggcactggtgggagtgtagcagtgagaatgaccagaggtcactctcgttgccatcttggttttggtgggatttagccagattctttactgcaacctgttttatcagcaaggtctttatgacctgtatcttgtgctgacctcctatctcatcttgtgacttagaatgccttaactgtctgggaatgcagcccagtaggtctcagcctcatgctacccagctcctattcaagatggagttgctcttgttcacatgcctctgacataagggtcaccctttgagtctcctgcagctgaaccccctacctggctagctttggggaatt

SEQ ID NO: 189628 - DNA, 522 bp, Homo sapiens
ataaattgaagtgggccaaagaaaagaatagtgaggatagctgaggactctaaccagtccyttcctactattacttagtcctgtgtttttgagtagtttagctaaaggcttaggtaaaacttgcctgcttaatttcattttattcttatacatagaatatagatatgtctatatatcacaaatatgaaacttatcacatgtcaaatattaattttcttcattggtagctggatctagactataaaatatgacttattttcctcgtatggggatatcctgatgtgagaaataaggaaggggttggaatagttttggaaatagttggtaaatatttttcagatatcactattggggtttttgttttttagtgtttgatttaaacactaaatcaagtatgctttatacactttgaggcagagatatcttttagcttcatcgatgagcatatcacttcctgataatggaaattggcaaaattggaaaaagaaacctaagtgagtttagtgggtagttttctggttt

SEQ ID NO: 189629 - DNA, 522 bp, Homo sapiens
ataaattgaagtgggccaaagaaaagaatagtgaggatagctgaggactctaaccagtcccttcctactattacttagtcctgtgtttttgagtagtttagctaaaggcttaggtaaaacttgcctgcttaatttcattttattcttatacatagaatatagatatgtctatatatcacaaatatgaaacttatcacatgtcaaatattaattttcttcattggtagctggatctagactataaaatatgacttattttcctcgtatggggatatcctgrtgtgagaaataaggaaggggttggaatagttttggaaatagttggtaaatatttttcagatatcactattggggtttttgttttttagtgtttgatttaaacactaaatcaagtatgctttatacactttgaggcagagatatcttttagcttcatcgatgagcatatcacttcctgataatggaaattggcaaaattggaaaaagaaacctaagtgagtttagtgggtagttttctggttt

SEQ ID NO: 189630 - DNA, 539 bp, Homo sapiens
gaagtctaggctaagctggtctcaggtggagatgaggaacttcttaggaactagagcaaaggtgactcttgctatgctttagcaaagagactggcagtattttgcccctgccctagagatctgtggaactttgaacttgagagacataatttggggcatctggcggaagaaatatctaaacaacaaaacattaatccaacaaatgaggtgccaattctttagggagaaaattgtaaaagtttattaacagatactaaagaaaacctaaataaatatgcagagctataccatgctccaggataaaaatactcaatatcataaagacatcattctcaccaaaaaaaaagaaaaaagaaaaaaaacattaaataggaagcagggcacaaaagtttggaaaatttgcagcctgatgatgagatagaaaagaaaatccattttctggggagtaattcaagctggctgcagaaatttgccacaagtaatgagcagctttacrttaatcaccaagacaatgaggaaaatatctccagggcatgtca

SEQ ID NO: 189631 - DNA, 447 bp, Homo sapiens
gaattcttatttcttcagtttgtggaggagacattctgggcaatcttgccgagttaaaagaggctagtacctaccaaaaagagtcgaaagcaaggactccatcagatatttggataccagtgttcaaagtggcattattcacaaccaccaaaaggtagaaacaaccccaatgactattgacagataaatggataaacaaatgtggtacagtacaatggaataggattcagacataaaaaggaattaaattcygccacatgttctaccagggaggaaccttgacaacattatgttaagtgacataagcgagacacaaaagggaaactattgtgtgcttccactaggtatccacgagagacctagaatcgtccaagtcacagagacagaaagtcaaattcatggagaccaaagggaggaggcatgagtttcctgggcgcagagtttcag

SEQ ID NO: 189632 - DNA, 486 bp, Homo sapiens
catgggcagattaaggaatttgccaaactcatagagcaagtcagggcagaggctgggacagcctggcgctcctgatttacattggcccagagttcttacctggtctaaagctctccgtctgattctaggtagaagctgtgctggggagaagccttgtggggatagaggagccggttccatgaaagaagtctatgcagttggggcagaaccctgagacttctgcagcagggacagttctgttgcattctgtatgggtcagcgtgaggctaccacacctcagggctgctgagcttaagagaggagccaaatggctctcttgataggaaatggggcttcaggttgraatcagatgagagctggcctctgaggacattttaaccacaggtcacagctcttggtaaactttagttggcttttgaaccacggggagacattttttcttgcctctttacttactggctatttcctccttctagcattcattaa

SEQ ID NO: 189633 - DNA, 400 bp, Homo sapiens
agaattctcaaaaggggagcttacccctagcccatgcccaacccccttcccttcccttccccagcaatgtccttgcccacaaggaccattatgcatccccatctggacacagcagggcacccagctcagaagcccaggtcctcttccraatcccttgaatgcaaatatcctgtgttgcccctggacctaggggtgcacacactggctgtgtatccctcggtggcccccgggcttaggggtgggtgcacatgctggttatatatcccttggtggtccctaggctttgaggtgcacgcactggcagcatatcctgggcctaggggtacacacgctggctgtacaatccatacttgggagaacaaatctgaggaaagacccatgtaggccccagacctggcta

SEQ ID NO: 189634 - DNA, 400 bp, Homo sapiens
agaattctcaaaaggggagcttacccctagcccatgcccaacccccttcccttcccttccccagcaatgtccttgcccacaaggaccattatgcatccccatctggacacagcagggcacccagctcagaagcccaggtcctcttccaaatcccttgaatgcaaatatcctgtgttgcccctggacctaggggtgcacacamtggctgtgtatccctcggtggcccccgggcttaggggtgggtgcacatgctggttatatatcccttggtggtccctaggctttgaggtgcacgcactggcagcatatcctgggcctaggggtacacacgctggctgtacaatccatacttgggagaacaaatctgaggaaagacccatgtaggccccagacctggcta

SEQ ID NO: 189635 - DNA, 400 bp, Homo sapiens
agaattctcaaaaggggagcttacccctagcccatgcccaacccccttcccttcccttccccagcaatgtccttgcccacaaggaccattatgcatccccatctggacacagcagggcacccagctcagaagcccaggtcctcttccaaatcccttgaatgcaaatatcctgtgttgcccctggacctaggggtgcacacactggctgtgtatccctcggtggccccygggcttaggggtgggtgcacatgctggttatatatcccttggtggtccctaggctttgaggtgcacgcactggcagcatatcctgggcctaggggtacacacgctggctgtacaatccatacttgggagaacaaatctgaggaaagacccatgtaggccccagacctggcta

SEQ ID NO: 189636 - DNA, 611 bp, Homo sapiens
tttctctgtgcgtttaccctccttgcttctctgagagagacagaggaggaaggcagtcctggaaagggcttttttgcctctctaattcacatcttctgtgccagctgtcattactgattcccttgaagtgaaaggtcatggcagactaatgctttcttgaagtatggccggtaaagctgcgatctagtgcatccacccttccatttgtttccccgatttccaggcaaggcttagaaatgcttagtaggactttgatacatagtcgcctaggaaacagtgacttattttatctaaaatattgtatcataaagtgtgtttcaaaataaaatttcaaataaattaaaatagaaatttcaaaataaaaatagctaaaatctgttaaataccctctgtyaggctttagtgaaaatcctttaccatattaaagtttaatcgacacaacaccctcctaagttggtaccttgttgtcttcctcattttatagatgagaaagcagaggcatggagaagataaagatggatctatgtacttatctttcccaacacccaaatttagtaagtggcagagctgggatttgaactcaggtcagaataggtcttgaaccactatga

SEQ ID NO: 189637 - DNA, 611 bp, Homo sapiens
tttctctgtgcgtttaccctccttgcttctctgagagagacagaggaggaaggcagtcctggaaagggcttttttgcctctctaattcacatcttctgtgccagctgtcattactgattcccttgaagtgaaaggtcatggcagactaatgctttcttgaagtatggccggtaaagctgcgatctagtgcatccacccttccatttgtttccccgatttccaggcaaggcttagaaatgcttagtaggactttgatacatagtcgcctaggaaacagtgacttattttatctaaaatattgtatcataaagtgtgtttcaaaataaaatttcaaataaattaaaatagaaatttcaaaataaaaatagctaaaatctgttaaataccctctgtcaggctttagtgaaaatcctttaccatattaaagtttaatcsacacaacaccctcctaagttggtaccttgttgtcttcctcattttatagatgagaaagcagaggcatggagaagataaagatggatctatgtacttatctttcccaacacccaaatttagtaagtggcagagctgggatttgaactcaggtcagaataggtcttgaaccactatga

SEQ ID NO: 189638 - DNA, 510 bp, Homo sapiens
gaattcgtcctaattatgacattatagacatggttagcctaaataaagaaaagccatagttaatccccacatttcattttcctagaaacatgcttctgacctccgtcctcaacagaactcccccatgagcttttgtactcgtttggttcctccagtttctgatggatgcccactcgtggttggaagggctcacgggcaatgagaggaccctggcaagggcaaaagtgaaaactcaagtaggaaatgacaggagggagccgggacctaactccaaatggaggcattttagtgacaccaaactaagtccctctccctcaataaaattctaaccctgaacacctcttcccaaaacaggaaacctgcgacatccctaatgacaagtaaataaacgattacaaccccatagaagaggaagcttctctgygtgtaactgcacagatgtgaacgggagctccaggccttggcatggctcctgggctctaggaatggctggaaacactggaactacta

SEQ ID NO: 189639 - DNA, 583 bp, Homo sapiens
cagacataggcttatgggctcaaaagtttccctgctagttaggcaaaacaactaataagatagcttaagggaggctcttcttgttactactacttcccaattccttcttgcctgtaattctagtagttaatttagaatactatgtagtagttcttccactccataaccattagtgctaaaatcaaattataccaaaagttctagtttctgtggcaattataagattacatagtgcaatcatgcttagatgcctttcttgaaagcatctttaccaagccatctatatttctcctgaaagtctacagcttcaaacttattccaagtgtgaccagccctatttaggagttttcttgtatggacataatgtaaacattctaaattttcatccatttatcttttttctcatattctgaagcgacacagaatatgtttaatccttttttttttttttttttttttggaaatgaggccttcaaataaataraaagggcattgatgccccttttaaatcatgttttccaaactaaactttctcaagccttttgccactcttcacgtaatatgatttctagtttactcacca

SEQ ID NO: 189640 - DNA, 583 bp, Homo sapiens
cagacataggcttatgggctcaaaagtttccctgctagttaggcaaaacaactaataagatagcttaagggaggctcttcttgttactactacttcccaattccttcttgcctgtaattctagtagttaatttagaatactatgtagtagttcttccactccataaccattagtgctaaaatcaaattataccaaaagttctagtttctgtggcaattataagattacatagtgcaatcatgcttagatgcctttcttgaaagcatctttaccaagccatctatatttctcctgaaagtctacagcttcaaacttattccaagtgtgaccagccctatttaggagttttcttgtatggacataatgtaaacattctaaattttcatccatttatcttttttctcatattctgaagcgacacagaatatgtttaatccttttttttttttttttttttttggaaatgaggccttcaaataaataaaragggcattgatgccccttttaaatcatgttttccaaactaaactttctcaagccttttgccactcttcacgtaatatgatttctagtttactcacca

SEQ ID NO: 189641 - DNA, 583 bp, Homo sapiens
cagacataggcttatgggctcaaaagtttccctgctagttaggcaaaacaactaataagatagcttaagggaggctcttcttgttactactacttcccaattccttcttgcctgtaattctagtagttaatttagaatactatgtagtagttcttccactccataaccattagtgctaaaatcaaattataccaaaagttctagtttctgtggcaattataagattacatagtgcaatcatgcttagatgcctttcttgaaagcatctttaccaagccatctatatttctcctgaaagtctacagcttcaaacttattccaagtgtgaccagccctatttaggagttttcttgtatggacataatgtaaacattctaaattttcatccatttatcttttttctcatattctgaagcgacacagaatatgtttaatccttttttttttttttttttttttggaaatgaggccttcaaataaataaaaagggcattgatgccccttttaaatcatgttttccaaactaaactttctcargccttttgccactcttcacgtaatatgatttctagtttactcacca

SEQ ID NO: 189642 - DNA, 316 bp, Homo sapiens
actacttaaaaacagaaaataattttttaatttctaaaacatttattgggtattctctataagcttggaagaagtagaagatataagtytccatgtaactgggaagtaaaatgcaaattataacaatgggaaccaaccaaaaatggtgaaaatcctaatattgtgctttggtgcatagttttttttttttttaacaaatgtagatatcaataaaattgaaagttagattttccaaatagtaggcctagtgcaaaagacacccaacatgtataggaaatcaaacaaagctatgtgcacagaactgaaatgagttggg

SEQ ID NO: 189643 - DNA, 557 bp, Homo sapiens
agcagcacatacacagcagagaaggcacttgatcggatgcttttgatgccagctctaagagcatccagttctacacagatcagaaatagacacataggtcctctggttatttaactgaattcagtccatttggggcgtaatttttgtttggcttcattttactaagttcagccaaactgatttatatgaagcctccaattatcttttcagtacaccaatgccaaaaattttgttagggaaacattcttctcctttctccctctcagggagagatgattaagaaaaatcaagttytagtggcagctgggtcttaaagagaaggtttttcctacctgattatccagttgttttggggatggcagttcacactgcttggagcagagtctaatttcccgaagattaataatattaaagaaagttaaatgaagcaaacagcatgccacactgtgcagagccccagtcagaaccacactgcccaattcccttttgctattgggaagataattactgaatctttgttcctgtgaagtaaatgaattttgaatcctctgtatgtt

SEQ ID NO: 189644 - DNA, 557 bp, Homo sapiens
agcagcacatacacagcagagaaggcacttgatcggatgcttttgatgccagctctaagagcatccagttctacacagatcagaaatagacacataggtcctctggttatttaactgaattcagtccatttggggcgtaatttttgtttggcttcattttactaagttcagccaaactgatttatatgaagcctccaattatcttttcagtacaccaatgccaaaaattttgttagggaaacattcttctcctttctccctctcagggagagatgattaagaaaaatcaagttttagtggcagctgggtcttaragagaaggtttttcctacctgattatccagttgttttggggatggcagttcacactgcttggagcagagtctaatttcccgaagattaataatattaaagaaagttaaatgaagcaaacagcatgccacactgtgcagagccccagtcagaaccacactgcccaattcccttttgctattgggaagataattactgaatctttgttcctgtgaagtaaatgaattttgaatcctctgtatgtt

SEQ ID NO: 189645 - DNA, 557 bp, Homo sapiens
agcagcacatacacagcagagaaggcacttgatcggatgcttttgatgccagctctaagagcatccagttctacacagatcagaaatagacacataggtcctctggttatttaactgaattcagtccatttggggcgtaatttttgtttggcttcattttactaagttcagccaaactgatttatatgaagcctccaattatcttttcagtacaccaatgccaaaaattttgttagggaaacattcttctcctttctccctctcagggagagatgattaagaaaaatcaagttttagtggcagctgggtcttaaagagaaggtttttcctacctgattatccagttgttttggggatggcagttcacactgcttggagcagagtctaatttcccgaagattaataatattaaagaaagttaaatgaagcaaacagcatgccacactgtgcagagccccagtcagaaccacactgcccaattcccttytgctattgggaagataattactgaatctttgttcctgtgaagtaaatgaattttgaatcctctgtatgtt

SEQ ID NO: 189646 - DNA, 292 bp, Homo sapiens
ttcagcgtctcacagaaactacacaataatgtcccatatgtgcgttacattcggcagcactcaaaaaattagaactgtttgttaaatcacccccggaaaaaytcgttttgaagtacgtgaagctccaagtcagctcagcattacaattttcgcaatattaaatcaaggccaacttgatttggcacctttgaaagaacagacactaggaaaacgtctcgaaaccaccttacaatacgtaaacctaatcccagtctttgcagcattttagtgcaatgctctctgaggacctgct

SEQ ID NO: 189647 - DNA, 563 bp, Homo sapiens
tttctacagaaaattatataccagcatccacaaatacaaggacagtgatttatgacagctatttttccacagctatcaaggatttagcactgtgttaggcacatagaaatggcttaattgctaacttttaaaagaaatatatatatatagtcaaaaatgtaaagaaaaagatgttacatcctccttggatttaccttagcctcagataagtggtgatgaagctctaaaaattcagacagacatttatttccataactatgcagaaacatcatcgtgagaacattaggtagacaatcatacagctttgcttatgctgtgtgctgactcataacacctgccgcaatcttcacacttgacagaacatgatttcatgtgcacgtaaaagaaaactgaccaaaatttcatgttctttgggtgtttgatttcatctagagaaactccagagcctttcagaagtatgccayagaatgggttgtagaattttcaatttaaggtgcatggttatccaaagctagataatgatttggtttcaatcaagtgataggtaacaactgtaatatggc

SEQ ID NO: 189648 - DNA, 599 bp, Homo sapiens
caaacaacagatcggtggttgcctaaagacagtgaaggtaaagtttgaagagacagattactaaggagcatgaggaaacttttaggtgtgatggatatattccttattttgattgtagcgatgatttcctgggtgtatacataagctaaaacttataaaattctacctattaaatatgtgtggcatttacatttgtatgtcaattataagtctacaaagctatttttaaaaatacatttctctcataaactaaataaatgcagaaatttaacattttggatgttgtattattgcatgttttaaataatgaattcaattggagttttctcattaaaatctaaagttgagtttaggttcacagtcaaatgatgtcctataatctataaaagttattattgcacagtgataaattggaaaccrgagagaccgacattatataatatttcagttgagtgtgatgtgtctgttatgtacagattttggcaccacagtgcatggaaatatatacaaagagtcttcaaaaagttcatggaaaatgcatattatggaaaagcagttcagagaaatcaaattttgttgaaccaaaataaactcatact

SEQ ID NO: 189649 - DNA, 568 bp, Homo sapiens
catataagtaatcagcttcctgtcaggtatagtttcattttcaattaactgaacaaaataacacttacttaagctgtggaactgaatcaaattgccatagttccaatctacattgrgctttatgcaaatatattgggtaaaatttgagaaaaacacagatctctttgaaagcatttcccctttatgtctgtggcatatcatgtaccaagttatgcaaaacagaatctcagaaatcaccttcggtggcttccctgtgccccttcatttacatcctataaaaatataagttccactaacttaattgtctaaatattcctcaaacgtgtcctaatcactgcaaccataaaacccttcccttgtttaaatgtttgtaggtacttggcacctgatgtccctcccctcattaaaatctgtcaagatctacctattcatgagtaaataaagttaaactctagtaaatcgggctagatgatacgacccctacctacctttccaactgtagctccaccatcacatacccacttgcagtatgtacatggaagagtctatgctatttcccactgttgtt

SEQ ID NO: 189650 - DNA, 568 bp, Homo sapiens
catataagtaatcagcttcctgtcaggtatagtttcattttcaattaactgaacaaaataacacttacttaagctgtggaactgaatcaaattgccatagttccaatctacattgagctttatgcaaatatattgggtaaaatttgagaaaaacacagatctctttgaaagcatttcccctttatgtctgtggcatatcatgtaccaagttatgcmaaacagaatctcagaaatcaccttcggtggcttccctgtgccccttcatttacatcctataaaaatataagttccactaacttaattgtctaaatattcctcaaacgtgtcctaatcactgcaaccataaaacccttcccttgtttaaatgtttgtaggtacttggcacctgatgtccctcccctcattaaaatctgtcaagatctacctattcatgagtaaataaagttaaactctagtaaatcgggctagatgatacgacccctacctacctttccaactgtagctccaccatcacatacccacttgcagtatgtacatggaagagtctatgctatttcccactgttgtt

SEQ ID NO: 189651 - DNA, 322 bp, Homo sapiens
tcaacatcatactggaagtcttagctaatgcaataaaacaacaaaaaaagaaaataaaaggtacagatgctccttgatttatgacagggttacatctgcaaaaacccctgatcagtagaaaatattgttaagtcaaaagtgcatttttcaacttaccatatttttcacttattgatgtgcttatccagatgtaacactatcttaagttgaggagtgtactgaatgtgtatcccttttgcaacatgataaggctgaaaaattgcaagtcaaaccactgtaagttgtrgactatctatatagacagggaaagaagaaatagaat

SEQ ID NO: 189652 - DNA, 613 bp, Homo sapiens
atttatgactaaatccccagaaacaattgcaacaaaaacaaaaattgataagtggaacctaattaaactaaagagcttctgcacagcaaaagaaactatcaatgaaataaacagacaacctacagaataagagaaagtgtactatacactgacaaaggtttaatgtccagaatctttaagttaaacaattcgaaaaacaaaaaacaaccccattttaaaatggataaaggacatgaacaaacactgctcaaaagaagacatacatgcagccaccaaatwtatgaaaaaaatggtcaacactactgatcattagagaaatgaaaattataaccacagtatgatagcatctcacaacagtcagaatggctatttttaaaaagccaaagaataacagatgttggcaagattgcagagaaaagggaatgcttatatactgctgttgggaatgtaaactaattggccattgtggaaagcagtttggatatttctcaaataacttaaaacagaattaccatttgacccagcaatcccacgactctttatatacccaaaagaaaataaatcatcgtaaaaaaatgcatgcactcatatgttcactgcaatactatttgtt

SEQ ID NO: 189653 - DNA, 635 bp, Homo sapiens
ttacttttcctttgggtaaagctaattaggaaatacagatggcctatgatccttctgattcaggctcttaaatatactccactatttgtttcagtggagttaagttcagactccattctgccctttctcccctactgcaatagattttagcaaatcttacttgcctgtttattttgaccagtggaatttctgctttgtcatctgttgctgtgctatttacatataataataggcatttatatagtcgtcttagtagtcctaagagtaaataactttttaatctccattttcaaagtggaagacatagagttagactaatagaaattaaggaaaggtctcaaggtcactcgcatcaygaaaggtgaagccaggttttgtatctcagcaaattgactctactgacttaaccaacattctacgctgcttcctttacaatccattagcttgagtttcaagaggagaaatagcaaggataacagttcgtagctctctttttctatcattaaggtgctagcagaccccacctttcctcctacacttctactcgtgtgataatttcttaattatccctctttagttgtttatatgccaccctcataggacaaaaacatatttctaaaagtataattcttatc

SEQ ID NO: 189654 - DNA, 635 bp, Homo sapiens
ttacttttcctttgggtaaagctaattaggaaatacagatggcctatgatccttctgattcaggctcttaaatatactccactatttgtttcagtggagttaagttcagactccattctgccctttctcccctactgcaatagattttagcaaatcttacttgcctgtttattttgaccagtggaatttctgctttgtcatctgttgctgtgctatttacatataataataggcatttatatagtcgtcttagtagtcctaagagtaaataactttttaatctccattttcaaagtggaagacatagagttagactaatagaaattaaggaaaggtctcaaggtcactcgcatcacgaaaggtgaagccaggttttgtatctcagcaaattgactctactgacttaaccaacattctacrctgcttcctttacaatccattagcttgagtttcaagaggagaaatagcaaggataacagttcgtagctctctttttctatcattaaggtgctagcagaccccacctttcctcctacacttctactcgtgtgataatttcttaattatccctctttagttgtttatatgccaccctcataggacaaaaacatatttctaaaagtataattcttatc

SEQ ID NO: 189655 - DNA, 635 bp, Homo sapiens
ttacttttcctttgggtaaagctaattaggaaatacagatggcctatgatccttctgattcaggctcttaaatatactccactatttgtttcagtggagttaagttcagactccattctgccctttctcccctactgcaatagattttagcaaatcttacttgcctgtttattttgaccagtggaatttctgctttgtcatctgttgctgtgctatttacatataataataggcatttatatagtcgtcttagtagtcctaagagtaaataactttttaatctccattttcaaagtggaagacatagagttagactaatagaaattaaggaaaggtctcaaggtcactcgcatcacgaaaggtgaagccaggttttgtatctcagcaaattgactctactgacttaaccaacattctacgctgcttcctttacaatccattagcttgagtttcaagaggagaaatarcaaggataacagttcgtagctctctttttctatcattaaggtgctagcagaccccacctttcctcctacacttctactcgtgtgataatttcttaattatccctctttagttgtttatatgccaccctcataggacaaaaacatatttctaaaagtataattcttatc

SEQ ID NO: 189656 - DNA, 614 bp, Homo sapiens
aattactttcaaaatacacatacatatgtgagttggcaataaaccaatttttatagtggatatatctaaatgttaacwtggtagattatttttatttttttccttgtgcttatttttgatttccaaattttccacaatggaattatattatattccattgcaaaaatgaattaagaaaatgcattactgataaactatttatggaataaaatgagctcacataagtatgaaaaaaatgtgcccaagttaattgattggtaaattaccatttctcctcattcatttaccctgtgctgtctctttcttctctgaagtgatatgaatcctggataaatctgatatatgtatatttatgtgagagtagcaatttacatttcacatgaaattatgcttccaattactaaatcaaggaatcatcaaaaacatcttcatcaccataaaaaggaaggtagtaataaaagtaatacactttttgatattactttaggcaaattaaaacttcaatgaggcacaaaaggttatgctgggaagtcacatacaacaaaagcctaaaggataaactctttatcttgaaaacattcctcttgacttatttttgttttggtttgccacaa

SEQ ID NO: 189657 - DNA, 614 bp, Homo sapiens
aattactttcaaaatacacatacatatgtgagttggcaataaaccaatttttatagtggatatatctaaatgttaacatggtagattatttttatttttttccttgtgcttatttttgatttccaaattttccacaatggaattatattatattccattgcaaaaatgaattaagaaaatgcattactgataaactatttatggaataaaatgagctcacataagtatgaaaaaaatgtgcccaagttaattgattggtaaattaccatttctcctcattcrtttaccctgtgctgtctctttcttctctgaagtgatatgaatcctggataaatctgatatatgtatatttatgtgagagtagcaatttacatttcacatgaaattatgcttccaattactaaatcaaggaatcatcaaaaacatcttcatcaccataaaaaggaaggtagtaataaaagtaatacactttttgatattactttaggcaaattaaaacttcaatgaggcacaaaaggttatgctgggaagtcacatacaacaaaagcctaaaggataaactctttatcttgaaaacattcctcttgacttatttttgttttggtttgccacaa

SEQ ID NO: 189658 - DNA, 552 bp, Homo sapiens
  misc_feature (1)...(552): n = A,T,C or G
ttgggagttttgtgcagaggcagtgtagagtatatatatggaggtataagagtacatatttattcttgattctcatcaattcaaaacttgagagatttgactcttttgacagagtgtttaaatattataaaataccattgaaactcatatttcctcctaaaaatgctaattaattccaatgtgagaacacctgaaatgttcaataaataaatctctgctgtttgcattatgtgtgtttgtgtgtgtgtgtgtgtgtgtgtgtgtgtgtgtnagatattgatattgaggtatgagacggattaattagrttatctaccaatagctctactgtgtattcatacaagaccaaaaaggcacagcagccaaaaaaaatctaaagtcataattttgaattttcaccatatatacaaatgtatgtcttaatcaataaccattaaaatagataaactctttggtacttggcctaatcactgaataagatcctttgattagtccataattatcacagttcagttaccaaatttaaaatcaataatactaatgaacaacatt

SEQ ID NO: 189659 - DNA, 552 bp, Homo sapiens
  misc_feature (1)...(552): n = A,T,C or G
ttgggagttttgtgcagaggcagtgtagagtatatatatggaggtataagagtacatatttattcttgattctcatcaattcaaaacttgagagatttgactcttttgacagagtgtttaaatattataaaataccattgaaactcatatttcctcctaaaaatgctaattaattccaatgtgagaacacctgaaatgttcaataaataaatctctgctgtttgcattatgtgtgtttgtgtgtgtgtgtgtgtgtgtgtgtgtgtgtgtnagatattgatattgaggtatgagacggattaattagattatctaccaatagctctactgtgtattcatacaagaccaaaaaggcacagcrgccaaaaaaaatctaaagtcataattttgaattttcaccatatatacaaatgtatgtcttaatcaataaccattaaaatagataaactctttggtacttggcctaatcactgaataagatcctttgattagtccataattatcacagttcagttaccaaatttaaaatcaataatactaatgaacaacatt

SEQ ID NO: 189660 - DNA, 496 bp, Homo sapiens
tgtgcaatataaaaaacagtagtcttcattggatcagagtgcaatggtggttaccagcatcatggaagtggaagaaattgggtgaagcaggtcacccaatttgctattatgataaatgaataagtctaaagatctaacgtatagcatataactctaatgtgcactggctgggcrcggtggctcactcctataatcctagcactttgggagaccaaggcgggaggatcacgaggtcaagagatagagaccatcctggccgacatagtgaaaccccatctctcctcttgtagagattgtaaaaattttgtaaaaatacaaaaattagctgggggtgttggcacgcacctgtagtcccagctacttgggaggctgaggcaggagaattacgtgaatctgggaagcggaggttgcagtgagccaagatcatgccactgcactccagcctggcgacagagcaagactctgtctaaaaaaaaaaactaatgtgtaccttaaa

SEQ ID NO: 189661 - DNA, 428 bp, Homo sapiens
ttgccattctgtctctagctgttggtgtaagatccawattttacccatttctaagctaagcaaatactactctcagtgagggaacaatccctatgtccaaaaatacatggaagtacacttgtgtctttctcaagaaaaaagaaaataacttgtatttcttttcactaatacacacacacacatacacacatacacagacacacacatatatactagtttattctgaagagaacctttatgctagaattaaaatttttagtttttggatactaacatttgacatgcacctgcattgttttattttaatgaagcagacatttcttggggttgtcaacctagaaaatttaatgattcagaaaatcaggtacaacctggttgtcaaaaaatcataaacatcgtatcactattttcaaattgtatgtttcttg

SEQ ID NO: 189662 - DNA, 428 bp, Homo sapiens
ttgccattctgtctctagctgttggtgtaagatccatattttacccatttctaagctaagcaaatactactctcagtgagggaacaatccctatgtccaaaaatacatggaagtacacttgtgtctttctcaagaaaaaagaaaataacttgtatttcttttcactaatacacacacacacatacacacatacacagacacacacatatatactagtttattctgaagagaacctttatgctagaattaaaatttttagtttttggatactaacatttgacatgcacctgcattgttttattttaatgaagcagacatttcttggggttgtcaacctagaaaatttaatgattcagaaaatcaggtacaacctggttgtcaaaaaatcataaacatcrtatcactattttcaaattgtatgtttcttg

SEQ ID NO: 189663 - DNA, 596 bp, Homo sapiens
ctgaatagaccaataacaagttctgaaattgaggcagtaattaatagcctaccaactaataaaagcccacgatcagacagattcacagggctaagtttttatttttatttttgaagatgggggtctcttcatgttgtctatgctggtcttgaactcttgggtgcaaacgattctcccaccttggcctcccaaagtgctgggattacagacgtgagccactgtgcctggacaaatctaaagtttaatcacccttcaaagcaactgttctacttctaccttccaaaaytggttctaggtaacttctatctactcagaataaccttctctccatccatgtattatccttatttttcaaaacatgatttctcttcataaatcctttggcttaacatatacccacagctcctgctgacattgtatagtgtatttttaaatgtgcaaagactttccactccagagtttgttacctttaactgattacacatcatttatactgtaaattgcatcatatcaatttcctccctaaatatttttttaattcttgttcaaatgtgatcaccttaaagatatttttatttttatatcctcttaaaaat

SEQ ID NO: 189664 - DNA, 596 bp, Homo sapiens
ctgaatagaccaataacaagttctgaaattgaggcagtaattaatagcctaccaactaataaaagcccacgatcagacagattcacagggctaagtttttatttttatttttgaagatgggggtctcttcatgttgtctatgctggtcttgaactcttgggtgcaaacgattctcccaccttggcctcccaaagtgctgggattacagacgtgagccactgtgcctggacaaatctaaagtttaatcacccttcaaagcaactgttctacttctaccttccaaaactggttctaggtaacttctatctactcagaataaccttctctccatccatgtattatccttatttttcaaaacatgayttctcttcataaatcctttggcttaacatatacccacagctcctgctgacattgtatagtgtatttttaaatgtgcaaagactttccactccagagtttgttacctttaactgattacacatcatttatactgtaaattgcatcatatcaatttcctccctaaatatttttttaattcttgttcaaatgtgatcaccttaaagatatttttatttttatatcctcttaaaaat

SEQ ID NO: 189665 - DNA, 596 bp, Homo sapiens
ctgaatagaccaataacaagttctgaaattgaggcagtaattaatagcctaccaactaataaaagcccacgatcagacagattcacagggctaagtttttatttttatttttgaagatgggggtctcttcatgttgtctatgctggtcttgaactcttgggtgcaaacgattctcccaccttggcctcccaaagtgctgggattacagacgtgagccactgtgcctggacaaatctaaagtttaatcacccttcaaagcaactgttctacttctaccttccaaaactggttctaggtaacttctatctactcagaataaccttctctccatccatgtattatccttatttttcaaaacatgatttctcttcataaatcctttggcttaacatatacccacagctcctgctgacattgtatagtgtatttttaaatgtgcaaagactttccactccagagtttgttacctttaactgattacacatcatttatacwgtaaattgcatcatatcaatttcctccctaaatatttttttaattcttgttcaaatgtgatcaccttaaagatatttttatttttatatcctcttaaaaat

SEQ ID NO: 189666 - DNA, 646 bp, Homo sapiens
tggagtctgtaaaatggacctgtgtgtaagtcttggtatttcctatttgccacaagctttcttcttgaatgtagtgtttgtccctgtttaatagcattttaaatcattttttctggcaaaataaacctgtacatgtagggaaacagatataattttcrtattaccagttggtgaactggggaaatcggtccagctcaaggtcatagtaattacagtcaaagcacacacataaaagaagaatctcctacaagttgattttgagaggctaataaagcatatctacagtattttgtaaactgcaagacatgatactttaaatattcttattataatactcatattaagaaacattctcaaatataaatcatagatgaattgtttcaaataaagtgtgagtttatgcctccattttatttgtgttattttatttgtgcaaataaagaactatgtttactttccttttgcttatgtgcttaaacaattataagttagagattaatttacaaattaatcacaaacaaaataaccaaagcagtaaaattctatctaattaacaatcttaactgagtgtaatggattgcttatattactgagctggaaataaatcaccgattttgtttttaaattagaaatataatgtgccaga

SEQ ID NO: 189667 - DNA, 615 bp, Homo sapiens
ttgatagtgcattttaaatattttattatttccattctaatttctaaatctcacaatgcttttcattgcaccgttcaggctggttttactagctgcctttctataaaaataatgttaaatattatctctatcttgtgttatctcattgtaattttgtaatcttagtattagtctgcttaaaaatacacccagttttggtaataaagatactgacgatgttaaaagtaaaagttaccatttactggtcagttaacacatgctagggtctatcttaaattgattctcacacaattcagagcagttaaaatatatagaggcagaaagatgaatgactgtgtragaatatgaagaatttctctctgcctggaacaatttctttcacaacacctgcaatgtgattacaacacattcttcaagtttcaacttagaatttactgctccatgtagactttcaagtccccatatcaattcctgacaatgcatggctatgtaccccgacctatatgttcccttttatcctttatcataacactatgaactatgtaagtataggaacttgttcatcattgcatcctatttttagcaataatgctgtttaatttgaacaataaatga

SEQ ID NO: 189668 - DNA, 615 bp, Homo sapiens
ttgatagtgcattttaaatattttattatttccattctaatttctaaatctcacaatgcttttcattgcaccgttcaggctggttttactagctgcctttctataaaaataatgttaaatattatctctatcttgtgttatctcattgtaattttgtaatcttagtattagtctgcttaaaaatacacccagttttggtaataaagatactgacgatgttaaaagtaaaagttaccatttactggtcagttaacacatgctagggtctatcttaaattgattctcacacaattcagagcagttaaaatatatagaggcagaaagatgaatgactgtgtgagaatatgaagaatttctctctgcctggaacaatttctttcacaacacctgcaatgtgattacaacwcattcttcaagtttcaacttagaatttactgctccatgtagactttcaagtccccatatcaattcctgacaatgcatggctatgtaccccgacctatatgttcccttttatcctttatcataacactatgaactatgtaagtataggaacttgttcatcattgcatcctatttttagcaataatgctgtttaatttgaacaataaatga

SEQ ID NO: 189669 - DNA, 646 bp, Homo sapiens
tggagtctgtaaaatggacctgtgtgtaagtcttggtatttcctatttgccacaagctttcttcttgaatgtagtgtttgtccctgtttaatagcattttaaatcattttttctggcaaaataaacctgtacatgtagggaaacagatataattttcgtattaccagttggtgaactggggaaatcggtccagctcaaggtcatagtaattacagtcaaagcacacacataaaagaagaatctcctacaagttgattttgagaggctaataaagcrtatctacagtattttgtaaactgcaagacatgatactttaaatattcttattataatactcatattaagaaacattctcaaatataaatcatagatgaattgtttcaaataaagtgtgagtttatgcctccattttatttgtgttattttatttgtgcaaataaagaactatgtttactttccttttgcttatgtgcttaaacaattataagttagagattaatttacaaattaatcacaaacaaaataaccaaagcagtaaaattctatctaattaacaatcttaactgagtgtaatggattgcttatattactgagctggaaataaatcaccgattttgtttttaaattagaaatataatgtgccaga

SEQ ID NO: 189670 - DNA, 462 bp, Homo sapiens
gaattctgctgcctacaccagagtgtactctgtgacaacccagctcccttgattttttgtattatttaaattactgaaagtcttagtttgcaaaaagcactaggtcatttggytttaactttacaaacatatgattgttaatatagaaatattagtcataaaaattagcaatcttcagttgaacaacgtggtacagaacatgttttttggtgtttattaaattacgaattgaacaccacaaattcaacaatcttagagtgaatcaagaatcacaggagcattttcaaatatgctgatagtcctcaagttgaaaaattttgccattctgtctcatagcagaagaaatggtttatgaaacaattttgaggaaaataatcaacagccctttcttgttttcatcaccatcatcattatcatcatttttatcctcacagttattttgaaatgtactaacttgatctc

SEQ ID NO: 189671 - DNA, 462 bp, Homo sapiens
gaattctgctgcctacaccagagtgtactctgtgacaacccagctcccttgattttttgtattatttaaattactgaaagtcttagtttgcaaaaagcactaggtcatttggctttaactttacaaacatatgattgttaatayagaaatattagtcataaaaattagcaatcttcagttgaacaacgtggtacagaacatgttttttggtgtttattaaattacgaattgaacaccacaaattcaacaatcttagagtgaatcaagaatcacaggagcattttcaaatatgctgatagtcctcaagttgaaaaattttgccattctgtctcatagcagaagaaatggtttatgaaacaattttgaggaaaataatcaacagccctttcttgttttcatcaccatcatcattatcatcatttttatcctcacagttattttgaaatgtactaacttgatctc

SEQ ID NO: 189672 - DNA, 462 bp, Homo sapiens
gaattctgctgcctacaccagagtgtactctgtgacaacccagctcccttgattttttgtattatttaaattactgaaagtcttagtttgcaaaaagcactaggtcatttggctttaactttacaaacatatgattgttaatatagaaatattagtcataaaaattagcaatcytcagttgaacaacgtggtacagaacatgttttttggtgtttattaaattacgaattgaacaccacaaattcaacaatcttagagtgaatcaagaatcacaggagcattttcaaatatgctgatagtcctcaagttgaaaaattttgccattctgtctcatagcagaagaaatggtttatgaaacaattttgaggaaaataatcaacagccctttcttgttttcatcaccatcatcattatcatcatttttatcctcacagttattttgaaatgtactaacttgatctc

SEQ ID NO: 189673 - DNA, 462 bp, Homo sapiens
gaattctgctgcctacaccagagtgtactctgtgacaacccagctcccttgattttttgtattatttaaattactgaaagtcttagtttgcaaaaagcactaggtcatttggctttaactttacaaacatatgattgttaatatagaaatattagtcataaaaattagcaatcttcagttgaacaacgtggtacagaacatgttttttggtgtttattaaattacgaattgaacaccacaaattcaacaatcttagagtgaatcaagartcacaggagcattttcaaatatgctgatagtcctcaagttgaaaaattttgccattctgtctcatagcagaagaaatggtttatgaaacaattttgaggaaaataatcaacagccctttcttgttttcatcaccatcatcattatcatcatttttatcctcacagttattttgaaatgtactaacttgatctc

SEQ ID NO: 189674 - DNA, 646 bp, Homo sapiens
tggagtctgtaaaatggacctgtgtgtaagtcttggtatttcctatttgccacaagctttcttcttgaatgtagtgtttgtccctgtttaatagcattttaaatcattttttctggcaaaataaacctgtacatgtagggaaacagatataattttcgtattaccagttggtgaactggggaaatcggtccagctcaaggtcatagtaattacagtcaaagcacacacataaaagaagaatctcctacaagttgattttgagaggctaataaagcatatctacagtattttgtaaactgcaagacatgatactttaaatattcttattataatactcatattaagaaacattctcaaatataaatcatagatgaattgtttcaaataaagtgtgagtttatgcctccattttatttgtgttattttatttgtgcaaataaagaactatgtttactttccttttgcttatgtgcttaaacaattataagttagagattaatttacaaattaatcacaaacaaaataaccaaagcagtaaaattctatctaattaacaatcttaaytgagtgtaatggattgcttatattactgagctggaaataaatcaccgattttgtttttaaattagaaatataatgtgccaga

SEQ ID NO: 189675 - DNA, 496 bp, Homo sapiens
aagtgtaggaactcaaatttgattcacaatttgtgtaaatccaaagcttaccacaaatacaccacttcactacataatcctacagagtcattcttcttagagtccactaaataggtttttaaaaaattgcttatatatattgttgtcttttaaataatcacagttcatatttctaatatgtttgtgtgaaggttgttgtaaaataaataatattccaggcacaggtgaccttacaaaagcagyattttgaactctgtttttatataggtgtgcttcagtgggttttatataagccacttgagtgtagtgatatttttccaaatgtttgaaaaacatctgaaactccagttcaatcagtacttcaataaatacgtagcattgactaagtcaacaagtctcagttacggatctcactttgacattacctatccttctaccttattccttaaaacatgttttcctttacatttgtctttttcatgagagtaaagggatt

SEQ ID NO: 189676 - DNA, 617 bp, Homo sapiens
gtctgtggtgtctacgagggtgtttctggatgagattaaccctttaattggcagaatgaggaagcagatagcyctctccaatgtgaatgggcctcatccaatcaattgaaggcctgaatagaacgatagtagagtaatggagaattcactctttttctgttggattgtctttgatctggaacataaatcttctgtctctatacatggatttagtatagatgttataccaatggatctcctggttctcaagccttcagacttagactgacactatacccctggcaacaactaatctgttcttcatctccacacttttatcatttccaggatgctacataaaaggaatcatacaatatgtaacctttggagattgactgtgttcactcagtctaatgtctttaagattcattcaggttgctccatgtatccatagttcattcctttatgtggctgagtagtattccattgcttgggtttgccagagtttgcttaaccattcaccctttgaaagacattcagattgtttacaggtttttgtcattacaaataaagctattatcagaattcatgtacagattaaaaaatttaacaaacaaaaacaagaatgaaatatgccc

SEQ ID NO: 189677 - DNA, 535 bp, Homo sapiens
aatctgcacatgaatgattatagcagcatttttttatrattgccaaaacttggaagtaaccaacatgttcagcaggtgaataaactgtagtatatgcatataatggtatatcatgcagaacttgaaatgagctactgaaaggacttagccagcttgctttaggcagactaagtaaggtcgccagagaacctccaacctaccccacaaggtgcttatcccagatgttttgtgcagataaaggaacttgctcaggggctaaacatgaccgctgtgggaaattcccgttccttaactcatgcgcagtaggtgaaataaatcaacatggagttcagactaagggcccgcatgcgcagtggatggacgggggtggagctgccaagaattcacaccatatacaaataaggagcccagcctcattgacttttgcacagaagccctggtattcaactgcgaaaggggcaactggaaacctgctttcaggacccttctttttgctgagagctttccttttgcttaataaattctactctactca

SEQ ID NO: 189678 - DNA, 535 bp, Homo sapiens
aatctgcacatgaatgattatagcagcatttttttataattgccaaaacttggaagtaaccaacatgttcagcaggtgaataaactgtagtatatgcatataatggtatatcatgcagaacttgaaatgagctactgaaaggacttagccagcttgctttaggcagactaagtaaggtcgccagagaacctccaacctaccccacaaggtgcttatcccagatgttttgtgcagataaaggaacttgctcaggggctaaacatgaccgctgtgggaaattcccgttccttaackcatgcgcagtaggtgaaataaatcaacatggagttcagactaagggcccgcatgcgcagtggatggacgggggtggagctgccaagaattcacaccatatacaaataaggagcccagcctcattgacttttgcacagaagccctggtattcaactgcgaaaggggcaactggaaacctgctttcaggacccttctttttgctgagagctttccttttgcttaataaattctactctactca

SEQ ID NO: 189679 - DNA, 535 bp, Homo sapiens
aatctgcacatgaatgattatagcagcatttttttataattgccaaaacttggaagtaaccaacatgttcagcaggtgaataaactgtagtatatgcatataatggtatatcatgcagaacttgaaatgagctactgaaaggacttagccagcttgctttaggcagactaagtaaggtcgccagagaacctccaacctaccccacaaggtgcttatcccagatgttttgtgcagataaaggaacttgctcaggggctaaacatgaccgctgtgggaaattcccgttccttaactcatgcgcagtaggtgaaataaakcaacatggagttcagactaagggcccgcatgcgcagtggatggacgggggtggagctgccaagaattcacaccatatacaaataaggagcccagcctcattgacttttgcacagaagccctggtattcaactgcgaaaggggcaactggaaacctgctttcaggacccttctttttgctgagagctttccttttgcttaataaattctactctactca

SEQ ID NO: 189680 - DNA, 603 bp, Homo sapiens
aaatccccagaaacaattgcaacaaaaacaaaaattgataagtggaacctaattaaactaaagagcttctgcacagcaaaagaaactatcaatgaaataaacagacaacctacagaataagagaaagtgtactatacactgacaaaggtttaatrtccagaatctttaagttaaacaattcgaaaaacaaaaaacaaccccattttaaaatggataaaggacatgaacaaacactgctcaaaagaagacatacatgcagccaccaaatttatgaaaaaaatggtcaacactactgatcattagagaaatgaaaattataaccacagtatgatagcatctcacaacagtcagaatggctatttttaaaaagccaaagaataacagatgttggcaagattgcagagaaaagggaatgcttatatactgctgttgggaatgtaaactaattggccattgtggaaagcagtttggatatttctcaaataacttaaaacagaattaccatttgacccagcaatcccacgactctttatatacccaaaagaaaataaatcatcgtaaaaaaatgcatgcactcatatgttcactgcaatactatttgtt

SEQ ID NO: 189681 - DNA, 293 bp, Homo sapiens
tttccattttccccagtcatctgcygtcactcagacatcatctagaaattatatgaaaatgctattgtccctcttgcagtagatctttctggtgcaaagtctgacttgtagatctttctggtgcaagaaggacaaacacattttcatctaattcagccagaatcaagagtaaatcatctaggtctacttttgtgcaagttacagtcaagagagtctgctacccaggctgatgtgggggtgcagtccagagaaagaatgatgcattatgcccaggaatagaaagggcagaattc

SEQ ID NO: 189682 - DNA, 551 bp, Homo sapiens
tttgtttgttttctctgcttctaatgacacctacatcagagatcatatttctccctggtcccatttctcaccagcagtawttctactgtgaaatggctcattactggatctctggaactttagtttctcccattgaccttactatcatgaggaaaggattagttctctgctagtgctaatactttcatcactattccttgctttgtttcttagttattttcaccctgatgttacctgctccacataataaaatcagattgtttgttaagtcctagactagtttctgccttgctggctatatcctcaatgaagagtaaatatttacctcatgggagaaatagacctaatggatttaggagtttagcagtttacagggcacaaattaaatctcaataaatatttactctgagtaaaaaagtacaaaatagaagtacaattcttttttattgtcattgatttcagagcaaaatgaatcaacagttgacaaattaaggattaacttaggcaagattattcaacaaatatttattattcatttgctctatgccaga

SEQ ID NO: 189683 - DNA, 491 bp, Homo sapiens
catatcatggtgacgaggatcttacaaaacaaatcatgtcaaagactagtcatgtgctagttagttttaaacattctttaacaaataatctccagggacactaccttcaacactgaatctttgagaaaatctagtttttaaatggtccacatttttgcattaatttttwaaaacgtattgaagaccataggaaagaactggaaagatttctgagacatctgaaaataatagaaaataatctattttatatcaagaaacattgaacaaaaatgaaataaataaaaaaaattctgtggaagaagaaattaattcaacctcatatatttctcagtcaatttattcaatcaatttattcaataatgaggtcacttgatttacttcatgtgtacatttcaatgaatgactgcatgtctaaattatattttatacttttttactgagattattcacacttcagtcttcctgttttggtacaaaatattttagacaaa

SEQ ID NO: 189684 - DNA, 491 bp, Homo sapiens
catatcatggtgacgaggatcttacaaaacaaatcatgtcaaagactagtcatgtgctagttagttttaaacattctttaacaaataatctccagggacactaccttcaacactgaatctttgagaaaatctagtttttaaatggtccacatttttgcattaatttttaaaaacrtattgaagaccataggaaagaactggaaagatttctgagacatctgaaaataatagaaaataatctattttatatcaagaaacattgaacaaaaatgaaataaataaaaaaaattctgtggaagaagaaattaattcaacctcatatatttctcagtcaatttattcaatcaatttattcaataatgaggtcacttgatttacttcatgtgtacatttcaatgaatgactgcatgtctaaattatattttatacttttttactgagattattcacacttcagtcttcctgttttggtacaaaatattttagacaaa

SEQ ID NO: 189685 - DNA, 491 bp, Homo sapiens
catatcatggtgacgaggatcttacaaaacaaatcatgtcaaagactagtcatgtgctagttagttttaaacattctttaacaaataatctccagggacactaccttcaacactgaatctttgagaaaatctagtttttaaatggtccacatttttgcattaatttttaaaaacgtattgaagaccataggaaagaactggaaagatttctgagacatctgaaaataatagaaaataatctaytttatatcaagaaacattgaacaaaaatgaaataaataaaaaaaattctgtggaagaagaaattaattcaacctcatatatttctcagtcaatttattcaatcaatttattcaataatgaggtcacttgatttacttcatgtgtacatttcaatgaatgactgcatgtctaaattatattttatacttttttactgagattattcacacttcagtcttcctgttttggtacaaaatattttagacaaa

SEQ ID NO: 189686 - DNA, 491 bp, Homo sapiens
catatcatggtgacgaggatcttacaaaacaaatcatgtcaaagactagtcatgtgctagttagttttaaacattctttaacaaataatctccagggacactaccttcaacactgaatctttgagaaaatctagtttttaaatggtccacatttttgcattaatttttaaaaacgtattgaagaccataggaaagaactggaaagatttctgagacatctgaaaataatagaaaataatctattttatatcaagaaacattgaacaaaaatgaaataaataaaaaaaattctgtggaagaagaaattaattcaacctcatatatttctcagtcaatttattcaatcaatttattcaataatgaggtcacttgatttacttcatgtgtacatttcaatgaatgactgcatgtctaaawtatattttatacttttttactgagattattcacacttcagtcttcctgttttggtacaaaatattttagacaaa

SEQ ID NO: 189687 - DNA, 411 bp, Homo sapiens
tttaacttaaataactttgtggaaaaatgtcatgaccacaactaacgaatctttggtgggcaggtgctttgatgcaccagkctcctttaattacaaggatgtgtgttcatgatgatgaagagaacaagtatccgaagagtgctagccctctgcgtaggggctttaggattgtatggggtaaactgtatgaggaaaactcaggcaactactgccatcaatgagacttagctagtgagtgccaataccttcatcctcataaataatactagcacagggggtctgtgtgtgccagagggctacatctttatctgtgggcaatctggggtgactcaaatgcggggtgggcaaagtcatgcctggaaaacttacagatcctgccccattgagtgtgctagggatgctcctagaatt

SEQ ID NO: 189688 - DNA, 411 bp, Homo sapiens
tttaacttaaataactttgtggaaaaatgtcatgaccacaactaacgaatctttggtgggcaggtgctttgatgcaccagtctcctttaattacaargatgtgtgttcatgatgatgaagagaacaagtatccgaagagtgctagccctctgcgtaggggctttaggattgtatggggtaaactgtatgaggaaaactcaggcaactactgccatcaatgagacttagctagtgagtgccaataccttcatcctcataaataatactagcacagggggtctgtgtgtgccagagggctacatctttatctgtgggcaatctggggtgactcaaatgcggggtgggcaaagtcatgcctggaaaacttacagatcctgccccattgagtgtgctagggatgctcctagaatt

SEQ ID NO: 189689 - DNA, 411 bp, Homo sapiens
tttaacttaaataactttgtggaaaaatgtcatgaccacaactaacgaatctttggtgggcaggtgctttgatgcaccagtctcctttaattacaaggatgtgtgttcatgatgatgaagagaacaagtatccgaagagtgctagccctctgcgtagrggctttaggattgtatggggtaaactgtatgaggaaaactcaggcaactactgccatcaatgagacttagctagtgagtgccaataccttcatcctcataaataatactagcacagggggtctgtgtgtgccagagggctacatctttatctgtgggcaatctggggtgactcaaatgcggggtgggcaaagtcatgcctggaaaacttacagatcctgccccattgagtgtgctagggatgctcctagaatt

SEQ ID NO: 189690 - DNA, 384 bp, Homo sapiens
ttaaataactttgtggaaaaatgtcatgaccacaactaacgaatctttggtgggcaggtgctttgatgcaccagtctcctttaattacaaggatgtgtgttcatgatgatgaagagaacaagtatccgaagagtgctagccctctgcgtaggggctttaggattgtatggggtaaactgtatgaggaaaactcaggcaactactgccatcaatgagacttagctagtgagtgccaataccttcatcctcataaataatactagcacagggggtctgtgtgtgccagagggctacatctttatctgtgggcaatctggggtgactcaaatrcggggtgggcaaagtcatgcctggaaaacttacagatcctgccccattgagtgt

SEQ ID NO: 189691 - DNA, 606 bp, Homo sapiens
attgctcataaaaaaatgaaaagaaacctgtcccaaaccatggcaaatattgcctcctccattgccactgtcttagaagccaaggaaacatctcccagatccacccagaaagttattttaaacaacagaattgttccagactttttttgtttgagatggagtttcgctcttgttgcccatgctggagtgcagtggtatgatctcagctcactgcaacctctgcctcccgggtctaagtgattctcttgcctcagactccagagtagctgggattataggcrtgcattaccactcctggctaattttgtattttttttttttttttttgtaaagacagggtttctgcatgtttgtctggctggtctcgaactcctgacctcaggtggtccacctatcttggcctcccaaagtgctgagattacaggcatgagccactgcactcggccctccagactttcttttagctcaactgggagaagcgtatacaattgccaacacctcttactgtattgggataaacatcttaggtattgtagaaacataggtagaggagatccagaagctgacccattggttgtagacagtggggccacctgaagaatcctt

SEQ ID NO: 189692 - DNA, 606 bp, Homo sapiens
attgctcataaaaaaatgaaaagaaacctgtcccaaaccatggcaaatattgcctcctccattgccactgtcttagaagccaaggaaacatctcccagatccacccagaaagttattttaaacaacagaattgttccagactttttttgtttgagatggagtttcgctcttgttgcccatgctggagtgcagtggtatgatctcagctcactgcaacctctgcctcccgggtctaagtgattctcttgcctcagactccagagtagctgggattataggcgtgcattaccactcctggctaattttgtattttttttttttttttttgtaragacagggtttctgcatgtttgtctggctggtctcgaactcctgacctcaggtggtccacctatcttggcctcccaaagtgctgagattacaggcatgagccactgcactcggccctccagactttcttttagctcaactgggagaagcgtatacaattgccaacacctcttactgtattgggataaacatcttaggtattgtagaaacataggtagaggagatccagaagctgacccattggttgtagacagtggggccacctgaagaatcctt

SEQ ID NO: 189693 - DNA, 606 bp, Homo sapiens
attgctcataaaaaaatgaaaagaaacctgtcccaaaccatggcaaatattgcctcctccattgccactgtcttagaagccaaggaaacatctcccagatccacccagaaagttattttaaacaacagaattgttccagactttttttgtttgagatggagtttcgctcttgttgcccatgctggagtgcagtggtatgatctcagctcactgcaacctctgcctcccgggtctaagtgattctcttgcctcagactccagagtagctgggattataggcgtgcattaccactcctggctaattttgtattttttttttttttttttgtaaagacagggtttctgcatgtttgtctggctggtctcgaactcctgacctcaggtggtccacctatcttggcctcccaaagtgctgrgattacaggcatgagccactgcactcggccctccagactttcttttagctcaactgggagaagcgtatacaattgccaacacctcttactgtattgggataaacatcttaggtattgtagaaacataggtagaggagatccagaagctgacccattggttgtagacagtggggccacctgaagaatcctt

SEQ ID NO: 189694 - DNA, 606 bp, Homo sapiens
attgctcataaaaaaatgaaaagaaacctgtcccaaaccatggcaaatattgcctcctccattgccactgtcttagaagccaaggaaacatctcccagatccacccagaaagttattttaaacaacagaattgttccagactttttttgtttgagatggagtttcgctcttgttgcccatgctggagtgcagtggtatgatctcagctcactgcaacctctgcctcccgggtctaagtgattctcttgcctcagactccagagtagctgggattataggcgtgcattaccactcctggctaattttgtattttttttttttttttttgtaaagacagggtttctgcatgtttgtctggctggtctcgaactcctgacctcaggtggtccacctatcttggcctcccaaagtgctgagattacaggcatgagccacygcactcggccctccagactttcttttagctcaactgggagaagcgtatacaattgccaacacctcttactgtattgggataaacatcttaggtattgtagaaacataggtagaggagatccagaagctgacccattggttgtagacagtggggccacctgaagaatcctt

SEQ ID NO: 189695 - DNA, 624 bp, Homo sapiens
ccccacaccacaagttacatgaaggaggcttattatttacagaaatgcagaaagggacaacagaagcttatgattcactgcaaactgggcccccaaggctcaggaagctatctggggtggatgatgtctcatctgtgtgtgccccacttacamcacagctaaagaatcctgaaaagtaggcatccgtgaatttgataccacaaggctatggacatccctgagctaaagtgttcaatggcatcctgtttctacatagggactataacagagcttgagctatttcatccaactctttcttatcttaagatgttgcattcccagcacattctagttatttttgagaactgtaagtgagaaaagtgagaaaactgggttgcccaaggccactcagagaactgccctgcaaggggtaagaagagaacagtaactttaaatcaaaataataataatcccaaagtgattgaaagaaacaacagtaataatactacaactattaatagtagtaacaatgaaactctggttaaattatatgtcagatacaggtttaagtgatttaatttttcaaaaaaaaaacttttttcctatgctatccttaaattaacttatttactccacagagaagcc

SEQ ID NO: 189696 - DNA, 600 bp, Homo sapiens
ttcttgtttaattgaatccttcatcattatgtaatgtcctttattgtctgttttgatcattgttagtttaatgtcagttttatctaaaataagaacagcaacacctgttcttctttgtttttcatttgtttggtacttctttctccatccctttactttgaacctatgggtgttctcacatgtgagatgggtctcttgaagacagcatacagttgggtcttgattctttatccactttgccactccgtgccttttaagtgggtgtttagcttgtttatcttcaatactgacatatgcacattygattctcccagcatgttgttagctggttgttatgtaaacttgattgtgtaattactttatagtgttgatggtctatatacttgagtgtgtttttctggtgctaggtaacagtccttcattttcacgtttagcactttcttaaggatctcttgtggtctctaaaggcctggtggtaataaattcccctagcttttgcttatctgaaatggattttatttctcccttgtttatgaagcttagtttggtgggacataaaattcttggtacaaaattttattttttcaaaaatgctgaata

SEQ ID NO: 189697 - DNA, 474 bp, Homo sapiens
ttctaaatgtatatgtcaatctctctagtgaaattggggaaattttttatagaatcccttatttctccaaggctttttcttttctttcccttttccttttttttttttttttttttttttttttgagatggagtcttgctctgtagcccargctggagtgcagtggcatgatctcagctcaatgcaagctccacctcccaggttcctaccaatctcctgcctcagcttttgagtagctggggctacaggcacctgccaccatgcccagtgatttttttttttttttttggtatttttagtagagacagggtttcaccatgttagccaggatggtctcaatatcctcccaaagtgctgggattacaggcgtgagccactatgcctgacctttcattttttaaaattcttcttttctttatttattttctggctgtgttaacttaaataatcagtcttcagtctctgagattcttt

SEQ ID NO: 189698 - DNA, 474 bp, Homo sapiens
ttctaaatgtatatgtcaatctctctagtgaaattggggaaattttttatagaatcccttatttctccaaggctttttcttttctttcccttttccttttttttttttttttttttttttttttgagatggagtcttgctctgtagcccaagctggagtgcagtggcatgatctcrgctcaatgcaagctccacctcccaggttcctaccaatctcctgcctcagcttttgagtagctggggctacaggcacctgccaccatgcccagtgatttttttttttttttttggtatttttagtagagacagggtttcaccatgttagccaggatggtctcaatatcctcccaaagtgctgggattacaggcgtgagccactatgcctgacctttcattttttaaaattcttcttttctttatttattttctggctgtgttaacttaaataatcagtcttcagtctctgagattcttt

SEQ ID NO: 189699 - DNA, 474 bp, Homo sapiens
ttctaaatgtatatgtcaatctctctagtgaaattggggaaattttttatagaatcccttatttctccaaggctttttcttttctttcccttttccttttttttttttttttttttttttttttgagatggagtcttgctctgtagcccaagctggagtgcagtggcatgatctcagctcaatgcaagctccacctcccaggttcctaccaatctcctgcctcagcttttgagtagctggggctacaggcacctgccaccatgcccagtgatttttttttttttttttggtatttttagtagagacagggtttcaccatgttagccaggatggtctcaatatcctcccaaagtgctgggattacaggcgtgagccacyatgcctgacctttcattttttaaaattcttcttttctttatttattttctggctgtgttaacttaaataatcagtcttcagtctctgagattcttt

SEQ ID NO: 189700 - DNA, 609 bp, Homo sapiens
aaatgtgtcagcagctttcaactttgatttttgctcttataattttttagcttggttttgtttcccttccctttaacagatcatttcctttcctgagttggtgccagcatcttgtgtatctagatttctgaggacactgcttttcaaagtgtgctctaaagatccttggttctaaaatggtactgtcagaaagctgctttcacctatttgaatacatacttcttgttacatctgaattccaacagatgcagtttttttctttttcttttttttttttttttttttctgagggggagtcttgctctgttgcccaggctggagtgcagtggtgtgatttgggctcactgcaagctccgcctcctgggttcacaccattctcctgcctcagcctcccaagtagcttgggactacgggtgcccgccaccacacctggctaattttttcgtatttttagtagagatggggtttcrccatgttagcctggatggtctccatcttctgaccttgtgatccacctgcctcagcctcccaaagtgctgggattacaggcgtgagccaccactcctggcccaacagatgcagctgtttgcaggcaagtgatacctgatt

SEQ ID NO: 189701 - DNA, 411 bp, Homo sapiens
tgcttgcttcttgatcataggatctcagccatggttcatatttgaataacacagaatgtcggccacagaactaaggactggacatttggtcctttgtgactgttgttacaggaaagtaaatggttttgttacattgcttgtcaggaaaaagaataggaaggcrccttctatctcaggctcttttccttaaagaaggtaggtttaatgtaaaacctgaattgtgagtaagcctggggatatcgtttttagctgttccaaattgagcaagtacttagtcaaactaccagagttttggaatatgcctgagtaagccagtctgaaatagctgatgatccagcttaagactattcaatatccatgcacctgccttttctaaagcttaaacttcaaaagagcaacagtaacaagtac

SEQ ID NO: 189702 - DNA, 411 bp, Homo sapiens
tgcttgcttcttgatcataggatctcagccatggttcatatttgaataacacagaatgtcggccacagaactaaggactggacatttggtcctttgtgactgttgttacaggaaagtaaatggttttgttacattgcttgtcaggaaaaagaataggaaggcgccttctatctcaggctcttttccttaaagaaggtaggtttaatgtaaaacctgaattgtgagtaagcctggggatatcrtttttagctgttccaaattgagcaagtacttagtcaaactaccagagttttggaatatgcctgagtaagccagtctgaaatagctgatgatccagcttaagactattcaatatccatgcacctgccttttctaaagcttaaacttcaaaagagcaacagtaacaagtac

SEQ ID NO: 189703 - DNA, 362 bp, Homo sapiens
cgagggtctaaatgtttgttcctcacataggattccagaacactcctgctgttgtttgtatgtttgtctgtcacataggattccagaacactgtggctggggtawgtatgtccctgatataggatggaagaacgctgataccaggttctgaatgtttgtctgtcacacaggattccagaacaccactatgagggtctgaatgtctctccctcacaaaggattccagaaaactgctgcaagggtctgaatgtttgtccctcccataggactccagaacacagctgcgagggtctaaatgtctgtccctcacataggattgcataacactgttaggagggtcaggatgtttgtccttcatgtag

SEQ ID NO: 189704 - DNA, 362 bp, Homo sapiens
cgagggtctaaatgtttgttcctcacataggattccagaacactcctgctgttgtttgtatgtttgtctgtcacataggattccagaacactgtggctggggtatgtatgtccctgatataggatggaagaacgctgataccaggktctgaatgtttgtctgtcacacaggattccagaacaccactatgagggtctgaatgtctctccctcacaaaggattccagaaaactgctgcaagggtctgaatgtttgtccctcccataggactccagaacacagctgcgagggtctaaatgtctgtccctcacataggattgcataacactgttaggagggtcaggatgtttgtccttcatgtag

SEQ ID NO: 189705 - DNA, 362 bp, Homo sapiens
cgagggtctaaatgtttgttcctcacataggattccagaacactcctgctgttgtttgtatgtttgtctgtcacataggattccagaacactgtggctggggtatgtatgtccctgatataggatggaagaacgctgataccaggttctgaatgtttgtctgtcacacaggattccagaacaccactatgagggtctgaatgtctctccctcacaaaggattccagaaaactgctgcaagggtctgaatgtttgtccctcccataggactccagaacacagctgcgagggtctaaatgtctgtccctcacataggattgcataacactgytaggagggtcaggatgtttgtccttcatgtag

SEQ ID NO: 189706 - DNA, 517 bp, Homo sapiens
attctcctgcctcagcctctggagtagttaggactacaggcttctgccaccatgcctggctaattttttgtatttttagtggagacggggtttcaccatgttagccaggatggtctcgatctcctgacctygtgatccacccaccttggcctcccacagtactgggattagaggcatgagccaccaagcccggcctgaatgtgatttttgtttgtctgtaggtttctttgtttctctttctttgtttctttgtttctctataggtaggatgttgtccactccacctttgctctgttggagctgctgttttgtacagttggagaataacatgcctagctgtaggtttttagcatgtgtcctgtctggtgcactctgagcttccgatctttgattttgtgtctgacattaacagtggaagttgtcagacatgactgttgcagatgtttcttctacttctctctcttctccttctagtattctcatcactctatgttacaccttttctagctgtcctaca

SEQ ID NO: 189707 - DNA, 517 bp, Homo sapiens
attctcctgcctcagcctctggagtagttaggactacaggcttctgccaccatgcctggctaattttttgtatttttagtggagacggggtttcaccatgttagccaggatggtctcgatctcctgaccttgtgatccacccaccttggcctcccacagtactgggattagaggcatgagccaccaagcccggcctgaatgtgatttttgtttgtctgtaggtttctttgtttctctttctttgtttctttgtttctctataggtaggatgttgtccactccacctytgctctgttggagctgctgttttgtacagttggagaataacatgcctagctgtaggtttttagcatgtgtcctgtctggtgcactctgagcttccgatctttgattttgtgtctgacattaacagtggaagttgtcagacatgactgttgcagatgtttcttctacttctctctcttctccttctagtattctcatcactctatgttacaccttttctagctgtcctaca

SEQ ID NO: 189708 - DNA, 611 bp, Homo sapiens
acacaacttggcctcccaagttgttgggatgacaggtgtgagccactgcacctggccaagtttcagtcttcttgctgatggagrgacttgccttaatgtaaggtggtggttgctgagcgttggggtggctgtggcaatttcttaaaataagacaacattgaagtttgctgtgtcaattgactctctgtttcacaaaagaattatctgtagcatacgatgttgtttgatagctttttacccacagtagaactttcaaaattggattcaatcctgtcagaccttcgtactgctgtaccaactaagtttatgtattattgtaaatcactgggttcaatcctgtcaagccctccttctgctgtaccaactaagtttattctaaatctgttgtcatctcaacaatgtttacactgtcttcaccacgagtagatttcatctcaagaaaccactttctttgctcatccgtggaagcaactcatccactcacgttttctccggaggctgctgcagtctcgccacatcttcaggctctgtctctgtttctagtgctcttgttatttccaccatatctgcagttacttcctacagagaagtcgtgaacccctcagtgtcat

SEQ ID NO: 189709 - DNA, 611 bp, Homo sapiens
acacaacttggcctcccaagttgttgggatgacaggtgtgagccactgcacctggccaagtttcagtcttcttgctgatggagagacttgccttaatgtaaggtggtggttgctgagcgttggggtggctgtggcaatttcttaaaataagacaacattgaagtttgctgtgtcaattgactctctgtttcacaaaagaattatctgtagcatacgatgttgtttgatagctttttacccacagtagaactttcaaaattggattcaatcctgtcagaccttcgtactgctgtaccaactaagtttatgtattattgtaaatcactgggttcaatcctgtcaagccctccttctgctgtaccaactaagtttattctaaatctgttgtcatctcaacaatgtttacactgtcttcaccacgagtagatttcatctcaagaaaccactttctttgctcatccgtggaagcaactcatccactcacgttttctccggaggctgctgyagtctcgccacatcttcaggctctgtctctgtttctagtgctcttgttatttccaccatatctgcagttacttcctacagagaagtcgtgaacccctcagtgtcat

SEQ ID NO: 189710 - DNA, 447 bp, Homo sapiens
aaaccactttctttgctcatccgtggaagcaactcatccactcacgttttctccggaggctgctgcagtctcgccacatcttcaggctctgtctctgtttctagtgctcttgttatttccaccatatctgcagttacttcctacagagaagtcgtgaacccctcagtgtcatctgtgagggttggaataatcttcccaacttctctctctcttttttttttytttttttgagatgaaatcttgcctggactggagtgcagtgatgcgatctcagctcactgcaacctccacctcccgggttcaagcaattctcctgcctcagcctcccaagtatttgggattacagtcacccccgaccaggcccagctaattttttgtgtgtttttagtacagagaggatttcactttgttggccagtctggtctcaaattcctgacctcgtgatcc

SEQ ID NO: 189711 - DNA, 495 bp, Homo sapiens
acttgaaagttgaaattattctgtgatccaagggcactagaatgaatgttgggttagtaggcatgaaaacaatattcagctctttatacatctctgtaaawgcccttgagtaccaggggcattgtcagtgagcggtaatactttgaaagtaatcttatttcttgagcagtaggtgtcaacagtgggcttaagatattcagtaaaccgtatttgtaaaccgatagtctgtcatccaggctttgttcccatttgtagagtacaggcagagctgtgttttatcataattcttcagggcccttggattttcagaatagtaaatcatcattggtttcaagttaacatcaccaactgcattagcccttaacaaaagagtcagcatgtcctttgaagccttaaagccaggcatcaactcctctctagctgggaacatcctagatggcatctccttctagtagaaggctgttttgtctccattgcaaatctgtttagtgtagc

SEQ ID NO: 189712 - DNA, 495 bp, Homo sapiens
acttgaaagttgaaattattctgtgatccaagggcactagaatgaatgttgggttagtaggcatgaaaacaatattcagctctttatacatctctgtaaatgcccttgagtaccaggggcattgtcagtgagcggtaatactttgaaagkaatcttatttcttgagcagtaggtgtcaacagtgggcttaagatattcagtaaaccgtatttgtaaaccgatagtctgtcatccaggctttgttcccatttgtagagtacaggcagagctgtgttttatcataattcttcagggcccttggattttcagaatagtaaatcatcattggtttcaagttaacatcaccaactgcattagcccttaacaaaagagtcagcatgtcctttgaagccttaaagccaggcatcaactcctctctagctgggaacatcctagatggcatctccttctagtagaaggctgttttgtctccattgcaaatctgtttagtgtagc

SEQ ID NO: 189713 - DNA, 497 bp, Homo sapiens
gacttgaaagttgaaattattctgtgatccaagggcactagaatgaatgttgggttagtaggcatgaaaacaatattcagctctttatacatctctgtaaatgcccttgagtaccaggggcattgtcagtgagcggtaatactttgaaagtaatcttatttcttgagcagtaggtgtcaacagtgggcttmagatattcagtaaaccgtatttgtaaaccgatagtctgtcatccaggctttgttcccatttgtagagtacaggcagagctgtgttttatcataattcttcagggcccttggattttcagaatagtaaatcatcattggtttcaagttaacatcaccaactgcattagcccttaacaaaagagtcagcatgtcctttgaagccttaaagccaggcatcaactcctctctagctgggaacatcctagatggcatctccttctagtagaaggctgttttgtctccattgcaaatctgtttagtgtagcc

SEQ ID NO: 189714 - DNA, 495 bp, Homo sapiens
acttgaaagttgaaattattctgtgatccaagggcactagaatgaatgttgggttagtaggcatgaaaacaatattcagctctttatacatctctgtaaatgcccttgagtaccaggggcattgtcagtgagcggtaatactttgaaagtaatcttatttcttgagcagtaggtgtcaacagtgggcttaagatattcagtaaaccrtatttgtaaaccgatagtctgtcatccaggctttgttcccatttgtagagtacaggcagagctgtgttttatcataattcttcagggcccttggattttcagaatagtaaatcatcattggtttcaagttaacatcaccaactgcattagcccttaacaaaagagtcagcatgtcctttgaagccttaaagccaggcatcaactcctctctagctgggaacatcctagatggcatctccttctagtagaaggctgttttgtctccattgcaaatctgtttagtgtagc

SEQ ID NO: 189715 - DNA, 497 bp, Homo sapiens
gacttgaaagttgaaattattctgtgatccaagggcactagaatgaatgttgggttagtaggcatgaaaacaatattcagctctttatacatctctgtaaatgcccttgagtaccaggggcattgtcagtgagcggtaatactttgaaagtaatcttatttcttgagcagtaggtgtcaacagtgggcttaagatattcagtaaaccgtatttgtaarccgatagtctgtcatccaggctttgttcccatttgtagagtacaggcagagctgtgttttatcataattcttcagggcccttggattttcagaatagtaaatcatcattggtttcaagttaacatcaccaactgcattagcccttaacaaaagagtcagcatgtcctttgaagccttaaagccaggcatcaactcctctctagctgggaacatcctagatggcatctccttctagtagaaggctgttttgtctccattgcaaatctgtttagtgtagcc

SEQ ID NO: 189716 - DNA, 478 bp, Homo sapiens
ttttccatcagtactcgctgctttatcttgcgcttttatgttatggagatgacttttttccttaaacctcaagaaacaagctcttctagcttcagacttttcttctgcagctgcctcacctctctgagtcttcatagaattgaagagagrctggatgcggtggctgtcacacctgtaatcctagcaatttgggaggccgaggcgggcagatcacctgaggtcgggagttcgacaccagtctgaccaacgtggagaaaccccatctctactaaaaatataaaaaatcagccaggcgtggtggcgcatgcctgtaatcccagctactcgggatgctgaggcaggagaatggcttgaacttgggaggcagaggttgcgataagccaagattgcgccattgcactccagcttgggcaagaagaatgaaactctgtcttaaaaacaaagaaaaaaagtaaaaagagaggcttaggcttaatgg

SEQ ID NO: 189717 - DNA, 478 bp, Homo sapiens
ttttccatcagtactcgctgctttatcttgcgcttttatgttatggagatgacttttttccttaaacctcaagaaacaagctcttctagcttcagacttttcttctgcagctgcctcacctctctgagtcttcatagaattgaagagagactggrtgcggtggctgtcacacctgtaatcctagcaatttgggaggccgaggcgggcagatcacctgaggtcgggagttcgacaccagtctgaccaacgtggagaaaccccatctctactaaaaatataaaaaatcagccaggcgtggtggcgcatgcctgtaatcccagctactcgggatgctgaggcaggagaatggcttgaacttgggaggcagaggttgcgataagccaagattgcgccattgcactccagcttgggcaagaagaatgaaactctgtcttaaaaacaaagaaaaaaagtaaaaagagaggcttaggcttaatgg

SEQ ID NO: 189718 - DNA, 445 bp, Homo sapiens
ctcgctgctttatcttgcgcttttatgttatggagatgacttttttccttaaacctcaagaaacaagctcttctagcttcagacttttcttctgcagctgcctcacctctctgagtcttcatagaattgaagagagactggatgcggtggctgtcacacctgtaatcctagcaatttgggaggccgaggcgggcagatcacctgakgtcgggagttcgacaccagtctgaccaacgtggagaaaccccatctctactaaaaatataaaaaatcagccaggcgtggtggcgcatgcctgtaatcccagctactcgggatgctgaggcaggagaatggcttgaacttgggaggcagaggttgcgataagccaagattgcgccattgcactccagcttgggcaagaagaatgaaactctgtcttaaaaacaaagaaaaaaagtaaaaa

SEQ ID NO: 189719 - DNA, 478 bp, Homo sapiens
ttttccatcagtactcgctgctttatcttgcgcttttatgttatggagatgacttttttccttaaacctcaagaaacaagctcttctagcttcagacttttcttctgcagctgcctcacctctctgagtcttcatagaattgaagagagactggatgcggtggctgtcacacctgtaatcctagcaatttgggaggccgaggcgggcagatcacctgaggtcgggagttcgacaccagtctgaccaacgtggagaaaccccatctctactaaaaatataaaaaatcagccaggcgtggtggygcatgcctgtaatcccagctactcgggatgctgaggcaggagaatggcttgaacttgggaggcagaggttgcgataagccaagattgcgccattgcactccagcttgggcaagaagaatgaaactctgtcttaaaaacaaagaaaaaaagtaaaaagagaggcttaggcttaatgg

SEQ ID NO: 189720 - DNA, 445 bp, Homo sapiens
ctcgctgctttatcttgcgcttttatgttatggagatgacttttttccttaaacctcaagaaacaagctcttctagcttcagacttttcttctgcagctgcctcacctctctgagtcttcatagaattgaagagagactggatgcggtggctgtcacacctgtaatcctagcaatttgggaggccgaggcgggcagatcacctgaggtcgggagttcgacaccagtctgaccaacgtggagaaaccccatctctactaaaaatataaaaaatcagccaggcgtggtggcgcatgcctgtaatcccagctactcgggatgctgaggcaggagaatggcttgaacttgggaggcagaggttgcgataagccaagatkgcgccattgcactccagcttgggcaagaagaatgaaactctgtcttaaaaacaaagaaaaaaagtaaaaa

SEQ ID NO: 189721 - DNA, 440 bp, Homo sapiens
ctggtgaggagcttccccttaagcctgagtttctgagaggggagagggagaagctgggtgaggctcgcatggaccttggggtgtccgtgctgggggaccgttcataagaagagccagacaagaccctactgttcttaggtgcagacatgattaggaaacctgcagctcccaggggccccyactgatgttctaactcgcagaaggaaggagtgtgtgtgcgtgtgtgcgtgtgcgtgtgtgtgtgtgtgtgtgtgtttgtgtgtgtgcggtgtgagctatgtgccccttaaggaaatggaaatcaaccaaccaatgggacagacagacagacagacagacagagattcacttgcccaagtgttctgtcctgtcctctgaatccgctttcaagtcgcaagacgctgtgagctccaagtccacgcagagtccgccaaacgctc

SEQ ID NO: 189722 - DNA, 440 bp, Homo sapiens
ctggtgaggagcttccccttaagcctgagtttctgagaggggagagggagaagctgggtgaggctcgcatggaccttggggtgtccgtgctgggggaccgttcataagaagagccagacaagaccctactgttcttaggtgcagacatgattaggaaacctgcagctcccaggggcccctactratgttctaactcgcagaaggaaggagtgtgtgtgcgtgtgtgcgtgtgcgtgtgtgtgtgtgtgtgtgtgtttgtgtgtgtgcggtgtgagctatgtgccccttaaggaaatggaaatcaaccaaccaatgggacagacagacagacagacagacagagattcacttgcccaagtgttctgtcctgtcctctgaatccgctttcaagtcgcaagacgctgtgagctccaagtccacgcagagtccgccaaacgctc

SEQ ID NO: 189723 - DNA, 412 bp, Homo sapiens
cagtgttaaccaaaagtggaaatctaaggccccccaacagccatctgaatggacccatcctcttggcagaggccattccggagttaacctgaaactctagttcaggccatgatgaaaasgggcttggaaatgcctcattgtacccctccagcattaacatcaatacaaacctcaagtgtaacaagaaacatttacaatctattttctctgaggcctgtgacctggtggcttcatctgcatgataaaaccttggtcttcataactgcttattgtaacacaggcattcctttcttctaataactctttcaatcaatgtttaaatttatctatgacctggaagctccccaccctaccagatcaaaccaatgaaaatcttacatatattaattgatgtctcatttctccctgaaat

SEQ ID NO: 189724 - DNA, 417 bp, Homo sapiens
ggggacagtgttaaccaaaagtggaaatctaaggccccccaacagccatctgaatggacccatcctcttggcagaggccattccggagttaacctgaaactctagttcaggccatgatgaaaacgggcttggaaatgcctcattgtacccctccagcattaacatcaatacaracctcaagtgtaacaagaaacatttacaatctattttctctgaggcctgtgacctggtggcttcatctgcatgataaaaccttggtcttcataactgcttattgtaacacaggcattcctttcttctaataactctttcaatcaatgtttaaatttatctatgacctggaagctccccaccctaccagatcaaaccaatgaaaatcttacatatattaattgatgtctcatttctccctgaaat

SEQ ID NO: 189725 - DNA, 417 bp, Homo sapiens
ggggacagtgttaaccaaaagtggaaatctaaggccccccaacagccatctgaatggacccatcctcttggcagaggccattccggagttaacctgaaactctagttcaggccatgatgaaaacgggcttggaaatgcctcattgtacccctccagcattaacatcaatacaaacctcaagtgtaayaagaaacatttacaatctattttctctgaggcctgtgacctggtggcttcatctgcatgataaaaccttggtcttcataactgcttattgtaacacaggcattcctttcttctaataactctttcaatcaatgtttaaatttatctatgacctggaagctccccaccctaccagatcaaaccaatgaaaatcttacatatattaattgatgtctcatttctccctgaaat

SEQ ID NO: 189726 - DNA, 417 bp, Homo sapiens
ggggacagtgttaaccaaaagtggaaatctaaggccccccaacagccatctgaatggacccatcctcttggcagaggccattccggagttaacctgaaactctagttcaggccatgatgaaaacgggcttggaaatgcctcattgtacccctccagcattaacatcaatacaaacctcaagtgtaacaagaaacatttacaatctattttctctgaggcctgtgacctggtggcttcatctgcatgataaaaccttgrtcttcataactgcttattgtaacacaggcattcctttcttctaataactctttcaatcaatgtttaaatttatctatgacctggaagctccccaccctaccagatcaaaccaatgaaaatcttacatatattaattgatgtctcatttctccctgaaat

SEQ ID NO: 189727 - DNA, 417 bp, Homo sapiens
ggggacagtgttaaccaaaagtggaaatctaaggccccccaacagccatctgaatggacccatcctcttggcagaggccattccggagttaacctgaaactctagttcaggccatgatgaaaacgggcttggaaatgcctcattgtacccctccagcattaacatcaatacaaacctcaagtgtaacaagaaacatttacaatctattttctctgaggcctgtgacctggtggcttcatctgcatgataaaaccttggtcttcataactgcttattgtaacacaggcattcctttcttctaataactctttcaaycaatgtttaaatttatctatgacctggaagctccccaccctaccagatcaaaccaatgaaaatcttacatatattaattgatgtctcatttctccctgaaat

SEQ ID NO: 189728 - DNA, 530 bp, Homo sapiens
cagttccaggcacccacgatacaccaccgaactcacgaatttcactgacttactcccccgtctccctcatgttctcacccccagccctcagggactcttctgtctctctcagctactctccaaccatctccagatttcacctggagtcagcttcccgcacccaggaatcacctacaaactcacggaccttactgmaaccctcccccatttctttcacctcttcaccccctgccttcagggactctcctgggtctcccagcttctctccagccttccccagatttctgccacagtcagccccaggcacccaggacaaccctagacactcacaggcctcacgagactatctccctatgacctgtacctatacaggaatggctcccacgcatacctcagtgaccccaaacccatctccacttacactcaggcactcccagggcctgacagctactccccgttatcgtccttcagttcgaagccctggccaatctactagcccacatgacgcagttacctggccatttctccac

SEQ ID NO: 189729 - DNA, 522 bp, Homo sapiens
ctacacctcctactctggtacaagaggggactgtggcacatccaagtcccacggggccagagtggactgtggctgtcgcatgcttgggagtggcattcaccaggtttctacgattgggcactaaccaaaaccaagggccagctttctacacctggaagctctacagcatgataagaattaaaacaagcatcgaatgaagtcatatgatgactaagatcagtcaaattggagttacggtcaatcagcaggaaattgtcaacatcggaattcacagccttgccctagagaaggaaggagaaacaagckgagaggccagcagatctgtgggatgttgcccctcaaggaagccacaacaatagaacaagtttatccaggaaggggagagggtaatgaatccaggccgtcacagtgagcttcaggtcagatagggggcaggacaggatgaggaggacggagtggcttggctaaagagttgatgcagagctgggtcctctggaagatccagccaggatcagcaaggag

SEQ ID NO: 189730 - DNA, 522 bp, Homo sapiens
ctacacctcctactctggtacaagaggggactgtggcacatccaagtcccacggggccagagtggactgtggctgtcgcatgcttgggagtggcattcaccaggtttctacgattgggcactaaccaaaaccaagggccagctttctacacctggaagctctacagcatgataagaattaaaacaagcatcgaatgaagtcatatgatgactaagatcagtcaaattggagttacggtcaatcagcaggaaattgtcaacatcggaattcacagccttgccctagagaaggaaggagaaacaagctgagaggccagcagatctgtgggatgttgcccctcaaggaagccacaacaatagaacaagtttatccaggaaggggagagggtaatgaatccaggccgtcacagtgagcttcaggtcagatagggggcaggacaggatgaggaggacggartggcttggctaaagagttgatgcagagctgggtcctctggaagatccagccaggatcagcaaggag

SEQ ID NO: 189731 - DNA, 556 bp, Homo sapiens
atatgccaacatcatgctgtcttgattactatagctttatagcaagtcttgaagttgagccgtgttgatctcccaatgttgttcttctccttcaatattgtgttgattattctggtcttttgcctctctatgtacactttagaatcaatttgtcaatagccacaaaataacttgctgagattttgattgggattgcactgtatctataaatcaatttgggaaaaactcacatcttgaaaataattgacttttcttatccatgaacattgaaggtctctccatttatttagttattctttgatttctttcattagagttgtgagttttacctcaaatatatcttgtacatattttgttagatttataacccaagtgtttcttttctttgcatgttaatgtaagtgatcttgtttctatttcaaattccatttgttcattgctggtatatagaaaagcaattgacttttgcatattaaccgtatattctgccacctttctataattgcttattaatkccaagaggtagttttctcttttgttcctgattcacgtggat

SEQ ID NO: 189732 - DNA, 614 bp, Homo sapiens
attagctctaactgattttttgtgaaatatttggggttttctacatataagaccatattatctgcagacagacacttttacttcttcctttctgacttggatgccttctttttcattttcttgcctaactgctctggatagaacttccagtagaatgtttaatagaagtggtgaaagtgaacatcctagccttgtcactgatcttagaggaaaagctttcagtctcttaccattgagtatgacatttgctgtgggctattcataaatggcttttattatgttgagatagttcccttctgttcctagttgttgagtgtcttttatcatgaatagttgttgaattttgtcaaatgctgcttctgcattgattcagatgatcrcatttttttcctttattctgttactatgatgtattatattgatcagttgttttgaaccatccttgcattccaggaataaatttttcatttgttcatttacttttattttatgtgcacctgtagagttaaaataggtttattgtagacaacatatagttggatcttgttttttgatccactttgacaatctcttttagttgatgcatttagacctttgatgtttaaaatgagaat

SEQ ID NO: 189733 - DNA, 614 bp, Homo sapiens
attagctctaactgattttttgtgaaatatttggggttttctacatataagaccatattatctgcagacagacacttttacttcttcctttctgacttggatgccttctttttcattttcttgcctaactgctctggatagaacttccagtagaatgtttaatagaagtggtgaaagtgaacatcctagccttgtcactgatcttagaggaaaagctttcagtctcttaccattgagtatgacatttgctgtgggctattcataaatggcttttattatgttgagatagttcccttctgttcctagttgttgagtgtcttttatcatgaatagttgttgaattttgtcaaatgctgcttctgcattgattcagatgatcacatttttttcctttattctgttactrtgatgtattatattgatcagttgttttgaaccatccttgcattccaggaataaatttttcatttgttcatttacttttattttatgtgcacctgtagagttaaaataggtttattgtagacaacatatagttggatcttgttttttgatccactttgacaatctcttttagttgatgcatttagacctttgatgtttaaaatgagaat

SEQ ID NO: 189734 - DNA, 614 bp, Homo sapiens
attagctctaactgattttttgtgaaatatttggggttttctacatataagaccatattatctgcagacagacacttttacttcttcctttctgacttggatgccttctttttcattttcttgcctaactgctctggatagaacttccagtagaatgtttaatagaagtggtgaaagtgaacatcctagccttgtcactgatcttagaggaaaagctttcagtctcttaccattgagtatgacatttgctgtgggctattcataaatggcttttattatgttgagatagttcccttctgttcctagttgttgagtgtcttttatcatgaatagttgttgaattttgtcaaatgctgcttctgcattgattcagatgatcacatttttttcctttattctgttactatgatgtattatattgatcagttgttttgaaccatccttgcattccaggaataaatttttcatttgttcatttacttttattttatgtgcacctgtakagttaaaataggtttattgtagacaacatatagttggatcttgttttttgatccactttgacaatctcttttagttgatgcatttagacctttgatgtttaaaatgagaat

SEQ ID NO: 189735 - DNA, 351 bp, Homo sapiens
ctcacttatcatgtcaattgtactatttttttagtagttgccctagagtttgcaatatacatatgcaactaatccaagttcattctcaaataatgttatactgcttcacaggtagtgtgagtattttayagtaacaaaataatcctaattcctccctcccatccttatatcattgctgtcattcattttgctcatatataagcatacataagtggatatttatgaatacattgttgctattattattttgaacaaactattgtctgttaaatcaattaagagtaagaaaaatacattttttaaattttaccttcgcttattctttcttcagtgttcttcttgtatgtagat

SEQ ID NO: 189736 - DNA, 351 bp, Homo sapiens
ctcacttatcatgtcaattgtactatttttttagtagttgccctagagtttgcaatatacatatgcaactaatccaagttcattctcaaataatgttatactgcttcacaggtagtgtgagtattttatagtaacaaaataatcctaattcctccctcccatccttatatcattgctgtcattcattttgctcatatataagcatacataagtggatatttatgaatacattgttgctattattattttgarcaaactattgtctgttaaatcaattaagagtaagaaaaatacattttttaaattttaccttcgcttattctttcttcagtgttcttcttgtatgtagat

SEQ ID NO: 189737 - DNA, 615 bp, Homo sapiens
atctgttcttgcatgctgtcctctttatccattagagcccttagcatattaatcatagttgttttgaatttctggtctgataattccaaaatccatgccatatctgaatctggttctgatgcttgctctgtctcttcaaactatggtttttatgccttttagtatgccctgtaattttttcttgatagctggacatgatgcactgggtaaaagtaactgctgaaaataaggcctttagtgatttagtggtaaggggtgaggagagggggaagcattctatagtgctatgattacatctcagtcttttggtgagcctgtgcccctgggcggtraacttcacaggtgcttctcccccacctcccccgcaacacacacgtgtagaagggataggatggctagggtgggctggagttgagtatttcccttccaccaggtcagttagtctctcatgaaaccccagcaggttaggctctggctaactagtttcccctgaggacaaaccttgttaaaaagaacagaatgctctggcatattttgaaatgattccttttccccttccactgccagaagcacatggggatttttctccaatattcacttaagaacctcgtagat

SEQ ID NO: 189738 - DNA, 527 bp, Homo sapiens
cctgtttttgtcatgttttaaaactggaattgtagtccggcacagtggctcacacctgtaatcccagcactttgggaggcaggccaaggcaggtggctcacctgaggtcaagagttccagaccagcctggccaacatggtgaaatcccatctctactaaaaatacaaaaattatccgggcgtagcagcatgtgcctgtagtcccagcaacttgagagactgaggttggagaaccgcttgaacccgggaagcggaggctgccgtgagcagagattgtgccactgcactccagcctgagcgacaagagtgaaactccatctcaaatgaataaataaataaataaataaaactggaactgcacacttctcatttsgtttattattagttatttaatgtttttgctgatattgtaaaaggaattcatttgctattaagtttttttactgattgtcactgatatgaagaaacactattaatttgtgctaactggtcatttaacttaactctactagctcctacttgttttca

SEQ ID NO: 189739 - DNA, 522 bp, Homo sapiens
tctggccatctcagagggaagcccgcatctgctgaagcccctccctcctctgtcacccagccccttccccatcccagatcctgacctggaatcaaggccatatttatttgggcaagcttgggaccagactttcttgcctgggctcaagtctgctccaaaccccttccctactccccaaatcattgaagaggaaaccaacacagtrcattccagaaggaggccactttggggatgcaggaggaacaggataagtttagtgcccattagagacatctcagagaccagaggaagccagtccagcatgaaaggtctctaggctttatcactcatcatccttccatgagtcattgttgatttcactaaagctgcggctgtgatggggctggatgttccccatgacggtggcagtcacagagagtcaagcacaccccaagtgtgtccccagcctctccttcccagcaccagatggagtgactaagtggggggcccaggggagaagacaggctgggggccagaaggagg

SEQ ID NO: 189740 - DNA, 522 bp, Homo sapiens
tctggccatctcagagggaagcccgcatctgctgaagcccctccctcctctgtcacccagccccttccccatcccagatcctgacctggaatcaaggccatatttatttgggcaagcttgggaccagactttcttgcctgggctcaagtctgctccaaaccccttccctactccccaaatcattgaagaggaaaccaacacagtacattccagaaggaggccactttggggatgcaggaggaacaggataagtttagtgcccattagagacatctcagagaccrgaggaagccagtccagcatgaaaggtctctaggctttatcactcatcatccttccatgagtcattgttgatttcactaaagctgcggctgtgatggggctggatgttccccatgacggtggcagtcacagagagtcaagcacaccccaagtgtgtccccagcctctccttcccagcaccagatggagtgactaagtggggggcccaggggagaagacaggctgggggccagaaggagg

SEQ ID NO: 189741 - DNA, 497 bp, Homo sapiens
ctgcccatattgacatgcacgtgcgtgtagccatgtgtttgtatgtgcacacacacctgctctccagtgttgtccatgcacgtgcacaagtctctgtgggccacgtttctgcccgtgtatgtctgcagacctgtggccatgggcatgtgtgtgcacacaagtccaagtggatgcctggagctgtggatacatgtggtacacgtgtgtcttttgtgctccatggcccctcagggctcatccgactgcaggagctcatcatggccccatcaagatacaacatccgcctgaagatccgtcagctccccatcgactctgacgactcgcgccccttgctcaaggagatgaagcgaggccgggaattccgcattatcttcgactgcagccacactatggcggcccagatcctcaagcaggtgcgtgagtgctggccaccgggacagatgactggggtctgctggccacttctcccacgtcccyttcccaaatgtgggtgtgat

SEQ ID NO: 189742 - DNA, 420 bp, Homo sapiens
ggcacataggttccccctccatcttagaagctcatccaaacaagatctatacacagtagggcttcagccaactcagatcagcacacaggaggtgctttctcagcatggagcctggcacgtagtaggcctctcccagtacaggatctggcacacagtagaaattcctccagcattggcacatagtagggcgtcagccttcctagagtgtgcttcagagcaggcaagtttcagaaaaatgtcccctgggtcaagttttccttctctcttcactgtgctcaagaaatatgtactgagtacctagtactgccccagtttgataccaggtgttgcatgggggagcasagtaagggagacacaaaccttttattcttatttaaagaactgacagccaagtgatgaaataccacccctttacaaata

SEQ ID NO: 189743 - DNA, 420 bp, Homo sapiens
ggcacataggttccccctccatcttagaagctcatccaaacaagatctatacacagtagggcttcagccaactcagatcagcacacaggaggtgctttctcagcatggagcctggcacgtagtaggcctctcccagtacaggatctggcacacagtagaaattcctccagcattggcacatagtagggcgtcagccttcctagagtgtgcttcagagcaggcaagtttcagaaaaatgtcccctgggtcaagttttccttctctcttcactgtgctcaagaaatatgtactgagtacctagtactgccccagtttgataccaggtgttgcatgggggagcacagtaagggagacacaaaccttttattcttatttaaagaacygacagccaagtgatgaaataccacccctttacaaata

SEQ ID NO: 189744 - DNA, 605 bp, Homo sapiens
ccaacacagaatataagatagagccaccaagcagaaagccttgggacattgggaggtttcagtagaattggggtcagagcaggaacaaaatcttcctatctccttcacccaccctgagtactgccctcgccacccactctgtctgcacagggcttgtgattaaaccccctctgggccttgctccaagtcccagccgtaaatatcctattaaaagcatctctgcctggctcaagcctcattccaaggccggggtggrgggtcgttgagttggtaaaatggcagggcctgaagctttggcccctcagccctgcagcctggctgaccttccaggacaagactctggggaaggcaccaccccagtgaccccagtaccttccacgttaatgccattggccactggggtcaagatcgaaggtcttaaagagaggatcctagtgtccccgggtccaggagttgctctcagcaccctaagatctcaggatgggatggggagggctgccatgagtggggagaaagttgtggacccctggaatgtgccccaccccaccttcccagtcttgctcctctgccctgctcccagctctggacagaggtagagtttcagg

SEQ ID NO: 189745 - DNA, 588 bp, Homo sapiens
cacaaggaaatttaggtcagtgtttaggccatctacagaggacaaaagttgtctaacaattcagcttaatggaaaaattattttaaaagcaaataatttgatgaaaacttagaactcwcaatattatttgggtaaaacagaaaaagttttatctcaattatatttcttttaaatgaaattagtagtgagccttcagacttgtttccaggaaagtctaaacatttaaactgtgttagatgtgcactcacagagagtaatgtactagaatctcctctaggatgtaaaacttttattaatttttacatttatacattgacgtttttaaatactgggagttttattctatcccatagtaacaaattttcaaaatcaacataatgaaattaaatactggagttatatcttaaatttgtttaatgatacaaatgccataaaaataaaatcatcctgattatatacattctggtatatagttattatcggtttaactgcagattccttttttgtttgcagatttgttttaaaggcccccaaatgttcaaattttgctggttctacctttaagttaaacaaatatataatcaaatt

SEQ ID NO: 189746 - DNA, 605 bp, Homo sapiens
aataccagttgggagtgtcctgaaaagtgatgtactgaaatactgacccttccagctggttaactttcataatcatgcatttacttttcaatggcaactgaatatatgactgcctgatgattcaggggaaaaaatgcagtattgtgtgtggaattggaagagattcaaagtgagtgccatggcagtgactaacttctttcaaaagcttaaggaagaaacaatgcataggcctttgagttagttggtgtagtaagcattgtgttttcaccatcagtatccatttctatattttggtgacagtactccattttgttcttccgggaaccactcctctcctatagtccatgatctttgggtggaccagaggtaaagcatatgactcaaatytggctaatcatagcacaagagttttccttgctacagtaatttgttaaaggatgggaaggtaactctctatcctttaacaaattactgtagcaaggtaattggttcagtgaatctaggagctactggaagggatctcttgctggacttggactggagtgaatatagaactaaagtttttgagaactgtcttgttgccacatgatgaagtctgagtataa

SEQ ID NO: 189747 - DNA, 267 bp, Homo sapiens
tttctctggtcatactgttccatgtcatcctgccctaataaacctgcaacattatacaacttgtgtgtgtatattttaacacatcttctgaccactgcagttttttcacagattgttatcaaaggaaaacagaggaatacaagactcgtcatttgactggattttttaaaaaagtttytaaacatctaactgtcaaaacaagaatactgggtgggcatggtggctaacgccttgtaatccagcactttgaggggccaaggtgggcag

SEQ ID NO: 189748 - DNA, 544 bp, Homo sapiens
gtaagcagcttgttgtatggtccatatatttgctagtaatcttcattccagacttaaactaaccatgcagaagatgtggaggcagagtgtgctgtcccagtatctgtgtcctgatgatggtcctcgggcttaggctaagcagcaggctgccrgcactatgtccaaatcacccagcccccagtgacaactgcccttgtggtcatctaatgccttagttgggtaaccccagaagcagatgctgagagtgcaaggagttcatttgagagacaaagaaggaggggaattgagaaagtataggaaaggcagccaaataaaggaggcatgggcattacccagccaatcaccatgaggacaaatggagctcaatcatgataggaaactctgggagccagtgtagactcgtgctcaggtatcccacccaaggaatgaggagctttggtatttatacactaacttccattaatcattagctgaagtctactgggagctgtggggaggaacagtaattcctggacatctgcagcttgccacacaggtgagcaaa

SEQ ID NO: 189749 - DNA, 550 bp, Homo sapiens
gagttaaaatttgccttttacatttacataattttctgtttacctgttgctttccccctaaatgcgccaacagatttttcaagagtcttcatctatctatgtatctatccatccatccattctagcttataacatcaatttataagctataaaacgaatttattttgcataaaattagttgtgaactatagagaaatataaaacaaaaatacagttttaggaagaagaatacatgaacacctgtggtctcactacctaggtcaagaaattacatgttacatttatcctagaagtttcctcaagatatcctttaatggcaccccctcccttccaggaaatcacaagcctattttaacatattagtcattctcttgggaccattctctgctcaagcctgcaatatcctccatgtccatacatgtatttttggccaaaatttttaattttgaaaaaccaaaaagctctactacctctctaartctgttagtcaggataggctgaactactttaatgaataattaccaaatcagtggtttttaacacaaaattt

SEQ ID NO: 189750 - DNA, 538 bp, Homo sapiens
ttgcagtcccagctactcgggaggctgaggtgggaggatggcttgatcccagaagatggagactgcaataagctgagatcataccacggcactccatcctgggcaacagagcaggacccatttcaaaaaaaaagaaatccctttctccttatgtaacactacttggcctagaaaagccagtatttgtgtccactgtgctctgccagggctgcttatgtaggggccttcgttcataatatgacaacgaagcaggtgactgaatcaaaaattaattcctccatgatgctaaaagactgtgtctgtgttctccaaaatggagtcagtttgtgaagagaatttttgtcagaccagtttattcattgctacacaaagytttcttaagtgacatgcagtgggcaaacaagggaacaatgacaccaaagttatgtcaagcttgtacttgtaccacccacaaatgaagatggaataataatgttgccacctataagctaatgaacaaaatgcaacaatgggcccaaacatgcatatacccattgcc

SEQ ID NO: 189751 - DNA, 601 bp, Homo sapiens
taaagcgtgcagtgggcttagggttgagcaaagggacaagtcaatatttgtacatgcatggttgaatgcatattagagaagaggacttggtattgaaatgacattcagttaagggacagaagagtagcaaaaagaggtatcctagaacagctacttgccatctcagattattgcaagaggaagcctcactgattgagaccacattaatttgaaatctgtgatacctctgagattttcactaacaactaaaaagggggcttgtcaaataaatcagtagtataacaattggcaaaagtgctgcttaagacaaacgactttcaagcccttgggaagcattcattacattactatttaaaacygtggctttacttcccactggtactttcttagtcttgactagctgagttctttgtatgtataagtcttcctttttacaagaggttttatgatttaggaatctcttaaactctaacaacctgtctcgtgagtacagttgtccctcggtatttgagggggactggttccaggaacccttcggataccaaaatccacacatgctcaagtccctgataaaaaaatgtcctagcatttgcacatcacc

SEQ ID NO: 189752 - DNA, 565 bp, Homo sapiens
cgcctatgacattctctcaagagtttagagtaggagaggattttagaacatgatagtaacaagtaaaattagtattttttggactccaggtacctgtttgaaattatattgtttagaatataacaataacagtgaaattaaattgttgtcttaaagtgaataactgtaaagccatgtgtgatctgaacccccgagcctgcccttatctatcaaaatcctggtgtctgaagaagtccaaaatggaaacacactctgaacagatttccggcaggagcttccaccaggttttcttcgtggcaagccctagaaatagtctggactacaagcaggtctttttaaaaccatgctcctttatttaatcatgaagatttaaagtttataagtttagaaattcagggataaaaataacccactgagtgtcaggcctgattgctaagtgctgttcaggtgtgatctcacagctctctcagcattttcrtcactgccaccacttcacaggtgagaaaagtgaggcagacaacagacaagttactggtctaagtggtagaataaaaatataacccca

SEQ ID NO: 189753 - DNA, 585 bp, Homo sapiens
tcaaatagaaaaattatcacctggatacctggcttctggaagcccatcattttatttactcaaagtagaagttcttcctcatacctttggtcatagtcaagagaattgtcatctgcttgggatactttaggtgtattttcaaaaactttcactgaacacctactgaagtaatgcaagttcatgcttaagagctcatgctttgggtgtaaatcccaaggctgatactttgtctaaatctcaacatacgcacttgtgatgcatatgtatccataygcataactggcactatttctccatgttcttttctagtcctcaaagcatagctatacaaatagcttgcagtttcacaaggtaactattattttatcatttatcataaacattcttgccttcataggcttaattgttactagttttaattgctgcgtaatattccattgctaggtgtaaggctttggggaagttatttaaccttctctgtgcctcagtttcctcctctagtaaaatgagaataatagcactgcacacctgattaattgctgcaaggattcaacgagactttggaaagcatttggcacggcgcac

SEQ ID NO: 189754 - DNA, 585 bp, Homo sapiens
tcaaatagaaaaattatcacctggatacctggcttctggaagcccatcattttatttactcaaagtagaagttcttcctcatacctttggtcatagtcaagagaattgtcatctgcttgggatactttaggtgtattttcaaaaactttcactgaacacctactgaagtaatgcaagttcatgcttaagagctcatgctttgggtgtaaatcccaaggctgatactttgtctaaatctcaacatacgcacttgtgatgcatatgtatccatacgcataactggcactatttctccatgttcttttctagtcctcaaagcatagctatacaaatagcttgcagtttcacaaggtaactattattttatcatttatcataaacattcttgccttcataggcttaattgttactagttttaattgctgcrtaatattccattgctaggtgtaaggctttggggaagttatttaaccttctctgtgcctcagtttcctcctctagtaaaatgagaataatagcactgcacacctgattaattgctgcaaggattcaacgagactttggaaagcatttggcacggcgcac

SEQ ID NO: 189755 - DNA, 585 bp, Homo sapiens
tcaaatagaaaaattatcacctggatacctggcttctggaagcccatcattttatttactcaaagtagaagttcttcctcatacctttggtcatagtcaagagaattgtcatctgcttgggatactttaggtgtattttcaaaaactttcactgaacacctactgaagtaatgcaagttcatgcttaagagctcatgctttgggtgtaaatcccaaggctgatactttgtctaaatctcaacatacgcacttgtgatgcatatgtatccatacgcataactggcactatttctccatgttcttttctagtcctcaaagcatagctatacaaatagcttgcagtttcacaaggtaactattattttatcatttatcataaacattcttgccttcataggcttaattgttactagttttaattgctgcgtaatattccaytgctaggtgtaaggctttggggaagttatttaaccttctctgtgcctcagtttcctcctctagtaaaatgagaataatagcactgcacacctgattaattgctgcaaggattcaacgagactttggaaagcatttggcacggcgcac

SEQ ID NO: 189756 - DNA, 585 bp, Homo sapiens
aaagggtacacaataggtacctaaaagcagatagctgtaattactactatttatcttttgtgctctgaggtttctcatactgtgttggtgccacactctaatcagctgcataaaagggtagatcacttgccaccacagaggcatgtgggagaagacagcatgtctaggacattacgctgaggctgaggcagtaggcaaggaagtccaacctgcaggctaagagtcagttttcactcctgtgggaaaagcatgcccagctctcagcaaaagcatagaaatcaagagagaacagtaaaggcaaacaggatatgtagcctagttccagttgaaggtattattcctaacaatgaaaaatgtcaatataactatttccagagttaaaacttcagacacatgctatgacaatgagacagtatgtttgaaactacagatgtccaaggaaattcaggctatatgctcaccatatgtagagaaggcagggaaatttaattgtttgtagagaaagagacccaagacttcgtaaagccatgggatatggagttgggggacctgccagtcrccttgtcagttcacttcattttataa

SEQ ID NO: 189757 - DNA, 538 bp, Homo sapiens
ttgcagtcccagctactcgggaggctgaggtgggaggatggcttgatcccagaagatggagactgcartaagctgagatcataccacggcactccatcctgggcaacagagcaggacccatttcaaaaaaaaagaaatccctttctccttatgtaacactacttggcctagaaaagccagtatttgtgtccactgtgctctgccagggctgcttatgtaggggccttcgttcataatatgacaacgaagcaggtgactgaatcaaaaattaattcctccatgatgctaaaagactgtgtctgtgttctccaaaatggagtcagtttgtgaagagaatttttgtcagaccagtttattcattgctacacaaagctttcttaagtgacatgcagtgggcaaacaagggaacaatgacaccaaagttatgtcaagcttgtacttgtaccacccacaaatgaagatggaataataatgttgccacctataagctaatgaacaaaatgcaacaatgggcccaaacatgcatatacccattgcc

SEQ ID NO: 189758 - DNA, 505 bp, Homo sapiens
tgagcccaggagtttgacaccagcctgggcaatgaagtgagaccctgkctcatttacatatgtatatagaaagaactacagtcttgaggaaaccaactcaagaccaatatgttctgtgatgtagatttcctagagacgtagttgttgttaactacagaaagaaccccatgaagataaataggggtagagacataaaaattggaagataaccagaataaagccatctggtagtgatattgccaaacgtcatctagacaataattggacatctgtttaatgacctctgagagctccagggaatgtttcttttctgctactaaagaaggatgtcactaatcacattgcaagtagccctgagtatgtccagaggaaggattttctagttaagcagaaagttttttgagctttcacattaaattaggcttatattagaggggctacaagaattaaaatatttgcaaatgtatagaatacctaatccaatcctgcaaaactgttttatgca

SEQ ID NO: 189759 - DNA, 556 bp, Homo sapiens
taattgtttttggtatttttttgtagaggcgtctccatattgcccaggctggtcttgaactcccgaactcaagggatctgccagccttggcctcccaaagtgctggggttataggtgtgagccactgcacccagcgcagatccattctttaagcaagctaatactttataacagagccaggcacggttggctcacgcctgtaaccccagcactctgggaggcccagacaggtggatcacctgaggtcaggagttccagactagcctggccaatatagtgaaaccccgtctctactaaaaatacaaaaattagctgggcatggtggcatgcacctgtaatcccagctactcaggagtcttaggcaggagaatcacttgaacctgggargaagaagttgcagtgagcctgggcaacagagtggactccgataaaaaaaaaaaacacttcatatggtactttactgttcaaccctctaagaaagctaaataatttattccgtgttatttttagtttttcagaaatgaatatactggctgatatatttttaaatcagttc

SEQ ID NO: 189760 - DNA, 548 bp, Homo sapiens
cctcccaaagtgctgggattacaggcatgagccactacacccagcagacaattgtatttttcaaataaattttctaatataattttctaaagctaggtataaacaaatatacattgtttgaaatattattgttattaatgtcttaagggtctttttyttctaatgactagatttgaataagtttcacaatagtaaaggatgttaacaagaccttttaggtaaggccaattcaatgaactaattcaatatactgttgttgtagattctacaacttgatatacagttggagtagatttgttatatacttgaatatgtgtgtcctataagtgtctgagataattcactcagttggaaagagctgcatatagagaagtgctaaaactgttaggtctgcataaggttagtggttttttattttaggagactctgtgatttatggcttgatgttggagtctctgggaaaggaaggaagttgtacccaaaaaagcctctggaaggtgctgtagtcataatctttctcacagaactaccagggagtcctcttgaaa

SEQ ID NO: 189761 - DNA, 525 bp, Homo sapiens
tggcataaatattctggtgcaggtttttgtatggacatgggtttcaactcctttaggtaaatatcaagaagggtatttgttggatcgtatagtaagagtatgtttactttgaatgaaactgccaaactgtcttccaaagtgactgttatcattttacattccaccagcagtgaatgagagtccttgttctttcatattctccccagaatttggtgttatcagtgctttagatctggctcattctwataagtatataatatatcttattattgttttaattttaatttctcaaatgcaatacaatacgaaggatactaaagttaaagggaaaaaacagcttcaaaaaagggtgtatgtgaggctgtaagaataatatattttcaaaatagaattaaaataaatcaataattaaggtaaaattaaaactcatgaacatagatacattttttcttatttttcttttaaaagaagaaactcaagccatgtcactttatgcaaccatgtgaggtatctttacatattttt

SEQ ID NO: 189762 - DNA, 615 bp, Homo sapiens
cttgtggtctctaaatttattaaatgtagggtaggagcaagaaaatacaagaaagaactggaacatcttgtcactaagaaagcaaatacaatttttaagacttctgggagcagaggaattgggtggaagtgcaagaaaaagaaatgagtatgggtttaactattctgttctctccaagttttacataagttaaaaaaaaacttcatagataatgcatcccaattagtgaagcttgtagccaataaaacataaaaataataattatttatacaagctattcaacraacagatctctacctttaggaagtaggttatcttcaggaggaaggcttttattgtttagcttgcattttctgctgcttgtgggtgtatatattgtaaatgttttcattatttatgtcggagaaatcaatatttttctgaatttatgacaagagcatatatttccatattgtgtgagagcattaccattgacagcataagaatttataacatgatgataaaatcccatcaactacatgcattttaaaatcaaatttaccttctaattcttcaaaaatggaaatataattaaatattgttcttctgaaacatagtataattcacaaatatgat

SEQ ID NO: 189763 - DNA, 615 bp, Homo sapiens
cttgtggtctctaaatttattaaatgtagggtaggagcaagaaaatacaagaaagaactggaacatcttgtcactaagaaagcaaatacaatttttaagacttctgggagcagaggaattgggtggaagtgcaagaaaaagaaatgagtatgggtttaactattctgttctctccaagttttacataagttaaaaaaaaacttcatagataatgcatcccaattagtgaagcttgtagccaataaaacataaaaataataattatttatacaagctattcaacaaacagatctctacctttaggaagtaggttatcttcaggargaaggcttttattgtttagcttgcattttctgctgcttgtgggtgtatatattgtaaatgttttcattatttatgtcggagaaatcaatatttttctgaatttatgacaagagcatatatttccatattgtgtgagagcattaccattgacagcataagaatttataacatgatgataaaatcccatcaactacatgcattttaaaatcaaatttaccttctaattcttcaaaaatggaaatataattaaatattgttcttctgaaacatagtataattcacaaatatgat

SEQ ID NO: 189764 - DNA, 585 bp, Homo sapiens
gtattatgttgacttcctctactacacaactttggytcgagaactgcattggttttctagggctgctgtaacaattaccaaaacgagagtggcttaaaaccattgaaattcgttctaatcgatattagatgaagaagtctgaaataagtcacactgggctgatatcaagaagtcatcagagccgttcttcctccagaggctctaggaaataatccgtccctcgcttattctagcttctggtgactgcagcatttcttgacacttggggctgcatcactccaatctcagcctcattggtcatttgctttctcctcttgtgtgtttgtcttctcctttttctgtctgtgtgaaatctccctcctctctctcaggaggacacttactaatttcattatgcaagataatacctttatcttaaaatccctaatttaatcttatattttaccaaacaaaattatattcttagactctggtaactagggcctgatatccttggggcactttttcagcagaccacatgggctccattttagcatggacacaatcttcttaaagctacacttcagtataagcattgactctcca

SEQ ID NO: 189765 - DNA, 585 bp, Homo sapiens
gtattatgttgacttcctctactacacaactttggttcgagaactgcattggttttctagggctgctgtaacaattaccaaaacgagagtggcttaaaaccattgaaattcgttctaatcgatattagatgaagaagtctgaaataagtcacactgggctgatatcaagaagtcatcagagccgttcttcctccagaggctctaggaaataatccgtccctcrcttattctagcttctggtgactgcagcatttcttgacacttggggctgcatcactccaatctcagcctcattggtcatttgctttctcctcttgtgtgtttgtcttctcctttttctgtctgtgtgaaatctccctcctctctctcaggaggacacttactaatttcattatgcaagataatacctttatcttaaaatccctaatttaatcttatattttaccaaacaaaattatattcttagactctggtaactagggcctgatatccttggggcactttttcagcagaccacatgggctccattttagcatggacacaatcttcttaaagctacacttcagtataagcattgactctcca

SEQ ID NO: 189766 - DNA, 580 bp, Homo sapiens
caaaacagtttgagaacaattaacagaagaattttgataatcctataacagagtatatgtattctatgtgaattctgagttctaaaaaatcttaaaataatcagggcttattggaaaaataaggttgagccaatccacttgaacctggtacaactcagaaataacacacacacacacacacacacacacacacacacaaattagtaagggcaacaataacaaaaacactgagaagtttgagaagtaactccattagccaasgtaggaagctcactatggctatagatttcctacagggatagaaaaaaatgtgccctccaaaatgaaaaataaggtagaaatactagcttgcggaccctgagataatgcagatgtagctgcgcctctaagcactagaagaagtatcaacaagctaggagcctagaactattccaaggttagggatgtgcacctttaaggataatctgttacaggcattcattttattatttttttaaaaaagaaagaaaataaggattctctctgggcagtagccaagctttctccttttctgctaaagatttttagtttaatttatgat

SEQ ID NO: 189767 - DNA, 608 bp, Homo sapiens
gtgcacacactcatactacatcaagtaaaatagaattaaggattttccttacaatgtacatttcattttgtccagcctaagacagatcttaagcacacgttagtatcttaaagaaacatcaaagaataactatacccaggggagaggatagtcttactacatctgtcttactgaaaatgctgacccaggacacatgacttctttttcaaagataagaatgctaaaatactcaaactctgataaatctgtttcttggcttgctattagaatgtggtcagttcaacagtatttagtaacaagatgtagaacatatgatctttcaatgttttgcctttctgaatattttattatatagaaaaatttgaattatctgatatgactgaagacacaattaagttaatatactgattggtttagcaatattattggcaataatttctctttatctttctattctttcgtattcctgaaatgtagtgtagaatttccaaaatataaagaatcaraatagcactatgaataaataatcttgcttcttttgtacatatatattcactgtaacaagtctaataagttctattcttaatataagatagaactcatgtatg

SEQ ID NO: 189768 - DNA, 579 bp, Homo sapiens
ttttaccttcttagggtccacacatgatacttgtgctagaatcattgtgtttgattgcatgtattcttaaatgttaaaccatttgaattatctgatggtcagtagttctaaaatctttctcagtaaagaaatcctggtagcatctaatactaagctggaactaataaattaatttaaaaatattagatatagttactaacattctagaatcagattcagacaaaagattaaatgcaaacacattttaagattgtttgcatgaaacatgctaatgyttgcatattttaatgtctaaatattttgaatttaattttacacattagattgaagaatattcacaacaatgtgcatatcacagttttaagcaagacttgttccgatatacaagcacaattttcttatgtgcaatttcctgactcatgatttcttattgttctattttcttacaaataattttgaatgtaagaggatccattagggattttaatgattttattttacatttaataaaaagattggtaagaataacaataacattaacaataataatagttatgatcaaatagccattgatatttt

SEQ ID NO: 189769 - DNA, 626 bp, Homo sapiens
ttataaactgttggttggattgtaaattagttcagccattgtggaagacagtgttgcaattcttcaaagacctaaagacagaaattccatttgacccagcaattccattactgagtgtatacccaaaggaacataaatcactctattataaagacacgtgtaagtgtatgttcactgcagcactgttcacaatagcaatgaaatggaatcaacctaaatgtcaatcaatcatatactggataaagaaaatgtgttgcctatacaccatggaatactatgcagccatataaaaatgagatcctgtcctttgcagggaartggatagagttgatggccattatccttagcaaactaacacaggaacagaaaaccaaataccacatgttctcacttataagtgagagctaaatgatgagaacacatagacacataaaggcaacaacacacactggggcttttcagagggtggaggttggaaacaactgaagcgtccatcaatagatgactgggtaaagaaatgtggtgcatatacacaatgaagtactattaagtcataaaaaagagatcctgtcatttgtaacaacatggatggaactggtggtcattgtgttgattgaaataagcca

SEQ ID NO: 189770 - DNA, 543 bp, Homo sapiens
atatatttttgtaaccattaattatcatcacttcctttcatccactacccttccaagcctctgataaccatccatttactgtctatctctatacattctatttctgtgaaatagaaaaaaatgtatttttctatgtgttttgatagtgactagattgaatctgtagactgctttgggtagtatgaacattttaacaatattgattcttccaatccatggacatggcatatcttttcattttttaagttctcttcaattttcttcatcagmgttttatagttttttttgtagagatattttagttctttggttaatttttttcgtaagtagttaattttctgtgctttaagatttttgtggagtctttaggtttttattataagatcatagaatctgtgcaaacaaggataatttgacttcttccttttgaatttggatgacctgtatttcttacttttgtctgattgccctagttgggacttccagtaccatgttaaataacagtagtgaaagtgggcatccttgtcttgttccagatcttag

SEQ ID NO: 189771 - DNA, 529 bp, Homo sapiens
ataattttatagctagaatccaaagtatacaattttattatttgcattgtaataaaaatgttatcaatgcaatctattaataaattttatttatgttagaagcctgacatttacatctaattgtgagtaactgattaatattttgtacttataatgaagttttagaagcaattattgaaagaataagcaagatgtgctaactttgccaaaatgccagtttatagaactgctttgtgggaaaaccactattaaygcttgaacattcttaatgccttagggctctcatcatttgctaagacatgatcaacagctatgctgggctgccttggcctctgtctctgccaactcatgaatatgtctttcaaaaagtgccataaacagaacagagtataagctgcttctgttttctgagccttctgtcaggaatttaaaagtgctcttggttgggaagagaaagttaaatagaagccaaatagaaaatggtgagccttatcaggaaaacagtatttagatgatactcaactctaaa

SEQ ID NO: 189772 - DNA, 479 bp, Homo sapiens
  misc_feature (1)...(479): n = A,T,C or G
gtactgggattacaggcatgagccacccaagcctggccaagcaaatgaatttggatccatatttcatacgatttgcaaaaatcaacccaaaatagaaaaagatcaaaatataagagctaaaacaataaaactcctagaagaaaatacaactgtaaatctttgtgagcttgggttaggcaatggtttctcagatatgataccaaaagcacaagctacaaaagaaaaaagtagatttttttttttttgagagtcttgctctgttgcccagctggagtgcagkggcacaatcttggctcgctgcaacctccacctcctgggctcaagggattctcctgcctcagcttcctgggtaactgggattacaggtgtgtaccaccacacctggctaatttttgtatttttagtanagacggggtttcgcaatgttggccaggctggtcttgaactcctgacctcaggtggttcacctatctcggcct

SEQ ID NO: 189773 - DNA, 475 bp, Homo sapiens
tgcaatggtgtgcctttatttcaaatttccatgttgcactgtaagatgtcaattgtatgggaagaaaccatagagaaaaacaagaaagctggtttctttgatttracagacaatgtataaaccatttgggcactggcccagggaagtttgaaaaaagggattaagtcccttaaagattggtgtttcccatagggggcctcagcagaagggtaactattaaggaaggaaaagtagccccacctacaaaaaaggaggttatgatagatctttatatttctcatattaattcaaacattttctagccataccataagcaagaataaagacaaatttgcaagtttcctgttattttgtccctgtcaggctgtgggaacagcagcattgagatcctctgaagtcctggtgagagcagatgacaagtccgtgagtggccctgtgaagtgaaagcaggaagttcgactacatgaaagattta

SEQ ID NO: 189774 - DNA, 475 bp, Homo sapiens
tgcaatggtgtgcctttatttcaaatttccatgttgcactgtaagatgtcaattgtatgggaagaaaccatagagaaaaacaagaaagctggtttctttgatttgacagacaatgtataraccatttgggcactggcccagggaagtttgaaaaaagggattaagtcccttaaagattggtgtttcccatagggggcctcagcagaagggtaactattaaggaaggaaaagtagccccacctacaaaaaaggaggttatgatagatctttatatttctcatattaattcaaacattttctagccataccataagcaagaataaagacaaatttgcaagtttcctgttattttgtccctgtcaggctgtgggaacagcagcattgagatcctctgaagtcctggtgagagcagatgacaagtccgtgagtggccctgtgaagtgaaagcaggaagttcgactacatgaaagattta

SEQ ID NO: 189775 - DNA, 475 bp, Homo sapiens
tgcaatggtgtgcctttatttcaaatttccatgttgcactgtaagatgtcaattgtatgggaagaaaccatagagaaaaacaagaaagctggtttctttgatttgacagacaatgtataaaccatttgggcactggcccagggaagtttgraaaaagggattaagtcccttaaagattggtgtttcccatagggggcctcagcagaagggtaactattaaggaaggaaaagtagccccacctacaaaaaaggaggttatgatagatctttatatttctcatattaattcaaacattttctagccataccataagcaagaataaagacaaatttgcaagtttcctgttattttgtccctgtcaggctgtgggaacagcagcattgagatcctctgaagtcctggtgagagcagatgacaagtccgtgagtggccctgtgaagtgaaagcaggaagttcgactacatgaaagattta

SEQ ID NO: 189776 - DNA, 475 bp, Homo sapiens
tgcaatggtgtgcctttatttcaaatttccatgttgcactgtaagatgtcaattgtatgggaagaaaccatagagaaaaacaagaaagctggtttctttgatttgacagacaatgtataaaccatttgggcactggcccagggaagtttgaaaaaagggattaagtcccttaaagattggtgtttcccatagggggcctcagcagaagggtaactattaaggaaggaaaagtagccccacctacaaaaaaggaggttatgatagatctttatatttctcatattaattcaaacattttctagccataccataagcaagaataaagacaaatttgcaagtttcctgttattttgtccctgtcaggctgtgrgaacagcagcattgagatcctctgaagtcctggtgagagcagatgacaagtccgtgagtggccctgtgaagtgaaagcaggaagttcgactacatgaaagattta

SEQ ID NO: 189777 - DNA, 561 bp, Homo sapiens
aaacaaattctttaaatcatggtgttttaaaatgaattcttaaaaggagttgtttttattaataattctagggatccaagtatgcaaarcttgtgggtcccaggcaagaaacttgtcagtttggggtccaaagaaaaattgttttaagtacaaaatgaagtcagtgagtcacattgccttcaatcttaggctaactcatttaaaatatgaaaggattaatcaccacagattggtcaaaaaagaatctcagctcctcacttagtgttttcaggtagctctgaccagccagtctcagtctctcactgtccaggttccaaagaggtgtcatggtaccaggatactggggtatattgggcacacttgccttggcagagttttctggttgccaacaggatattcatctatctattcttccctttactaataaaactccaattttgttggatgtggcaatttatccaacattttaaaaagatactttgccaagcctcttctgcaggtagggcagctgtttgacccagttctggccagataattaataaaaaattacggattgagctt

SEQ ID NO: 189778 - DNA, 596 bp, Homo sapiens
cagaagaagttgttattgtgtgggaaatgatggatcaattttacacattagcccaaagcagacttgacaaaaacatccctgactgagtcagccagagacacaatggttgcccctgcccccaactcatattcagaaagaaactctgagatctaggtctctcctgagaagatgggctgtcatagtaaccaacaccaaacttctaaatgttgtgagctagaccaggataagcaatggcactgaaattacttcctaacatttgacaatagcatgtgtgattggagaactggcatcagtgcagctctctccctattcagaggcagagaatgaacataaacagaaaaatattggttagataactaaaaataatagaatcttggaataaaatatccagttgtcagtaggatatatttacacccataagtgaatttcttcaaggttgcttgctcwtccaagattagattgcagctatgccaaagtctcatttttcatggcgcgctcccatccccctgccaccagcaaaggaaattaaaggtcaaatggctttttcagaaaacaatttatctcctgtttctgggctgttcactaaataagaattt

SEQ ID NO: 189779 - DNA, 588 bp, Homo sapiens
ttacagttggttgaatagtcctaggttgtccatcgggcccttcacaatgcaaaatataactgctttgatatacttcaggggctttactaactccaactacgttaaattgagtgggttgaattggccacagagatggccagtgctgtagataaatgattgaaatgtccactcctgtattgaccaaacctttaaatttctttccctgaatagttatttaacaggtaggacatttatcagtaatttgattcacccaataagctgctttgccttgtttatttgtgcttccaaatcttcctgttcatttaatttcacttttccccatttccacatatggcacaatcaggagctgtgctatacgctctcctggctctgctttccagggaacagaagtagatataacaatttgaattttccyattgtaatctgaatcaatgactcctgtttgtacttgcactccttttaaatttaaactagacctacctagaagtaatcctatcatcccctctggcaacatctgacgggagacagcaacattttttaacagtcccattacaaaaggagaacctggtccatattgattaatagctt

SEQ ID NO: 189780 - DNA, 627 bp, Homo sapiens
acatgttgattaaatctgtttgtttttgtaaatatttctgtaatttttttttgcaaccaccaccagacttaaagcatggagctttttcactctaaaactttgtggggtaatttgggtaaaatgttttctatctgttctcctagctaacccctatatatcctttagaattcagcctcagtgtgttccaggaagcctcttctttwtcactgttcctttatctttctgtttttgactagcaaaatgccctgagtaatatgaaagtgcctccacagtattaaaactgtagtgtttctgtctgtcttatacaccagaatgtgaaaatctttaaggcaaagacttcatcttctttcatcttgagtctaatcctctagcatggtgcctggcacataacacaggctcaatagacatttgttgaactgaattgaatctatttatagaacagtttgtttaactaaatttattctaaagtgattcccaagtttccactagtccaagaagaatgctactttatgtacagcttcctgaaggagacattaatatgtattttttatgaaagcagtttctgatttgtgttgcagtgatagatttcagcatctgatgataggtttcagtgataggagagtgata

SEQ ID NO: 189781 - DNA, 546 bp, Homo sapiens
gctaaaacatccaatactaaaattgtttaaatatacaattcgaatgaactccgtggtctaagtcaaattacccatgataacccattagttatcagtgctatggatctaagttggagaaacaactggtattcaagaaggacaaatgtccaatgttaatcatggactcatgaagaaccaggacagccaccttgtccttcctgagtccttaaagcttttgttattaaaggttctatatttcatgacttgtcgtaaaaaagaaaaaaataatacaaattgaatatattgatgtggtgacttataaattgtggaaatagttgaaaacaaatgtttggttctatattcctgggaagacaatcaaagcttcaggtrtatttggctacttgatgggccatttaaacatttataaagagatttcattcagttgtcattttcaatgcatgttttctggttatataaaagctttcccatgcaagagggcttttgttaaagtggtagattattatgctatagtatattttcaccaggtaaagaacactttttatggtt

SEQ ID NO: 189782 - DNA, 465 bp, Homo sapiens
gaggcccaatgtaggagagaaactttagtgatgcatacgttgcctcataatcagtcaaaactcctcttaacctacattatggattaaagagaacattgccagggggccttcamtcttctaaaaggatatcatttgttaggtcctttttccatagtttagagtaaaagaggcaataattagaaatgcctccctcataataggctctacagcaacttctactttaaaggctatcattacacaacagactttaaattttcttatgactgttatgttaaataataggctcaacagaaaagtacctgtgcagctgctgacacttgtggcctatggagaaacacatcaaatgtagattataaaaattcagttgtagggggttaatgaaaagaccagttagtcaagcaaatagactcttcatctagctcattctttatttaattttagcgggtttggtttatagggaccctg

SEQ ID NO: 189783 - DNA, 591 bp, Homo sapiens
gtgggcttcctgggaagggtcttggaatgctagagaagctggattgttgcttctggttctcttttccccctgyagaaaccctggacccaggggaatacactccttgtctttgtgccaacttcggggaggagaccagttctgttaaacttctaattcagtttttattcaattctgtggaccacatggatgtctcaggcttgttattggagttttcacaaagatgctaaggactgtggatagttgctagttgcattttccatggggtgaaagggaagcctgagaaatcttattttgccatcttgctgatttcactcctttaaaatgtctatttaaaaattagacttagaacaaagaatggttaggacaaaaagggactgcaaaagatcattgccacttcaggtaaaacaaatcctcaatcactttagacagatgactgtctaagaatttaaaaatgatcaaacaaatagaaaattactctataaactcccacattgaaaatgacttcatggatagttgcagtacaatacatagtactcatcagaaatgggtgtggccatttactttttactttcttctaataatgtcaaatgc

SEQ ID NO: 189784 - DNA, 574 bp, Homo sapiens
cattacctaacttccaactatactataaggctatattaactaaagcagcatggttctgctacaaagacagacatgtagtgcaatggaacagaaaagagaactcagaaataaagctgcacacctacagccacccaatcttagcttatttttgtttaatttgtccaaggggaaagactccctatgcaatcarttgtagaagataggtggctagccatttgcagaagaataaagctggacccctacctttcatcatatacaaaaattaacttaagatggattggaacttaagatggattaaatatttaaatgtaagatatcaaactataagaatcctagaagaaaacctaggaaacaacattctggaaatcagccttgggaaagaatttatgagtaagtcctcaaaagcatttgcaacaaaaacaaaaaattgacaagtgggacctaattgaactaaagagcttctgcacagcaaaagaaactatcaacagagtaataagacaatctactaaatggaagaaaacattcacaacctattcatccaacaaagggctaatatacagaatctataagaaat

SEQ ID NO: 189785 - DNA, 611 bp, Homo sapiens
gaccttgtgatccaccctcctcggactcccaaagtgctgggattacaggcatgagccaccacgcccggatgattatattttataaaaaagcaaaactgcagtgtttcttgggaggaagcagagccattatagctatttatatgctcttggcctcttatagatctaagaagtttagattaaaatatttatgtttactgmagaaacttactttcatctcaaatatttcaaaatttccaaatataacctatcctttaattatattttatagcttttgttgttattgttgttgttatttgttttttatttttattttttagacaaggtctcactttgtcacccaggctagagtgcagtgagtgccgatcctcctgcctcagccctgccaagtagctaggactacaggcatgtggtactattcccggctaatttttttgtcttttttgtagagaggaggtttcactatgttgcccaggctggtctcaaactcctgagctcaagcaatccacctaccttggcctcccaaagcgctgggattacaggtatgagccactgtgcctggccgtattttataattctgatagtcttgtggactgttaagctcaacacattca

SEQ ID NO: 189786 - DNA, 481 bp, Homo sapiens
cagcctggccatctttccacctttgtggcaggtgaagtgggcaattaaatggtagctccaccatgtcatatagcactgggaaggagcaattcccaaaaggagatgacatgccaaacagatacccacttcatctggggagcaagtatagtgagaaaaaagcctgagatcaagctcccaggggccccaacattaaaaggttgggttatggaaaaaatggcctgctttttaagattttactgtgaatttgcatttcacttagagtctaaagtttctagtaagataaaaataaaaagcaatttcactgagaaataaatgtaactaaggaaacagttataatcctacaataagaggcaagaggtctaagggtgtcttattttgccatgaaccctgaatgatctgctgttattttccattttccaacatgtaaaccgaatatagcatttyctgtgcccgccccttgatagctccatgaacaagtact

SEQ ID NO: 189787 - DNA, 489 bp, Homo sapiens
tcagttgaaacagaaaattaaagctacttaaaactcctagcacaacatccctgtcactttggctgcctgccaacagttactgatatacatgtctggtgaatgtagataagcgctataggatatgccaggtggacgtctcaccaacgccacataggctactacagtcagcagtgatgaatgccaaggagagatacttagctttgtttaaagccattatttattgtcttttctaatcataagaagcacatgatctaagaagatcatctgaagaatacaaaaacatatagccaaattactttatgaaagcttaaagcaaaatttacattaccagcagcatgataaaaaaaaaaatcctcttttagagcactctctccaacattgggaactcttttaattgccaatttaataaggctttgtgtttttaaatatgtatcyttgattacttgtgaacttaaatgttatttaatatgtttatttttttctgttgtg

SEQ ID NO: 189788 - DNA, 610 bp, Homo sapiens
agtaccatgatggataccacatatatgtcttctagaatattgtcattactagccccctatgagtatatagtgaggcaagccactctctagagagtctactccataactcttggatgtttttaaaatcagcttcccaaaatgtaagctcaaaagatatgagaatagggtgggagatggtgatcaataattgaagtctactttccttctctgcttgaatcttcttcctcatccccacaatgccttgagccagaagggatgtacatatccttcccgtgtagaacatttcccttccacccccgggacttcaagattcatggttgaatatttaggtgacgtgacagcaacgggaaatagaaattaacacagacaaaaataacatctcyattatgtaattaatgataaaaactatatccatcatgtttatagtgtatattctcttgaggttgacttttcattttgttcatcaatgtttttatgaatacgaatgttagatttttatgattatgatttttatgtagtaaaatataaaatgtttttattatggattttttaaaactaaatattgtatgtttgagaagtcctcaattcagagctcagaagaatgttcata

SEQ ID NO: 189789 - DNA, 425 bp, Homo sapiens
tattttaaagttcagatctttttttyttttaattatcttgcagcttctcacatctattttaaaaattcctatgtaagcctgatatgttttgaatgctttgtcctctgcaaatttcattttgaaatgtggtccccaatgttggaagtggggcatggtgggaggttttagagtcatggggctgatccctcatgaatggcttggtgccatcctgggagtaatgagtgagttctcactctgagttgacatgagatctggttgtttaaaagatcctggcacttcctcctttctctctctctcctgctcttgccatatgacatgctggctccctttcaccttctgccacgatcgtagcttccttaggccctcactggaagcagatgctggtactctgcttcatgtacagcctgcaaaactgtgagcaaaat

SEQ ID NO: 189790 - DNA, 562 bp, Homo sapiens
tatatatatatatatatatatatatatatatagtttatgaggagaactatcttcttgttactgaaaccagagagaatgtgttcctgtgggtagtaaaggaaattaaaatattttacctccaaatatattycttttacgtattttgaggtggctgtttcaagagcctgcaaacagaagtaaccttgcaaagctgtattttgtcctgggggaacggaagaggcagggatttgcatctctagagaatctaccttgatacagccaggttttctctgtggccttcacttgtccgatctaggaaagattaactgagaatctaattacttcaaagatctaaaagaaacatttactatctattctctctgagggctgctacctgtgaagtttatttacataacaagaccacctttgctagccaggcctcatcttctcccccaacaccctccctcccccatagcccatagcttattttgccactgtcttaggctgttcttgtgtcactataaaaaaaaaacctgagaatgggtggcttataaaggaaagaggttaaattggctcacagttc

SEQ ID NO: 189791 - DNA, 523 bp, Homo sapiens
aggcatttttgtgaaaactaacaagctgatctttaaatttataagaaaattcaaggataccaaaaaaaagcaagagaaaattgaagaacaaatccgtagcactcatgcagtgaaatataaagacttatataaaggtatgttaagtaactattagttcaagtttagattcaaagaataatatatcattgaaagtatggaaactaactcatatatattcagtcatttaatttgtaataaatctgctactgcagggtagtggaaaaaagaagttacatttatttaatgatgctaggtaaattggacagcttgaccyttgccttactccacattaaaaacaaatcaattccaggaagactttagatttacctgtgatagacaagatattaaagcttctgtattatctttatggtgattagtaggtaaatatctttcaaataggacacaatagccctaactatcaaagaaaacattgataaatttgtctgtactaaaatgaaaatcttctgtttttaacagaacacaa

SEQ ID NO: 189792 - DNA, 516 bp, Homo sapiens
ggcctagaagaaggaaaggcatattcatttccaagcattaaaaaacccacaataaccttagtatttattgtcctaaaaaacatgcccagcatttaacaaataattgyaaggcatacaaaaaggcaagagtaaacacattgccataagacaaggccatcagaaccaggttcacataacaataatgtagaaactctcagaaagggaatttaacttaaactatgattaatatgttgatggttctaatgtaaaagattagaagtataaaaaataagatggaaatctagagaagagacatgaaaatcacaagataaaattgaatgagaatgctgaatattaaaaagacactaagatatgtgaaaagtgtcctttagtcttgttagtaggctgaatatagccaaagagagaatcagtgagtttgaagatagttcaatagaaattacccaaactgaaagagaaagagaaaaagaggaacacagcaacaacaactaaaacacagaacagagtttccaagaagtg

SEQ ID NO: 189793 - DNA, 604 bp, Homo sapiens
tctttcctatgccctctcattacaaattgctatttactacattaatatttattactccctatccaataacgattttaaaactgaggtataggtacttgctctggattcacaatcatcttgagtttaatctagatamactctcaacaagtccataagagtcaaatcttccagcctcccctgaggctagaggaaaggtcatagaacaagcagctgaacttctctcagaactaactcatttagagacccaccttcttatttagtaggtgtagctacccgaataatttaggtaaaatttccaaggttttaccaccagttagtggcagagcctggattagaattaaaggattctcatatcttagtcaatgttccttttccattacataatgtttttcttgtctgcaatagcccagtgacttgaaacacaaattcacagatcctaagaacaaacctaatgggtgtggcttctaaaaattattccatggacttttatgaaaacaaacaaacaaaaagtggagaagggctgtggagatggtagaaactgcagacatcttccaggaaagggcattttaagattccctcctgccatacaatcacggcgacaact

SEQ ID NO: 189794 - DNA, 604 bp, Homo sapiens
tctttcctatgccctctcattacaaattgctatttactacattaatatttattactccctatccaataacgattttaaaactgaggtataggtacttgctctggattcacaatcatcttgagtttaatctagatacactctcaacaagtccrtaagagtcaaatcttccagcctcccctgaggctagaggaaaggtcatagaacaagcagctgaacttctctcagaactaactcatttagagacccaccttcttatttagtaggtgtagctacccgaataatttaggtaaaatttccaaggttttaccaccagttagtggcagagcctggattagaattaaaggattctcatatcttagtcaatgttccttttccattacataatgtttttcttgtctgcaatagcccagtgacttgaaacacaaattcacagatcctaagaacaaacctaatgggtgtggcttctaaaaattattccatggacttttatgaaaacaaacaaacaaaaagtggagaagggctgtggagatggtagaaactgcagacatcttccaggaaagggcattttaagattccctcctgccatacaatcacggcgacaact

SEQ ID NO: 189795 - DNA, 503 bp, Homo sapiens
tctggccttaacttcacctcaaaattggggtgaatgtttgctttataagcatattgtgatatgatttacataaygtactttacacattgcctgaagcccattagggtctaatatttggtgatgtttatatttttgctattttcgcttatggctagatcatatatataaatgtaggagaaagggtaaaattaaagataattatctttatgtttagctttgacaaccaacagtatgatctcactaataatgcgtggaaatatagttttaataattggcttaatgggaaagagatgataagtttggtttgggccatactgaatttaatctacaagtaagagagtcatgtgaaaataatactcctgacaaataaaattctgtttttagaattttgagagccaagtaagagtcatgaaaccaagccattgattcaggaaggaaaatgatctagacacttgtagtaaaagttgcagcaaagtctggactaaaaggtcagtaagtcagag

SEQ ID NO: 189796 - DNA, 564 bp, Homo sapiens
  misc_feature (1)...(564): n = A,T,C or G
ctccaccacatccaggccctggtccatcagccccatacccaccttatccacaaaaacacatgggcccaggacctatgggagggggccccttanccccctcttcaaggatacacctatcaaggatacaaagatacccacagtacagctggcaggacagacctcgggagcctcctaaaaccacagtgtatgtggtagaagaccaaagaagacatgagttggaaccatccacctgcctcacagcctgctggactgctttctgttgctgctgtctccrggacatgctcacctgaccagcccagccatcctctcctgccagctctgccaccacctccgatagatgtgcctgcccctgtctcttctgattgctgtaataaatgactagctcatacaccttcggcactatgggattctagattagtgagggctgctgctgttaaattcagtgacttgatctctttaatgtccaaaatccatttcttactgacctttaaaaatgtgctaagtgactttttttggacaaaggcttagttgtggaaaatgtatttataattttgtaattataca

SEQ ID NO: 189797 - DNA, 205 bp, Homo sapiens
caactctgggagttgaatacaaacatcaccaaaaagttcctgagaatgcatctgtrtagtttttatgtgaagatgattccgtttccaacgaaatcttcaaagaggtctacatgtccccttgcagatgccacagaaagagagtttcaaaactgcgctctcaaaaggagtgttcaactccgtgagttgaatgcagtcatcacagaga

SEQ ID NO: 189798 - DNA, 439 bp, Homo sapiens
acttgcagattctgcagaaagtgtgtttctaaactgctacatcgcaaggaatgctcagctctgtgagttcmactcaatcatcccaaagaattttctgagaaagcttctgtcttctttttataggaagttatttcctttactacggtactcctcaaagagtgcaattatccccttgcagtttctacaaaaagagtgtttcaaacctgaactatcaaagaaaggttccacactgtgagttgaatgcagacatcacgaagaaggttctgagaatgcttctgtttagttctgtgcagtttatcccgtttccaacgaaatcctcagagaggaccaaatatccacttgcagtttctacaaaaagagtgtttcaaagctgaactatcaaataaaggttcagcactgtgagttgaatgcaaacatcacgaagagggttctgagaatg

SEQ ID NO: 189799 - DNA, 439 bp, Homo sapiens
acttgcagattctgcagaaagtgtgtttctaaactgctacatcgcaaggaatgctcagctctgtgagttcaactcaatcatcccaaagaattttctgagaaagcttctgtcttctttttataggaagttatttcctttactacggtactcctcaaagagtgcaattatccccttgcagtttctacaaaaagagtgtttcaaacctgaactatcaaagaaaggttccacactgtgagttgaatgcagacatcacgaagaaggttctgagaatgcttctgtttagttctgtgcagtttatcccgtttccaacgaaatcctcagagaggaccaaatatccacttgcagtttctacaaraagagtgtttcaaagctgaactatcaaataaaggttcagcactgtgagttgaatgcaaacatcacgaagagggttctgagaatg

SEQ ID NO: 189800 - DNA, 541 bp, Homo sapiens
acccgtttcgaacgaaggccacagagtggtccaaatakccacttgcagatcctacaaaaagagtgtttcaaacctgaactatcaaaggaaggttcaactctgggatttgaatgcaaacatcaccaagaagtttctgagaatgcttccgtttagttaggtgcagttatcccgtttccaacgaaatcctcagagaggtccaaatatccacttgtagattctacaaaaagtgtgtctcaaacctgctccatccaaaggaatgttcagctctgtgagttaaactcaatcatcacaaagtattttctgagaatgcttctgtctagtttttctatgaagctattccctttactaccataggcctcaaagcgctccaaatctccacttgcacattccacaacaagagtgtttccaaactgctctatcaataggaatgttcaactctgtgaggtgaatgcaatcatcacaaagcagtttctgagaatgcttctatctagtatttaggtgaagatatttccttttccaccacaaaccacaaagccctcca

SEQ ID NO: 189801 - DNA, 526 bp, Homo sapiens
aggccacagagtggtccaaatatccacttgcagatcctacaaaaagagtgtttcaaacctgaactrtcaaaggaaggttcaactctgggatttgaatgcaaacatcaccaagaagtttctgagaatgcttccgtttagttaggtgcagttatcccgtttccaacgaaatcctcagagaggtccaaatatccacttgtagattctacaaaaagtgtgtctcaaacctgctccatccaaaggaatgttcagctctgtgagttaaactcaatcatcacaaagtattttctgagaatgcttctgtctagtttttctatgaagctattccctttactaccataggcctcaaagcgctccaaatctccacttgcacattccacaacaagagtgtttccaaactgctctatcaataggaatgttcaactctgtgaggtgaatgcaatcatcacaaagcagtttctgagaatgcttctatctagtatttaggtgaagatatttccttttccaccacaaaccacaaagccctcca

SEQ ID NO: 189802 - DNA, 526 bp, Homo sapiens
aggccacagagtggtccaaatatccacttgcagatcctacaaaaagagtgtttcaaacctgaactatcaaaggaaggttcaactctgggatttgaatgcaaacatcaccaagaagtttctgagaatgcttccgtttagttaggtgcagttatcccgtttccaacgaaatcctcagagaggtccaaatatccacttgtagattctacaaaaagtgtgtctcaaacctgctccatccaaaggaatgttcagctctgtgagttmaactcaatcatcacaaagtattttctgagaatgcttctgtctagtttttctatgaagctattccctttactaccataggcctcaaagcgctccaaatctccacttgcacattccacaacaagagtgtttccaaactgctctatcaataggaatgttcaactctgtgaggtgaatgcaatcatcacaaagcagtttctgagaatgcttctatctagtatttaggtgaagatatttccttttccaccacaaaccacaaagccctcca

SEQ ID NO: 189803 - DNA, 541 bp, Homo sapiens
acccgtttcgaacgaaggccacagagtggtccaaatatccacttgcagatcctacaaaaagagtgtttcaaacctgaactatcaaaggaaggttcaactctgggatttgaatgcaaacatcaccaagaagtttctgagaatgcttccgtttagttaggtgcagttatcccgtttccaacgaaatcctcagagaggtccaaatatccacttgtagattctacaaaaagtgtgtctcaaacctgctccatccaaaggaatgttcagctctgtgagttaaactcaatcatcacaaagtattttctgagaatgcttctgtctagtttttcwatgaagctattccctttactaccataggcctcaaagcgctccaaatctccacttgcacattccacaacaagagtgtttccaaactgctctatcaataggaatgttcaactctgtgaggtgaatgcaatcatcacaaagcagtttctgagaatgcttctatctagtatttaggtgaagatatttccttttccaccacaaaccacaaagccctcca

SEQ ID NO: 189804 - DNA, 526 bp, Homo sapiens
aggccacagagtggtccaaatatccacttgcagatcctacaaaaagagtgtttcaaacctgaactatcaaaggaaggttcaactctgggatttgaatgcaaacatcaccaagaagtttctgagaatgcttccgtttagttaggtgcagttatcccgtttccaacgaaatcctcagagaggtccaaatatccacttgtagattctacaaaaagtgtgtctcaaacctgctccatccaaaggaatgttcagctctgtgagttaaactcaatcatcacaaagtattttctgagaatgcttctgtctagtttttctatgaagctattccctttactaccataggcctcaaagcgctccaaatctccacttgcacattccacaacaagagtgtttccaaactgctctatcaataggaatgttcaactctgtgaggtgaatgcaatcwtcacaaagcagtttctgagaatgcttctatctagtatttaggtgaagatatttccttttccaccacaaaccacaaagccctcca

SEQ ID NO: 189805 - DNA, 526 bp, Homo sapiens
aggccacagagtggtccaaatatccacttgcagatcctacaaaaagagtgtttcaaacctgaactatcaaaggaaggttcaactctgggatttgaatgcaaacatcaccaagaagtttctgagaatgcttccgtttagttaggtgcagttatcccgtttccaacgaaatcctcagagaggtccaaatatccacttgtagattctacaaaaagtgtgtctcaaacctgctccatccaaaggaatgttcagctctgtgagttaaactcaatcatcacaaagtattttctgagaatgcttctgtctagtttttctatgaagctattccctttactaccataggcctcaaagcgctccaaatctccacttgcacattccacaacaagagtgtttccaaactgctctatcaataggaatgttcaactctgtgaggtgaatgcaatcatcacaaagcagtttctgagaatgcttctmtctagtatttaggtgaagatatttccttttccaccacaaaccacaaagccctcca

SEQ ID NO: 189806 - DNA, 648 bp, Homo sapiens
ttcatatagtgtgggaaacaagaatgtaaaagtgagcacagaaatatacaagtatagatgatgacaaaggcattaaaaaaactattctggtggaattaaaagacagtgaggcaactaaagtgtttgggaaaaccttctccaaaaagttgatatttaggctgtgtgcaaattgactctaagatgtctactatgggaaaatctttgtgaagagaatgccaagcaaatgaaatagcatatgcaaaggctttaaggaagacacaatagttaaagaagccaagaagactatggtgttagagtatagtgacaaatgagcatggaacgaaatgaaatgatttagaagtcaatagacatgagatcatcaggagagctatggcaaagagtctgattttatgctaagtgcaataggaagccagagctgaaggtagrgacccacttcttcagctaccatctttgtccaatacaacagtaacccagattaaattctcatcagcaataagctcttccgcactgatcttgttatctctgcctcatggggattaattaccatagggcttcagttgctctgtaggaaaggtagagaactgtccacagtctgtgtgtggaaactatgtttcaggcaatatgacaccaggctgattcagtacccag

SEQ ID NO: 189807 - DNA, 618 bp, Homo sapiens
tgattttatacgtgaatttttataaacatggaggttatatttccaaccaaagtcgtatcaaatttgtctcatttttaaatgattcttttttgaacaaggaaaacttaatcttttattctgttcatccttgaaagatagttgaagccaaattgctacaaaattatgttggctgaaatacaaaatgaacacgttgggttctgtwaagctgggacatgttaggagtaatcatcttgattttctgctaagcactagtcatgctaatttctgccattaacaaatttgattaaattcaaagagggtaaacattttttttctaacttgaaacattctaatgtttagaaacaaaatttgtcaaccagaaacaggttttcctaatatgaaattaaaactatatctttttaagaacccaaaataaaacaaaacatatttctcatatttctttttacttccaggcaaatagtgtgatgctgatcatgtacttttcacttcctattttttttaattgtttagatacaatggctagtcttcttattcccagggatgatttcatctctcccatccaaatcattttagaatctaacaccagtgccaaaacatctggtatgaaagttgaaaatg

SEQ ID NO: 189808 - DNA, 586 bp, Homo sapiens
atgctttccacctgccacctgtcagtacagacactgcmtgtgggatagagaatgtgctacttttatataatttccacagaatgagacagagacatattaagacattcaaatgaaaagcaaaaaaaaaaacacaacaaaatattcagaaattttgtttcataattctgtgtgggatcctatttggatacttaaaaaatatcacagacattaccctgacacatttctatttatagtaattttttcctcaaaggaaacttgtacttcatctatttgtttaactccaacctatttggctttttcagttaattaacactttattaatcagtcagactagtctggcctacactacatactatatctaaattgcttagatatagtgtgctggttctgcaatgtgggattatcagaggacaggcagcaatatcatggttaatgcagtgaaatggctgtgattgtgatatgcccaccatgggactgcagggcagctgcatctgccactgagagataggttgtggctcaatgaaatacactggagcagcagcacacttgtgcttgaataagctcactctcttggctgatggagtta

SEQ ID NO: 189809 - DNA, 533 bp, Homo sapiens
agaaggagaagaacaagtggaagaggaactggaagaaagaaagaaatggcagcactatgcagacagcaacttgccatttgtgttttacttctctatccttagtgcctagactactgctcaacaaatatttgttacatgattaaggatatagctcaccatttcccttttttggacaattataatgaatactacaaataatacgtttgacaagtgtatgtgtggcattttttcttaaaatattgctttatgaaaattgttgtgaacatagctaattaacttatactttataattgccaccaccactatcttcattatcacaatgaattaattaagtagctaccttctagtgtcattgagatgcagttcttattttctaaatgctcactgtttcaaagaaagcagaaaagtatgaagacactaagaatccccctaaatgtacaattcaagkatctatcaatctatgatacagaggttagaacccaaaattaagtgtgtgtgtgtgtgtgtgtgtatgaatttaaatgaagtagatg

SEQ ID NO: 189810 - DNA, 506 bp, Homo sapiens
tgtcaggtcattgggaaagccaggagaagactccatctaaactcagttgtctttggttcctttcatctgtttgggaaggtaggcatcttgggttagaaagagtttggcagtgatttgaatactggacatcaagcctctctgatttcagctgctctcagcatggagactgtagtcatggtctgtcctgatgaacacatctggggaacaraaaaatgatccttgtgataatgtcattgagtgcttgtgaggcataaagccataagcttcttttttgctcctctgaggatgcaatcacataggtaattttggtgtacttaggtaattcaggataactttgggaagggaccatttctaaattcaaaagcagtactctcatttgcttagtgtggggctgaggcattttctacagaacagaataatggaatttctatttaaacaaagtagcacagtaaatttagtttcttctagttaaagcatgttcatgtaattattcccttaatgagata

SEQ ID NO: 189811 - DNA, 576 bp, Homo sapiens
atatactcagcaaaatttcccctctggttaaactcgatcatccacctactctatctctatggctgggctgctgaatattgctggagtaaaatattaactgaaatgattgaactcactatagactcatgcctgcatatttcaaatgggcacttagtgcagacttacagtcctaatacgcttctctggtatgttcaccttctcactgtcagagatgactgtttcccaatttggttcttctcaaacttcctacattcccttcccttgctctcactttcagcttcctcatacttcgctgagtaaatagacccaaccaatcaagtacagcctcattctcccacgtcatatctgccagcctgcatctgcacctaattccttggcctccctcctgttactgtagtcagagctctactgtctctgccaaaggccagtcctccatttgtttcctgaggccttgttgtcttgccatctcaagtatattgcacttgcagttttsttctttccacagcatcggtgatttttccaactctatgagatcattctcatcagttcattgtagtatctgctctcttaaaataa

SEQ ID NO: 189812 - DNA, 369 bp, Homo sapiens
tctgagaagagacaggaagggagccaaagtggagtatcaattgagtgcttaacctcatgtaggaggagatactcttctgaaattgaggattaagatgagacattagatagagggatgctagtagcttgaggatggcaataaggtaatgggaacaaatgagagagtttaccgtagataaatttcctcccaataaggtcatgaatatttcagttaatggcrtttagttaataaaatgacccagttgttgtttgattttatgttgtgtctgaaaaattaaccatttgtgtctgaaaaaccatttgtgtctgaaaaatgtagtagccatcaacatgtttttacctcttctgccttattatcactcacatacat

SEQ ID NO: 189813 - DNA, 355 bp, Homo sapiens
atttctctctctaccccctatgtctttttcaaaattcagaagcggagggtgctgctcaaccaaacaactcattaatgctgcaaactagcaaggagaatcatgctttaggtaatgtgcatcttttaacaataattctagtaggggagtgcttgatgtccatataggttttacatttttggatcttgaattgtctcatgcattatctgtattatctaaatgatattatatttaagagtgttaataaatttttcattctgaaattatttctrtgcttatttagtacctattttaagaatgggatcactaaacaaaaccaatggcctattcaaaaaatttgttattcaacttttgaaac

SEQ ID NO: 189814 - DNA, 385 bp, Homo sapiens
aactaccactttgtatttttcattagcttatatttttacttaatgcaaaatattttgcagaaaagttttctagctagctttattgctagtaagagaataacttttattaattgaattaatttttgtaatttgtgaccaatgaggtttgactcacrtcgcacattttctttaggaactcagatacttcatagatcttaataccctgatgaaaatttaagtcctaaaaggccaggaaatactgagattcaagttggctcctctaccatctttactgacagaaattcagagtgccaaaagtcagcactgctggttgctgatcatcatatctaaacattgattcttctaattgtgtattttgagacttgcttgattttagaattacagg

SEQ ID NO: 189815 - DNA, 522 bp, Homo sapiens
acttttctgcatgaaactgaaagaactaggaggtcactgggtaggatctactgagtcaagtttaagctcagttgaaagagaagctccaattttctgatgataagatgggctttcctgggaagtactgaagtctgtagctggaagcgttmaagagaaggatacaatcagtgtttctcaaactatggctcacaactcactaaagggttatcaagtgaatttacagggttgtaaccagtatttttaaaaatgaaaatggaatgaaattaaatagaaaagaataaaaggtatcagagagcattacaatagatatcaatattgttttgtgaactttatttttaatttgtgtgtgtgtttactaggttacaatgcaaaatgcatttttagtatgggctacagtctaaaaagtttttctgactagattatacatctagttgaggggaaacacaagtattgagtgggactgattgaactcaatgactattaagacccaactcaaaaaggcaaacaatcataatgttaaaa

SEQ ID NO: 189816 - DNA, 641 bp, Homo sapiens
ttccattataaagccttattttcagagtttataactcagccgtaaaactctgctccaagctgggccttggctttctagtcaaattctcaactcagcaacaaacccttttttttttcttaattccttctccttctcctcttcctcctccttttcctcccctttgcctttctcctttttcttctcgattaaaaaaaaaattgaattgctctagtttgcctaagttacacaaggacttccatgcagagaaatctttcagccactttatattcaagcacatttttttcaatgctcagktattgagatttttttcaggaactattaggaatcaagatgtttctaataaggcctgtgttacagtccttcaaatcataatgaagatgtataagccactactatttgatagtgggggtgggaggtttcagaagaggggattttatcacagaaatatttcaccttgtttctagaattctaaatgtctatttctaatcctgttccctaaaggtaaaagcaatgcatatatcccattattttatcaatgtgtgcatgggcccttgcagaacatagcatcagcacggtaacttccagatgggtggggtgtgtgtgtgtgtgtgtgtgtgtgtgtgtgtgtgtgtgtgtgtaca

SEQ ID NO: 189817 - DNA, 641 bp, Homo sapiens
ttccattataaagccttattttcagagtttataactcagccgtaaaactctgctccaagctgggccttggctttctagtcaaattctcaactcagcaacaaacccttttttttttcttaattccttctccttctcctcttcctcctccttttcctcccctttgcctttctcctttttcttctcgattaaaaaaaaaattgaattgctctagtttgcctaagttacacaaggacttccatgcagagaaatctttcagccactttatattcaagcacatttttttcaatgctcaggtattgagatttttttcaggaactattaggaatcaagatgtttctaataaggcctgtgttacagtccttcaaatcataatgaagatgtataagccactactatttgatagtgggggtgggaggtttcagaagagggkattttatcacagaaatatttcaccttgtttctagaattctaaatgtctatttctaatcctgttccctaaaggtaaaagcaatgcatatatcccattattttatcaatgtgtgcatgggcccttgcagaacatagcatcagcacggtaacttccagatgggtggggtgtgtgtgtgtgtgtgtgtgtgtgtgtgtgtgtgtgtgtgtgtaca

SEQ ID NO: 189818 - DNA, 572 bp, Homo sapiens
ttccccactgggaccctgaggagagacaattgccatgtcacactcagccaccagcttctcacaccttgccaggtctgggctacattctccagctctcagctcacaaaggcaggtctaagaaggccccaggagtgctacacaggaccagtgctggcatgcaccacctactagaccagacccagtcacctcccctcaagtgatgctaaaatggtttgccctgacccttctaaataatttcaaggtcctttgtctttcttttacaacatacacttagagattctcctgtgataccccctcgcctactatgaagtagctggagctgctctcactaaaaaaaggaacaaacacaaaattaatatctgaaaggctttcccttccyattctaatgtactatctcattataaaaaggtttgtgtgcttcttctaattacatgttcgaataattttgacagagtagaccagccatatgcatttctgtccaactttctgacagacacaattgccttcttaatgacaagtacagtttcatactcacagatatatctgaaacccctagcatcgtgactagcaca

SEQ ID NO: 189819 - DNA, 572 bp, Homo sapiens
ttccccactgggaccctgaggagagacaattgccatgtcacactcagccaccagcttctcacaccttgccaggtctgggctacattctccagctctcagctcacaaaggcaggtctaagaaggccccaggagtgctacacaggaccagtgctggcatgcaccacctactagaccagacccagtcacctcccctcaagtgatgctaaaatggtttgccctgacccttctaaataatttcaaggtcctttgtctttcttttacaacatacacttagagattctcctgtgataccccctcgcctactatgaagtagctggagctgctctcactaaaaaaaggaacaaacacaaaattaatatctgaaaggctttcccttcctattctaatgtactatctcattataaaaaggtttgtgtgcytcttctaattacatgttcgaataattttgacagagtagaccagccatatgcatttctgtccaactttctgacagacacaattgccttcttaatgacaagtacagtttcatactcacagatatatctgaaacccctagcatcgtgactagcaca

SEQ ID NO: 189820 - DNA, 609 bp, Homo sapiens
tatgtctgtgtctcctgtctagtgcagggcttggcatgaagttggaatccataaatgtttgctgaataaaggaaatatgcaccagaataagcatgagataggaaatcagggaggcagtgtaacggaaacrtgagagcaacaaactgggagtcagctgggccccaccccaccggaatggcgccatgtgactggacaaacctatacatttccaaggctcattgttgggttacatgaactcaaatatcatctagctctaaaagcttatgaccatatcatagccttaaaaataaataaactttcaagtggaaatgagaagtcaaaagccttaaatagcaaaatggagtgctcccaatggccttaaaggaattcacagatagacaaactgaatatagggaaatgaaagccaaaacaccaaaaatggcagtaaataacaggaatttattggcacattaaaatggaagctccctgagggcagagacttggtctgtcttgcttcctactgtatccccagtacttagactggagaaatggtgcctaactcatggtgggtgctgacttaactgaaaagatatgaaatgccagatttttacataggctcaaaccaggaac

SEQ ID NO: 189821 - DNA, 609 bp, Homo sapiens
tatgtctgtgtctcctgtctagtgcagggcttggcatgaagttggaatccataaatgtttgctgaataaaggaaatatgcaccagaataagcatgagataggaaatcagggaggcagtgtaacggaaacatgagagcaacaaactgggagtcagctgggccccaccccaccggaatggygccatgtgactggacaaacctatacatttccaaggctcattgttgggttacatgaactcaaatatcatctagctctaaaagcttatgaccatatcatagccttaaaaataaataaactttcaagtggaaatgagaagtcaaaagccttaaatagcaaaatggagtgctcccaatggccttaaaggaattcacagatagacaaactgaatatagggaaatgaaagccaaaacaccaaaaatggcagtaaataacaggaatttattggcacattaaaatggaagctccctgagggcagagacttggtctgtcttgcttcctactgtatccccagtacttagactggagaaatggtgcctaactcatggtgggtgctgacttaactgaaaagatatgaaatgccagatttttacataggctcaaaccaggaac

SEQ ID NO: 189822 - DNA, 442 bp, Homo sapiens
gtgggtgctgacttaactgaaaagatatgaaatgccagatttttacataggctcaaaccaggaactggtctggaaagcattgtaggggagacagccaagaggaaaagatctccaaaaagtgcacactactcacaagccatcatcatcatgtctctatataatttacctcttactagragatttccatcaacttctgtcattgtcacaccatctgtaataattacaccagaggatttttcatatgaaatagtagcttgaagctatgtgtgatgacagagaattaatttggatattgagaagactttaaagcagtacaattcctgccaagttactttttttttctttagccaaatgcgtgtgcttttccatggaagaaagccaacaagccttgatctgaatccatattggtattgtgggaacattccctaggaagcacctcaat

SEQ ID NO: 189823 - DNA, 442 bp, Homo sapiens
gtgggtgctgacttaactgaaaagatatgaaatgccagatttttacataggctcaaaccaggaactggtctggaaagcattgtaggggagacagccaagaggaaaagatctccaaaaagtgcacactactcacaagccatcatcatcatgtctctatataatttacctcttactaggagatttccatcaacttctgtcattgtcacaccatctgtaataattacaccagaggatttttcatatgaaatagtagcytgaagctatgtgtgatgacagagaattaatttggatattgagaagactttaaagcagtacaattcctgccaagttactttttttttctttagccaaatgcgtgtgcttttccatggaagaaagccaacaagccttgatctgaatccatattggtattgtgggaacattccctaggaagcacctcaat

SEQ ID NO: 189824 - DNA, 552 bp, Homo sapiens
gccctgtctttctgtgaccagaagtctagattcatctattgtgctcgattgctacccctcaaaactaaacagaacaaactaaatcctttcaccacctggtaatcctcaactatttgaagatggttacctcactcctaccatgaccactatcaccactttcaagacttattaatcccttcaaatattcctcmtggggatggtatccagtcttctcactattctcatgaggctttgtagtcacaatccaattttctatgtacctctaaaaatatagacctaactacagaccttcaggtagactcttcccacgtcaaagacaatgtcaattatcactgctcttgctctaggtgctactccttccttaagttagttaagttctcataggcactttaggtagctactatcatttgagcaacatttctccaacctagaataactgatgtttatttcatactttatgctttacaaattgcttttctctctctctctctcacttgaccctgatagcaacttataataaaggtattattttcatcattttcatatgatgaa

SEQ ID NO: 189825 - DNA, 376 bp, Homo sapiens
tgttccccacgactaccaaattattcaagatacatttgctaacacccagagataaaacttacacatgatttgtttttrgatttggacctgtccatatacatgtgcatggcaggtggtcagtgagccacctctccacgtacaagaatagaagaccatcagtgagtcacctgttcgtgtacaagtgcatggcacatcatcagtgagtcacctgtccacatacaagtgcatggcagatcttcaatgaatcacttccaccaaggcttcaaccgtcttcctggaggtcagagagcactggacattctagcacagtctcacatcagtagtctgccatttctcctgctcacatatccctaaaataacttagaaaacttatgaa

SEQ ID NO: 189826 - DNA, 514 bp, Homo sapiens
agccacatgattctaaattatttcattttcctttccctttgctgcttggttagttcaaggctctgcacaacaactttacacatggttatctctttacatcttggcaatgtgtgtaagttggaataacacgaggttcaggtgggatttcctgttttcttatatatttagctaggcaaggcctcaagtaagaaatcagtgccactattctgcatgagaatgtttacataaataatggttcagattctcawatgcagcaggctagtttgttcttgatggtccttgaaagtccttttttctttttaacctggtcacagtcaacttaagctgacctggcaagtgcccagattgcttgtacaagaattacaaattattagtgtcattgactcttccactgtacaaatggctgctatgtttgagcagcaagcaggcagcacttagaggcagccagcctttctaaatgtcctttaatgaagagaccctgttcatttgcttttaagatcagaatgttctttct

SEQ ID NO: 189827 - DNA, 584 bp, Homo sapiens
ggagatttgcaacaatttgaaaccacttgcagacaaagcacatagcctagatatactgaaaaaaataggaaaaaggtatttcatgaatacaaaaaatatatgtagacactattctatcatttgccaccataaaatatacacaaatccatgattaaaagttagaataaaaagtaagtgcatacacaaacacttacagaccatacatggtgccatytgaagtcaaggaaaatgtaaacaaatgtaaagattctgtattaaatcataactgcatacaattaactgtagtacatactaataattccatagccacctccagttgaattgtggtgagctccagtgttgcgagtatctgcttaaaacgctgtatgacactaatcaactccatgtgagcattttgcctctagtaaattgtatatcacagtaaagagtgatatctcatggttgtcacttatgctttcatagtgcttggggcaatactcttaacttttaataactccatgagacccatacaaagtgtcactagcgatgctgaaaagtcctcccaaaaagcagagaaaagtcacgatgttagaagaaaaagttga

SEQ ID NO: 189828 - DNA, 535 bp, Homo sapiens
gaccatacatggtgccatttgaagtcaaggaaaatgtaaacaaatgtaaagattctgtattaaatcataactgcatacaattaactgtagtacatactaataattccatagccacctccagttgaattgtggtgagctccagtgttgcgagtatctgcttaaaacgctgtatgacactaatcaactccatgtgagcattttgcctctagtaaattgtatatcacagtaaagagtgatatctcatggttgtcacttatgctttcatagtgcttggggcaatactcttaacttttaataactccatsagacccatacaaagtgtcactagcgatgctgaaaagtcctcccaaaaagcagagaaaagtcacgatgttagaagaaaaagttgaattgcttcatatgtactgtagattaaggtctgcagctgctgttgcctaccatttcaagataaatgaatccagcgtaagaaccacaataaaacaaagaaaaggaaattcactaatctatcactgcagctacaccagccagcacaaaa

SEQ ID NO: 189829 - DNA, 524 bp, Homo sapiens
  misc_feature (1)...(524): n = A,T,C or G
gccagggctcagttccatactgttctttcctctctaccgtgctacctttctatgccaaatgatctggaatatataaaggaaaatgacattgttcttgcttatagtcttttgaggggaaaggtgtgcaacagttgactcttcagggtgaaaacastaaatgctaagctgaggtcaaggggaactctagggaaccctgaggaatggcccagcacacctagacctcatagcctccatagccccttccctgctgatccttttcatactggcctggccagtcctaatttctctctgaaatagagtagccttcacagttgtcctgggttggtcattttgacctcatatttaggggtttggggtaatttctctaggaagtttctccctatatgcagcatgaccaataagtgtagaggtcaccagcaagcaaattgctcaaaagaagtatcacaaactgtcctgtaccaaatgctctacttcntgaagatggagaccctttgggcgcctggctggttctcaccaacttggaa

SEQ ID NO: 189830 - DNA, 503 bp, Homo sapiens
tgggtctggtcacaggaaggaccaaggcatgattacactgttggaactttcagccccattctctatcttaccctataactcacccaaccccartctctggggaggggagaggggctgaagatcgagttaaccgccaatggtaatcatttaatcaatcatgcctgaataatgaaaccgtcataataacccctaaaattccaagaacttccagattggtgaacacattgagttgctgggagtacagcgtacccagaaagggcacagaagctctgtgccccttctcccataccttgccctatgcatctcttctactggggtgtttctgagttgtatcctttataataaacccaataataataagttaaagtgttttcctgagtcctatgagtcattccagtgaattattgaaccatgggggtggggtggtgcaggaacctttgtagccaagttgaacagaagtgtaagctggggaccccatacttctcactggcatctgaactggg

SEQ ID NO: 189831 - DNA, 311 bp, Homo sapiens
tgttaaccatttgctgggagtacatgcatggtattttcaaacatttgatacattgaagaaaacatagaattagtgaaaattgatttccaagatgcttcacyttttaatcatgatggggaaaatttaggtttgaaaaatgtggaatagtttagaagtacaatttaaagatctaagctagcaatattcaatgttttaaataaattagcttattacagttattcataaaggtagagaagtgcaggagtcagtccatcaggaggggtggtttggaacatggactccagtagacaaggccttggtttacagattta

SEQ ID NO: 189832 - DNA, 469 bp, Homo sapiens
caataatttccaaatgaccaatgcaaaatgttacaaaattatgcatgggtaaaaaatccactcacggtataatataaactatgcattttaatttaacagagtatgaaaaattcattgatatggkttcaaattaacatttaagaaactaccacttgttagttttgggtagagtatcaaagaagaattgccacaactatctgaaaaggccattaaaattctcctctcttttccaaatcaatatttgtgtgtatctttattttctttatggacttcaatcaaaacagtataccacaatagactgaatgtagaaacagaatccagctgtcttgtattaagccaagcacagttacagaaatgtaacataatgccactcttctcactaaaatttttgttttggaaaatataatgagtttataaaaatacatcactcatgttaatatgtaatcagtttcttactgccttttaaatg

SEQ ID NO: 189833 - DNA, 548 bp, Homo sapiens
ttcatttttcttcacgtgccaagtggtatagggaaagttgcttcatcttttatatttatgaatccctaggataaaaaaagaatataccacttacttttttgaaagtatttgtgagtttttatatgaaaaactgaacaatacttcaaattatagagcagcaggggaaaatcgagtggggctgaggagacagattatgctgcctaccttccatgggactctgttgggctcactttgtagttctgccattcagggctggcttccccagctcactccrcttgtggctttggacactgctttttctccacactctctcttcgttctccagcttctttgctgactcctcttccttgacccagccctgaaatgcaaagattctctgaaggtctatctccacacccttctcttctagcattatctatatgctagtgcagtctttttcacgcccaatgttcctgccacgtttccacataccagtcagacatctgtgcctatgtgccccacaggtactttaaacccagtgcccccaaagtttaacatgtcttccagtc

SEQ ID NO: 189834 - DNA, 518 bp, Homo sapiens
atatttcaatttttaatgtttaataattattaagcttggcattatacttatggattttcatgaaggatataactttttaaaaagataactaaatcagaaaaaataacacttggaracggatggtcacaaggaatttaaacaattaaatttcaatttatacatatagttttactcagtgaaaaatgaaatgccattcaggataaaatgctgtgatagaggtagaacagaaacatgatttaaaaaaaaaaagagaaacaatgtgaacacttctatttaaaaaagagttaatttatgtattaaaaatagtgttaggtgttaaactgctatggtattttaatccaatggttacatttaatggagagatgtaatccttttgttttaaaatgtcaatatttacaattcaacagaaattacagtccgggcaaatgtttaaacttatgataaaagtgttgctgcaacttaaaatgctgcaaggtattacatagatttttcaaaattcttttagggtacacaggata

SEQ ID NO: 189835 - DNA, 519 bp, Homo sapiens
atcatctgaggacattattggagaatttcccatagaagcatctgacactaagcagagaagaaaacataatttccatatgaaacaggaaacaaaatatgaggaagagaaccaagagttaagagtgcacttaggtggcttaatttggtaattcatttcaaagatagacgaaaggaaagtgtttaaacagaattgctttatttgttctgacagctcccagcctgaatcagaaatctttaccatctcaatcccataaaggggaaaaaattctcttctttagggcaagaaacaaatgttttcccatttgctttagatggggtattgagttgaccatttcagattttggtacgtttgtctcgttcttcataattagtcttcagaaagaaaagaaaaacaagactgaatcctcaaagagaagatagaaagattccacaagtccaagagrgacaaataaaatcatgaccccattttacttatagcatttaacatcacaagcttgaatctcttgtgcaattgctggtt

SEQ ID NO: 189836 - DNA, 599 bp, Homo sapiens
tatccttttccaccctgaatatcatgaacaatattataggagaatgtacaccacctgcgatattaagagtaatatcatcctttccccccatggatattacaaacaatatcacagtgttgtgtacaccccctgtgatattgggaataattttatcctctccccccgctcgatattatgaaaaatatcacaggaaggtgtacattctctgtgatattggcagttatatcatcctctgttctagttaatattacgaagactatcacaggggtatgtacacctcctgagatattgggagtaatatcatcctatctccccctggaaattaggaaccatatcacaggggaatgtacataccctgcaatattgggagtagcatcatcttaccctcccctgctctttacaaatagtatcacaaggggctgtacaccctctgcaatattgagagtaatatcatcctctcttcccctggatattacgaacaatacagcagggggtgtacacacagggtttttatgatattgggagtaatatcattctctccccrccctggatatttcgaacagtatcacaggggttgtacactccctgcgacattggga

SEQ ID NO: 189837 - DNA, 439 bp, Homo sapiens
aatatggaaacatcagaggaaatccataatatatataargtttcaaggtcttgtagaagatctcaggctggcctaaagaaatggtaaaggaaattgccttaaacaatcaaatgaaaaggatttcctgtaatctctttaatgtgaatttctgatttaaacttcaagagcttctaaaggccctcagaacttccccatagcactggatagcatttttcatatcacacaccacttacactggcaccagacactgcctccaggaggaaaacatagctattaagatttcccaacctcttaatggggaaagtaagagtgaaaaacaaagctaagcttagaaaacacttcagaagaggaaagatgtaaggtaaagtgataacaggaagatcttcgtgaaatgcagctgaaacccaatggacaccagctgtctatctaaagcttctct

SEQ ID NO: 189838 - DNA, 472 bp, Homo sapiens
ttgcattcaactcacagtgttgaacctttctttgatagttcaggtttgaaacggtctttctgtagaaactgcaagtagatatttggacctctctgaggatttcgttggaaacgggataaaccgcacagaactaaaacagaagcattctcagaaccctcttcgtgatgtttgcattcaactcacagtgctgaacctttctttgatagttcagctttgaaacactcttcttgtagaaactgcaagtggatatttggtcctctctgaggatttcgttggaaacgggataaaccgcacagaactaaacagaagcattctcagaaccttcttcgtgatgtctgcattcaactcacagtgtggaacctttctttgatagttcaggtttgaaacactctttttgtagawactgcaaggggataattgcacttctttgaggcctaccgtagtaaaggaaataacttcctatagagagaag

SEQ ID NO: 189839 - DNA, 408 bp, Homo sapiens
ggtccaaatatgcacttgcagattctgcagaaagtgtgtttctaaactgctacatcgcaaggaatgttcagctctgtgagttcmactcaatcatcccaaagaattttctgagaaagcttctgtcttctttctataggaagttatttcctttactacggtaggcctcaaagaagtgcaattatccccttgcagtatctacaaaaagagtgtttcaaacctgaactatcaaagaaaggttccacactgtgagttgaatgcagacatcacgaagaaggttctgagaatgcttctgtttagttctgtgcggtttatcccgtttccaacgaaatcctcagagaggaccaaatatccacttgcagtttctacaagaagagtgtttcaaagctgaactatcaaagaaaggttcag

SEQ ID NO: 189840 - DNA, 305 bp, Homo sapiens
gaattcctcagagaggtccaaatatgcacttgcagattctgcagaaagtgtgtttctaaactgctacatcgcaaggaatgttcagctctgtgagttccactcaatcatcmcaaagaattttctgagaaagcttctgtcttctttctataggaagttatttcctttactacggtaggcctcaaagaagtgcaattatccccttgcagtatctacaaaaagagtgtttcaaacctgaactatcaaagaaaggttccacactgtgagttgaatgcagacatcacgaagaaggttctgagaatgcttct

SEQ ID NO: 189841 - DNA, 591 bp, Homo sapiens
gaattcctcagagaggtccaaatatgcacttgcagattctgcagaaagtgtgtttctaaactgctacatcgcaaggaatgttcagctctgtgagttccactcaatcatcccaaagaattttctgagaaagcttctgtcttctttctataggaagttatttcctttactacggtaggcctcaaagaagtgcaattatccccttgcagtwtctacaaaaagagtgtttcaaacctgaactatcaaagaaaggttccacactgtgagttgaatgcagacatcacgaagaaggttctgagaatgcttctgtttagttctgtgcggtttatcccgtttccaacgaaatcctcagagaggaccaaatatccacttgcagtttctacaagaagagtgtttcaaagctgaactatcaaagaaaggttcagcactgtgagttgaatgcaaacatcacgaagagggttctgagaatgcttctgttttagttctgtgcggtttatcccgtttccaacgaaatcctcagagaggtccaaatatctacttgcagtttctacagaaagaccgtttcaaacctgaactatcaaagaaaggttcaac

SEQ ID NO: 189842 - DNA, 408 bp, Homo sapiens
ggtccaaatatgcacttgcagattctgcagaaagtgtgtttctaaactgctacatcgcaaggaatgttcagctctgtgagttccactcaatcatcccaaagaattttctgagaaagcttctgtcttctttctataggaagttatttcctttactacggtaggcctcaaagaagtgcaattatccccttgcagtatctacaaaaagagtgtttcaaacctgarctatcaaagaaaggttccacactgtgagttgaatgcagacatcacgaagaaggttctgagaatgcttctgtttagttctgtgcggtttatcccgtttccaacgaaatcctcagagaggaccaaatatccacttgcagtttctacaagaagagtgtttcaaagctgaactatcaaagaaaggttcag

SEQ ID NO: 189843 - DNA, 408 bp, Homo sapiens
ggtccaaatatgcacttgcagattctgcagaaagtgtgtttctaaactgctacatcgcaaggaatgttcagctctgtgagttccactcaatcatcccaaagaattttctgagaaagcttctgtcttctttctataggaagttatttcctttactacggtaggcctcaaagaagtgcaattatccccttgcagtatctacaaaaagagtgtttcaaacctgaactatcaaagaaaggttccacactgtgagttgaatgcagacatcacgaagaaggttctgagaatgcttctgtttagttctgtgcggtttatcccgtttccaacgaaatcctcagagaggaccaaatatccacttgcagtttctacaaraagagtgtttcaaagctgaactatcaaagaaaggttcag

SEQ ID NO: 189844 - DNA, 434 bp, Homo sapiens
gaagcattctcagaaccctcttcgtgatgtttgcattcaactcacagtgctgaacctttctttgatagttcagctttgaaacactcttcttgtagaaactgcaagtggatatttggtcctctctgaggatttcgttggaaacgggataaaccgcacagaactaaacagaagcattctcagaaccttcttcgtgatgtctgcattcaactcacagtgtggaacctttctttgatagttcaggtttgaaacactctttttgtagaaactgcaaggggataattgcacttctttgaggcctaccgtagtaaaggaaataacttcctatagaaagaagacagaagctttctcagaaaatcctttgggatgattgagtggaactcacagagctgaacattccttgygatgtagcagtttagaaacacactttctgcaga

SEQ ID NO: 189845 - DNA, 452 bp, Homo sapiens
ccattctcagaaccctcttcgtgatgtttgcattcaactcacagtgctgaacctttctttgatagttcagctttgaaacactcttcttgtagaaactgcaagtggatatttggtcctctctgaggatttcgttggaaacgggataaaccgcacagaactaaacagaagcattctcagaaccttcttcgtgatgtctgcattcaactcacagtgtggaacctttctttgatagttcaggtttgaaacactctttttgtagaaactgcaaggggataatkgcacttctttgaggcctaccgtagtaaaggaaataacttcctatagaaagaagacagaagctttctcagaaaattctttgggatgattgagtggaactcacagagctgaacattccttgcgatgtagcagtttagaaacacactttctgcagaatctgcaagtgcatatttgga

SEQ ID NO: 189846 - DNA, 452 bp, Homo sapiens
ccattctcagaaccctcttcgtgatgtttgcattcaactcacagtgctgaacctttctttgatagttcagctttgaaacactcttcttgtagaaactgcaagtggatatttggtcctctctgaggatttcgttggaaacgggataaaccgcacagaactaaacagaagcattctcagaaccttcttcgtgatgtctgcattcaactcacagtgtggaacctttctttgatagttcaggtttgaaacactctttttgtagaaactgcaaggggataatggcacttctttgaggcctacygtagtaaaggaaataacttcctatagaaagaagacagaagctttctcagaaaattctttgggatgattgagtggaactcacagagctgaacattccttgcgatgtagcagtttagaaacacactttctgcagaatctgcaagtgcatatttgga

SEQ ID NO: 189847 - DNA, 367 bp, Homo sapiens
cagtttagaaacacactttctgcagaatctgcaagtgcatatgtggacctctctgaggaattcgttggaaacgggataatttcagctgactaaacagaagcagtctcagaatcttctttgtgatgtttgcattcaaatcccagagttgaacttccctttcaaagttcacgtttgaaacactctttttgcaggatctrcaagtggatatttggaccactctgtgtccttcgttcgaaacgggtatatcttcacatgacatctagacagaagcattctcagaagcttctctgtgatgactgcattcaactcacggagttgaacactccttttgagagcgcagttttgaaactctctttctgtggcatct

SEQ ID NO: 189848 - DNA, 518 bp, Homo sapiens
tagccagtgctctaatccaccaggtctcaggcatgatctgtgtttctccacatgctctttctgaggatagttttacctgtgttctgtcatgaacaggccctccctgctgtcctggcctcgatttgcttagtgtttcctgctccctctgcccttgtgtggctcccagaccaagtgaaagaaaatcacctgagggccacagtgttccctagccctggcgtttagggrcagggttatgggtgggatttttgactctctaagttaacccctagggctttgaagtgtctgttgagaaattcagctgttatcatcctaggtggtcttgctctctcctgtcctcctacttcaaatgcagaacttcaatcgtgtacaaaagaagaccgagtcatataacagaacacacccttattcattggctggcttcaccaatcatctcatggctgaacttttaaaaatacactcttagccacatacctatgaaatgtatatgtgtgtgtatacatatgtgaatttgcttctga

SEQ ID NO: 189849 - DNA, 583 bp, Homo sapiens
tgcggtggctcacacctgtaatcccagcactctaggaagccaaggcgggtggattacttgagcccaagagtttgagaccagcctgggcaacacaatgaaactccatctctacaaaaaatacaaaaaaaattagctggccgtggtggtgcacaactatagtcccagttactcaggaggctgaagtgggaggatcacttgagctcgggaggtcgaggctgcagtgagcagagatcacgccactgcactccagcctgggcaacagtggagaccctgtctcaaaaaaacgaaacaaaatgaagcaaacaaaaagtctccataaactgtgagaaacatgcaaaagaaatgagcaaagatgttagcaaaacagaaagaggaatggttaaaagaccccagtggaaacactctatgtgaaaaaccagttgaaataacaaacacataagtrgaataaattacagagtgtatccagctgctgaacgatggaggagagagctaagttattagcttgaggacgcttccaggaggaagcagggaaggattaagaaacagaaaattggccaggcttggtggctcatgactggaattc

SEQ ID NO: 189850 - DNA, 532 bp, Homo sapiens
agaattctcatagaatattaaaagtgtgacttgttacagcttcttttcatagtaatttggatagaaattagcaaattcagaaatgtataaatactttggtctgacaattccatctccagttatctacggagaaatagacaagtgatgcacgacagatacatgtgtcagtctggtccctgcagttgtatytgtaataatacacattggagcaatttcatggccatcggttagagaatgtttgaagaatgacccattaatatcaggaaggacgtttcaaagatcaaagcctgatggaaatgctggaggccgtgacgctgataggagctcatgcgtgttgaccaactgctatgtgacaggcattggctccacgcttttcctgcgctgctcatttaaacgttggacaaattaagtgttctgatttagcccattagacagatagaaatggaagaacagaaaattaatgtgtttaactttaaacgctagcagattaagtttttcacccagagcctgtggtttcaccataggcgtgatt

SEQ ID NO: 189851 - DNA, 532 bp, Homo sapiens
agaattctcatagaatattaaaagtgtgacttgttacagcttcttttcatagtaatttggatagaaattagcaaattcagaaatgtataaatactttggtctgacaattccatctccagttatctacggagaaatagacaagtgatgcacgacagatacatgtgtcagtctggtccctgcagttgtatttgtaataatacacatwggagcaatttcatggccatcggttagagaatgtttgaagaatgacccattaatatcaggaaggacgtttcaaagatcaaagcctgatggaaatgctggaggccgtgacgctgataggagctcatgcgtgttgaccaactgctatgtgacaggcattggctccacgcttttcctgcgctgctcatttaaacgttggacaaattaagtgttctgatttagcccattagacagatagaaatggaagaacagaaaattaatgtgtttaactttaaacgctagcagattaagtttttcacccagagcctgtggtttcaccataggcgtgatt

SEQ ID NO: 189852 - DNA, 528 bp, Homo sapiens
tccagcctgagtgaaagagtgagatcatgtctagaaacaaaagaagaaaaaaaaaagggggtgaaagcctatatattgaagactaccaagtattgctaagagcagttaaagacgtttggaatagagaacgttccttcttgcatttcaagattgcttttgttttggggggacacttgctattttttaggaacatgaagttcttctcaggcattcctgtaaaaaaggccactttttgataggattgtattgagtctgtggattgctttgagttgtatttttatcttaaccatgttacaacttccaacccatggacacaaggtgtctttccattgatttaggtcttccttagtctcctygagcaatgttctgtagttgtctgtgtacaagtactgcaccttcttgaacaaatttattcccaggcatattatccttacaggtgctattataaatgaaatcattttgtcagttttcttctcagatagttcattgccatcacaatggattgtttgctgaaagtttgctgaattc

SEQ ID NO: 189853 - DNA, 510 bp, Homo sapiens
tgacctgtcctctacaaataagtccatgtcaccacaatcaatgacaacaacaaaaagatgaggaaatatttggggttcaaaataactaaagaaatgagctacattatcatttacttcttctgaacccaaaatatctctcctcctttttgttgtgtgattcgtggtgacgtggactgtgtgaaggagacaggtcagttgtcctgctcagtgttctacattctgcagttgtctggtgattacctcctatgaaactcaggctaagcgttttctgcaagaacatggcattgttcatattctgcaccrgcagagtcccgggtgacatgctgtctcttgccagcggctcctgactcctgttctttacaggatggaattgaaaggagcagggctaaggcctctcaatgctgtttgtccatctagctgtggtcttcctaagtattgatatcaattggaggctgaaggactatggcttctctactcaaaggagcctagtgggttaacaactgtcaagag

SEQ ID NO: 189854 - DNA, 494 bp, Homo sapiens
cagagcgggtactgtgtactatcaccaagttttcctcagggtccccagaacagagctttgcctattgggcctcaacagaagcttgaacacaataagggttcactagtcccacacatttagaacaacagactagatgttatttgtctgccggatcttatatggtacagagaggattcttgaaaacacgatttagcctcttggagaaaacaggtcgttctgtgcctgtgtcccaaatgaataactgcgattttaactctaggcccacccccacctgactgcaaacatggaaagttgctaaatactttggtacctctgacttcccaatttaacaaaatgtgaaaatgcccatttctattttcctagaagtatgggagggttgaacttatttttgatggagagagcatttagtttctcagcgagaagacaggacatcattcatcgcttttgtgatggtgagcctatagaacttaccgyaattattttgccggttggcc

SEQ ID NO: 189855 - DNA, 429 bp, Homo sapiens
tgaatgagaactttcctgggttttagaggacggtggacattgtttattkatgcctcctgtccattaccgatgtttctcctgattcttattcatatgctcaccacccctccatggagcatccatggcctgtgacagagctctggggactgatatccttccactgactttggcgctggtgagagccctggtcatgtgattcagcttggccttaacccgacccagttgcacatattcctcaggccctttagagttgaagtcgagacctctctgagaacgcttgccagcccatgctgttctaaggctggagcaaacttcctccatctattccagacagaggggactgcagggggttggactcactcaagatacctctggtgttagaaagaagacctgtttcagggtttggggaagattgctcaatatgaacta

SEQ ID NO: 189856 - DNA, 429 bp, Homo sapiens
tgaatgagaactttcctgggttttagaggacggtggacattgtttatttatgcctcctgtccattaccgatgtttctcctgattsttattcatatgctcaccacccctccatggagcatccatggcctgtgacagagctctggggactgatatccttccactgactttggcgctggtgagagccctggtcatgtgattcagcttggccttaacccgacccagttgcacatattcctcaggccctttagagttgaagtcgagacctctctgagaacgcttgccagcccatgctgttctaaggctggagcaaacttcctccatctattccagacagaggggactgcagggggttggactcactcaagatacctctggtgttagaaagaagacctgtttcagggtttggggaagattgctcaatatgaacta

SEQ ID NO: 189857 - DNA, 517 bp, Homo sapiens
tacccaagatatggaaacaatctaaatgtctatgagcagatgaatgaattgaaaaattgtggcrcatatatacaatgtaatattattgaaccttagaaaagaaggaaaccctgtcatttgcaaaaacatgtttgatccttgatgatatgctaagtgaaataagccagtcatgtagaaggaaaaatactgcatgattctattatgtgaagtttctaaaatatccagacctatggaagcagagaaaagaatggtggttgccagggtctggggtagaaggaaatagaaaatttgtttttcagtgggtataaagtttcagttatataagataaattctagagacctgctgtgcaatataatacctatggttaacaatctggttgatatggtttggctctgtgtacccacccaaatctcatttcaaactgtaattgccacatttcaagggagggacctgctgggaggtgattggatcacggaggcaatttcccccaagctgttcttgtgatagtgtgcgagt

SEQ ID NO: 189858 - DNA, 488 bp, Homo sapiens
cagcaatcacatgcattggaacaaattgtcatggagtatccaaatataggagccccaaatctaaatagtcaaggctctattatctgtaattccaattgctataggtaggtgtgtggattttggcagggctaatgtagtggaaagatgagatgtctggaaaatcatgaaatcacagagtaattcagtagaatattaaatgttatttttttctagtcacagaggtaatagcatattctttccctcagaactcacaagattgttgtgacactcatgtaaggcaacacaatttagaaactaaaatcattatttttttaacaactatttatctagcacgtactctgtttcaggtattggatcatgtcctgagtgtaggtgaagttgcagtctgactactcaaagtgctcscaagctcaagggaaaaggatatgggtggggaatccacttaatgcagatgggttgcacttaacacttaatgcaaagctcagagt

SEQ ID NO: 189859 - DNA, 524 bp, Homo sapiens
caatcacatgcattggaacaaattgtcatggagtatccaaatataggagccccaaatctaaatagtcaaggctctattatctgtaattccaattgctataggtaggtgtgtggattttggcagggctaatgtagtggaaagatgagatgtctggaaaatcatgaaatcacagagtaattcagtagaatattaaatgttatttttttctagtcacagaggtaatagcatattctttccctcagaactcacaagattgttgtgacactcatgtaaggcaacacaatttagaaactaaaatcattatttttttaacaactatttatctagcacgtactctgtttcaggtattggatcatgtcctgagtgtaggtgaagttgcagtctgactactcaaagtgctcgcaagctcaagggaaaaggatatgggtggggaatccacttaatgcrgatgggttgcacttaacacttaatgcaaagctcagagtgttttatgggactcttaggtaggggcacctgccctaata

SEQ ID NO: 189860 - DNA, 530 bp, Homo sapiens
acaaattataatcaaattatcaaaagagagaatcttgaaagcagcaagaggaaaatgaatcatgatatctaagaaattcttaagaagtaattgaccaaatgctcatcagaaaccttggagatcaagaggtagtgggatgacatacttaaagccctaaaataaaacactttcaacctagaatcctatagccagcaaaattgtcctttaaaatgagggcaaaattatggcatttcctgaaatcaaaacttgaggcagttcactgcctgtagagtttctgtatgagaaacaacaaagagagactctcaggttgaaataaaaggatgctggagaaaaactatgtgaagatacaaaaatctctgataaatgtacactggtatataaaagccagcattattgaaattttagcttgtaacttcactttttattttctacaagatttaaaatgcaaatgaacacaatataattacaaatctgtgttggcraacacacaatatataaagatgtaatttgtgaattcaacataaaaacag

SEQ ID NO: 189861 - DNA, 384 bp, Homo sapiens
ggtggggaaggtgtcacaggaggacatttttgctggcactgctgaggtgggcagggctgtggacactttggtggtgggcagggctcagggcacttcgggggtggacatggctctgggcactttggcgtggggcacacaggaggtggctggcagggctgcttgcactgctgctgttgataagacatcctgctggagtctcagaatctgaaagaaatgataygacagtgttcacaggaatggactcctccagagagagaagccaaagcttatgtaataccatggcatattatttctccaatctccaaaaatttatttaaactcttagctctcttttcatgacttcctgtcttctcctttccactttagcaagttgtttcatcagcc

SEQ ID NO: 189862 - DNA, 577 bp, Homo sapiens
agcagactcaccaggttctccaaagcagatcagtgctcaagtaccaggagtttaggagttgtagagcagagaacctytttatagggcctgctaccccacccagcaggaagtggaactacccaaaactgggctggcccagcaatgtcccaactaaaatgcaaatctatccataactggcatgacagggattctcaaactgggaaatatcctgttctgggatctttccactggattaagtgccctgactcactgaggccctgccttagatctcagtttcagtgacagcaaagagggacttgggggattctctaactggtggtcaagggctctctttcttgattgggggcaatgaatgcttcctgtcttacacattccctaaatcataaaacttcctgccctgatccactttagctgaatgccatattgtttgtacatgaacccatctccacctctactttccttgtacaatttgccaatgtgctagaaggaaggagagacctaacaaaggcctgagttctggccccagatttttttgctaagctgtatgaccacagccaggtcaactctcctccctgga

SEQ ID NO: 189863 - DNA, 506 bp, Homo sapiens
tcttaaaagataagcataactttatgatatgatcccrcaataacacgttcaaaaattgatctagtacattttaaaatatcttgacaaaaaataatgtgcattctgtatacatatgtaactaacctgcacattatgcatttgtaccctaaaacttaaagtataataataataataataaaataaaaaataatgtgcattcaaataattatagcagctttagtcataaaatccactatctgtgatctaccaagatatccttcaataattgaatcgataaactgtggtacatcacacccatgcaatggaatgctgcacagtgataacatggaatgacgtgtcgagactcacaaagacatggttgaatttgaaatgcaaactgatacgtaagaaaagtcagtctcaaaggctataggcccatttatatgatttctgtaaaagacaaaattacacatccaaaaagtgcaacaaactccaagttcaatgaattcggtgacacccaccgtgac

SEQ ID NO: 189864 - DNA, 359 bp, Homo sapiens
gtaattcaattttatgccttagacaagtttgttaagtaaatgttattttgctcactttgcagtaaagagattgacattcagagaagttgaataatatgttcctcaaatcaatcaaacactaattaargaaaataaaaataaaaaaatacagaaataatctttgatatgtcccaaattgtgagatcctgtctgtggatgaaagaaaagtggaaatatacccaaatgattataaaatattgctaataaagcatatttgaaaagaaacaaaagatccattcacaaatatatatgcatagattctttattcagggagtgaaaggaaagtgacaactgcacaggtggtggaagctcatgcccag

SEQ ID NO: 189865 - DNA, 550 bp, Homo sapiens
acttagtacattatgtacttagacttatgactacagatagtactcataatagtaatgtaatacattgttaatcaaagaaatagagccaaaacttcaagtttgagatgtgtttgatggtaagttatttgctttatctttaagatattttatatcatatttcttttaggtcagagccagaagattttagggggaarcaaatgaaaatattttatttgaatgaggtgtggtgaaataataagatgggctaaccgtgacacttactcttatgtggtgaaaatgggagttaatcaaagaagaaatgtagaataaagtacagaaacaagataatttaattgttcttagttatttggactaagattgtcttctgactactgttaagtacaaaaataactaaatacaataaatgcaatatgttaactgtgttagtttgcagaaaattgacattgtaaatatttagcattctgtataaaaatatataatgtaatctctaatctagtttactattactatgattagctgttcaggacaataaaaaattctctcacttaaa

SEQ ID NO: 189866 - DNA, 571 bp, Homo sapiens
gggacacctcttttgctttgaaacttgctttggaattggtatgcactgctccccagctaacattttgaagacctcttacccttttcttatgtgtccccaaatataggagccccaaatayaaatagtcaagtctctatcacccataattccaattgctataggtaggcgtgtgatgtttggcagggctaatatagtggaaagatgagatgtttagaaattcatgtgcctttggcaagatggccttctttttggaatgtgtagacaaccatatttttaacctcacccatgagataatttgtctgctgatccctcagctccatttttatcaatcacatgtgcacacaaaatcacacacaatccatgcacagttctaaaaataatgcttcttttcgagtgccactttttccatgttgtgatcatctggaagcaagtcttgtctgtcacaatacactgtatattcttcaagattagggtcatgaacagctcaaatctttatcttgtgcatttttaatggtgtctgctatgtagtaaaactattgattgaatggacggttaaaagccagttttgttt

SEQ ID NO: 189867 - DNA, 571 bp, Homo sapiens
gggacacctcttttgctttgaaacttgctttggaattggtatgcactgctccccagctaacattttgaagacctcttacccttttcttatgtgtccccaaatataggagccccaaatataaatagtcaagtctctatcacccataattccaattgctataggtaggcgtgtgatgtttggcagggctaatatagtggaaagatgagatgtttagaaattcatgtgcctttggcaagatggccttctttttggaatgtgtagacaaccatatttttaacctcaccyatgagataatttgtctgctgatccctcagctccatttttatcaatcacatgtgcacacaaaatcacacacaatccatgcacagttctaaaaataatgcttcttttcgagtgccactttttccatgttgtgatcatctggaagcaagtcttgtctgtcacaatacactgtatattcttcaagattagggtcatgaacagctcaaatctttatcttgtgcatttttaatggtgtctgctatgtagtaaaactattgattgaatggacggttaaaagccagttttgttt

SEQ ID NO: 189868 - DNA, 359 bp, Homo sapiens
gccgatgagcataggtatgagtgcaggccgtgcagrcagcgccagcctgtcctcgtggccaccttctaatgcactagcatgagcagtcagcgaggctgcactcgagtaaagtagcctgaggagtttcccagggcagctggtccaaactgtcttcctcttcaggacaattcttggacaaaatgtccaccactggtgattcacatttattaaagacttgcacatttattaaaaatatctgatggagaggaaggaacattgaacatgatatgccaaagcttcagtcctctactggagccaccacggtaaatccaaccctgacctaaaggggctctgctctttgcccaaagtgcatgttctga

SEQ ID NO: 189869 - DNA, 469 bp, Homo sapiens
caattgctaacaagtcaagaggagaatatgaataaatatttttttttaaaatgttcaaagcaaaaaggaactgaaacaaaaattctgtcaaaggtatcagggcctctcctgtctcacagtcaaagccaaggcctccacgacttggtccccagctcctcccatcatgtctctgaccctctctctgaaccctggcttccccatccaccaattctctccagccacagcagctgaatttgctcctaggacagacctggatagcatgttcccgcctcagggcaattgatggattttttaaaagataaaatcatgacacttgcacaaatataaagtgatcgtgtgtcaaagactacttaagtcattaatgaakgaaggaaccaggaaaatgttaaaaccaattctgcagagcatcctaaaagcagacacatacaaagacaaccaggcacactgatctgaatctgtcaacagggga

SEQ ID NO: 189870 - DNA, 532 bp, Homo sapiens
aagtgcgagttttagacggatgcaccwctgcccctctccgtcccctgttccagcctcctgcagccaggagttaacaactgggataaaggacacacacccacacacacacagccccaacagcaattacaccaacagcctgtactagccttgtcttttattttctggattctgatgtgttgacatctggggctttgctgactctggaggccccttggagagatagtaaacaactctggcctttcaaacacaaatcaatcaatccagaacccatacccccacccaaacacatcctttatcaggctgtcacactggggttgacaccagtcctgctctcatcactgcaggaccaggtaaaagtcaaccaggaagagtccctatgccccagggcctactgcaattattctaaggagctaatcctaaacctaagcctgcgtgccctgctcctcccttccttcctgcagaagccacaatgaaggacggcccttgctcaggtttcccgcactctctcggcctcccgcgtggccctggtgcc

SEQ ID NO: 189871 - DNA, 577 bp, Homo sapiens
ctgttgagaatgggtaaattttctgaacagaagacagagggagagacacaccctgtcataaatctttttagttmtatattttattctaaaatgttgagggtctgcaatcagcaatgtggcttgtcatagtccatgaccaaaaaagtcttgagtagaatcaaacttttatggtcatttctacctgccagagattccaggaagcagaattctgaggtaccaggaggaggcttccagaaaaatgcattcaagaatatttcctttttttaaaaaaagaaaatatttacttatttatattatttgtttatttatttattttgagacagggtcatgctttgtcacccaggctggagtgcagtggtgcgatcgtggctcactggagcctcaaactcttgggctcaagccatccgccttcctcagcctcctggcagctaggactgcaggcacgtgctatctgttcatattttgatttttattttagattcaggacatacatgtgcatgtttgtcacatgggtatatcgcatgcgatgcagaagtttagggtataattgattccatcacccaggcagtgagcagag

SEQ ID NO: 189872 - DNA, 530 bp, Homo sapiens
  misc_feature (1)...(530): n = A,T,C or G
cttacctccattgtggagtagcagtctaatttctccttgataatccagccagaccagtatcaatcattccagccagcatgataactttctttggcagttaatttagaggcatgaggagccccagatgactgggtggcactcttaacttcaggttcaatggaatcattttgtttcctggtggaagtattcctccctttggaactaagacccctagcccagcagagtataaagtcatgggaacaggaagcaaacattccgctagtggtcamcaggggtaatggtgagttgtgtcactcccatatctaccccttgattcttggacctatgcatttggccatgggagaaacagaaccatatattagacactgatttaaagcatattcagccttttggagaactttgtcccagccatgcaaggtattgccatctagctgactctgtgactgagtcttcaaagagccattccactatcttaccaagcctgcttttgtagcatggtggggaacatagaaaggccaatgaattcnnnn

SEQ ID NO: 189873 - DNA, 530 bp, Homo sapiens
  misc_feature (1)...(530): n = A,T,C or G
cttacctccattgtggagtagcagtctaatttctccttgataatccagccagaccagtatcaatcattccagccagcatgataactttctttggcagttaatttagaggcatgaggagccccagatgactgggtggcactcttaacttcaggttcaatggaatcattttgtttcctggtggaagtattcctccctttggaactaagacccctagcccagcagagtataaagtcatgggaacaggaagcaaacattccgctagtggtcaccaggggtaatggtgagttgtgtcactcccatatctaccccttgattcttggacctatgcatttggccatgggagaaacagaaccatatattaracactgatttaaagcatattcagccttttggagaactttgtcccagccatgcaaggtattgccatctagctgactctgtgactgagtcttcaaagagccattccactatcttaccaagcctgcttttgtagcatggtggggaacatagaaaggccaatgaattcnnnn

SEQ ID NO: 189874 - DNA, 375 bp, Homo sapiens
catgttctactctgcatataattattattttaagaatcaactcttatcttgctatgctaytgagctttgtcaagacaaaatgagaacttcatgaccactgttcatcatgaattggctatgcaccgacacactaggccataaggtgggaggagaataagattcggcaagtccagaaacaggtttcatgagcaggtgactgctaaggactccgattccatcttttccttcttctccatcttttcttcccataatttacacttaggacctcattgggagttgcctacggcagctggtttgcagatggttctgttatgctggcaccagccataagtggatcgctgccaatgctactgtctcactcaaggatagtgctga

SEQ ID NO: 189875 - DNA, 620 bp, Homo sapiens
caaaattaagaaagttttcttttatttctaacttcactgttttgctttgtttacatttttatcagaaatgtaatcaggatgttggttttagcaaatgctttcttgatattgattgagatgatcttgttttcctcttttaatctgaagacatacagaattgaattaatagattttgaaactattgaatcatgtttgcatatctaagtcttgattttacaagacacacacatttttaaaaatcattattctgtgaaattygctaagattttttggggtttaatttctgcagctctctgtgttagtgagattggctgatctcatttagttttgtgtcagctttgtctagttgtggtgttagttttatactagcctcacagaataaggtagcagccttcccatattgtttgatgctacagcaaagtctgtatcacacagggataatctaatctatgagctaaagtttcataaaatttattaactcaagaaaatccctgaacttggtttcattattatggatagatttttttctttttattatcttttaaatttggtttagatgcttttgactgtttgaattttgtttcttattaagttaaaaatgataatttatagtgttctca

SEQ ID NO: 189876 - DNA, 593 bp, Homo sapiens
ggataccctgcctttcatcatttttagtcagacaggaaaaactgaagggattctttttaacaaaggtgtatctcagaacagaatcaacgttacatgttttcttggccctgttaagtatgctgtacatctggaggcattgcttttaaagtagagcatggctttgcaatacaagattaacattcttcccaaagtctatacggcattgcgaatatcatacattagtaggtaaatttaaatgaaatactttatgtatgtaggtgtgtgtgtgtgcatacatgtaaaatcactaaatatatatgragaaatcaacactgtccattatactttcttagaatttattaggttctcacaaagttgagccaagaggccactgctttgttttccaaatgtcccaaattctatttctgctaaatgatgtcactaatgtcatggttacaacaatactgcacagagcctccttcctgccactggccaccgatacaatagatcatttaagcagctgagtcattagtaaaaacaatagatttttctactgatactcaattgaacatatatttccaattgaacatagaattcatggaaataaattttaa

SEQ ID NO: 189877 - DNA, 612 bp, Homo sapiens
agtacccacaaaaaattgaaaagaaaaattgaaaaaaataataataaaatgaagggaaagagtcaaaggagaatgcttacttcagcagcacatatactaagaaaaagataggggtcaaaggagaaaaaggtcagtttgtaaacagtcataagtcctggtaagctccacctcgtgacaaagatcatgcattgagcaggagtttgaccttcatcatgcagttggaatgagaatgcagaggatcagatacatatagtggctggttattttattccagttatagaagatttaaaaatatgtcattattacaataaatgggtaatttttgtttctgtttgttaaatctaggaccagttgttactcaagtttatattttgtaaaaattgtatcaatggcagttaacagagtaactcagtagctgatgtttataataatgmtcttggattctaggaaaggtaaaattttactcataaaatgatcacatatggcatggaaatgtggattttaaagggagattcttattcaaatttctaaaaataaattctttttctcacagagttaacattcagtcttaattatttggaaaatattattcacatcttatgaagcacaaaa

SEQ ID NO: 189878 - DNA, 561 bp, Homo sapiens
ttcttcctcctcaagttattcatgacccagaaagagaggagcaggaaaatgacatgctatatgttgtgattaatgctgttacaaagcacagaaatctaactggagcacgtagcagagacagctatctttgacttcatcctgcaactggccatgcttcctataggacattgagccccgtcttgagaattcagtagagtgaggcaagtgaagaagtaagttagaatgttccaaccactgggtaaagtataagcaatgacagtatgttgtagaagttgcaaatggttctatatacctgggtcttaagttggagaaagagaaagaaggagagaggtcaagaagttgtaatgacgaaaaacttgaggctactataaygattgtcagccttggatgacatgtggaacaaactaacatcaagagagattgtcaatacaaagaaagtgatcatttgattattgagcaaatgctggaacatttttgcacatctttgagtactggatggtaaaaaatcaatagaagccaactatgaattgagtcttaataaacaatatttcactaagcagg

SEQ ID NO: 189879 - DNA, 557 bp, Homo sapiens
acataggcatggtcaaggacttcatgtctaaaacaccaaaagcaatggcaacaaaagccaaagttgacaaatgggatctaattaaattaaagagcttctgcacagcaaaagaaactaccatcagagtgaacaggcaatctacaaaatgggagraaattttcgcaacctactcatctgacaaagggctaatatccagaatctacaatgaactcaaacaaatttagaagaaaaaaacaaacaaccccatcaaaaagtgggcgaaggatattgccgtaaactcttaactgacttccctgccactagtctggactgttccagatcattttgcatacttctgccagagtaatctttgtaagatacttttaaaaatactggcctacttgccattgactgccctttcaatacccataggagaaagaccaagcccaactgtatagaacataaggaacttcacaattttgatcctacctttctggctttatcttttgcaatacgtgaatataaagaacaggtacagacttatccactagtctctgaacatgccaagcactctgttc

SEQ ID NO: 189880 - DNA, 546 bp, Homo sapiens
tttaaatattattttattttagatttaggggatacatgtatatgtttgttacatggatatattgartattggtagtgattggacttctaatgtacccatcacccaaatagtgaacattgtgctcaataggttatttttcaaccctcacccttttcctctcattagtaatttttttgcagtaggtatttttgttaggctatcagacgttgaattagtggaactcttcttaaaatgacccataggtgactcagttcatttctgtgcagtactcttaaaatagagatttttctgactttctagttgagaaagatcatgtaattcattgtcaaaacttttaaatcaaaatgctagccttaatataaatttccaacactgcagtggagtcagggtaccatataaacctgattactgtggcaaaaagcttgaagctttcataaatgcagaacaatgctggtaaagaggaacctgattttaaaattattgcttaaacctaggttttcaataaagagcggaaattgatgagcgtttgagggaataataaccaat

SEQ ID NO: 189881 - DNA, 546 bp, Homo sapiens
aggaattcctagaaatagctcagtttctttaaactataatactaccagaaagaaaagacgtcataaattatgtatcaaatatattgttttgagagtcaatagataatagcaaacatttattaagtgcttrccttaagctaggctctgtgctaagaacattatgtgcataaggtcatttaatcatttgagagtaagcacttctactattacgaattgctatggcctgaatgttcgtgtctccctaaaattcacatgttgaaaacctaattaccagtgtgatggtattaaggggtgaggcctttgggaagttattagatcatgagggcagagctctcataaatgggattcatgtccttataaaagaggcccgagagagttgccatggcccttccacgatgtgaggacacaacaaggaggcgctgtctatgaaccagaaagcaggccctcaccagaaaccaaattagccagcaccttgatctcggacttcacaacctccagaaccctgagaaatgaatttctactgtttatgagctactcagatgatag

SEQ ID NO: 189882 - DNA, 589 bp, Homo sapiens
gcaggccatttaaactgtccaacaagtattaaaattattttcattaaagcttgttagtatatatttatatgtgtatttttatttctttgaggaagatcttctacctcataattggaaagactacttcacaatttaacaaattgtattttaatagagttctcacatacttcattttaatactttcattctcagttctgtctcattgctcttaatagcactttgttgcattatacaaaatattttttcctccttgacatttagtatcttcaaataatatcaaagagccattagctctccctttagtccccactccatcaagctgtgctaattagctcctttaatcttttctctaaataactctttctattctctaatcagtttgtggtgaattctctgaastttctttaatttgctggaatttggtgagtggcattacatggcattacagatgtactacaaaaacgatgtgctactactctgcagaatatctgctgggaacttaaagcactggcaggttcatgtggcatatttcacatgtaacctgtaggctgccagatatacaaaatgacagagataaagggtccaaatc

SEQ ID NO: 189883 - DNA, 579 bp, Homo sapiens
cattacagatgtactacaaaaacgatgtgctactactctgcagaatatctgctgggaacttaaagcactggcaggttcatgtggcatatttcacatgtaacctgtaggctgccagatatacaaaatgacagagataaagggtccaaatcctcaagctccctcaagtcaccaaatagggcaccagtgtaactgtgacccaatcagcaggagtttaactataaatagttatattttaactagaaatacytgtccactccccagggtccactgaaaataaaaaagcattaaatgaaattgagagagaccaagagacagagacagagacagagagagagagagagagagagagagagagaaaagaagcagggagagacagaaaccgagacagtgagagagtgtgttcagagcatacattttcatttttaattctgttttaagagaatcaatatacactataagagaaagatgtgcaggctgtctggtggcaaaatccatcccattttttatcatcagggtttattcattatatctacatgtatttcctgaataaataagggaattgatgagtggattgtgggg

SEQ ID NO: 189884 - DNA, 598 bp, Homo sapiens
ctcagagcatcagcctcactggccttatttctatttcttgaacatgccaagtttattcctaccttaagatctttgcactttaattttctgttttttttttcttgtggaaatactcttcttccaaatgttctcatggcttgaggcttttagccagtcaggtctcagctcaagcatgacctctgcaacraagtttccctgaccataaacacccaatataaaattactttgggctgaagtcgtgtactccagctcagttcagcagagagccaagctctggaattttaaacacaagcctgggtgttataaattaactatttattataaagtaattaatttcatgtttatattgtcaattgggcatctttctcctgtaagtagctcagaagtaggaggagcagctaggccaagacaatctctaggcatttctgtaatccttgattattgtatagtctaataggactccaattcttatgatcaatcctacaattatttacttgttttcttacagaaaagagaaaatgaatgcataaatggacaaaattatggtgaaagaaagtgagaagaacagtcttaaaggcaaaagttaagctcaaaatag

SEQ ID NO: 189885 - DNA, 585 bp, Homo sapiens
actcctttccacactattatctctatgtctttgaacttttttcttctatgatatggttttcataccattaagtaatacacacacccttcctaggattcattcttgtttgttaatgtccttagaggcagcatctgaaactaggctaagtgttcaaayatggtccacaagggtgccagagaagaatttccagagttccaaaaactacatttctattgatacagtttatatttactttggagagaagcatgttatctggtttactatcggatttgttgccaactaaaacttggagctggctgcaaatatttttttttcaaaaagcacaagggggagacacagttgcatcaccacatgccaagaaaggaaagggaggtgggacaagagagagtggaggagggtgatatgagctgggtgtacagagctgggctcctaagactgctagtacctagtttccccatcccttctatagtcatacgtgtcatcataaagcacttgacatattattgagactttcctgtctaggtactcttctaaaacttttgccaacactgtctcattgaattcttaccataataacatgaaata

SEQ ID NO: 189886 - DNA, 404 bp, Homo sapiens
caaaccataaataacagatttgtagttgtacaattaaggaattgatcaaagcaatgaaaaatgatctcatttggatcttccttttccatgatcccagattactcttcttcagtgtctcattatattctatatcccatttctgcctatattgtaatggccttatataaaagtgtgtttgtatgagcgattatatttaaatgagaagaattttttttatattttcatctgcaattgttcaaagtgtattagttaatatagcaaagcatrtattattttattgccccaatccaggattatgacttgattataagatagaaaatcaacttgatgggggaagacaggacattaatcaattccaaattcaggaatgttaaaatataaatttttaaatgggtaggggttca

SEQ ID NO: 189887 - DNA, 516 bp, Homo sapiens
gttaaaatataaatttttaaatggktaggggttcactgcattttgatttttaaaaatgtgatgtcatttctctcaaaatcttatcaattcttcatcaattctgtttctatatttctatctattggttaattctaatatctgctacacaactctccaaggaagttttttctctttcaacgcctgctttgcaaaatgcttgcagactctttctctgtatccctggggatagcttcgctggttttgagttgtatttctgctctgtgctattccttcagggatagttctccaagttgtgttgtcttcctggcttttcacggaagcgagaacaattatacatatagctcccccaaggcactgacgtttagttgctgtgtcttttttttttaattttattattattatactttaagttttagggtacatgtgcacaacgtgcaggtttgttacatatgtatacatgtgccatgttggtgtgctgcacccattaactcgtcatttagcattaggtatacctcc

SEQ ID NO: 189888 - DNA, 516 bp, Homo sapiens
gttaaaatataaatttttaaatgggtaggggttcactgcattttgatttttaaaaatgtgatgtcatttctctcaaaatcttatcaattcttcatcaattctgtttctatatttctatctattggttaattctaatatctgctacacaactctccaaggaagttttttctctttcaacgcctgctttgcaaaatgcttgcagactctttctctgtatccctggggatagcttcgctggttttgagttgtatttctgctctgtgctattccttcagggatagttctccaagttgtgttgtcttcctggcttttcayggaagcgagaacaattatacatatagctcccccaaggcactgacgtttagttgctgtgtcttttttttttaattttattattattatactttaagttttagggtacatgtgcacaacgtgcaggtttgttacatatgtatacatgtgccatgttggtgtgctgcacccattaactcgtcatttagcattaggtatacctcc

SEQ ID NO: 189889 - DNA, 516 bp, Homo sapiens
gttaaaatataaatttttaaatgggtaggggttcactgcattttgatttttaaaaatgtgatgtcatttctctcaaaatcttatcaattcttcatcaattctgtttctatatttctatctattggttaattctaatatctgctacacaactctccaaggaagttttttctctttcaacgcctgctttgcaaaatgcttgcagactctttctctgtatccctggggatagcttcgctggttttgagttgtatttctgctctgtgctattccttcagggatagttctccaagttgtgttgtcttcctggcttttcacggaagcgagaacaattatacatatagctcccccaaggcactgacgtttagttgctgtgtcttttttttttaattttattattattatactttaagttttagggwacatgtgcacaacgtgcaggtttgttacatatgtatacatgtgccatgttggtgtgctgcacccattaactcgtcatttagcattaggtatacctcc

SEQ ID NO: 189890 - DNA, 524 bp, Homo sapiens
tcactactaactcccaggaccagtgcatgctattcttcaatttattgtgtagattaaaaggtatcttcttaaaaaatgatgcatgctgctgggaaatacagacactttaattttacttagaatcttacttggaatgtgttagtagccagataaacaagcaagactgactcaggaaagaagccagagaaagggtaagtgtgtcaagcaaaagtagacagcagcmccaaattgaaaaaaaaaaaaatgagaggaggagaagaggctaaaggtacatctccttttacttttctttctttctttctttcttttttgtaattttgctttaagctttccattcaaattatcttatgcttcttggactagctattaatattagacttatggttgattggcatttcaaagagatagaggcaatgtatgatgattctgagtcacctactccattgaatgacagcttgactaacccagtgacacatacaggtctcagccacacccctatcctgaacgtgtcttctcagaattct

SEQ ID NO: 189891 - DNA, 524 bp, Homo sapiens
tcactactaactcccaggaccagtgcatgctattcttcaatttattgtgtagattaaaaggtatcttcttaaaaaatgatgcatgctgctgggaaatacagacactttaattttacttagaatcttacttggaatgtgttagtagccagataaacaagcaagactgactcaggaaagaagccagagaaagggtaagtgtgtcaagcaaaagtagacagcagcaccaaattgaaaaaaaaaaaaatgagaggaggagaagaggctaaaggtacatctccttttacttttctttctttctttctttcttttttgtaattktgctttaagctttccattcaaattatcttatgcttcttggactagctattaatattagacttatggttgattggcatttcaaagagatagaggcaatgtatgatgattctgagtcacctactccattgaatgacagcttgactaacccagtgacacatacaggtctcagccacacccctatcctgaacgtgtcttctcagaattct

SEQ ID NO: 189892 - DNA, 548 bp, Homo sapiens
agtggataaacaaaatatggtgtagccatacaatggaatattatccaacaataaaaaggaataaagtacaggtacatgctacatgaataaaccctaaaaacattatgctaaatgaaagaagtcaatcacaaaagatcacatactgtaagatttcatttttttgaaatatccagaataggcaaatctgtagagacagaaaatagattagtrttgcctagggctaaggatggtggtagtagagagtgaatgctcatggagagtgaatgttaataaagggtttcttaggggagatacccaaaaattttaaacttaaatgtggttgatgattgcacgattccataaatatactaaaaataattaaattgtaaacattacaaagataaattttatgctttgcaaattataaatcaataaagatgtttaaaaaacaacaaactatagaaagtaagacatggacattattgtgtgaaatagaatcggcatagaaagctttcagcatccttcaagaatagacaggatttagataacaagtgagcagatcatagaaa

SEQ ID NO: 189893 - DNA, 548 bp, Homo sapiens
agtggataaacaaaatatggtgtagccatacaatggaatattatccaacaataaaaaggaataaagtacaggtacatgctacatgaataaaccctaaaaacattatgctaaatgaaagaagtcaatcacaaaagatcacatactgtaagatttcatttttttgaaatatccagaataggcaaatctgtagagacagaaaatagattagtgttgcctagggctaaggatggtggtagtagagagtgaatgctcatggagagtgaatgttaataaagggtttcttaggggagatayccaaaaattttaaacttaaatgtggttgatgattgcacgattccataaatatactaaaaataattaaattgtaaacattacaaagataaattttatgctttgcaaattataaatcaataaagatgtttaaaaaacaacaaactatagaaagtaagacatggacattattgtgtgaaatagaatcggcatagaaagctttcagcatccttcaagaatagacaggatttagataacaagtgagcagatcatagaaa

SEQ ID NO: 189894 - DNA, 591 bp, Homo sapiens
aagctggtctcccggagcctttgacatgaatattctgccaggttgtctggtgtacagagatcagcctgatgagattgtgtgacctttttgctaaacacacacaatcgtgttaacagtgggctctggcagcagagcaaagctggactcacttctgtgacatactggcagtgtggcttccgacaagtgaattaaccactcctaccagcactgcttcaactaccaccgtgatcagcacaaccactgctgttacatcaccattactaggaccrgtgggggtgaatccacaactcatctatgaaagtgagttttactgtggctcgcggagctataaaaagatgcctgacttgaagaaaatccttatttacctttttaaaaaggcattatgtaagtgagacgttacagcatttcttcaaagtgagcctactatatttacaaggtaacttactttcccaaaattaaatttacacaagacatctcaggagtataatttttacatgcagtgaggcaagtctgtgtcactgggtagcactgcatttaattttgcagagtgaatgaaatagcatggcatctgggcctgcacagattcataaa

SEQ ID NO: 189895 - DNA, 591 bp, Homo sapiens
aagcttcaagcaaacttcatttgcttatttgagggtgctttttattattatccctgtgcaagatctctctctctctttcttttggtgcaagaaattctgatgatttcttttcaaaatttgcatgattggtttttaaatgtccatcargaacaatgcagggacagcttaggggttgcatgcaggcaaggtaccaagatttaggctcatttgcatctgcaaaataatgaaaaccagattcccaataagcatgtaaatggaggctgaaatatttagtcaggctgcaccggccgtggtgtggcaggtgccacctgggatcggaagcagacaggtgtctctcgggcttggctattatctgtgccactcaatgatgtcaggtggatctgaatttctctaattgcgttttctaaaattcactgtgttcacacttaggattggacattcctgtttttatttatgttgacatgttcccagatggacacatgattgaaaatcagcactgggagactggctgctgagggtgacatgccagtgcccagggagggcaaaacctgctccgttgacggtggcttggggagggcgtggttgcatttg

SEQ ID NO: 189896 - DNA, 591 bp, Homo sapiens
aagcttcaagcaaacttcatttgcttatttgagggtgctttttattattatccctgtgcaagatctctctctctctttcttttggtgcaagaaattctgatgatttcttttcaaaatttgcatgattggtttttaaatgtccatcaggaacaatgcagggacagcttaggggttgcatgcaggcaaggtaccaagatttaggctcatttgcrtctgcaaaataatgaaaaccagattcccaataagcatgtaaatggaggctgaaatatttagtcaggctgcaccggccgtggtgtggcaggtgccacctgggatcggaagcagacaggtgtctctcgggcttggctattatctgtgccactcaatgatgtcaggtggatctgaatttctctaattgcgttttctaaaattcactgtgttcacacttaggattggacattcctgtttttatttatgttgacatgttcccagatggacacatgattgaaaatcagcactgggagactggctgctgagggtgacatgccagtgcccagggagggcaaaacctgctccgttgacggtggcttggggagggcgtggttgcatttg

SEQ ID NO: 189897 - DNA, 581 bp, Homo sapiens
caaacttcatttgcttatttgagggtgctttttattattatccctgtgcaagatctctctctctctttcttttggtgcaagaaattctgatgatttcttttcaaaatttgcatgattggtttttaaatgtccatcaggaacaatgcagggacagcttaggggttgcatgcaggcaaggtaccaagatttaggctcatttgcatctscaaaataatgaaaaccagattcccaataagcatgtaaatggaggctgaaatatttagtcaggctgcaccggccgtggtgtggcaggtgccacctgggatcggaagcagacaggtgtctctcgggcttggctattatctgtgccactcaatgatgtcaggtggatctgaatttctctaattgcgttttctaaaattcactgtgttcacacttaggattggacattcctgtttttatttatgttgacatgttcccagatggacacatgattgaaaatcagcactgggagactggctgctgagggtgacatgccagtgcccagggagggcaaaacctgctccgttgacggtggcttggggagggcgtggttgcatttg

SEQ ID NO: 189898 - DNA, 212 bp, Homo sapiens
ggaattcataaaacaaatgacataaaactatacaaatagcttaaatatgtcaagagaagtgaatggctcacacctaaacatattcttaaatccaagttaaaaaaaaaaaaaaaacctttccccctcccgggtaggtgtgggtgctggtcactgcaaagaaaatgtgaggcaggtcaraaatattggataaaagataatggaaacattacttc

SEQ ID NO: 189899 - DNA, 527 bp, Homo sapiens
aagtgcagtcaggagcgggctgcttgctctgaggaaccagaagtttccttctccagtgcggccagcagccaggccctcttcccacgctggggcccagccctcccgcaccaggtgcccaggctccaggagggccatctcttcctcaccgacatggaagggccatggcctcgtgcgctttcactctctttccatttccccgcagcctgartcaccctcaaggaggtaactccctgtcctgggatgtctcctgaggacactccagcattgggacatcaggtcactccaggctcttcctttctttgttttatttattttggcctgggggagccacttggtttctcaggagccttctgctcatgtgtgaatgatctctcatggtgcactgattttataattttccaccagtttcccaggtgccgtacaaagacatgcagagccttctgggagctggtccagttgcttgctcatggtgttcctgtcgagcaccttcctggccgtggagaagtgggtttcgaaagggttgaagg

SEQ ID NO: 189900 - DNA, 357 bp, Homo sapiens
ttgcaaagctttccctaattaaagtcctcccggctgtgtgcatagctcttctgctgcaaatctttgcccttttrtgtttgtgtttaaaattccatctttccaaaatgtttgcccactcagcaagtctccttgaaagccctcacttttgtttgggggaagttttttttttttcctttttggtttttattctgcctatgtgtaggaaatttaagtctcttaggaattgcttgtgaaaatgctctctggtctttttttaaaccatgatgagtgtctctcaccatggcattggaagctggcaagggatgcccctggtgtccgtgctgttagctgccacttgagcttttagatggagctact

SEQ ID NO: 189901 - DNA, 379 bp, Homo sapiens
tggcccccaacaagacttgccccatttcagatgccagtctcaggtcagatccccaggccacccatacttctgaccagctggctacaaatctgaggggttcccatgatccctttcaggtttgacaattcactggaacaactcacagaacttargaaagtgctgttcttattattacaggcttattataaaagataaatcagggacagccagatgaagagacacttaggatgaggcctgggagaatctcaattgcagaacttctgtgccctccttccatggaattggggcacatcacccttctagcatgtcagtgtgttcacaaattaggaagcagcattgagcttcagtgtcaagagtttttattagggtttcattatat

SEQ ID NO: 189902 - DNA, 601 bp, Homo sapiens
tgggtcttataaaagactaccaaggcagtacctctgagtctgcaagakccaagcattactgggctaaaggtgccctgtagtgcagatacagttggagtgactgaagttaccacttcacccaaatccctttaaatacctggaaagccttcccaagaaggatgggtacaaatcagcccagacaatgaagactacaaaaattcctgactcttcaatgcccagacactgacaaatatccaaaagcatcaaggccatctaggaaaacatgatctcaccaaataagctaaataaagcaccagggaccaattctggaaagatagatctttcagacagagaattaaaaatagctgttttgagggaactcaatgaaattcaagataacatacagaaggaattcataatccaatcatacgaatttaacaaagcaattgaaatagttaaaaagaatcaagcagagattctggagctgaaaatgcaactggcacactgacgaatgcatcagcatctcagctgcagaactgatcaagcagaagaaagaattggtgactttgaagatatgctctttgaaaatacacagacagaagaggggaaaaaagaataaaac

SEQ ID NO: 189903 - DNA, 595 bp, Homo sapiens
tctcactccttccttgttaaaaaagggagatgacccagtgtttgagagctgtgttggacattcgcacccaaatgaaacctgcgccttgtccaaatcagaaatgattgaatgagaattgggaagagaataatttcctgctctgcagcccatggttttcaatgcctcgtcatctttcttacaaaactctcctctgtgccacagcttgggaaagccagatctagtccaatatctttgttacagatggggacactgaggcccagagaacacagtgacttggaattgaaagtttcatggaagcaggacctctgtcaagctcagtccctctggtatccccagtgccttgcaccgtgtgcagaacgaaggaatgggtgacttcacacaacctcgagtcgagactgaaacraacacccaggcttcttgactcttgagtgtttctgtgttgcagagctcctcaccccatccccagcctccaccacccctcctcagcttcctctttcagttcttcttggggaattcaggggattgtgcatcttgagcagggccatgtggccctgcctggatctcattctttctctgctatctgcagctggttatg

SEQ ID NO: 189904 - DNA, 605 bp, Homo sapiens
agcattgctttatttttctaacaggagagtaaatcatatgcaagataccaaaaaagttccaaaagatttcactttaccaccccacctgaccatggaacatagtagaaccccatgttaacagcaaggagttccttaagaacatcaagatatgggcggcactggatgaaaatatgagccctataatcatagcagaaaaatttcaagtcacctcagtaacctagaatacatgtcccctgttgcagctgggcataggactactcttgctgtcaagataacaaatgatcctcgacgttccacatatctatcctaccgagactccactattataatgggctttatctaaatatgaacatagcatgcaaataaaactgaagcaagcacaaaatagattggctcatccactggcagaagcaaatccttcatagacataaaggcacatgttcaccgccatcaccactgtaatcaccacacaactgcattmtaggagagttttataggtacaagggcctctgataatttcttcatgagtgaatagtgccctcaagtttataacctttcttctcataatgaatcaaatttgattaagtgcagactcaggtacccca

SEQ ID NO: 189905 - DNA, 514 bp, Homo sapiens
ctggaactgtttgttatttctagaaatgtttgcagttgttactatctccccaacttttcaatggttggagaccctagggcttggatttcrgaactcttgtttatgtaaatgcagttccctggttatctaattttatgacattgagtatttcccaaacaactccagactggaaatacttctaaactttacttaagtgtctaataatcatctcaaagctaatcactgagctcctcatacctgtttttcccaggtttctcaaaaaaattaaattaaatggcaaactcactcttcccatcgttcagacaaaaagaatctgcctcctctgtatctcttgcaattcaaatgtaagccaaaatcttattttgttatatataccctcaatttttatcaaggaaatggtattttctcacctccttgatagacaataccctgatctaactcatcataattttctgcttggaaatgggctaccattagtacaatcagtgtatagacatttggggtatttgagtgt

SEQ ID NO: 189906 - DNA, 626 bp, Homo sapiens
tgtttaccttcatctaattccttaattttgccttaattcctgaagtatattttcatgagatacagaaatctgggttaaaagtgctttcccccccttcccttaaaggtactgtctcctggcctccgygcttcttatgaaaaatttgtgatcattcttactgcagtcactcagtttagaaagtgccattttttctgtggctgctttcaatattttttccctttatttttagttttgggaaatgtgattataacatatgcaggatttttaaacttttgttttttgagattcactgagctacttggatcagtaaatgtatatgtttcactacatttgttaaactttggttattatttctttaaattagatttttgccccaatttctttctattttgcttctttgttaatgatgacacatttactcgatattgtccaacagttccctgagtctcttcattttctgtgttatgcagtttgcataatttctactgtactatcttcaagttcattgattttttctctgctagttctgttgcactactgagatctactagagacttaaaaatatttagatattgtattttttagtttttaaattattttgtttattgtagtttcaatgtttctgc

SEQ ID NO: 189907 - DNA, 626 bp, Homo sapiens
tgtttaccttcatctaattccttaattttgccttaattcctgaagtatattttcatgagatacagaaatctgggttaaaagtgctttcccccccttcccttaaaggtactgtctcctggcctccgtgcttcttatgaaaaatttgtgatcattcttactgcagtcactcagtttagaaagtgccattttttctgtggctgctttcaatattttttccctttatttttagttttgggaaatgtgattataacatatgcaggatttttaaacttttgttttttgagattcactgagctacttggatcagtaaatgtatatgtttcactacatttgttaaactttggttattatttctttaaattagatttttgccccaatttctttctattttgcttctttgttaatgatgacacatttactcratattgtccaacagttccctgagtctcttcattttctgtgttatgcagtttgcataatttctactgtactatcttcaagttcattgattttttctctgctagttctgttgcactactgagatctactagagacttaaaaatatttagatattgtattttttagtttttaaattattttgtttattgtagtttcaatgtttctgc

SEQ ID NO: 189908 - DNA, 527 bp, Homo sapiens
cccaggcagctggcttccggagtccatactgacactacactgcccaatatgtttgagtcttgccagtgtgaaagaaaaagcattcagtgatacttgttaatgcacagtaaggaagactttactcaggaccatactataggttcaagggccactgcaatgggatcttttagtgggagagagattgggatcaacttcattcatatataggcaagtgggaatttacagcctagaagcagtgtgggggtcaatggataggaaattaagagaaaacacatcggagtgagggggattgcagttacagacaggccaggcttataagacatcatgtggggaatactggaggatggggaacttgatcagatatcgagaataattaggggtcaaaaatggaggtgttcttgctaaactgacttagcagggatctttgctaaaacggaattttacgaggaaatgcacagatgggcytaggagaaggttcagaaacctaccaaagtttggccaagctttgtcacgaggacttgcttcaa

SEQ ID NO: 189909 - DNA, 622 bp, Homo sapiens
ctccaaattcttatggttattgtctcttctctrttgatgaggttttgtttgaaagggtccgtggacatataactgggcttcacatgaagatttcctgtaaagtccacagcaatctttactgagagttggggaatgaagcttgaggcttccaatcacttataaagcctgtcagaaacagctcagttatcaagccattagttttctaggggtgaacaaaacaattggtgccttgttttattagccctttcacaagtagctatactggctatttttaggatgattctatctattccctactggctctgattttgtgattatcccaaggtgagctgcatgtaggactgcgagctacttcctttctattacatgacaccaatctcattctttatgctttatatggatccaaatgttctcatttataagtccacttctggcattctcctggctttctagagcaaatatttattctcgtttttatttcattttatattttaatggaattatggaaatagagattcataatgatataaagccatgttgaatgagaagccaaaatgcaaatttagagaattttgttagatctcaagaagctaaaaacatggctgatgtaaagtgtagtctt

SEQ ID NO: 189910 - DNA, 592 bp, Homo sapiens
tttctttcaacaatgttgacatagtttggatatttgtccccacccaaatctcatgctgaattgtaatccccaatgctggaggtggggcctggtgggaactgtttgggtcctgggggtgaatccctccgggcttggtgctgtctttgccatagtgagttcttgtcatttaaaagtatgtggtacctctgctacccccactcttcctctttctctctcttactcctgcttwcaccatgtgatgtgcctgttcctgcttcaccttcaggcaaaagtcaaacctccttgaggcctccccagaagcctagcaatgtcagcaccatgctacacagccaattaagcctcttttctatatgaaatacctagtctctaatttttttttgtagcagtgcaagaacagcctaatacaaatgttttctacttttgaaagtataagtttttaacctcttttcaaaatttattcaatctttactattttgatggtgttataagtgaaattgttcttatattaatttttggactatttgttgctaaggaataaaaataaagttgttttttaaatatttaccctgcaaacttactaagttcatttatt

SEQ ID NO: 189911 - DNA, 440 bp, Homo sapiens
tcctcacccatgctagggactcttgatcacccagctggccttgaaggggcattggtgaaaacctgctgcttattctaaaaaatctgataacggtaacaggacaggatattcaaataatgacacctaattatcaggagcaagctcagaaaaataatggtacctgtagtcatagaaaggaaggtcagtcwcaaagaagtagaacatatcccacccaaaacagacatactggttgattgtaaaaaggagttaaatagaaaattatctatagcactgtatatactagtttagcctacatccatacacatgcacacacacacacacacacacacacacacacacacagataaatttttagaaagtaaaacataacttactgagccaagaattgagcatataccatgctgaatacaagaagataaatttcctttttgaccccaaaa

SEQ ID NO: 189912 - DNA, 606 bp, Homo sapiens
tttcctgtttttgctcaagattatgtttttgaaatgtaatagttttgatatatagagttgtggttcattcatttttacttctatatactatcgctttgtataaatacctacaatttgtattttaatgcaaatgtgcaagagtttggttaggttatatgcttagaggtggatttgctgggcataggttggccacatacttaccatctactgcaagtttgccagatggtgtatccaaatgcagccaagtaaattccagaaccttttgctctaccttctcagcaacccatgacagtgtgagactttttccccttggataaatgagtgggtaaaagttgcatttctctgcaytttgaacatgttttcatatgtttattgaccaatagattttcttagttttgaattatttcttcacggctattgattagttttctatgtgacatcttttcttaatggtgtacaagaatgccatctatattttaaatattagttatttacagttatacacaatacagttgtcttatgttatagcttgcctttaaacttgcttatagtcttctatgtcttactaacattttacattttaataaaatcaaatttattctcttt

SEQ ID NO: 189913 - DNA, 606 bp, Homo sapiens
tttcctgtttttgctcaagattatgtttttgaaatgtaatagttttgatatatagagttgtggttcattcatttttacttctatatactatcgctttgtataaatacctacaatttgtattttaatgcaaatgtgcaagagtttggttaggttatatgcttagaggtggatttgctgggcataggttggccacatacttaccatctactgcaagtttgccagatggtgtatccaaatgcagccaagtaaattccagaaccttttgctctaccttctcagcaacccatgacagtgtgagactttttccccttggataaatgagtgggtaaaagttgcatttctctgcactttgaacatgttttcatatgtttattgaccaatagattttcttagttttgaattatttcttcacrgctattgattagttttctatgtgacatcttttcttaatggtgtacaagaatgccatctatattttaaatattagttatttacagttatacacaatacagttgtcttatgttatagcttgcctttaaacttgcttatagtcttctatgtcttactaacattttacattttaataaaatcaaatttattctcttt

SEQ ID NO: 189914 - DNA, 573 bp, Homo sapiens
catgatctctttaaatattacttctctgcctggcacagtggctcacgcctataatcccagcactttgagagactgaggtgggcagatcacttgatgtcaggagttcgagaccagcctggccaacatggtgaaaccccgtctctaytaaaaatacaaaatttagccaggtgtggtggtgcatgcctgttaatcccactacttgggaggctgaggcaggagaatcgcttgaacccgggaggcagaggttgcagtgagctgatatcacaccactgcactccagcctaggcaacagagcaagactctgtctcaaaaaataaataaaatattacttctccctgagttgctccatgctgtgcttcctagaatacctattagatgcatgttggactttctcaccctatcttctatatctcttaacctctcttttatagtctcctttttatcattatgtattgcatttgggagaatctcatcactgattttctcctggtgtctaacctgctatttaacctatctactgagtgtcttcatttccttgttttaagctatctcttacagaaggatgaatggctt

SEQ ID NO: 189915 - DNA, 573 bp, Homo sapiens
catgatctctttaaatattacttctctgcctggcacagtggctcacgcctataatcccagcactttgagagactgaggtgggcagatcacttgatgtcaggagttcgagaccagcctggccaacatggtgaaaccccgtctctattaaaaatacaaaatttagccaggtgtggtggtgcatgcctgttaatcccactacttgggaggctgaggcaggagaatcgcttgaacccgggaggcagaggttgcagtgagctgatatcacaccactgcactccagcctaggcaacagagcaagactctgtctcaaaaaataaataaaatattacttctccctgagttgctccatgctgtgcttcctagaatacctattagatgcatgttggactttctcaccctatcttctatatctcttaacctctcttttatagtctcctttttatcattatgtattgcatttgggagaatctcatcactgattktctcctggtgtctaacctgctatttaacctatctactgagtgtcttcatttccttgttttaagctatctcttacagaaggatgaatggctt

SEQ ID NO: 189916 - DNA, 585 bp, Homo sapiens
gtgcctgtctttagctcaggcatgaaaaaacttcaaaacattttcactttcaaaagggatccctttgagttgtccagaagggccatcttatctcccttctactcaggatagcctatcagtgggcagtaagatcatggaggtcaggaagagggtgactagttctctctgacttcagagaggaggacctgtcctcgactatctattttccaatgaaagtttcccaataagtcattgccccattataacctaagcacagcagaatggccatggtatgtcattaagtgtttttgtaagttgatttgtggtgttaactttctggatcatagaaatggttttcctcagtattttttcttctgtaggtttggagtcaagaattataatcagttgctaagactttgaattctccaggtagttatttcaagaacatccttttgcatgtttcttggaaactgattccttgttgtgtgaattcaaatacattatatgtggtggctactggccagctctmagggcacctgaactttttggcacttcactccttatattccattatggaatatggtaaaatctcttatgcactaagta

SEQ ID NO: 189917 - DNA, 580 bp, Homo sapiens
ttgagaagttaggaagacagtttaaagatgtgtcaaaaggaatttaaaattaaaagcaagaaaagaggtcccataacccacattctgaagtttcacaaaattctggcttcaacagcgttcaagaaaaacaatagaaggagagggagtagccacccatgtcatctgctgtctctccagatgcctaagaaaacaaagcttcttgtaccagaactactatgaaaacatgcacttcttaaagctccttggagctcaaaagtcctccatgttccactacaatccaaaggtccaaccaacatgagattaacctaacatcagaactcaggccacttgatacatttaaataaattttcagcaatagtttcatctaatatgcgattacaaatgaactaataggacctaaccactagaatttcaggtgttagatctgaatatgaaattgtgtactttatttgttaaaggcagggttcatgcaatggaagggaaatagaagatttaataactagttgcatcatttatcagaagaactcgtatcgtcaggttcatgacatmataaggaattgattcctgattgtaattttgg

SEQ ID NO: 189918 - DNA, 545 bp, Homo sapiens
cattacagattcatggaaatcccaagtcagtttgttatctgttgagtagaggaagaggttttttctgaaagaccaaatctagtttgagatatagatacagacagatatagatgtaggtataggatgtgtgtacatccacaagcacacatacataaacacactacattttgagagaatgattcattgtccatttctaggaagtaccacttatacaaagttcaacacgaatggtactccctctggacttgtgcaatgtgtagagctgggcgtttatatytgagtatgttggagctgtcatcacataaatgtataacttcatcaggcatgtttttaagattcgtagaaaacttcttaatcatatatgagttctcatgtttaatttttttatgagtgaaataatcttgccaaaaaacactgtatttagaaaatcagtctaatttgaatgaggctggtggatatgacaagacttatttcagaggttgctactttagtgtaagtagatttaatgcagatgaaactcattctacttattggcaagataaata

SEQ ID NO: 189919 - DNA, 603 bp, Homo sapiens
attggggtttggcagtttgtttccaagtacttattatattttgtgtttaataaaactttcatggtattttaccccagctcctctttctttggtcatttaaacatatagatgacaaataaaatgtaatttagtgttttcttgaatgttttaatcaaaaagagatatttataagagacattaataattactgaataatcacagcatattctgttttgaactgggagtgaatttttgcaaaagataagccaaaatggaaggtcaaagatatggtcaaaatcacagctaagtttctgttttaaaatagggctggtccttgggaaagggaaaatgagaaacttctatagtactggaaaagttgcataccctggtctgagtagtgccttacacagctttatttatgtaaatattcatcaagatttaggtgcattcattgtacttccaacatttcagctaaaaagtttaaaatgaggccattctagctatctctagacagaaatttcaacacaaaggcttcaaaaaaaagtaaaaattcataaaacattgaaaaaaastttttattatactttaagttatagggtacatgtgcgcaatgtgcaggtttgt

SEQ ID NO: 189920 - DNA, 407 bp, Homo sapiens
agagagaattgggaaacatgatccattgcctacaagcactttaccctttgaatgcaatcacagcctgcaaggaagctgatgggaagaaagtttagacacacacacacacacacacacacacacacacacaaacagccctacaacmcactcctctccgccccagtttatccttaccttagtgattagatttgtaccactagaaacctgagtgtggtcaacccttgattttgctgaccactcccttcaaagaaagaagaactttctatgagactgaaagtcatgaccagctccagtccctaacctatttccagcctgaagaaggaccacaaacacaaacccacaatcttcatctaaatgcttgtgtgttggtaagttgtgtgttgacaaatgctaatgtgttgatgtgt

SEQ ID NO: 189921 - DNA, 626 bp, Homo sapiens
cttcaaaaaaaagtctaatgagataggtactacttttaaccctaatttatagaaatataaagagcaagtagagtaaatgacccccaaatactaagttgtatcacaaatctcaaactcaaagaggcctaccaygaagacaaaattttgtcctgaccctttctatggaatattccattatttgaaaggaagaaagacagaaatgcccatctgctgtgacccttcctccatggcagggattggctattctcctttacatacactatcttgcttaatgctcccaatgacctgttatgcaagaattaataccccatttcacatatgatgaaatagtttgagtaatgttgttcaagatcccacggctgccgtggggtggaaacagcattcaaacccaacttcttccaataccaaagtcctaatgtgaccacttcattgttttctctccaggcttttgatgtaaaagaatgctgaggatcctgcagcacttcctgtgagcatagtttccctctgtgtgcctcagggtggggggataggaatggaagaggatggaggaggtggaagagggttttccacactttatcctcatctctcccttgccgttttagtggcgattgcgtgaactacagcta

SEQ ID NO: 189922 - DNA, 542 bp, Homo sapiens
cttcatggccagcttcaccacagctcaagttttctgtcctatactcactctcaactgaaaatctttgctcatcctgttttcctgagtggaaatggcctttcccttcatttcttttatctaaacttactcttcttaagatccatattatgtttaaactatagggcacacaccatctcttctagcctcctgggatattccttttyctatacttctatagcaaatcccaactgctcactagaatagcttgtcacacattgctttacggggacatataattattccacatgaatacatcttgtcttgatatttacgttataagtttcttagaatactccataacaaattatgcacataagaagaattcagtacatactttctgaattaaaagtagttttcttcctatctacctatgtactagcattataagaataacattataggcatacagtggaaaagtttcaagagtgaaaacaaatccacacctatgtattattaaatagtgagggacaaagtgctaaagtattatatataaaattattcac

SEQ ID NO: 189923 - DNA, 381 bp, Homo sapiens
tttaaactatagggcacacaccatctcttctagcctcctgggatattcctttttctatacttctatagcaaatcccaactgctcactagaatagcttgtcacacattgctttacggggacatataattattccacatgaatacatcttgtcttgrtatttacgttataagtttcttagaatactccataacaaattatgcacataagaagaattcagtacatactttctgaattaaaagtagttttcttcctatctacctatgtactagcattataagaataacattataggcatacagtggaaaagtttcaagagtgaaaacaaatccacacctatgtattattaaatagtgagggacaaagtgctaaagtattatatat

SEQ ID NO: 189924 - DNA, 565 bp, Homo sapiens
gtctgttcaggtttttctatttcttcgtggttcaatcttggttggttatatgtgtctaaraacttattcatttcctctaggctttccaatttgttggtatatagttgttcatcatagtctctaatgatcttttgtatctctgtagtatcaattgtagtatcttctttttcatcatttgattttatttatttggattttctatttttcttagtctagctaataatttgttgatttttaaaaaatctttacaagaaaacaacttttcattttgttgatcttctgtattttttatcttgatttcatttagttctgctctaatttttattatttctttccttatactaattttgggcttggcttattattgcttttctagctccttgaggtgcattgttaggttttttatttgaaatctttctcctttttttcatgtaggtgtttattggtataaacgtcctctttaatactgcttttgctgtatcatttaggttttggtatgttgtatttctatttttatttgttttaagaaatctttttaaatttcctttttgatttcttaattgac

SEQ ID NO: 189925 - DNA, 402 bp, Homo sapiens
tagcaccttgggtgagccgtgcccagacgcaatccctgagcagcktgggtggcaggctccagaggctattggagttggcactttgggctcggggcccagttggcagaggctgtgtccccacggagctgggaacagaaggccctgggtctgagtccaggttccgtgagatcctggacttgtccctgagccgccctgagccccaagttctcatctgagagtgggagccatgactctcctttcagcgcggtggtgaggattgattgagctgacttacgtcagagtgctgggaatcacacacaatcgtggctgagaagagagaggctggctttttgtgccgaggtccagttctccgtgtcagagtccatgtcatgacccactcccgtctggagcctcaccgagggc

SEQ ID NO: 189926 - DNA, 402 bp, Homo sapiens
tagcaccttgggtgagccgtgcccagacgcaatccctgagcagcttgggyggcaggctccagaggctattggagttggcactttgggctcggggcccagttggcagaggctgtgtccccacggagctgggaacagaaggccctgggtctgagtccaggttccgtgagatcctggacttgtccctgagccgccctgagccccaagttctcatctgagagtgggagccatgactctcctttcagcgcggtggtgaggattgattgagctgacttacgtcagagtgctgggaatcacacacaatcgtggctgagaagagagaggctggctttttgtgccgaggtccagttctccgtgtcagagtccatgtcatgacccactcccgtctggagcctcaccgagggc

SEQ ID NO: 189927 - DNA, 402 bp, Homo sapiens
tagcaccttgggtgagccgtgcccagacgcaatccctgagcagcttgggtggcaggctccagaggctattggagttggcactttgggctcggggcccagttggcagaggctgtgtccccacggagctgggaacagaaggccctgggtctgagtccaggttccrtgagatcctggacttgtccctgagccgccctgagccccaagttctcatctgagagtgggagccatgactctcctttcagcgcggtggtgaggattgattgagctgacttacgtcagagtgctgggaatcacacacaatcgtggctgagaagagagaggctggctttttgtgccgaggtccagttctccgtgtcagagtccatgtcatgacccactcccgtctggagcctcaccgagggc

SEQ ID NO: 189928 - DNA, 592 bp, Homo sapiens
agggcctgggatggaaggtctcagtggcttcctcatctgctgagtcccatgtcatggagccttctttgcagatgctgagcagttgtccagatgaggagggtcacaggtccccaggagccggggctagtttatcccatggaggcttccagaaatgacaggaaaccaggcgccctgcctagcactcaggccttcactgctggctggaagggagatgggtggatggagggccgagtctatgtgctgttaccttgcagcttctgctctgctccttcatcacctgggtccacasaacagccctagtgagacccactggagggcaatgtgcccccatcaggggctgggaattccagaaggggagtagggcagtggggagtttccttgcatgggagaggatagggcagtttgagcagagagtggacactgaggtgaggggcagaaacatgcctgggaccagccgagtcctcccacactgggccaggaggtgaagaggaagcaccgtgctggacaggaagcctggtgaatgggttggttttggggactgaggcctaaatgggaaagcgaataaaccccatactgcacctcacccctgatt

SEQ ID NO: 189929 - DNA, 607 bp, Homo sapiens
gcagggggctgggtgaggtgggggctgggtgatgtggtagaaagagcagtcaagcagrgtcaggagatgggctcccctgcctaccgtgctctggcatgtccttcgccacccagtgagggcttggacaaagtgagcagacctcaagccagatggacgtgaggctcacccagtgggtggcttttgggccacaccagtgcccaggtgctgcggaggtccaggcctggccttttgttggcattcctcactgggtttcagtgcatgggccggagaactgttggactggacgctctgttgtttctttacagctcagctgtgaacttcactctaactggacataacgcccctagagctgcatctccaaacaagggatgaaacaactctcccaagtgtttggtgttccgagcagacgctgatctgctgttctcctgtttttcccaccactggacaatttcagtccccaggaatcagttaggattctgttttacccctggccccagttgtcaccaagaaatatctgggacattcaaaaaaatagccatgaacgaaaagtagtgtccaatgctagccaaagtctggcgaaaagggtattttcatgcatttttctgcc

SEQ ID NO: 189930 - DNA, 514 bp, Homo sapiens
gattttcttctctccaaataagtcacaatataccccgattttcatgaagaaggatatatggtttttttcttctgcttttagttataattagactagctgaactacatggagaagctaaagctgcatttatttgttacaggcatatttatatcaaatacaratggggtgggtaggcttgtgactcttcatggccatgaaaatgaaatgaatttggtgtctgaaagtaacctcgggtgagactaacatctctgttgaaattgactccattgcttctcttcaggctaatgtgtatcatcggaggggtccattcagataatttaaggcacctttttggggctctgtattagtctgttctcacactgctatgaagaaatacccgagactgggtaatttataaagaaaagagggatgatacagttccacatggctggggaggcctcaggaaacttataatcatggtggaagaggaagcaaacacgtccttcttcacatggcatcaggagagagaagtgcc

SEQ ID NO: 189931 - DNA, 514 bp, Homo sapiens
gattttcttctctccaaataagtcacaatataccccgattttcatgaagaaggatatatggtttttttcttctgcttttagttataattagactagctgaactacatggagaagctaaagctgcatttatttgttacaggcatatttatatcaaatacagatggggtgggtaggcttgtgactcttcatggccatgaaaatgaaatgaatttggtgtctgaaagtaacctygggtgagactaacatctctgttgaaattgactccattgcttctcttcaggctaatgtgtatcatcggaggggtccattcagataatttaaggcacctttttggggctctgtattagtctgttctcacactgctatgaagaaatacccgagactgggtaatttataaagaaaagagggatgatacagttccacatggctggggaggcctcaggaaacttataatcatggtggaagaggaagcaaacacgtccttcttcacatggcatcaggagagagaagtgcc

SEQ ID NO: 189932 - DNA, 514 bp, Homo sapiens
gattttcttctctccaaataagtcacaatataccccgattttcatgaagaaggatatatggtttttttcttctgcttttagttataattagactagctgaactacatggagaagctaaagctgcatttatttgttacaggcatatttatatcaaatacagatggggtgggtaggcttgtgactcttcatggccatgaaaatgaaatgaatttggtgtctgaaagtaacctcgggtgagrctaacatctctgttgaaattgactccattgcttctcttcaggctaatgtgtatcatcggaggggtccattcagataatttaaggcacctttttggggctctgtattagtctgttctcacactgctatgaagaaatacccgagactgggtaatttataaagaaaagagggatgatacagttccacatggctggggaggcctcaggaaacttataatcatggtggaagaggaagcaaacacgtccttcttcacatggcatcaggagagagaagtgcc

SEQ ID NO: 189933 - DNA, 576 bp, Homo sapiens
cagaaacttaacccttccatgattttcttctctccaaataagtcacaatataccccgattttcatgaagaaggatatatggtttttttcttctgcttttagttataattagactagctgaactacatggagaagctaaagctgcatttatttgttacaggcatatttatatcaaatacagatggggtgggtaggcttgtgactcttcatggccatgaaaatgaaatgaatttggtgtctgaaagtaacctcgggtgagactaacatctctgttgaaattgactccattgcttctcttcaggctaatgtgtatcatcggaggggtccattcagataatttaaggcacctttttggggytctgtattagtctgttctcacactgctatgaagaaatacccgagactgggtaatttataaagaaaagagggatgatacagttccacatggctggggaggcctcaggaaacttataatcatggtggaagaggaagcaaacacgtccttcttcacatggcatcaggagagagaagtgccaagcgaagggggaagccctttataaaaccctcagatctcatg

SEQ ID NO: 189934 - DNA, 358 bp, Homo sapiens
taaaacgagtatgagtcccgtccttcatcagaacacgagtctgggtttttttgttgctcagttggttgttgtttttaatacaatacaaatcttggcaaattcagggctcaggaagtctgggatttcagcatcctggggtccagttaggatccaggcagaggagccctccctccaccgacscagccagggcctgcctgaaaaaagcaaagaagtctttgcgtgttcttgagtgaatgagtgaaggtggagtggagggagaagaggaatggtttccagcctccctgcagctcctctgcagaaaaccctccccaggccagccccatgaccaccccagggagaccacagctgccgtgcccag

SEQ ID NO: 189935 - DNA, 358 bp, Homo sapiens
taaaacgagtatgagtcccgtccttcatcagaacacgagtctgggtttttttgttgctcagttggttgttgtttttaatacaatacaaatcttggcaaattcagggctcaggaagtctgggatttcagcatcctggggtccagttaggatccaggcagaggagccctccctccaccgacgcagccagggcctgcctgaaaaaagcaaagaagtctttgcgtgttcttgagtgaatgagtsaaggtggagtggagggagaagaggaatggtttccagcctccctgcagctcctctgcagaaaaccctccccaggccagccccatgaccaccccagggagaccacagctgccgtgcccag

SEQ ID NO: 189936 - DNA, 570 bp, Homo sapiens
cataatacctacagcaaaaacagatgatctcaccgtccccatttctctccatgtgagaacactgcaattgctcatctttctatcagccttggagttgaggtgtctttccatttctctgccttggtctgggttgtctcctatcctacctactgggagatccatcccagtcatcccacctcttctttatccccagccttcctcttcccaccgcctcattcttgtctactttctgatcctcacagtactaccctgaaaacaaaaatccccagaaaacccaaagtccttggctgatgtttctgcctaagtagacttcgctttgacattgcccccctttttttgagacagggtctcactgtttcccaggctgaagtgttgtggcacaatcttggctcactgcatttttgacttcctgggcttaagcaattctttcacctcaggctcccaggtatctgggactacaggcatgagcctctgtgctgggctaatttttctattttttwaaaaaaagttgctgttgagctggggtctcactatcatgcccaggcttgtctcagactcctggactcaagt

SEQ ID NO: 189937 - DNA, 504 bp, Homo sapiens
atggtcgattttttctcgtttactctaagttaatttcactgatttcaaaggctaaagcaatcacatttgatttgtaacatttttattaggtttttttaatacytctatgcctataagtgagataggctttatacttgatataaaatgtgtctggaatattcttttgtgtaacatgatagttattttggtcctaaatgtctgatataatttcttatctgatctgatctagagttttgtttgtaggaaaagctttaatttcagattcaattttcttaacagttaaaagactattcagattttctctttcttcagatgtcttttaataaaattgtacttctttaagaatgtgttcatttcccctaaattttgtaaagttttgctataaagttattcataatagtttcttatcatttcaatatctaggacctgagataatcacttttttattcttgacattgattcctctctgtttctctctctttctctctctttctgtgtgtgtgt

SEQ ID NO: 189938 - DNA, 333 bp, Homo sapiens
agagggaagaagaatcagagaaagaagatgctaggccactggctttaaagacagaggaaggggttggagccaaggtaggtagctctagatgctggaaaaggcaggaaaacagattctccccaagagcctctggaggaagygcagggctgctgataccttggtttcagcccagtgcttatggcgtccagaactgtgagagaataaattctagtgcattaaatttatggtgattcattacagcagtcacaggaaacaaaaagacaaccaagaccattccttccaggactaaatccctggttctgagaaatggactgtgtggtggattggccccag

SEQ ID NO: 189939 - DNA, 603 bp, Homo sapiens
gaattccaaattctaaaagcaaacttggtagctaatttgrcacatagctctgattaatatcatttgcttagtatctctgtcagtaagaaaggataacataaagaaaaactagaaatataattttagatatctaaaagagatatcacctttaaacattttttacttgttattcagtttgctttcctgccttagctacctattatcttgtttaattttcactagcaaaaacaagctttgcatttatggaaaaaattggcaatttttaggatgtgctaacatcacagattaaagcttggaaaatttcagtttgatggcctagaaaacaaagatgacaaaaacgttaagctctgccttttggtaggatcttgatggattttcaaaaccgagccctctctggaggtaaagggataattcatcatcatcaagaatatttgccattcaaagttatttaagcagcaggaaatactggcgtgggcagatgttcaaagctcaatcagaatgtgtctccttgatggcaaaacctccaaaggagtcatgttttgcttattgatggtaaaatatgcacatatttctgtagatcaacatgctccacataaacacaga

SEQ ID NO: 189940 - DNA, 603 bp, Homo sapiens
gaattccaaattctaaaagcaaacttggtagctaatttgacacatagctctgattaatatcatttgcttagtatctctgtcagtaagaaaggataacataaagaaaaactagaaatataattttagatatctaaaagagatatcacctttaaacattttttacttgttattcagtttgctttcctgccttagctacctattatcttgtttaattttcactagcaaaaacaagctttgcatttatggaaaaaattggcaatttttaggatgtgctaacatcacagattaaagcttggaaaatttcagtttgatggcctagaaaacaaagatgacaaaaacgttaagctctgccttttggtaggatcttgatggattttcaaaaccgagccctctctggaggtaaagggataattcatcatcatcaagaatatttgccattcaaagttatttaagcagcaggaaatactggcgtgggcagatgttcaaagctcaatcagaatgtgtctccttgatggcaaaacctccaaaggagtcatgttttgcttattgatggtaaaatatgcacrtatttctgtagatcaacatgctccacataaacacaga

SEQ ID NO: 189941 - DNA, 560 bp, Homo sapiens
aagcagtggggatattatgatatttgattaaaaaatgagttggaaaattttaaatgcccaaatttgaaaaatgaacaaaatgttaaaaatagatgggaaaggctgggaccctgactgggcctcctttctctcaccccaagtgggacccaaggcacttccatgaaactcaagggctctggaaaatccagtttgaaaaccagtggccaaaacttaactgyctaattttccaggtgtagaaactagggaccaaataagacaatagagccataactcaagtaggttttcttgctcctaggtcagtggtagaaggaggaagcctgccttgactccagacccatttttctggaggggaaaaagtgtggtatctttacttccctggctgtaagtagagtagaggtgggattatgtctgcccagggattgttcctcaggtcaatttaaaacttgctggctaagtggtcactctatgttgggtcacaccatcatggaggcagaggaatgcccagtcattggtaaagtacatccctgggaatccacacacatgattcgtgttcaagcatc

SEQ ID NO: 189942 - DNA, 457 bp, Homo sapiens
aagaaatggccctggatcagtggtccatcttaggaaccacaggtgttgttgtacacattctgtttacaaccttaggggtgagtgaaaaacaaaacctaaccaagaaaacagcgaccacagaccagaatgagctttgccaacatttccttcctaatcattcctaaacaaccagacacataatggcatgataacaagcacaaagttctaacatctacgtggaatgtcaattttaartaagagtgaggacatgggtgtgtttgtgcatgtgtatgtggaaaacaatttaaaaaattaatgtgactaatctactcatgtcttgcatattcagtaaccttcagaattcacctcattgaagggccactagttttgaagaatgtagattaataagcctccttgcttaaaaaatgagcttcaatatttgtgcaaatcatagagtcaaaagaaaaaaatcgatgga

SEQ ID NO: 189943 - DNA, 371 bp, Homo sapiens
agcaattctcctgcttcagcctccccagtagctrggattacaggtgcccgccacctggcccagctatttttcttttgtattttcagtaaagacggggtttcaccatattggccaggctggtctcaaactcctgacctcagattatctgcccgcctcggcctcccaaagtgctgggattataggcatgagccactgcacctggcctaaaccccagttttagctgggctcctggccacctgattacaaatcccctcactcagtttctcttaaagcaagatgtggccataggactaggttcaagccaatgggatgtaaaaagaaattataggcgtgatttcaactccctaaagacaagattgcttgccatggac

SEQ ID NO: 189944 - DNA, 467 bp, Homo sapiens
gatagtgaaaaaaacaggacacatcctacagttccaataaaagatgaatgattgagtaaatttatggcacacctaaacrataaaaatgtttacagctattaaaactcagattggctaagtgtagagagaaatgcttactttatataattaaggaaaaccataatatgacctagtataaattcaaccatgtaaaacactgtgcaatatattaaaggaatgtatgccaacagtttaacaggaatggcctatgagtaatagtttcataataccaaattttttcctgttcctttatacatttctgttcttcccaatttgtctaaaatgagcatattcaggctgagattaataaaccctgttttgcaggtaacttcctttttcttcaatttcccaagagaaaacaagaataggccaccttctcttccatttttcattcccaggaagaaccaagccactggtgcagggagaat

SEQ ID NO: 189945 - DNA, 581 bp, Homo sapiens
ggttattgctgcaacccaagcaagagaygatggtggcctgggtgacacagtgacagtgggcatagagaaaagaggacaggtttaaggacaagttccaaaacactcatttgtcagggtgatattgctgcctcctttaattgaggcaacagcccaactcacacctccaacctcctaggtcctaccatccattcatatcctgagaaggtgaaagtgtggagaaaagatgtccttccctcagccatgacacatctatcacattttcaatatcatttagaaacagactctctacaattaaacgggcgtatccccacatccatattgaaatagccaatgaaggccaggtgcggtggctcacacctgtaatcccagcactttgggaggccaaggcaggcagatcatgaggtcaggagatcgaggccatcttgcctaacacgttgaaaccccatctctactaaaaatgcaaaaaattagccaggcatggtggcacatggctgtagtcccagctacttgggaggctgaggcagaaaaatcacttgaacctgggaggtggaggttgcagtgagccaagatcgtgccactgc

SEQ ID NO: 189946 - DNA, 581 bp, Homo sapiens
ggttattgctgcaacccaagcaagagacgatggtggcctgggtgacacagtgacagtgggcatagagaaaagaggacaggtttaaggacaagttccaaaacactcatttgtcagggtgatattgctgcctcctttaattgaggcaacagcccaactcacacctccaacctcctaggtcctaccatccattcatatcctgagaaggtgaaagtgtggagaaaagatgtccttccctcagccatgacacatctatcacattttcaatatcatttagaaacagactctctacaattaaacgggcgtatccccacatccatattgaaatagccaatgaaggccaggtgcggtggctcacacctgtaatcccagcactttgggaggccaaggcaggcagatcatgaggtcaggagatcgaggccatcttgcctaacacgktgaaaccccatctctactaaaaatgcaaaaaattagccaggcatggtggcacatggctgtagtcccagctacttgggaggctgaggcagaaaaatcacttgaacctgggaggtggaggttgcagtgagccaagatcgtgccactgc

SEQ ID NO: 189947 - DNA, 418 bp, Homo sapiens
ggctgttgtatgctctggctatagtacttcatttttgtaaaatttgttgttttcaaaggtggaatctcactccataggagtgaattaaacattctgctatggttgcctgccactaggtgaactgtggcatctgaattcttgagctaaaatacactgatgcccttaaggtccagatgagaagaagcagggccaaagtactgatccattcatctgcatcattttctacaaaatattaattttaagttgaaaaagagacacagagtcattgcaaaaacaagagttctaaaaatacttttagaacttttgyataaattcactgctaatcattttttcacagtaaaaaacaatattgttttaggtagttttcctccatttctgaagaaaggccatccagtttgttcccagtggccaggaatgc

SEQ ID NO: 189948 - DNA, 616 bp, Homo sapiens
aatgcaaaaaaaaccttaatatcagcataaggtgataaaatatgtaggcatcctaagattataattataaaacccaagaacttttttactcactcactgaacgctgcatagctccagagacacagaatatggtattcttgttctttggccccatctctgatttagaaatgttatctatcattagttttgttattaaccaaaatgcattgcaacaattttctaactgttctataaacagtactttgcarctataaaatattcaaaataaactttatatatagtaatacctacaaaaggaataccttttccattccccaaaatattaatgcattaacattgccaggggtttgtattttcacttgtctacttttataaaatgccaaaactatgcaaataatatagatgcaatatagtggcttagcatcatggtctttacctaagagcataatatggttttcaaggacatttgactcatacatagaacccaatgattcaagacatattttatactgaattcattcagagctgaaaatttacaaatgatgaaaaacaagttctaactagaattcgcttctgttttatataatatatacctccccccaccctgatctcattt

SEQ ID NO: 189949 - DNA, 616 bp, Homo sapiens
aatgcaaaaaaaaccttaatatcagcataaggtgataaaatatgtaggcatcctaagattataattataaaacccaagaacttttttactcactcactgaacgctgcatagctccagagacacagaatatggtattcttgttctttggccccatctctgatttagaaatgttatctatcattagttttgttattaaccaaaatgcattgcaacaattttctaactgttctataaacagtactttgcaactataaaatattcaaaataaactttatatatagtaatacctacaaaaggaataccttttccattccccaaaatattaatgcattaacattgccaggggtttgtattttcacttgtctacttttataaaatgccaaaactatgcaaataatayagatgcaatatagtggcttagcatcatggtctttacctaagagcataatatggttttcaaggacatttgactcatacatagaacccaatgattcaagacatattttatactgaattcattcagagctgaaaatttacaaatgatgaaaaacaagttctaactagaattcgcttctgttttatataatatatacctccccccaccctgatctcattt

SEQ ID NO: 189950 - DNA, 497 bp, Homo sapiens
ctcttacaactcaattattaaaaaacaaataactcaattaaaaatgggcaaagtgatggaacagtcactctcaaaggaagataccaaatggccaaaaagcacatgaaaagtcttcagcaaaatacaaatcaaaatcacaatgagataccacttcatagccactggaatagttagatcaaaaggtcagatgaagagatatagaaaataatttatgtcagctgctcaaatgattaaacatagattatcatataatccagcgactccaatcctaggtatactgaagagaaatgaaatgcatgttcacacagaaacttatgcatgaatgtgtaggagttcrgtcagggtggtgggaaaagttgtaaaaaaaaaaagttacaggaaagacacaaacctttttaaaaagccggaaggttttgcaaaagctttaggaaaaggttatggctaaaggcagcctaatcctcttacctttagctaatagcaaaaagcaaataacaagg

SEQ ID NO: 189951 - DNA, 534 bp, Homo sapiens
taagtgtctattccagtgaggacaaacctctgccctttccataatggaagaggtccattgtaagcagcttgccaccaggtagctggctgatcactccaaggaacggtgccatatcaaggactcagtgttggtctctgctgctggcaaattgggcactcagcagtggccgtagccaggtcagccttggtgagtggaagtccatgttggtgatcccatgagtaacctccatccctgctaccatggcatccctgccacmgtggccactttgttcatgggcccgttgggtgatgacaggggtggctggggaaagaagctgaatggtgtccacagaacgggtcatcctatccacttgattattaaaatcctcctctgctgaggtcacctgttggtgagcactcatatgggatacaagtatcttcatggtttttgaccactcaaagaggtccgtccacatacttcttccccaaatttatttctcaccagttttctaatcatgtgtcttccaagtcccttaccatccagccaaaccactgg

SEQ ID NO: 189952 - DNA, 604 bp, Homo sapiens
tcatcatggtcctaccacacatctccattccaaattgcagggtcccattcttttccaatcaatgacctcactttaacagtagatatctggtgaggctgtgcatgcaccttttgttgcaggtcagccactggcataagagcttgcatgtgtttttctacagtttcatctctttctctacaggaaataagccactcactatgggcaatcttagcggatttgagcytcagcttctgaagccaggagacagaatcccagagttcatcattttctttcattactttgtccactgaacttaggagcaaccaaccaacttcattatgttccttggttctccacatatggtcaaaggtattatgtagagtcactaaactcctttcctctcatgagaggtgaatcaggagtgtcaaatctatttattttatgtaactctctaaacagttcatgccaaggaatatcagtgttctccatactattacaagtagagtccttagcatttttggatctgaacatattaagcagccaactccagaaaccccaaaaccaatgaaagaacatccttaatattctattcctttagaaccattcctggtaccaaaatatgtat

SEQ ID NO: 189953 - DNA, 386 bp, Homo sapiens
gaattccaaaacaccatatccctggaagaatgctgagctatgagtcataaattttaatctctgagcaagtaacttctgtatttttttttttgagacagtctcactccatcacccaggctggagtgcagtggtgcaatctcagctcactgcaacctctgcctcctgagttcaaatgattctcatgcctcagcctcttgagtaggtgggattacaggtgtgtgccaagaccccagctaatttttgtacttttagtagagacagggtttcaccatgttggtcaggctggtctcaaactcctgacctcaagtgatccayccatctcagcctcccaaagtggtgggattacctgcatgaaccaccacacctggccacttctgtatttttat

SEQ ID NO: 189954 - DNA, 601 bp, Homo sapiens
tcactaattctttcttcttgttgttcagttctgttattaagagactcaggtgcattttctgtacctcaattgcatttttcagctgtagaatttctgcttaatttattttaattattatggtctctttttaaaatttatctgatagaatctgaattacttttctgtgttatcttgaatttctttgagtttcttcaacacagctattttgaattctccgtctgtaaggtcatatatttctttctccaggactggtccctgttgacttatttcattcattttgtgaggtcatgttttcctggattgtcttgacacttgcagatgttcgtctgtgcctgaacattgaagagttaggtatttattgtagtcttcactgtctgggtttgttcgtacttgtccttcttgagaaggctttccagaatttgaagttacttggatgttgtgatatatycgctttaatggggaccccaagcccagtaatggctatagttcttgcagaattgtagaggttctgccttgatggtcttggacaagatccagcataattttctggattaccaggcagagacactttttcttctcttgctttctctccccaaaatgg

SEQ ID NO: 189955 - DNA, 579 bp, Homo sapiens
gtcatctgggagctagggcctggaaaagaggtgtcatgactctggtggcatatccaagatgcaagacaaagtccaccccacttttctctttcctttacttgagtggaaggaagttatcgctgttggagccttgagctgtgcagcctggggttagggtaggagcgatgccagcacttccttagtcacctgggctagtgtctcagtagtaacatgcccccaaggtctgctggctctgggcccagtacagcactaggaggcacctaaaatttgcagtccgtgtggtctagactgcatttcaagttgctttagagctctagagaactttagcccatggtggcaaggttaataggaactcaagtttcagccactgagatcagcagttccgctctggctacggctggtttaagtgctccctccatgcatgagtgtcaactgagtttggtctggttttcctttctrcttgaacaggacaggactgagttcaatacctcacaatggctgtgttctcccttcccaagcacagagaaacactctctgcaccactttgccactgccgggggtgttgaggagaaatgacac

SEQ ID NO: 189956 - DNA, 544 bp, Homo sapiens
ggaatttctggaaagctctttctttttttcaaaaagtgaagcaagccagatatggtggtacatgtctagaatcctagctactcaggaagttgaggtgggagaattgcttgagcctaggagtttaagacctgactgtgaaacatagcaagaccttttctcaaaagaaaaaaaaaaagtcaagcagatgaggagaaatcctttttcctccttgcctttagacctccttctgtgaggatgtgatgcttgaagctacaggatttattttgtgaccatgaggagaaagtaaagagaatttcagagaagcatactcagaaccctgacatcacgagctgctgagctarccaacggtggaaattcccactactgaatttctttgtatgtaagataaatgtcaccattgtttaggtcactttcagtctggattccataacttgcatccaaaataattcaaactgatatagaaaaacattcaagtacattttgtggtataaacataaatatcttctagaaagatgttcctgtggggagcattccaaatccccca

SEQ ID NO: 189957 - DNA, 574 bp, Homo sapiens
  misc_feature (1)...(574): n = A,T,C or G
acattgccactgaagcctgaaggccgtgtgcaggtgaatgatttccttcttgctgtgagaggtcagtctttgttctattcaggacttccactgaccagatgtggcccacccatatcatggaggatgctttactcaaagcccactaatttaaactttaatctcatccaaaaaacatcctcacagaaacatccagaataatgtctgaccatatatccgggacccatggcttagccaaattgacacaaaaattaaccatcacaagtctgctgttgaaacatttctgttgtggtccctgtgacctttaatctgcctgattgcatcaggagaagtttataatctctgccagccactctgaggtagktggtggcagaacaaggttaacatcaagaaggtagtggctattgtcctggatgggacttcaactatttgtcttctgactatgcagttaggatgagatgcattcatgatgtgccatcaacagcttgcccagcagatgctgagtcacgtgtgatgaagacagacaggtctgggataannnnnnnnnnnnnnnnnnnnnnnnnnnnnnnnnnnnnnn

SEQ ID NO: 189958 - DNA, 428 bp, Homo sapiens
tatacaatgttaagggtgttgttgcaaaccacagagataatattrctgggtagaatgagtatttggcttggtcatcaggaatgtaaattagaacaatttggtgtctgtctcttcttagaatcaaggaggatataacaattgagacttctctttcccatgttgaagaaacccatttgcatagggcaagaggcttttcctccaagcaccttcccctcccttgtgcttaagttgtttcttttctctttccttcaccatgttgagtcaataaagtcctgcaaatacagggagattttctaatgattttttcctcttgggaggcatcttgttaggccaggtccccaattcctcggactccctttctctcccttgtttgaggaggacctggtcctacagcttcaccttcttatgatagggaagcaatggaggag

SEQ ID NO: 189959 - DNA, 513 bp, Homo sapiens
aagggtgttgttgcaaaccacagagataatattactgggtagaatgagtatttggcttggtcatcaggaatgtaaattagaacaatttggtgtctgtctcttcttagaatcaaggaggatataacaattgagacttctctttcccatgttgaagaaacccatttgcatagggcaagaggcttttcctccaagcaccttcccctcccttgtgcttaagttgtttcttttctctttccttcaccatgttgagtcaataaagtcctgcaaatacagggagattttctaatgattttttcctcttgggaggcatcttgttaggccaggtccccaattcctsggactccctttctctcccttgtttgaggaggacctggtcctacagcttcaccttcttatgatagggaagcaatggaggagcagccccactggttgctggctgcaatttttcaagggccatctgggcctaatttaatgggtccctacactctcccaaggcacccttttgtcctaagc

SEQ ID NO: 189960 - DNA, 587 bp, Homo sapiens
ggactccctttctctcccttgtttgaggaggacctggtcctacagcttcaccttcttatgatagggaagcaatggaggagcagccccactggttgctggctgcaatttktcaagggccatctgggcctaatttaatgggtccctacactctcccaaggcacccttttgtcctaagctttggtttgatgccctagaaaggaaaattagatctgagagatacagaggcagatgacaggggaagtctaggggcacagcacaggtgagcatgactaattccttccaattaggccctcctgcttcatagatggaggttatgctcacatccatggcatagataaggtctaggaaactcaaaggttacttacagttggaggcttaggcatcgagtaggtgagtgctaacattcctgctggctatgcctttctgcttcatgggtgaaggttgcactttcacctgtggtcagcacctgcaaaggtcaccaggactcgtggatataaggtcaggagaaagaaggggatgcctttttttgtcttcatcatgtacccctggtatttgctggaaagaaaaatgaacaaaggaatgacttt

SEQ ID NO: 189961 - DNA, 587 bp, Homo sapiens
ggactccctttctctcccttgtttgaggaggacctggtcctacagcttcaccttcttatgatagggaagcaatggaggagcagccccactggttgctggctgcaatttttcaagggccatctgggcctaatttaatgggtccctacactctcccaaggcacccttttgtcctaagctttggtttgatgccctagaaaggaaaattagatctgagagatacagaggcagatgacaggggaagtctaggggcacagcacaggtgagcatgactaattccttccaattaggccctcctgcttcatagatggaggttatgctcacatccatggcatagataaggtctaggaaactcaaaggttacttacagttggaggcttaggcatygagtaggtgagtgctaacattcctgctggctatgcctttctgcttcatgggtgaaggttgcactttcacctgtggtcagcacctgcaaaggtcaccaggactcgtggatataaggtcaggagaaagaaggggatgcctttttttgtcttcatcatgtacccctggtatttgctggaaagaaaaatgaacaaaggaatgacttt

SEQ ID NO: 189962 - DNA, 492 bp, Homo sapiens
cctcctgaaagtggtcaccttggtattttacaatacagattagaaggaggcccaagacaggaaaaggagacacaagaaaaaggcagaggctctaatagccacttcacatgctcacaaaccccagagtcactggatacacttgataaccgctacaaatgtggcaagccagggcagtttaggaaggactgtctggacagcaggaggaaaccaccttgatgctgtccaatatgcagtggggatcactggagggcagactgtctctggagacataggactcctggcccagcccaaatgatccagcaggattaatgggtcccgacgctcctctccccagctccagtggtttagaagttgaagagaggaaggtggacctcctcctggaaattggagtgagcctttcatttctcctctccaatycagccccctgcctcctctcttagcacgactctgggggacatctcaggaaaacctttaacccaatattgtttctaa

SEQ ID NO: 189963 - DNA, 552 bp, Homo sapiens
ggtgcccatgccgacagctagagcttccccccctaccacagccagtgtgcctggctgtacacgggccagaccttgcactcgttcactcatgcacccctcaccactctgtgcctggctcgtccttggcaggcatgggatctgggccagtagtgcaagccgagcacaacctgccaggtcaagtgggtggaacaagcctagcagccccaagcaaagcttgggcaaaagtgcaactagccacagaggtttctggctggcaaattgacaccccaaggatccacgacaatttgttttcatattgtcaatgaccattttggcactacactggcaaaggtgaayagttgtgacagagcctatatggtccacaaatattttaccatctgggccttaagggataaagtttgctgacctctgatgtagagcctacataggaaaacttttatacggggaagtgctctctgctgcaccaaattctctactgcaggtgatgactacttgtacttttgtgagataattgctggtctgtgggattatttaagctctttgagaactggt

SEQ ID NO: 189964 - DNA, 567 bp, Homo sapiens
tgtaatgaaaaagctaataaaaaactttatctgataaagttttaatattcagaatatataaaacaaatttttaacgcaacaatgaaaagacaattcaattaaaagacgggcaacagatgtgaatagacatttctccaaagaaagcatgcaaatgaccaataagtacagggaaaggtgctatacatcactaatcattagggaaatgcaaataaaaactgtgatgagaggtgagatagcagttcatyggtattaagatgattataacaacaaaaaagaaaaattagtgttggtgaagatgtggagaaactggaaccttctgacagtactttaggatgggagtgtaaagtgtgcagcagctgtggaaaacaatttgaagattcctcggaaacctaaacacagaattaacatatgacccagcaatggcattcttagatatgtatctcatagaattgaaaaccattgttcaaaaaaaattgtacaagaatgtttatagcaaccttattcatagtagctaaaaggtgaaaacaattcaaatatctatcaattgttgaatggataaacaaaatg

SEQ ID NO: 189965 - DNA, 567 bp, Homo sapiens
tgtaatgaaaaagctaataaaaaactttatctgataaagttttaatattcagaatatataaaacaaatttttaacgcaacaatgaaaagacaattcaattaaaagacgggcaacagatgtgaatagacatttctccaaagaaagcatgcaaatgaccaataagtacagggaaaggtgctatacatcactaatcattagggaaatgcaaataaaaactgtgatgagaggtgagatagcagttcattggtattaagatgattataacaacaaaaaagaaaaattagtgttggtgaagatgtggagaaactggaaccttctgacagtactttaggatgggagtgtaaagtgtgcagcagctgtggaaaacaatttgaagattcctcggaaacytaaacacagaattaacatatgacccagcaatggcattcttagatatgtatctcatagaattgaaaaccattgttcaaaaaaaattgtacaagaatgtttatagcaaccttattcatagtagctaaaaggtgaaaacaattcaaatatctatcaattgttgaatggataaacaaaatg

SEQ ID NO: 189966 - DNA, 575 bp, Homo sapiens
gttattttccaattaatatttttttcttaggattcattttccctctccagatccaagcccttagaagctgacctttatttaaaatgaatttttatcagatcactgatatttatacattaaccattccgatgagtccttaattttggaacctggcttctataaaaaaaattgcttgagctattccaaaaatttaaaatacgtttttacagatcggtacaactgattcttcatgcagccattagaatatttaaactgattgtggtaaattaggtggtgtgggtttcttttagcagttaagattgatatggagagattctaaagggtctgtacaccagcatgagggtatgtgcacaygcctcagtaatccttatattaatattggagtgttgagaaataaaggcaaggcttggggaggatacaaaaagatactatcttgccatagtatgagataagaaaatttataatcttctaaaagcaggaaattacagctgtaacctctgacatggaggaggaacgaatgtaatcactgtggacatgtcagcaacatcaaaaggttctttggggtaggcactact

SEQ ID NO: 189967 - DNA, 575 bp, Homo sapiens
gttattttccaattaatatttttttcttaggattcattttccctctccagatccaagcccttagaagctgacctttatttaaaatgaatttttatcagatcactgatatttatacattaaccattccgatgagtccttaattttggaacctggcttctataaaaaaaattgcttgagctattccaaaaatttaaaatacgtttttacagatcggtacaactgattcttcatgcagccattagaatatttaaactgattgtggtaaattaggtggtgtgggtttcttttagcagttaagattgatatggagagattctaaagggtctgtacaccagcatgagggtatgtgcacatgcctcagtaatccttatattaatattrgagtgttgagaaataaaggcaaggcttggggaggatacaaaaagatactatcttgccatagtatgagataagaaaatttataatcttctaaaagcaggaaattacagctgtaacctctgacatggaggaggaacgaatgtaatcactgtggacatgtcagcaacatcaaaaggttctttggggtaggcactact

SEQ ID NO: 189968 - DNA, 597 bp, Homo sapiens
gaaaatccctgatttaaactatgatttgcagacctccatttgtattmttgtctcagacctcaaatgtggtacagacaggcctgcaaagaacacaatcataaactaaatatatatatattttcctttttagagataggtcttactctgttgcccaggctggagtatagtagtgagaccatagctcactgcagcctcagcctcctgggctcaaacaatcctcctgcctcagcctccaagtagctaggactataggcatgtaccaacacacctggctaatttttaatttttctgtagaggcggggtctatgttgcccaggctggtctagaactctcagccaaaagcgatcctctcttcttggcctcccaaagtgctggggttacagatgtgagccactgcacctggccaaattataaaacttttataacactatctttatgggaaaaaaaagttccggttatggtatccaaagaataacttatctgactccagttacaattcaatctattctgcatataggccagaagcatgtgggggagcaaggcggatgaagagaggttggttaataggtaaatcatacagttagacggagtaagttc

SEQ ID NO: 189969 - DNA, 597 bp, Homo sapiens
gaaaatccctgatttaaactatgatttgcagacctccatttgtattcttgtctcagacctcaaatgtggtacagacaggcctgcaaagaacacaatcataaactaaatatatatatattttcctttttagagataggtcttactctgttgcccaggctggagtatagtagtgagaccatagctcactgcagcctcagcctcctgggctcaaacaatcctcctgcctcagcctccaagtagctaggactataggcatgtaccaacacacctggctaatttttaatttttctgtagaggcggggtctatgttgcccaggctggtctagaactctcagccaaaagcgatcctctcttcttggcctcccaaagtgctggggttacagatgtgagccactgcacctggccaaattataaaacttttataacactatctttatgggaaaaaaaagttccggttatggtatccaaagaataacttayctgactccagttacaattcaatctattctgcatataggccagaagcatgtgggggagcaaggcggatgaagagaggttggttaataggtaaatcatacagttagacggagtaagttc

SEQ ID NO: 189970 - DNA, 633 bp, Homo sapiens
attgaattccaaagtattaaacagaagatttgatttttagttagatttttattagctacaaacagcttttatactttagaaatccagaatatctctacttaccccatcagaatctaaatagtccccagctctaccaatgtcttccaacctagtccccaaagtcaaggacttatgattatcgtttgagggaaatttctttttaagagattatctagatagtttttatggaatatcacaatacacttttgtttctgattatcctttytgggggggtgggggggacagagtcttgttctgtcacccaggctggagtgcagtggcataatttcaactcactgcaacctccatttcctggtttcaagcgattctcctgcctcagcctcccaagtagctgggattacaggcacccgccaccacgcctggctaatttttgtatttttagtagagatagggtttctccatattggccaggctggtctcaaactcctgacctcaggtgatccgcctgcctcggcctcccaaagtgctgggattataggcatgagccaccacgcattgcctgtttctgattatcttatccagatcctctagccagatgaatgaaaaagaaaaccctcctatatgcagtgcgag

SEQ ID NO: 189971 - DNA, 578 bp, Homo sapiens
gactgcctatccccactctggaaaataagtagggcttttccacccacaaagtcattagatagtatgtcaagatttggtaaggaaggggtaagagggcagaaaatgtgtctgagagcctctgatccctgaagtaacttggtctcccacagaatttggatggaaagccctttatgagttttatatatttccatgttcttctctctccagtcagaagatgyttcctaccctccatccctgaggcagtcccttccctataaaaatacatttgtttgatcaaatcctgattgtactttcacaaatgagttggagggtaagtgcggctgtttgtttttctggctgtgtttgcttttccggagagactagaggcttttcccttgacagtgttccccaaggggaaggggaacaatggcaccatctctcagttcctagagtctctatagttcctcacaatcataaatgtatacatcctgagagcacaagtcctagctgctgctgatgcacatggctttttaccatggtgagtggattggagtgcactctcatagcatcagagacctgaagctgtggctacacagtca

SEQ ID NO: 189972 - DNA, 579 bp, Homo sapiens
ttattaagaagtggattgtgaacaaattgcattgggttggagaacttgagtttgattcttcacttatttattgaactgtgttgctttgagtaagttttcccctcctagagccttgactttaacaatagtaaaatcaaataattgaaccagatcagacacacaacccacctctcatttctgccaatgtcttgcwacagacattgctaatcaatggtggcccttacctgtgaagcctggctgaaggctcagaatccttcatttgacagtgttcctggcagccattattaaatgataagtttagatgtaatggataaaacttttccattacagtccaaaatgaattcctaggtttctgacccaccatgaccctagaagctcttttccaaccctcagtagaacagaattaatatgttttccattagctttgtgaacacccagctccaatgacactccataggctccagatcaactttcctccaaatgtacacccaagaagttctgtgtttcaagagttactgtgctgaaagtaccagcttatccaaatgctgcttccttttttagtagccaatttgtagaaaa

SEQ ID NO: 189973 - DNA, 448 bp, Homo sapiens
cctcttagccctcataaaaaaaaaagttattatttttcccatttttacggaatgagaaaatctaaaaatcttgagaaaaattaaaaagttagggagcatcagagttagaactgaatatcagctcttctgaacctgagcagaatttccaatccatgagtctataactctattttatgggctctgtggcaaggcatgcctttttcttcctctgaaatccaaattttaactaaacttttcagttctaattatttgatttattccaagttttccccatatccatgtattactcctcatttgttttgtaaatgtttattatgtgttattatmtcttactttttctttttttgggggggagattctgtttccttaacagatgggatacaccttgaggtgagatatacaataaaagaaattttatgttgttgtaaagcctgaacttgtcagtgaa

SEQ ID NO: 189974 - DNA, 578 bp, Homo sapiens
ggtagactgcaaaaattttctcccattctgtaggttgcctgttagctctgatgatagtttcttttgctgtgcagaagctctttagtttaattagatcccatttgtcaattttagcttttgttgcaattgcttttggtgatttcgtcataaaatctttgcccatgcctatgtcctgaatggtattgcctaggttttcctctagggwttttatgatttggggagtgatttattttaaaatagagcatacattcacccattctctggttcaattttctttctattgcattgtaatattagctaataaatgattctcattataacaaataattagccagtaaaattattattattatttattgaacaacaattgtattctgtgccctgtgctaagtactttacctacattatttaatttaatcctcacaaccacttttgaaggagacactattattagtgtcatttgatagatgaatcaccttaggcttacagagcttgagtaacttgtgtcaatgtgataaaaccttttttaagaaaaaaaaagatggactctgaaaccatgcaaaagtgcttaaccacaa

SEQ ID NO: 189975 - DNA, 590 bp, Homo sapiens
aaataaaaaatttattagagaacttcaagagcagacgagatcaatcagaagataaaatctgtgaagttaaagataggtcttctgaaattactccatcagaggaaaaagaataaaaaatagtgaagacagcctacaagacttatggaacaccattaagcaagcacattctacaaaagaaaaagagacaaagaaagagacagaaagcttatttaataaaataattgctgaaaatttcccacatcttaaaagagatatagacatttggattcataaagctcaaaggccctccaaaatatacaacccaaagagatcctctctaaggcacattataaccagactcttcaaagtcaaagacaaagagaaatttaaaagcaacaagagaaaagcatcaartcacatgtaaaggaattgccattaggttatcagtggatttctcaatagaaaccttgcagatcaagagagattgaataatatatttaaagagctgaaagaacaaaagcattgctagccaactatactatgttcaacaaagctctccttcaaaatggggaaataaaattgttcccagacaagaaaagctgaaggaattc

SEQ ID NO: 189976 - DNA, 623 bp, Homo sapiens
ccattagacctaacagacatatacagagctttactttaacagcaggataatatgccacatttttctttagttcacatggaacattccctgggataggccatatgataagccacaaaacaagacttactaaattttaaattgaaataatatctaatatcatttcagactataatgctatgaaactagaaatcaataataagaggaatcttgaaaatccacaattatatgataattaagtaacgtgctcctgaacaaccaatgagtcaaagaagaaataaaaagagaaattaaaaaatatcttgaracaaacaataattaaagcacaacataccaaaacctatgaaatgtagcaaaagcagttcaaagagaaaagtttatagcaatacatgccgacattaaaaacaaaaagaatctcaaataagtaatctaacattacacttcaaggaactaacaaaagaagaataaattaaaccccaaattagcagaaagaagaaaataataaaaataaaaacataaatagagaacagaaaaatcataggaagaatcaataaaattaagagttggtgctttcaaaaaataaaaaaaaatggataaacctttagctggtctaaatgaaaaaaagg

SEQ ID NO: 189977 - DNA, 601 bp, Homo sapiens
actaagaatgatggaatcttttgttattaactcagggacattataaggcagtaatgcaggaatgccctctggagagattgagatctgtktatccctgcctaagcaggtcctagactgcagtgctttctgcactcttgtgtgcttttggaaattattgttttctttattccctgacagactctcagctgttagcttttattagacctcagcctgcccggctttaccgggcatcattcgctcttctaattgccatttcaattcaattaaacaaatttaaaatgaataaccaagcaacggttcatacctttgtttacaacaaaagcgaaaagactgaaagagtccatagagtttcctgctttagtaacatgtaggagctttagtgtctacctttcactaatttggttaacttagtggccaatgttttttttttttattacaggatatgttatacaataatctttgtccatgtttggtttatcaacggcttacaatggaatcagctgtggtgcttattaaaatgtaaaattctagggctttagctttacagatgctcgtacattaaacctgggggattctgcatttagcaaacacttcaggaatt

SEQ ID NO: 189978 - DNA, 531 bp, Homo sapiens
gccaattgtggaaatttggtataaattaaaacaccattaaaacagttctcagaaattcacagctaactagttcaacatcaatatcagttacagacgttccaggatctaatcttggaagtgcagaaygagaagtctacaaagagaaatttttggacaaagtacgtgattgtattgtaagagtagtgtactcactgcatagagccatggttattgtaagaatgttgtaactgttatttgtcattccttacaacatgaaacaagctcccactaaatatatctgtaagtgttaacaagagtatgaaataaaacccatcattctttagaaataaaagatttaacaagtcagaattttaatggaatggcatttaaagaacaaaataaacattaatcactgggagactatcaatgtttataaaaacaaaaaaaaggaatactaaggaaaaatataaactttttcattaaatttcagacattagggcttagcaagccctccttgacctttatgataattactttgggattccgtttcaa

SEQ ID NO: 189979 - DNA, 531 bp, Homo sapiens
gccaattgtggaaatttggtataaattaaaacaccattaaaacagttctcagaaattcacagctaactagttcaacatcaatatcagttacagacgttccaggatctaatcttggaagtgcagaacgagaagtctacaaagagaaatttttggacaaagtacgtgattgtattgtaagagtagtgtactcactgcatagagccatggttattgtaagaatgttgtaactgttatttgtcattccttacaacatgaaacaagctcccactawatatatctgtaagtgttaacaagagtatgaaataaaacccatcattctttagaaataaaagatttaacaagtcagaattttaatggaatggcatttaaagaacaaaataaacattaatcactgggagactatcaatgtttataaaaacaaaaaaaaggaatactaaggaaaaatataaactttttcattaaatttcagacattagggcttagcaagccctccttgacctttatgataattactttgggattccgtttcaa

SEQ ID NO: 189980 - DNA, 275 bp, Homo sapiens
ttgtatcttcataagccttgagtatatcaatggacaatttcaagaacgatttacatttgacttttaacccttcctgagtgattgaaaataaactgttaaatttaatcaatatttattaggttcctaccctgtactgcaaggaatataaaaacaagtaagaygtccttgcccaaagtggtagaagtactactgggagaaataagcatgtgattttaatataaaatagatttaataagtgtgaaaattgaagaacaaactaccataaaagaacacaa

SEQ ID NO: 189981 - DNA, 611 bp, Homo sapiens
ttcatataaatgagagtgcttaagaaatcagaagcatatttaatgacttcaaaattagggcggataataaaatacttctgggatcatggcagccagaaggcaggactagattgcagctctggacaaagcagcatgcagaggattacrttgtgaattttagctccagtaatcacaagagcacccacagaccctctgaaggaagcagacttctcctgcaggacctgggagacaccccaaatactgtgagtgccccaacaagtgcagaagtgggaaagggagaccctccttttctgaacacacacccccactggagaagatgaaggtctgtttgcaggagaagtttctgacttcacctggtgcttagtcaaattagagagctcaccgaaatacaggggtagaggaagcagcagaaaggccccgggagctcactgggtctccaagcgcccattcctgcctggcaccacagggatccatcgggagggcagccagaggagcagggggtaaaactccacagggagaaggaattctgtagctgaattttgtaacaatttgaacaggggcaagaagcctcctagccagaactcaagggaggacatgaattaggtgtgcag

SEQ ID NO: 189982 - DNA, 521 bp, Homo sapiens
cacacccccaccttatggtccttccctgtccaccctggtagtggaagaaaaaggacatataatcttgggacttctagggccctgcccactgccagtctctctccacactactactacagctgatgctttctggaaagcgccgcctcctgcaggaggccaaccagcacaaaaatacagcattaaaccaccaaagctaaggaccctcatagagtccattacaccctctgccacctccactggaacaggcactggtatccacggctgagagactcatagatggttcacatcacaagactctgcggagacaacccccagtaccagcccagtgctgggtagacttgctgagtggctagacccagaagagagacaayaatcactgcagtttggctcacaggaagccacatccataggaaaagggggagagtactatatcaagggaacaccccatgagacaaaagaattggaacaacagtcttcacctctagaccttccctctgacagagcctacccaaatgagaagg

SEQ ID NO: 189983 - DNA, 552 bp, Homo sapiens
gcatattgctacattttctttttaattatttgttgcatcaatagaaatacaattgatttcataaactttatatacagagaccctgataaactctttaattctagtgggtttttttttttgataagttctcataaatactgtacttaaacaatcatgtttacatggtgtcatttgtttggggaaatacccgaggttcgtcatctagtgctaaggaaattgaagatgcagcacacaaggagtggggttaaaagtagaaaatttaataggcgaaagaaagaagagaaaagctcccccacgtaaaggaagtgaggttccaaaaaggtcttccttttcatggcaggatgcagtgggcttaatagaggggcttgaggaagtggtgtctgatttatatagaacgtagtggattggttggactagatgtracatttacatagctcacgaagagcctggctgtcccaccctaatttcttattatgcaaatgggatctttacctggctggggccatgttacctgcacatgtggcaagaaagaaaagggaagacaaaacctcc

SEQ ID NO: 189984 - DNA, 568 bp, Homo sapiens
actaattcttttatattgttgcttctcttaataagaaatccttttggtttcaactgtgtaactgcaacattggtcctctcacattttcctcagttgctcaagttgccaagtgcatggaatatcctgttttttcaattaaacttaccactgcttttcattttatcccctctgagcttcataagcttctttgggtaccatgcaatggagttcagaggccagcttaaaaaaattwaaaaaacccaacaatctgctttgcaaagctgagtaaatatgcataaacacgttcacactacctgtatctgaaagagttaagagctcctgaacagtacttcaaggtcagcagtttgctttcatccgtttccagcactttgcatagctggcagccctccatcctttggagagtagagggacagcagagtgcacaagacttacagtctcagccagaatttccataatcacatcaacagatggaataataatcactgctgaagttgctgcacaatctttctgatccaaggaaacttccttctgattcaattcaaaattatttctgctggcaacttagaca

SEQ ID NO: 189985 - DNA, 568 bp, Homo sapiens
actaattcttttatattgttgcttctcttaataagaaatccttttggtttcaactgtgtaactgcaacattggtcctctcacattttcctcagttgctcaagttgccaagtgcatggaatatcctgttttttcaattaaacttaccactgcttttcattttatcccctctgagcttcataagcttctttgggtaccatgcaatggagttcagaggccagcttaaaaaaattaaaaaaamccaacaatctgctttgcaaagctgagtaaatatgcataaacacgttcacactacctgtatctgaaagagttaagagctcctgaacagtacttcaaggtcagcagtttgctttcatccgtttccagcactttgcatagctggcagccctccatcctttggagagtagagggacagcagagtgcacaagacttacagtctcagccagaatttccataatcacatcaacagatggaataataatcactgctgaagttgctgcacaatctttctgatccaaggaaacttccttctgattcaattcaaaattatttctgctggcaacttagaca

SEQ ID NO: 189986 - DNA, 568 bp, Homo sapiens
actaattcttttatattgttgcttctcttaataagaaatccttttggtttcaactgtgtaactgcaacattggtcctctcacattttcctcagttgctcaagttgccaagtgcatggaatatcctgttttttcaattaaacttaccactgcttttcattttatcccctctgagcttcataagcttctttgggtaccatgcaatggagttcagaggccagcttaaaaaaattaaaaaaacccaacaatctgctttgcaaagctgagtaaatatgcataaacacrttcacactacctgtatctgaaagagttaagagctcctgaacagtacttcaaggtcagcagtttgctttcatccgtttccagcactttgcatagctggcagccctccatcctttggagagtagagggacagcagagtgcacaagacttacagtctcagccagaatttccataatcacatcaacagatggaataataatcactgctgaagttgctgcacaatctttctgatccaaggaaacttccttctgattcaattcaaaattatttctgctggcaacttagaca

SEQ ID NO: 189987 - DNA, 592 bp, Homo sapiens
tgtaccagacatttccatgcttatataatcaatctagcctgtgacctacttagcatgttgggcacctggaggggatcattttatgacatctctccactatacaatagagttattttcaataatattcacaaaatgaaataaataacaatgcaaagaagaatcatagttgaaaatttgttcttttatttagctttgtatacatggctatgcaagcagaaatgatccagctctccttccttctgtgcccaaaggccaaggttgaatagtaacaataatgttcctaggttctagactataagttgtcagatcaacaaatattccaaaagttttaggtcttcataaatgctatgattcctaaaattagtattggcctcacacacatttctaaagcctcccccgtctggccatctgtacctccttcagctttctatgccaccaagcaagagaacacaaccatctgcctttagcaagtacactcagttgccttacagatttccatgaattttgaacaaaaaagaaacagaaagsaatggacttaatctgtttttctcaacacctacccatcagtttcttcactatgcgtcctgagcat

SEQ ID NO: 189988 - DNA, 377 bp, Homo sapiens
gtgaacacaaatcttaccacctttattcacaagagcccacakactggaaacaaggtaaatgtccaccaatatatgaatagataaaccaaatattatacattcaatgggaaaccactcagcaatgaaaagaataaattattgataaatgtaacacaaagaatgactctttttaaaaaaatcattatgttcaatgaaataaaatgaaacacaaaagaatgcatagtatacaattcaatttatttaaaattttggaaaatgcaaattcatccataatgacaaaactgtatcagttgttgcctgggcttgtgcaacgggagctacgcactgcagaggggcaagaggagtctattgttagttctagaaatgcttgcttattt

SEQ ID NO: 189989 - DNA, 377 bp, Homo sapiens
gtgaacacaaatcttaccacctttattcacaagagcccacagactggaaacaaggtaaatgtccaccaatatatgaatagataaaccaaatattatacattcaatgggaaaccactcagcaatgaaaagaataaattattgataaatgtaacacaaagaatgactcttttwaaaaaaatcattatgttcaatgaaataaaatgaaacacaaaagaatgcatagtatacaattcaatttatttaaaattttggaaaatgcaaattcatccataatgacaaaactgtatcagttgttgcctgggcttgtgcaacgggagctacgcactgcagaggggcaagaggagtctattgttagttctagaaatgcttgcttattt

SEQ ID NO: 189990 - DNA, 510 bp, Homo sapiens
ccaatatatgaatagataaaccaaatattatacattcaatgggaaaccactcagcaatgaaaagaataaattattgataaatgtaacacaaagaatgactctttttaaaaaaatcattatgttcaatgaaataaaatgaaacacaaaagaatgcatagtatacaattcaatttatttaaaattttggaaaatgcaaattcatccataatgacaaaactgtatcagttgttgcctgggcttgtgcaacgggagctacgcactgcrgaggggcaagaggagtctattgttagttctagaaatgcttgcttatttataatgatagtggattcaaagtttatacaactgtcaacattcatcaaattgtgaaaatctgccaacaaattatgtcaataaaattgatttcacaaataaaacttaaaccaatacaaaaaccaatttgaaatcagtctgtttttcattatcaccatgaaacaacaattctgaatgacttttcatctatctaagttctaa

SEQ ID NO: 189991 - DNA, 510 bp, Homo sapiens
ccaatatatgaatagataaaccaaatattatacattcaatgggaaaccactcagcaatgaaaagaataaattattgataaatgtaacacaaagaatgactctttttaaaaaaatcattatgttcaatgaaataaaatgaaacacaaaagaatgcatagtatacaattcaatttatttaaaattttggaaaatgcaaattcatccataatgacaaaactgtatcagttgttgcctgggcttgtgcaacgggagctacgcactgcagaggggcaagaggagtctattgttagttctagaaatgcttgcttatttataatgatagtggattcaaagtttatacaactgtcaacattcatcaaattgtgaaaatmtgccaacaaattatgtcaataaaattgatttcacaaataaaacttaaaccaatacaaaaaccaatttgaaatcagtctgtttttcattatcaccatgaaacaacaattctgaatgacttttcatctatctaagttctaa

SEQ ID NO: 189992 - DNA, 510 bp, Homo sapiens
ccaatatatgaatagataaaccaaatattatacattcaatgggaaaccactcagcaatgaaaagaataaattattgataaatgtaacacaaagaatgactctttttaaaaaaatcattatgttcaatgaaataaaatgaaacacaaaagaatgcatagtatacaattcaatttatttaaaattttggaaaatgcaaattcatccataatgacaaaactgtatcagttgttgcctgggcttgtgcaacgggagctacgcactgcagaggggcaagaggagtctattgttagttctagaaatgcttgcttatttataatgatagtggattcaaagtttatacaactgtcaacattcatcaaattgtgaaaatctgcmaacaaattatgtcaataaaattgatttcacaaataaaacttaaaccaatacaaaaaccaatttgaaatcagtctgtttttcattatcaccatgaaacaacaattctgaatgacttttcatctatctaagttctaa

SEQ ID NO: 189993 - DNA, 633 bp, Homo sapiens
gatttctgcatttacaaattatacttaaataaatgtgaccgcagtgattataaagtcaaggaagcaggactttaatccactctagtttgtcttttagttttcaagttattatctaaaactttcagagtttactctttggaaacccttctttctgtgttagttttctgttaacaaaattaatgaaattaaaaagtattaactactgttttcttttgatattatcacacttagtttccatttgcatagctatatgaagttcaataaaagaacatttttacatatatgcttctttttgcattgctatttatttcattttgtgaatattgtggaaaatagttttgttgtatagtagagaggtgtcattaaatgaaccccttcttgtgcccaatatgctaagtagaccactcactagattarttatacaggtagggaaatgtcagatacaaaccaaaacatattttatttattaattatttattcttctgtgaggaggggcagagttctcactctgttgctcaaactggagtgcagtggcatgatcatagctccctgcatcctcgaactcctgggttcaagtgatccttccacattggcctgccaaagtgccgagattatgggtgtgagccaccacag

SEQ ID NO: 189994 - DNA, 633 bp, Homo sapiens
gatttctgcatttacaaattatacttaaataaatgtgaccgcagtgattataaagtcaaggaagcaggactttaatccactctagtttgtcttttagttttcaagttattatctaaaactttcagagtttactctttggaaacccttctttctgtgttagttttctgttaacaaaattaatgaaattaaaaagtattaactactgttttcttttgatattatcacacttagtttccatttgcatagctatatgaagttcaataaaagaacatttttacatatatgcttctttttgcattgctatttatttcattttgtgaatattgtggaaaatagttttgttgtatagtagagaggtgtcattaaatgaaccccttcttgtgcccaatatgctaagtagaccactcactagattagttatacaggtagggaaatgtcagatacaaaccaaaacatattttatttattaattatttattcttctgtgaggaggggcagagttctcactctgttgctcaaactggagtgcagtggcatgatcatagctcmctgcatcctcgaactcctgggttcaagtgatccttccacattggcctgccaaagtgccgagattatgggtgtgagccaccacag

SEQ ID NO: 189995 - DNA, 560 bp, Homo sapiens
ttgtaacctttctgaaacaaaattccaaccttaagagagagtgcccccatcttcctggagactgaagaagtggggagatgggagactggagaagcagaagatgtactctagattataattaaatcctcattcactcattacattttttagtactttataatgaagttaccaaaatatatataacccaackgggattgctttagtcctaatgctggctttctaaaacactcacaaatttctttctataataataccttaaaactagaaaaggcataaaataatgtaagtagataccacagtgaagatgattcttgaaaatgaacatgattcaagagagatgtgtatgtgtgtctgtttgggggagtgatgttgctgcagtaacttagggtgagtttttcatatttgtattaagaggaagagtattgcctgccttccttccttccttccttccttctttccttcttttctgatggttatttccaaggttaaaagtacagtgataaaagcaagagagctgtcatagacacacaactaaaggaaattaagatgactattagttt

SEQ ID NO: 189996 - DNA, 549 bp, Homo sapiens
aatagccagtcagagacaccaactctcccactcaccaraggattttaaagatgaagaaactctgtatttgtagtgggctctaacctatgtgaatctataatttccttcagcatcgctcagctgtcaaagacaagctgatagttgtattgacttaatgacacctctccaccctttcctacctaccacccccaccctgcctgccaaacaaaactcctatctaaataaaaatcaccatgatgtgtcttgggatttagattgcacagtaataaaagtggctccacagtggacagaaatactgtgataaaaggtataaagattagaagacagtagagtcaaagaagaggaatagtggaagtggtgaaagactgaagatattagcaatttagtcacagaatgggatattggaacttgtttttaggaagcatttcagtttttaggtaataatattcagcctgaggccaaggtaaaatgttagcatgagtagaattaagtttgtttgaagtttggtagcaggggataggagtggagaagtccaagcagtagagaact

SEQ ID NO: 189997 - DNA, 549 bp, Homo sapiens
aatagccagtcagagacaccaactctcccactcaccaaaggattttaaagatgaagaaactctgtatttgtagtgggctctaacctatgtgaatctataatttccttcagcatcgctcagctrtcaaagacaagctgatagttgtattgacttaatgacacctctccaccctttcctacctaccacccccaccctgcctgccaaacaaaactcctatctaaataaaaatcaccatgatgtgtcttgggatttagattgcacagtaataaaagtggctccacagtggacagaaatactgtgataaaaggtataaagattagaagacagtagagtcaaagaagaggaatagtggaagtggtgaaagactgaagatattagcaatttagtcacagaatgggatattggaacttgtttttaggaagcatttcagtttttaggtaataatattcagcctgaggccaaggtaaaatgttagcatgagtagaattaagtttgtttgaagtttggtagcaggggataggagtggagaagtccaagcagtagagaact

SEQ ID NO: 189998 - DNA, 549 bp, Homo sapiens
aatagccagtcagagacaccaactctcccactcaccaaaggattttaaagatgaagaaactctgtatttgtagtgggctctaacctatgtgaatctataatttccttcagcatcgctcagctgtcaaagacaagctgatagttgtattgacttaatgacacctctccaccctttcctacctaccacccccaccctgcctgccaaacaaaactcctatctaaataaaaatcaccatgatgtgtcttgggatttagattgcacagtaataaaagtggctccacagtggacagaaatactgtgataaaaggtataaagattagaagacagtagagtcaaagaagakgaatagtggaagtggtgaaagactgaagatattagcaatttagtcacagaatgggatattggaacttgtttttaggaagcatttcagtttttaggtaataatattcagcctgaggccaaggtaaaatgttagcatgagtagaattaagtttgtttgaagtttggtagcaggggataggagtggagaagtccaagcagtagagaact

SEQ ID NO: 189999 - DNA, 549 bp, Homo sapiens
aatagccagtcagagacaccaactctcccactcaccaaaggattttaaagatgaagaaactctgtatttgtagtgggctctaacctatgtgaatctataatttccttcagcatcgctcagctgtcaaagacaagctgatagttgtattgacttaatgacacctctccaccctttcctacctaccacccccaccctgcctgccaaacaaaactcctatctaaataaaaatcaccatgatgtgtcttgggatttagattgcacagtaataaaagtggctccacagtggacagaaatactgtgataaaaggtataaagattagaagacagtagagtcaaagaagaggaatagtggaagtggtgaaagactgaagwtattagcaatttagtcacagaatgggatattggaacttgtttttaggaagcatttcagtttttaggtaataatattcagcctgaggccaaggtaaaatgttagcatgagtagaattaagtttgtttgaagtttggtagcaggggataggagtggagaagtccaagcagtagagaact

SEQ ID NO: 190000 - DNA, 544 bp, Homo sapiens
tgtgaggtgagagccaggaggtgaaaaaggacaagactggagaaaatgaccttttctcacaaatttcttaacaactgtttcataaacataataaaactggcattacatttttcttatctctcaatgagtcaataaaataacatactaaatatctattttgctcagctttctattattttaaaatattttcttttgaagtccaagtgtaggtagaaatttaaaatttttctttataattaactaatcaatatttgaaagacttgmcgtggctgttctcctactgaggcacactgttgtaaaacagtgattgaacttgaattgtacatggttttccttattctctcaaataattttccttcagttgaaataattacatgttcaagactctgatgttgtatagaagctgtgaaatgagaataagttggttcaattttttgtattcttgggcttgaaagatagatgacaactggaataatcattacagaagagtgactgttgtggtagggaaaatgtaagaaatttaaagaaagagaaatagtatgag

SEQ ID NO: 190001 - DNA, 544 bp, Homo sapiens
tgtgaggtgagagccaggaggtgaaaaaggacaagactggagaaaatgaccttttctcacaaatttcttaacaactgtttcataaacataataaaactggcattacatttttcttatctctcaatgagtcaataaaataacatactaaatatctattttgctcagctttctattattttaaaatattttcttttgaagtccaagtgtaggtagaaatttaaaatttttctttataattaactaatcaatatttgaaagacttgccrtggctgttctcctactgaggcacactgttgtaaaacagtgattgaacttgaattgtacatggttttccttattctctcaaataattttccttcagttgaaataattacatgttcaagactctgatgttgtatagaagctgtgaaatgagaataagttggttcaattttttgtattcttgggcttgaaagatagatgacaactggaataatcattacagaagagtgactgttgtggtagggaaaatgtaagaaatttaaagaaagagaaatagtatgag

SEQ ID NO: 190002 - DNA, 582 bp, Homo sapiens
ttttccatgcattcactttgggaggagcactgtaaataactacagctctcttgtttwgtactagagagcttttaaatcccttcgtatgtaattttcatttacttcttacattagtaactttcatttacttactaatgcttattaatacaaagtacaatgtcttagaatgtctgaaggtcaatgtttctgatttttctcctgttttgtaaaatccagaagtcctgatttgtaatatttttaactgatgagcattctcctgcattctgcagccttcaagaagcaccgaatgtaattaacaagttcactggacccagcaataccatttcaaaatgtgtaggtttctgtttcttaggagatcatgcaaacacagtgatactctttaacaaatagaagatgtattcttttctaaatgttataaaaacttggatttttaggcagaattttaatacagaaatttttatacagaatcctaagcgttatgggctacatgagtatattttatatttgtagtgatggtctcagcttgaaacttagatattttcacttttggacatagataaatctgagcacatctggagaatc

SEQ ID NO: 190003 - DNA, 612 bp, Homo sapiens
aattgaaaaccattaactatataargatgagcactaaaatgagactgattgtattaaaatatttgctgctcttctgtgggggaattatgcattctgccccatggatgttatgcttggtgatatgatttagagtacccatgaaatatgaatgccatatttaagcagaagctttaagagccatggggtggttccaccatgttcctttcctctctgccttgagaggatcagtggtttagggaggggtgtttcattggcctaggtcctgaagcatgggagagatccatagcctacttgtgataagcagcatgcaaatatgtaaaaatgcattttttttattgttgtaaacccctattatcctgaccgatacaactaatttactaagcataaggaagaaaacactgtatggctattaaagatatctgacttcaatgttgatcaaagaagtagcagaaccagtagccctacaagcaagggaaagagaaggaaaatgcaaagattgaaattattgctggtgttagcagcagactgctgcagcaaaccagagacattagaagtccttataaaagtggtaagccacttttatgccactgtagaaagattaatactaggtgc

SEQ ID NO: 190004 - DNA, 612 bp, Homo sapiens
aattgaaaaccattaactatataaagatgagcactaaaatgagactgattgtattaaaatatttgctgctyttctgtgggggaattatgcattctgccccatggatgttatgcttggtgatatgatttagagtacccatgaaatatgaatgccatatttaagcagaagctttaagagccatggggtggttccaccatgttcctttcctctctgccttgagaggatcagtggtttagggaggggtgtttcattggcctaggtcctgaagcatgggagagatccatagcctacttgtgataagcagcatgcaaatatgtaaaaatgcattttttttattgttgtaaacccctattatcctgaccgatacaactaatttactaagcataaggaagaaaacactgtatggctattaaagatatctgacttcaatgttgatcaaagaagtagcagaaccagtagccctacaagcaagggaaagagaaggaaaatgcaaagattgaaattattgctggtgttagcagcagactgctgcagcaaaccagagacattagaagtccttataaaagtggtaagccacttttatgccactgtagaaagattaatactaggtgc

SEQ ID NO: 190005 - DNA, 634 bp, Homo sapiens
agcagcatgcaaatatgtaaaaatgcattttttttattgttgtaaacccctattatcctgaccgatacaactaatttactaagcataaggaagaaaacactgtatggctattaaagatatctgacttcaatgttgatcaaagaagtagcagaaccagtagccctacaagcaagggaaagagaaggaaaatgcaaagattgaaattattgytggtgttagcagcagactgctgcagcaaaccagagacattagaagtccttataaaagtggtaagccacttttatgccactgtagaaagattaatactaggtgccaatttattgaatattaactatgtgccaagatctttttgtgtataatctcactttattctcataagcatccttcagttcagcgctattatttttctttctcaatgatgaaacaggctttgaaatgttaagttcattcatttacatattccttgttcatttgttcactttttcactcataattcaatcaacaaatatttcttaagcacctattataaataaatcaggtggcaaagttaggtttttaacccctccctttctgatttcaaagtccatgtcttctccattgcatggaattctatagcatacagaattgtaggatg

SEQ ID NO: 190006 - DNA, 634 bp, Homo sapiens
agcagcatgcaaatatgtaaaaatgcattttttttattgttgtaaacccctattatcctgaccgatacaactaatttactaagcataaggaagaaaacactgtatggctattaaagatatctgacttcaatgttgatcaaagaagtagcagaaccagtagccctacaagcaagggaaagagaaggaaaatgcaaagattgaaattattgctggtgttagcagcagactgctgcagcaaaccagagacattagaagtccttataaaagtggtaagccacttttatgccactgtagaaagattaatactaggtgccaatttattgaatattaactatgtgccaagatctttttgtgtataatctcactttattctsataagcatccttcagttcagcgctattatttttctttctcaatgatgaaacaggctttgaaatgttaagttcattcatttacatattccttgttcatttgttcactttttcactcataattcaatcaacaaatatttcttaagcacctattataaataaatcaggtggcaaagttaggtttttaacccctccctttctgatttcaaagtccatgtcttctccattgcatggaattctatagcatacagaattgtaggatg

SEQ ID NO: 190007 - DNA, 405 bp, Homo sapiens
ttcaattgcttgtctttaagcctaggttcatggctcaaagccattatgtaaactggaattgtcatattactgttaattttactttatatttttccttttaaaactttgtgtctatcacttgttaaggtttggcagatgcacaagtcctaaaaaaataatgctggaccagcattttaagatgatagctaaagacactgaaacagacaaaattgaacttaatatggactccagtcacttccttcaaacttcctttgtcgctcaaatgtgactgaaagggttttgacactgattcctaatcatcaatcactccctgtgatatgggacaagaccagcagctgagatagatccatcccaacatgagggcacatctaaacctatctrtaggattattcatcagtgatgctt

SEQ ID NO: 190008 - DNA, 530 bp, Homo sapiens
aggtggccatctaaaacccgaggagagagccctcaccagatagtgaccctgctgacactttgatgtggtacttctggcttcctgaactgtgggaaaatgsatttatgttgtttaagccacacactccatggtatttggtaatggaagtctgatcagcctaatacactgagtcagtcactgattgcattatggtcaattcatggtatcccactagaatcttcccttgttgtcagtgaaggcataaactccatttgcagaggcgttttgtctgcttcccgagacttcctttcccataaggaatggtgaaatgatcttgagtgaatcatcaagggaaggaccatctctcaagatgagtcttcgcatgtggtgcagccctgcagggaatcttcagccttcctaccccatggggagattctcccttccttttcagtgttgggaaatcagggtatttttgttgtttatttttttattgattttaaaggagccagtgagttctttaaaaacacttcagttctctcatcttcaaggta

SEQ ID NO: 190009 - DNA, 621 bp, Homo sapiens
ttctgaacttgggaatccctaagctccacatccacagctgatggaactgactttacttgagaattctataaaggtataatagaggtgggttgcaatatgacatttcaccagtagatgctgctgttgcacactggctcatgaatttggctatttaaagttcatacttcactcgtaccttggagttagttaccctagggatcccaggagtcctctctytgttttaaagagaagatacaccagaggaaaaaagtttcccaaattttctaatggcaaaatattttaaatccaattatgaaagtggtacttgtagttacatacctaaaaaatatttttacaaaattaaatacataccattagagagaatgattaaataaaaattatttgatctacacacaaagaaaagagtgtcacatattttgtgctaaaaacacatctacagttttctccttttattctttctaaagctataagaaatggaaaatgtttaaatagtctactcttcagtttaccaagacagcttccttagagtaaccatactgatgattgccttgttgcttttgccctagaactgatccctcttcccttttccatattgcagcagaacccacaaggcaaccaaca

SEQ ID NO: 190010 - DNA, 499 bp, Homo sapiens
acttgccatatgagctcgataaaccttgaattggtctatatcccagtcaatgrgatgagtcatgcactcccagtcaatgagatgagtccactggtcatgcactatcagtctacctgacaatgccgaacagttatagtagtcttaaagttcttattctcattttctgaactcatgacagattggtaccagacagtttaaaagccagcagtgacccatgggccacactttgaatagcagcttttatgcttaagtcttttgaggatttatagtatcctgggcattgagtgaggcataggagattttctggtgtggcttctgcctcctcagaacgtcagggcttaatgagggtttcttgcggctctgtcagaatgcatgaatggtgaatggtatacctggattccagcctactgtgactaccagtaactacgggtcatctcagtctctgagcagggattcctgtttcatcctcaggcttggcttgccatttaggtggaaaagg

SEQ ID NO: 190011 - DNA, 513 bp, Homo sapiens
taatcactttcttcataattctaccagaagccaaggggcaaataacaacccatttgctytctagcctcagaactggggagttgtgggatctggcattaaagggtgagctctggacacatcagaggagccaattattattcaacaattattagtacaaactgtattgatcaggatctattgggaaaactgatacatcaatcatttcaaagtggagaattattacaaggaataattaaacaagttaacggacggaaaggcttaaggatcacactaagataacactcagctggtaactgcaggatgctgctacactgctagtggctggagcaacaagaaagagagaatgtggttcttagagcctagtgctgccaattccaatacagaggccaccagccccacgtggccgttgagaacctgaaaagcagccagcctgaatagggaagtgctgctataagtgcgaaatgcacactggatttcaaagtcctagtgtataaaaaagcaatgtaaaatatt

SEQ ID NO: 190012 - DNA, 511 bp, Homo sapiens
catgctcctttagcttggagaagtttgtttttaccgaccttctgaagcctacttctgtcaactcatcaaagtcattctgcatccagctttgttccgttgctggcaagaagctacgatcctttgaaggagaagaggcactctgatttttagaattgtcagcttttctgctctggtttctccccatctttgtggttttatctacctttggtctttgacgttggtgacctacagatggggttttggtgtagatgtcctttttgttgatgttgatgctattcctttctctttgttagttttccttctmacagtcaggtccctcagctgcaggtctgttggagtttgctggaggtccactccagaccctgtttgcctgggtatcaccagcagaggctgcagaacagcaaatattgcttcctgatccttcctccggaagctttgtcccagaggggcacctgcctatatgaggtgtctgtcggcccctactgggagatgtctccctgttaggctacac

SEQ ID NO: 190013 - DNA, 561 bp, Homo sapiens
catgacatgtggggattatgggaactaaaattcaaaatcagatttgggtggggacacagccaaaccatatcaaaaattaaataatctttttaatgaaattttaatctattgcttttatacttgacaagtcagtctacaatcacagacaagaaagataatacaactatattttcttcttattttacacttctgttttacacatttagctgcgtgttctagctgaaatttatttattttctcttctgagtgctgagaatttacaattatgycctcctcccatagttagctaattgtgtagatatcattaatcaaataattctttcctttagacttgtgatgccattatattataaacaaaatctttacacatgctagagtttgtttttaagctatctattctgattcaacaatctgtcagttgtcataagtacaatattttttgaattactgatgctttataatgcatttaaagagagaaaaactgctcttcaccaattgctcttattttttaaaagactccttagcaattctgcttgattgtatttcttaaagaaatgtcaa

SEQ ID NO: 190014 - DNA, 561 bp, Homo sapiens
catgacatgtggggattatgggaactaaaattcaaaatcagatttgggtggggacacagccaaaccatatcaaaaattaaataatctttttaatgaaattttaatctattgcttttatacttgacaagtcagtctacaatcacagacaagaaagataatacaactatattttcttcttattttacacttctgttttacacatttagctgcgtgttctagctgaaatttatttattttctcttctgagtgctgagaatttacaattatgtcctcctcccatagttagctaattgtgtagatatcattaatcaaataattctttcctttagacttgtgatgccattatatyataaacaaaatctttacacatgctagagtttgtttttaagctatctattctgattcaacaatctgtcagttgtcataagtacaatattttttgaattactgatgctttataatgcatttaaagagagaaaaactgctcttcaccaattgctcttattttttaaaagactccttagcaattctgcttgattgtatttcttaaagaaatgtcaa

SEQ ID NO: 190015 - DNA, 630 bp, Homo sapiens
tcaaaagatacccctcaacacacacacatatacacacagacacacatagggcccttgtcacaacaattttgtagcccaaagatcagagggccttgctaatgtcacagcccttaatactaggcaaatatgakgatagccttgaaaatacagagttccatgtcaccaaaatcttagctctctcatgtccttccctccctgcctctaaactccctttcatgggctgtcagatcaattttacagcatgtttgagtaagctgatgaggacctgagggagcagccccaactctgcactggactaatgaggaggggagctgggttgctgaatgcaggggaaagcaaactcctctttcctgttcaaaatatgtgctgaaaagagaccatttttgctcagttgtgcagtttttttaatgttccccagtcaattgagcccaaaagtataaatccgagcttatgcctgacacggatttttttcaatcagcctattttaattgcataaatgttcatctttgtcttgaagggaaaatataatacatagttcagtggaaaaggatgtcaccttgattggtataattaagactttctgttccaatgcactgtataaagaccagaagccatacaggttttctcctt

SEQ ID NO: 190016 - DNA, 495 bp, Homo sapiens
aatactattatgtatatctttttttaactcttgataatcagcaagaaaaaagccaaatgattcccaatggataaatggactaaagacacgaataggtatttagattaacttccttcttttatctctcctgcatgaaagtcttcatgattatcacattgtctaggatggatattaaatacactcttttaaagtgtaaaggaaaagaaaacaagctacacaaaaaagaaaacaaacttaaccaattaaattgttgtaactcacaaatcayccttgtatagaaaattttataatcctactaatttttatttttgctttctgcctataaaaacaagaccttaacatttacttttgaagtactgaccccagttctctggaatccagcttcccaggatggccattcccagcttttagccttaataaactatttaaaactggatttctgattgaactcaggaggtggaagttgcagcgagccaagattatgtcactgcgctc

SEQ ID NO: 190017 - DNA, 528 bp, Homo sapiens
ggctttcgtgccagtcacgtgatcacctatgcactcaccacttctctacatttgaaggtgctggactttctgttggggtcactgctcccattcttttctatgtggtccataaaagcctagttgaaaactttggttttatcataagaactgacctgacaatgatgtaatgatctccctacctctgaatttgtacaacatgagttatcattttcatggatttcaatgcaaaattggtgtgccattcttggctacaagaartgtgtgtttgtgtatctgtgcaagtgtatgtgtgtatgattggcatggaattatttatgaaactgtttaaaatacacactatgtcttttatgccatgttctccactgtgtagcatagagtgcaaacctcaaagaatagaatttccgagcctttatattctagacgataatacgatcccctgaacatgagccattgttttgcattttcaggggagctaaataagcacgaagtaccacgtccagcaccaaacagcaggtgcacagaggaaga

SEQ ID NO: 190018 - DNA, 528 bp, Homo sapiens
ggctttcgtgccagtcacgtgatcacctatgcactcaccacttctctacatttgaaggtgctggactttctgttggggtcactgctcccattcttttctatgtggtccataaaagcctagttgaaaactttggttttatcataagaactgacctgacaatgatgtaatgatctccctacctctgaatttgtacaacatgagttatcattttcatggatttcaatgcaaaattggtgtgccattcttggctacaagaagtgtgtgtttgtgtatctgtgcaagtgtatgtgtgtatgattggcatggaattmtttatgaaactgtttaaaatacacactatgtcttttatgccatgttctccactgtgtagcatagagtgcaaacctcaaagaatagaatttccgagcctttatattctagacgataatacgatcccctgaacatgagccattgttttgcattttcaggggagctaaataagcacgaagtaccacgtccagcaccaaacagcaggtgcacagaggaaga

SEQ ID NO: 190019 - DNA, 464 bp, Homo sapiens
ggtatcacagcagggactgatcagggtgagagtaggggaagcaaaggagtttgctgtttccactatcygcactttctcttcagagtggccatgccaatcctgggggacatgctgaagccaagggcttggtgagtgtgattatcctctccctctgctaattaacccctgcaactgaccccaaagaaaaggcccgagggaagccaagggtcagatcagccaaaggccaagataataaggctgacctttcaagaggcaatcagacttgcatagtgatttgtaaagagggtaggcctgtcttacaaaggtcagctacctcttctgagcagaaatggcaccctaagcatctaacaacgagtgaaggctgcaggggccctaacaggtgggtccatgtgacactggtgagccaggtggctgtcgtacactgacaccctgctggagccccatacaggaatctgacagaatga

SEQ ID NO: 190020 - DNA, 454 bp, Homo sapiens
tgagggagacaatgaaaaagtattttagcaaatgaaaggttccatttctgaaataattagcacttctcaatgtcaagtttgctcatcttatgaacagttctattattaacatacagaaagctaatatgaaaagcacattcttatgttaattatctaattaactaatccaggcacarttaagccactaaattcacacagtattaatttttcttatgttggtctcatggatactaaatttcttgacaagttaacatttctgctggtcttcctgacactttgatgtttgataagtccactccagtggacttcttagaatgcatgaactcaagaaaagttagaggtctctcatttagtttcacacgtctgttttctagagaattttgcccaacttcacctgaagaactcaaaaaatattacccagcaagtaacgtttcacttcaaatgacagtattaa

SEQ ID NO: 190021 - DNA, 597 bp, Homo sapiens
taagagtaattattttttagttatttatttataaattaataactagaaaggcctcactccgtagtccaggcttgagtgtagtggcatgatcatagctcactgcatctttgaactcctgggctcaagtgatcctcccaccttagcctccagagtagctgggactacagttatgtgccaccatacccagctaaagagaaattactttgaagtttcattacgtatactgcaagagctatgtgatctctacatgttttgttttctcaactataacattagaaatatatgaagacctgcctacctcatacacttgagtaaattaatacaagcaaagtgcatggaaaagtatcttagatggtaaagattcaataagtggaatttyaatatacttatttacttatccatcatccaatatttattaagtgcctactggtgtcagaaaatgttctaggagttgaggatatattaggagaaataaacaaacttcatgaatctgacaatatggtggtggtattcaaacaatgaatttaaaagtttttaaagtgtgtgtgtgtgtttagcatgttaagtggtgataaatgctccagagaaaagaaaaaa

SEQ ID NO: 190022 - DNA, 592 bp, Homo sapiens
tttttatcattatgtaatgctcttccttgtcttcttacactgttgatttaaagtctgttttgtctgaaattagtatagcaacccctgttctttttttttktttgttttccatttgcttggtagatttatctccatccatttactttaagcctatcaatgtcattgcatgtgagataatctcttgaagacagaatacagctgggtcttgctcctttctccatttgaccactatgtgtgccttttaagtggggcatttagcccagttatgtttaaggttaatattgatatgtgcagatttgatcctgtcatcatgttgttagctggttgctatgcagattttattgtatagctgatcatagtgtcaatgatctatatacttaagtgtgtttttgtggtggccagtaacagttttttatttccatgtttagcactcctttaaaacattttataaggcaggtctttccccagtgatagtagaatagatgggatcaggggtgttaatcaggttaagttgtttcaggtgtgagatagtaatagggttgtagtgcttgagtttaggttgagtactaggaatgcagtagttgttagaata

SEQ ID NO: 190023 - DNA, 217 bp, Homo sapiens
gttgagaacattttcacggacaatatcttcaaatatgttttccaagttkcttgttctctctccctctctttcagggatgccaatgaatcatatgtttggtctttttacataatcctatatttcttggaggttttattattttttattctttctgtttttttttttaattttctgactgagttgatttgaagaactggtcttcaggctgtaagaattc

SEQ ID NO: 190024 - DNA, 607 bp, Homo sapiens
agactgtcagtgttgcaggatgacagcttgcaagtagagggaccarttgcccctaatgtccctaattgaagggttccacaggagttggggactgtagaacgaaaactaggaaagcctggggcaagcagaagccagccaccctatttcaaaccatcttcaagactaacagcagttgatagatgtggacagagaaagatgctacaacagaacaagccaaaaactgatcttccagaaagagtcaacaaaacaagtaaagttaaggacatgataatttcaagcactgcaattgggtcatttagtgcaagagaaaataagctttcatgcttcacacccatgaggatatctaaaattatagcacagcacaaaaatggatatgattttagtttaaaaagtagagaaatatgaagtttatttataaagttttcatttcaataactaaccaaatgtagttgctttattaaaaggacagcttttagttatttgcaaaattgtctcttaggaaatagcacattttccagtgttgttggacaaatgagaggcaactgtaatataatatgctagaggccatctgcacctaaactgctattctaagctttgaaaaaagtgg

SEQ ID NO: 190025 - DNA, 552 bp, Homo sapiens
agaatatatatcggatgtgaatgttcaatgaagactgttagacagtatgtactaaatttaatttactcttgtttttatttacttattcctccagtaaacacttttgagctcctgctgtgggccagttaccagaacagatgttgagggagcaaactcttgagcatgattcttgccctcctggaatcagggtataaaacatgaaatgattgcacaaacagaaataaagttttaactgggcaaagtgcagtgaaatggaagagtgctatgctatggagttgggagaagttggcctcatcagagaggcccagaaaaatttcccagaagtgatgtctgagatgaaatctgaaacagaagcagttttatgtagaaaaacaaggaaggargagagaacaaagaacacacatgatttatatcaagggcagcaggcaggtaaggggactgagacaatgctggtgtttttggtgtccaaaaatggtggaagatgagctttaggcaggaagcgttgccatataagtcatggtatggagttctcttgttattttctaagttctg

SEQ ID NO: 190026 - DNA, 541 bp, Homo sapiens
aatatctgaaaatagaaaggtaaaaacatctcattacattctaaggaaattcaaaaaactgaacaatttttggacacattaaaaataacttttgatgtagtttggatatttgcctctgcctgaatctcattttgaattttaatccccaatgctggagggggggcctcatgggaggtgtttgggtcatcgaggtagatctctcaggtcttagtgctgtccacatgatagtgagtgagttctcaygaaatcttgtttaaaagtatgcggtacctcctctaccactggctctctctctcttgctcctactttccctgcatgaggtgcctgctcccactgtgcctttcaccaacattaaaagctccctgaggcctccccagaaacagatgcttctatgctacctgtacagcctgcagaactgtgagccaattgaacttcttttcttataaattacagtctttggtgtttctctatagcaatgcaagaatagccttatataattttaaaaatcaggaaaaaatttttacaactttccagacaggga

SEQ ID NO: 190027 - DNA, 571 bp, Homo sapiens
gataactgggactacatctgtagaagaccaagcctctccttagagtttgacattataccacatttgtacattcaacccatacttattaagggcttgttctatgactaatactatactaggcactagtggtatgattaaaaattagacataattctttctttcataaagctytaagtctagttggaagactaaacaatggtatctatcttaacaatttttgtattataagaggaagcccaactcaacatggataggaaaaagaaatgtattggctgtaactaaagagactgtctgtgggtccaattcagacagagattgatcaaggttctcaaatgataatcacaatgaaaggacacacacaaacacacatgcacactcacaaacacacatttattttcctttctctttcttcactacatgatggctacttcagcttcggctcctacatttttcctgatttatgtcgacaggaaagagaaagctacatccccagcaactttttttatggcccagaattgagtttcactatgctacactgtcctgatttgaagtcagagacccatcctggaag

SEQ ID NO: 190028 - DNA, 478 bp, Homo sapiens
gaaacagccataaggccatccatgggaacagtatttcatacatggaaaatagtacaaatgcctgagtctcagaggaggttggccgcttctgggcggcatgagatcaggtggctgcattgtggtgggataggaagaaaagggtaaggtggatggcggggaggggtaagcaatgtcaactgcattctaaatattataagaagccactaatggatttattcctctcagtcctcaatatcgctragctaattattcagcaaatcttcctgttatttattcaataaataaacatattgcaggtgtcaagaagtaggcaggcttccagctttcaagaacctcacagtctaaggagtgggaggaagaaaagacaacaataccacagcaagatagaagaacagcagccacacatgagcatctgccaaagccgcctgaaactgcactaggtatgccgtctacatgctcactaattcccctacaagca

SEQ ID NO: 190029 - DNA, 580 bp, Homo sapiens
ctggtggaaggtaactgaatcatgagggtgggtttttcccatgctgttctcatgatagtgaatacgtctcacaagggcccatggttttatacagggcagtatctctgcacatgctctgttgcctgctgccatgtaagacatgcctttgctcctccttctccttccaccatgattttgaggcctcccgagctatatggaactgtgagtccactgaatttctttttctttacaaattagccagtctcaggtatttcttcaaagcaatatgaaaatggacaaatataccttccttcatttttctcttctttctctgctgttccttcttcttttcctgccttccatcaccttttcattctttaccatattaatataggcagttattcaaaatataagattctaaatagtgtttgcagaatgccaccttttgtgtaaaatccagggagaataagaatatatacatttgattttgcttatatttctatcaaggttctagaaagacacataataaagaaataaaagtggytgctgattggagtgagctggggcaaactagctggatgagagcaaaagtagaaggaag

SEQ ID NO: 190030 - DNA, 571 bp, Homo sapiens
gggagttttcttcgttccatatgargaagaactaataaagttctttccactttacagagttcaattccatcttacaggagcatctggtattcttggactttactgagtccttaaagtctttccgctttattggttgctcaagccgcggcacggaattctgctttagaattcatttggctccctggctccacccaaaggccatgagatcccccatgttcctatctcccagagctgcccctggtgctttatggtcacttggtcatttgttataccaaagcttctgcctcggtgagttaggatctctgctgcacaagacctactgttaaggaacaaaaacagggtttatctgcagtgcagataaaactcccgaagagtcaccacccacccatgagtccttctggacattaatgggcccttctgtggtcttgctatcagccttggtctttaattcgtgcttttgtttattaagaaagatgctcacccatctccccagatagaactaacacactttttctgggttttgcattaagggattatctttgagccaggaatagggctccccctgctttca

SEQ ID NO: 190031 - DNA, 476 bp, Homo sapiens
tgtgggtggggccatcccctcattcaggcagcctgcagggtctttcaagctcccccggtatgagcttccttctagactctgaaaagagagaataaacaggcttagagaagtgtactttgaaaagtcatttggaatccctgtgtcctcccagcctagccacagacaacatggaaaatcagtagccaaggctgttctcaccaaaccacagtgaagcactagcagaccagagactttatcctcctgcagcagggagcccagagctgccaccttctcaggcaaccaggatgtacttggcatctatgtgctgccaatttcccagacataawgaaattgtcaaagtgactatctctagttaagagctccagaggtaatgctaacgatcgcaattctataccaaatatgcagttacaaaagaaaacaagtgaaaagggtgaatatggtactccagagggaactaagggtaaaagaacctaaat

SEQ ID NO: 190032 - DNA, 425 bp, Homo sapiens
tagctacctatgctagagttgggatactgagccccagctaagggcaactagggttgacctaaaattctctgttctgctcctgggagaaaacaggcagtggtggccaggtttctgccacagtgaggacttmtgccccacctggagctcagggcacaaatagtctcagaggacaaaggaaaaggtacatggggatagagcaacaaatgttcccatagtcaatccaaggatggggaatagaaatgcaaatagattcaaatatgtgatgaagtgtggaggaaggtcatccccatatttaaaatgaacacatttcctgggcgctggatctgggatcatatactcataacctgccccttctctgggcacctatagacactctttacatactccctgcatggctttcatcacatagtattgtaaccactggt

SEQ ID NO: 190033 - DNA, 425 bp, Homo sapiens
tagctacctatgctagagttgggatactgagccccagctaagggcaactagggttgacctaaaattctctgttctgctcctgggagaaaacaggcagtggtggccaggtttctgccacagtgaggacttctgccccacctggagctcagggcacaaatagtctcagaggacaaaggaaaaggtacatggggatagagcaacaaatgttcccatagtcaatccaaggatggggaatagaaatgcaaatagattcaaatatgtgatgaagtgtggaggaaggtcatccccatatttaaaatgaacacatttcctgggcgctggatctgggatcatatactcataacctgccccytctctgggcacctatagacactctttacatactccctgcatggctttcatcacatagtattgtaaccactggt

SEQ ID NO: 190034 - DNA, 385 bp, Homo sapiens
tactgcaggcttcttcagtgctgtcctccccacgaccctggccccacgctttggctcctgttaggatggcaytggaagcagaggataaaatgaaagttcccaattgactgtcctcaaggtctcctcgacctcgggttctcctgtgtaatcctctgtctgagtcagagacagagggaggaaagccctcaaagggcaatgaactccaccctctgcccctagataagcacttcctgaaaacacaaggccgctgctctgatatactgctgtgctgactcactggactcactgccccatctagctgtctctggaagttaaaggcgagaaaattctctctatattccaccagtcgtggattctgaagcttgatatgtgggatcaagcaaaa

SEQ ID NO: 190035 - DNA, 385 bp, Homo sapiens
tactgcaggcttcttcagtgctgtcctccccacgaccctggccccacgctttggctcctgttaggatggcactggaagcagaggataaaatgaaagttcccaattgactgtcctcaaggtctcctcgacctcgggttctcctgtgtaatcctctgtctgagtcagagacagagggaggaaagccctcaaagggcaatgaactccaccctctgcccctagataagcacttcctgaaaacacaaggccgctgctctgatatactgctgtgctgactcactggactcactgccccatctagctgtctctggaagttaaaggcgagaaaattctctctatattccaccagtsgtggattctgaagcttgatatgtgggatcaagcaaaa

SEQ ID NO: 190036 - DNA, 462 bp, Homo sapiens
aagaatggaggagaaagtgctgagctctgccagatratgctctaagaaatcaatattctaaaaccatctcctccctccctttctcactgaacaaggaagtaagagtttgagatccttcccaaacaaagcattcttcttataagcaaagactagtgaaagtattttggaagccacaaccacatttcagagagaatgccactgttttctgacctgtcaaagttttgctccatgctttctgttaagttgtcgtcacaagccaggcgggttaagcagatgctcctggtagagtgctttagggacaagaactgtccaaacaaagatgtgctcttttgcaaaagaaaaacggctccagagatacttaacagaagcagcaagctgacccaggcagaggctggacaacaagtccagaaaaaataaggaatatcctgaaaggttataaaaagcagtaaggtgttggcaacc

SEQ ID NO: 190037 - DNA, 462 bp, Homo sapiens
aagaatggaggagaaagtgctgagctctgccagataatgctctaagaaatcaatattctaaaaccatctcctccctccctttctcactgaacaaggaagtaagagtttgagatccttcccaaacaaagcattcttcttataagcaaagactagtgaaagtattttggaagccacaaccacatttcagagagaatgccactgttttctgacctgtcaaagttttgctccatgctttctgttaagttgtcgtcacaagccaggcgggttaagcagatgctcctggtagagtgctttagggacaagaactgtccaaacaaagatgtgctcttttgcaaaagaaaaacggctccasagatacttaacagaagcagcaagctgacccaggcagaggctggacaacaagtccagaaaaaataaggaatatcctgaaaggttataaaaagcagtaaggtgttggcaacc

SEQ ID NO: 190038 - DNA, 580 bp, Homo sapiens
aatgtggcatcctggatgagatcctgggaccgaaaaaggatattaggtaaaaattaaagaaacrcaaattaagtatgaacttcagttaataattatctatactggctcgttagttatgatatatgcatgatactaatgtaagatcttaataataggtcaaactaagcaaagggtatggagaactcactgtactatctttgcaacgtttatgtaaacctaaaatttctaaaataaaaaatattaaaaaaaagaattcctctggtttgaagtctttcaagtctgttgcaactatattccctggcccaagttatctataaccttggtcatctgggagcttgttagcaatacagaatctcaggcacatcccagatgtactgggcttctcagagaaacagccccaattgggtagtttgggtaataaagttttggctttcacaatataggctggccaactcgacccaaaacagatgatggtgcacatgcctggagacccaggaggacctgtggtgcagatgaagtctgaggacactctgctggagaagtctcccttgcttgggcaagagaagtgggggagtcggat

SEQ ID NO: 190039 - DNA, 607 bp, Homo sapiens
aagctttttagtttgatgcaatcccagttgtctatttttgcttttgttgcctgtgcttttggtgttatatgcaaaaaaacattgtctagatcaatgtttgtggattttgtatcatacaacatcaatgaatttattagttctaactttttttttgtatggaatccttagggtttaaaaaaattaaacaatttttaaaaaattttatttcaatagtttttggggtacaggcggtttttggtcacatgaataagttctttagtggtgataattctgagattttgtcatacaagcagtgcacacactgtatccaatatgtagtcttttatcccttaccctctgttgtccatcccctcaagtccccaaagtccattatatcattcttatccctttgcatcctcatagcttagctttcacttatargtgaaaacatacagtatttggttttccattcctgagttacatcaggtttctgaaaatatataagatcatgtcatctttgcaaacagagacaattttactatttcctttctgatttggatgtctttgtatttctttttctttgctaattgctctggctaggacttgtagtactatatggagtgaaggt

SEQ ID NO: 190040 - DNA, 554 bp, Homo sapiens
aagggtatggagaactcactgtactatctttgcaacgtttatgtaaacctaaaatttctaaaataaaaaatattaaaaaaaagaattcctctggtttgaagtctttcaagtctgttgcaactatattccctggcccaagttatctataaccttggtcatctgggagcttgttagcaatacagaatctcaggcacatcccagatgtactgggcttctcagagaaacagccccaattgggtagtttgggtaataaagttttggctttcacaatataggctggccaactcgacccaaaacagatgatggtgcacatgcctggagacccaggaggacctgtggtgcagatgaagtctgaggacactctgctggagaagtctcccttgcttgggcaagagaagtgggggagtcggattttttattctagataggccttcaactgattgaaggaagcccacccagattatggaaggcagccatctttacccagagttcaatgattttagtgttaacctcatccaaagacamccagcaagttaacacataaaattaaccat

SEQ ID NO: 190041 - DNA, 336 bp, Homo sapiens
ttgtatataaaatacacataatccacttactagcagcattttttggtattcacatttcttttaattagcattttagttcctatttttgagcatttgctatgcagcagcattgcacattatctcatttaatcctcacagccactctaaaataggtgccatttccactttacagttgggaaaactgaacctcataaaggtaagttgcagaaccaggatttaacctgtctctccagaacccaaggtcttagcaaactacaaggctgccaaaccagaaatggtatcagacactcaaagggtaactgacataggrcatcacatatctaaaataaagagaca

SEQ ID NO: 190042 - DNA, 485 bp, Homo sapiens
ggcgacaaacatccaaatgacagcaaacccaatatcttattgttacatgttcagaccattttcagtttttcttttgagacagagtcttgctctgtcacccagactggagtgcagtggcaccatcttggctcactgcagcctccacctcctgggttcaagtgattgtcatgccacagcctcctgagtagcttttattacaggtatgtgccaccatgctgggctaatttttgtatttttagtagagacagggtttcaccattttggccaggctggtcttgaactcctgccctcaagtgatttgccttcctcagcctcccaaaatgttgggattacaggcataagccaccatgcccggcccattttcagtgtttcytttttcttttctttcttttcttttctttttttttttgagacggagttttgctcttgttgcccaggctggagagcaattctgcgatctcggctcactgcaacctccaacgccc

SEQ ID NO: 190043 - DNA, 537 bp, Homo sapiens
ctcattttgaaagttcagcaacaactcttttggccattgcaaaggccagtgtaagcaaacgtcctgggatctaattaaagaggcagggaggaggtgtggtgaggggttgcctttattcacctgtactgagaaatggtaggtacacaggttctgtagggatcaggtgcaggtagtctgaccccaagtgctctctgggactgggtggagtgactacaacgcctctgggaagtgggcagagcccctcctgttgcccttgtattttcagggcctgctcccggctgcccccaaacatgtatttcccattagtgagtcaggctgkgggtagtgcctagtcgaccttgcactgggggagagggaagtggaggaactccagagcagtggagaaaccagggcagagtgggttaagtcaagctctgatgtttcaataagactgcagctcctctccacagacactgccactctcattatctctgtcaatcagatccaagcagcagaacttccaagttgctctctctggctgacaaactctctgtacat

SEQ ID NO: 190044 - DNA, 550 bp, Homo sapiens
aaagtaagatcgttgtgaagcagttatctggaggaggaaagggcaacagcctatgcaaaggtcctgaggcatgatcatgactggtgattcaacaagcaggaaggaaaccagcatgactggagtgatgcaagcaaatggggaagtaatagacagatgagagagattaccagaggaggtcatcatgttgggccttaaagactgggccgggtgcagtggctcacacctgcaatcctagcacgttgggaggctgaggcaggcagatcagtggcgctcaggagttcaagactagcctgaccaacataatgaaaccccatctctactaaaaatacaaaaaattagccaggagtggtggcaggctactcgggaggctgaggctagagaatcacttgaacccaggaggtggaggttgcagtgagcctaaatcacaccactgcactccagtgtgggtgacagagcaagactttgtcaaaaaaaaaaaaaaaaaaaaaaagactggagcttttccactgagtgaratatggagctataccaggttgaggaccggaggagg

SEQ ID NO: 190045 - DNA, 528 bp, Homo sapiens
tgggatgtggcagtctcatgcacctgggatctcagaaatttgaagcaacttcacatgtgacccccagtaygtcctgttcggatgtctccagagagaatagccaaggtgtcctcaaggccagaaagtctatcaccataaatatacttctacctttgggttttattagttccctattatcactatctgccccactcctctgagaccacccccagcaatagttctgaaaaatctgatttcccagtagcctcagcattgtgctcaagtgatctatctgactgtgcctaccactttctctctcttagctagccatttaccatagtttatgtaattatttgtgtatctgcctacctacctatatatctatatttattattcacttatgagctgtttcctgatagttttccaaatgtcagtctattcctgactccccaaattgaaagctttccatttttccttcattaattaaattatccataaaacagtctgtccttatatagcattttattttaggccaatgctctcagtctg

SEQ ID NO: 190046 - DNA, 511 bp, Homo sapiens
taaaatcataaataaattaggccccaaactgtatcatagtaataccagtgggtctacagatcctcattgtgtttattttccaagctctttaatgtgtaattagaatagacctactcagcaactatagagccgtcacattggctccctgatctaggaaataaagacttttatgatagaaaggccaagcataagcctctgtaacttgccctaactaattggatagtaattccaaagcaaaatcatatctcaagggaaactacagagactaaagatgtgaaagaggctgggttggtgattctgcccatatccctcttaatttrgtctgctccatttgtgcagaagatgattggatcttggaaaattgtaaacttaatgaaatattataaactgtaaactacaatgcaatattataaacttaatcaggtgctaacatcaatcatagctgctgttctagatgtggaatctctcctggaacaaatcaacacaacccctggaaattgttatgtaacta

SEQ ID NO: 190047 - DNA, 592 bp, Homo sapiens
cactgttttagtcagcctgggctcccatagcaagctaccacaccctggatggcttaaacagcggtcatttatttcttgtcatctgtaggcttgggagtccaagatcaaggtgctaactagggatggttggattcttattgagggctctattcctggttatgtcctcagatgccttttgttggcatgtgcacagaaagagagatcttgcctcttcctcttttgaaagcacatcaatcccatcttggggactccaccttcatgacataaactaactgcagtcacctcccagaggctccaccttcaaatatcacccaattggggattattaggacttaaacatatgaatttgggggacacataaacattcaatctacagcattctgccccaactaaatgtggcaggtcggacttcagaggcagagaggcagcatatacaaaggccctgtggcaagagggaagatggagtggaactgagaagggacccctgtttagggcatttggagatttagggaggaagyatccaaggaggcctgtagcagtccatcatgtaggatcttccccaaacgctgtgataggagttgcagccttagag

SEQ ID NO: 190048 - DNA, 406 bp, Homo sapiens
cagaaatgcctgtattaggaaattacagtccagtcaatcacattcagaaatcatgtactacacttaggcataagaaatagttgaaacatcagtaagcctaatcatrtgagaccatttgacatcaaaattaagacacattagaacatatacttgaatcaaaggaaaggaaaaatgtaggctcacccattatatatgagtctgtccacatgggagatgtggccagtcctcttctctccacatcctagagttttataggaatgggccagggcactgctgggtactggggaaaccttgcagggctccagaccaccaccttgcttcaaccacagcagctcctctcttacctattttagatattatgcttttaccaaggtttcctttcaaacaagttttgccaacatgagtt

SEQ ID NO: 190049 - DNA, 552 bp, Homo sapiens
ccacctactcaagcctcagtaatggccgatgcccctccccccaccaagctagagcatcccagttcaacttcagtctgctgtgctggcagcaagaatttcaagccagtggatcttagcttgctgggctccayggtggtgggatcctctgagctagaccacttggctccctggcttcagcctcctttccaggggagtgaatggttctgtctcagcagtgttccagttgccactggggtaaaaaaacaaaaaacaaaaaacaacaacaagaaaaacctcctacagctagttcagtgtctgcccaaaaggccacccagtttttgctttaaactcagggccctggtgatctaggcacccaagggaatctcctgttccgtgggttgcaaagaccatggtaaaagcgtagttttctggaccggatagaaacgtcccacacagcacagtccctcatggcttcccttggctaggggagggagttccctgaccccttgcacttctcaggtgaggtgacaccccaccctgcttctgcttgcccgctgtgggctgtacccaccg

SEQ ID NO: 190050 - DNA, 510 bp, Homo sapiens
gggacaacacaatgaataaaaatcaatagaaacaaacaaatagttctccaaggacttctgctattgagaatatcaaatagcaatattaaacagcaaattaaacagacaagaccgaaaacagaatgagagacagagagagagacagacagaggacagacagaggaagatagagggagaaaaaygtgaaaaaattaaagagatttcaccacatattacagaggaaaagggctatggaatactgaaacaaaagatgttttaaaatatgcttttcatataaattaatgaaggagatgatttcaggataacataagagaaacaattttgcgtgtgtgtgtgtgtgtatacactatttgagaattttctagtaccgaataaatccatgatgcaggacgcacagtatctgttcattagcactaacagaaataccttagtaactagataaacaatagtatcactagagagcaatttatgaagcaagatctgttgaattatcttcaaaaatgataacaa

SEQ ID NO: 190051 - DNA, 510 bp, Homo sapiens
gggacaacacaatgaataaaaatcaatagaaacaaacaaatagttctccaaggacttctgctattgagaatatcaaatagcaatattaaacagcaaattaaacagacaagaccgaaaacagaatgagagacagagagagagacagacagaggacagacagaggaagatagagggagaaaaacgtgaaaaaattaaagagatttcaccacatattacagaggaaaagggctatggaatactgaaacaaaagatgttttaaaatatgcttttcatataaattaatgaaggagaygatttcaggataacataagagaaacaattttgcgtgtgtgtgtgtgtgtatacactatttgagaattttctagtaccgaataaatccatgatgcaggacgcacagtatctgttcattagcactaacagaaataccttagtaactagataaacaatagtatcactagagagcaatttatgaagcaagatctgttgaattatcttcaaaaatgataacaa

SEQ ID NO: 190052 - DNA, 596 bp, Homo sapiens
tacgcagtgagactctacataattgcctgaaaatatctattttttctaaaacattttttattcatgaatattttttaagtttttcacactgtacacatttcttaaaacatatgataccagtaacaactgaaaatgactgctgaattgagtacacatgtgttatctagctcaagataacagaagtatgtggcaaaacatataccactcatagtgcttcacaatatgcacatctatttagccagcatttattttagtaaactattcttaataagactcatttactgtttatgaatattctggtatgcattctttatagtgaagtgttaatatatcacatcttatttattttagcaaatcagtatattttctgtatttaattataaaaagtaacttagtttttaaaatttatttgcaaatacacttactccatctggcactacagcttgttgcctacctaactgaatatataatgttagctcatcttaagcatgtccaygtacttaatttacttacgtgtttattttaagtaaacgatcactgtatataggaatttgtctatgaagaaatcactgtatataggaatttatctataaaga

SEQ ID NO: 190053 - DNA, 487 bp, Homo sapiens
aagggttcagctctggtttctctttctttactttctatattattcccataggttctttgttctgattcacattatcttccaaggactctcaaaattatatctcaaatgccacaaaagttatacatcctattccctacttgatgtacttaagtgagaaatttcaaaatttgtctaaatcttctcctttcccaaatatccattttagttacttgcacccacattcagtcaattgtcasagctaaaaattaagccagtttgaaatattattccctttcattcactagctcataataccttatagttctattaattctaacaaaaaaatctgtcctgatttatgtatgtgtttgtgtgtgtgtgtgtgtggtgtgtgtgtttctttatccttccctagcgcctgtgtccaaaactaactcttacggtttactgtaacagcctcttaggatggttccctccgtttactttttactcgttaaaagcaatgatc

SEQ ID NO: 190054 - DNA, 341 bp, Homo sapiens
ccatgataccaactatcatacattcaatctgataaatgggttcttctccctttgccagtagactataaatttactttctggggacattgaacccgatagactctgaagaggttgcaagacacagctgaaactaattgcactctaatcatgrgaataattgtaaagtctatcttcagaacagaggtggaaatttctagacactttctgaaacaacctgtgagagcaatggtagccaggcttaaaattccacagagacaaaaggattcctctccagtaaaacttgtcagtttatgaaaagaaatgtgcagatactttcttggttgatatctttaatgtaaggg

SEQ ID NO: 190055 - DNA, 617 bp, Homo sapiens
tcaaaaaatcattgcagactaacttcatttgtcattgaccactccatttcccccaaatatggtctaagctccatgtaatgtatttattcagtaaaatggagctacccagacactaatttggtatgcacttatatttgtattaaactcaaaatctctatttgaatgcaaaaataattagaaaagtgattctaaagagaaaaatcggtcactgtgtattctgggttcttcagagagatttctatatttttgttaacatttgttctaaaccttagtggcaaattagaaccacttgggaagatttttaaatcctcatgtccaagtcacactttargcattagtattttgtaaagccatctacctactgtctcagatattataatgctaatgtgtataaattttgctggaggttaatggatggaataattttaaatggtggaaaaaataccaatatctatatttcagaatttactttaaaatatgtaagttgcctaataaatcttgcataaaaatgaataatgattaagtgactaacagaatatttactactgtatcctacatatgaaactcttggtgaaatttattattttgaattaactggttaaatgtttactctgaat

SEQ ID NO: 190056 - DNA, 264 bp, Homo sapiens
aagaaaaataaagatcgttcccccagtgttcccctactttttgtgtagttcaggcaaaatcctcagtcagcacggagtgtttttgtatgctctcactctatagccagtgttttcaaattatttggctaaaacttaaacatatatccataatgcaaatgcttttacttcctattattrtaatcctaaccttattacctcttacttattacatagccacagctttctaaatctttgattttgaatatattacacttctgagttaag

SEQ ID NO: 190057 - DNA, 600 bp, Homo sapiens
tcctgtgggacctacagaagggaatcagccctgtccrtgccttcattttatcccagagaaacccatttcagacttctagaactattagataataaatttgtattgttttaagtcactgagtttgtgatagttatagcagcactaggaatctgatatacaactcaggtgcctaatgcataatatcttcaaaacagcatgagtaatagctatcaattgtggaggagtaaacatgtgcccagttttttttcttcttttttttgcatagtttatcttgtatcctcctagtgactctgagaagggaaaggataggccattaacagcgttgaccaaaaaaccatacactgtaaaatatttaaaggagtttagtccaagccaattatgagtaactaaggcccagagaacaatttcaagaggttctgagaaagtgtgccccagacatttgggttacagtttggttttatacattttcaggggacagaagttacaggcaaagatgtaaatcaatacatttaaggtataaattgattcagcctggaaagacaaaatatctccaaatggggccttacaggtcataggtagatccaaagattttggattggc

SEQ ID NO: 190058 - DNA, 600 bp, Homo sapiens
tcctgtgggacctacagaagggaatcagccctgtccatgccttsattttatcccagagaaacccatttcagacttctagaactattagataataaatttgtattgttttaagtcactgagtttgtgatagttatagcagcactaggaatctgatatacaactcaggtgcctaatgcataatatcttcaaaacagcatgagtaatagctatcaattgtggaggagtaaacatgtgcccagttttttttcttcttttttttgcatagtttatcttgtatcctcctagtgactctgagaagggaaaggataggccattaacagcgttgaccaaaaaaccatacactgtaaaatatttaaaggagtttagtccaagccaattatgagtaactaaggcccagagaacaatttcaagaggttctgagaaagtgtgccccagacatttgggttacagtttggttttatacattttcaggggacagaagttacaggcaaagatgtaaatcaatacatttaaggtataaattgattcagcctggaaagacaaaatatctccaaatggggccttacaggtcataggtagatccaaagattttggattggc

SEQ ID NO: 190059 - DNA, 615 bp, Homo sapiens
tgtatgctgtttggtatcacagagagccatcctgacaaaaatacacacagatcgctccgggctatttgttcattcaccaagtatttattgaataacttctgtgtgtctgactcttgaataccaggggtggaaaatcaagcaacatcagttctcactcctgaattaccctataacccaagttaaacatgacaaatatattgtccccatgctcttctaaaccatacccaggatgaggtatcactggttgccttctgctactctgcttgggccgagaagttactagaatgaaagtccttagcaggaggctctctgatttggtcactgtataattcccaggacatggccataatacatgttcaataaatatttgttggggaaagggattgaatgcagctggcgccaatggtgwatctttttgactcctttgattttggagaagttatcattttaattatataaattatcagtttagccaagcaaaactggtcttatctcctggattgtaaggaaggtaaattcttccaatgaagacctttatgcaattggtttaggatggttttatcccttttccctctccacatgctccttagggatacatgtgttatagatgacagg

SEQ ID NO: 190060 - DNA, 487 bp, Homo sapiens
aacttttggctttgttgattttctctttgttgttttgtttactttctattttatttatccctgctctcatatttattattttctttcatctgctagctttgggttcagttcgttttcttttttctagttccttggattgtaaagttaggttgtttgagatctttcttttttaatgtaagcatttatcacaataaatttcttccctggcactgcttttgctgagtcccataagctttgttatgttgtgttttcattttcatttatctctaagtgttttctaaatttccttgtgatttcctctttgattcattagttatttaagaatatgtgcyttaatttccacagatttgttaattttccagttttccttctgcgattgatttttaccatcatcttggtgtggtcaaagaatatactttgcgtgatacctatcttctaaaatctactgaggatttgtgatctaacctatggtttgtcatggagaatg

SEQ ID NO: 190061 - DNA, 615 bp, Homo sapiens
ttctgggtacatgaatgcgaagcacaagatgggaaatagggtgtataggaggtgagaatggaatctttaagtgtagtcagagcatgaaaggctttggatgccatcctcaggagcgtgaattttataamaagctactggagagactacacacggagtgacaggtgagacctccattttagaaaaacttctatggacagaaaatcaattttagaagggtaaaggtgaaacagagagtgaccacttagtaggcaattataaccatctggtcaagtagtaaggagaagaataggaaaagaagggaagtcatgcatcaaagaaataggaaataaaattggtataatgcgatttgacaaacatttcaacttccctaccttatattgatttttctcttctctataaatatgaccccaattttagggatgacagcaggaattaaaataatccctcttttcattcttctttgaggtgggagactgtggtgtttatattgtcttgcctggtgatatacatgcaaaaggcactgggcaccagtggagggcatcttccagggaagctactgttctcctgattaaaaaaggaaaaggacagactcagttaattgatggctattgttca

SEQ ID NO: 190062 - DNA, 594 bp, Homo sapiens
ataaatggtagaggtacaattcaaactgagacctgtctcaatccaaacaccacgttcctaaccactcagctccaactactgtgtcctgttaactgaacatactttgtgttttccaacagccttgcatctgttcacaatgaacaggaatacctatactgacggccaccataacttcaaccaaattcacttcagggctcattttaagtaagatttttaagtacgattttctccacraaaatgtttccaatctctccttctttactttttaccaaatatggagtctccttgccctaatacaaattgcctttggttggtttgttttgtggtgcttatatctgctttgattataactgaaatattactattctcatcacttatactgaaagattctctgtgaaagcagtccctgatccttcctttggctaagggagatgagggggagcttgaagaggaagtgagagttaaatgctaatgatatcactgaataggggtacacactcagagttacttcatcttatcttcacttccatatgctccaaaggattaataatctgagagttcttgccaacagaatgtaggtaagtgtgatgttct

SEQ ID NO: 190063 - DNA, 594 bp, Homo sapiens
ataaatggtagaggtacaattcaaactgagacctgtctcaatccaaacaccacgttcctaaccactcagctccaactactgtgtcctgttaactgaacatactttgtgttttccaacagccttgcatctgttcacaatgaacaggaatacctatactgacggccaccataacttcaaccaaattcacttcagggctcattttaagtaagatttttaagtacgattttctccacgaaaatgtttccaatctctccttctttactttttaccaaatatggagtctccttgccctaatacaaattgcctttggttggtttgttttgtggtgcttatatctgctttgattataaytgaaatattactattctcatcacttatactgaaagattctctgtgaaagcagtccctgatccttcctttggctaagggagatgagggggagcttgaagaggaagtgagagttaaatgctaatgatatcactgaataggggtacacactcagagttacttcatcttatcttcacttccatatgctccaaaggattaataatctgagagttcttgccaacagaatgtaggtaagtgtgatgttct

SEQ ID NO: 190064 - DNA, 603 bp, Homo sapiens
ctagaaacaactagctaatagcttcccacaactttagaaaagctacaaagataaaccaaataacagttgcaayagtggcaagtttaggacttaatctgttgaaggaggtatgacttcctcttatgcatgccatactgtgggtcttttgaactgggagagtattattaaaagagctggacaaaggcagaacagcaagaaacaggtctcagggtcccaggcctgggattaacattatgaccttcaaaaacaaaggtgaaattaaaactttttcaggccaacaatagctgaaagaattcatggccagtagaccagcataagaactgttaaaggaagtttttcaggctgagagaaaataacagaaactcatgtctgtacaaaggaacactggaaatcataaatatgtggacaaatataaaaaatactattcttattttgcaataatttaaaatattagtgatcatataaagcaaaaattataacaatgtaagatttataattatacaagtaaaatgtaagacaagaatagcacaaatgatcaagtgtaagattcttacataatatgtaaagtaaaatattaggaattataagaaaacaactaaaatt

SEQ ID NO: 190065 - DNA, 490 bp, Homo sapiens
aatacactattattaactatagtccctcatgctttacactagatcttttgatttgttcatcttacatagttgatacattgtatcctttgacctacatcttcccttttctcccctgccatcccaaccatggtaatcattgttttattcactatctctatatataagacatatttttatttcacgtataagtgagatcatgcaatatttgttcctttttctatgtctggctaattttacttagcatgtctttcagatccttctgtgttgcatcaagtggaaggatctccttttttaaggctgaataatattccattgtatatctataccacagtttctgcatcctttcacccatcaatggacatctagattctttccacatcttarctattgtgaataattctggaatgaacatgggagtgaagatacctttatgaggtggcagtttcacttattttgggtacgtaccttaaagacatattacagggtcaca

SEQ ID NO: 190066 - DNA, 571 bp, Homo sapiens
gcaatggaaacaacattgactatgaaatctaggagagttcagttttccagtcctggttactagctctgactctgttattgcaggtaagttaggaaacgtatatgtcaaatatggaaacatattccatacacctagcaaaaattccaaagtgtaggcactcaataaatgttgactcagtgtgctaggccatttttacactgctataaagaaatacctgagaataggtaatttataaagataagaggtttaattggcttacaactttgcagactgtacaagtatggcactggcatctgcttggcttcttgggaggkttcggggagcttttactcatggcagaaagtgaagagggagaaggtgtctcacatagtggaagcaggatcaagaaagagagagtgcatggggaggcaccacacacttttaaacgaccaggtctcacgtaaactcagagcaaaagcacacttatcacaaagcaaatggcctaggtcattcttgaaggatccaccccatgatccaaacacttcctacaaagccccacctccaacattggggattatatttcaacatgaga

SEQ ID NO: 190067 - DNA, 645 bp, Homo sapiens
tacagctatttaaaaaaaattctgtaaaaaacgatttccttacsttctgccaattaaaaattagtctcttgcatgatggactcttctgcagcagatttggaacaggacataaattgagccatgatttctacacaggcaatttaagtgggccatatccacaggcaatactgtaaaaatatgcaatttgtgccaggtacgaagcagtgcacagtgtgaacatacaaacctcgattcattggtgttctgaacgtgaaatccctccatcaaacagcactgccatctgctcagaggcaactttcctgcaaacccaccccagtactagagaacaatggaaacggaggcagttgctgggctgtcttttcctagacaaaagactcagtattgccaaaaggagaggctgccctgcagcaaattgctgtggcttcaagtgtccccttcatccagatatcaggaaacatcatgggcctgtggggatcttgaagagatggaagtatccacagttgagaagaagatccttctttaggaggggaggtgtcttctgagaattccacataagtaaagttgaagcacagaaaacacccatagtagcttaatgtctcattataaacatctcgcaagaggccagagtaaataccccatgttgct

SEQ ID NO: 190068 - DNA, 645 bp, Homo sapiens
tacagctatttaaaaaaaattctgtaaaaaacgatttccttaccttctgccaattaaaaattagtctcttgcatgrtggactcttctgcagcagatttggaacaggacataaattgagccatgatttctacacaggcaatttaagtgggccatatccacaggcaatactgtaaaaatatgcaatttgtgccaggtacgaagcagtgcacagtgtgaacatacaaacctcgattcattggtgttctgaacgtgaaatccctccatcaaacagcactgccatctgctcagaggcaactttcctgcaaacccaccccagtactagagaacaatggaaacggaggcagttgctgggctgtcttttcctagacaaaagactcagtattgccaaaaggagaggctgccctgcagcaaattgctgtggcttcaagtgtccccttcatccagatatcaggaaacatcatgggcctgtggggatcttgaagagatggaagtatccacagttgagaagaagatccttctttaggaggggaggtgtcttctgagaattccacataagtaaagttgaagcacagaaaacacccatagtagcttaatgtctcattataaacatctcgcaagaggccagagtaaataccccatgttgct

SEQ ID NO: 190069 - DNA, 559 bp, Homo sapiens
tttaattgccatgaggcgctgaatgcagttaacactcagaggaaaagagccttgtttcttggtttctttgaagactgacaattattttatggaacgacttcatgcattatcaaaacttccatagaaattcaatgagacactgcatagtaaagcaagagcccttcccctttacatagcaaatatctctatatacataccctgtacttctcaaacacaaagaagatcgttggaaaacacacagttatgctcaagggagcctgcagattagttctccagcacctyccatgaccctgctcctgcccttctcatctccacttctcctatcaaagattgaatcactcctactcatctaccatcattgtgccctttatagactctatgaataataaagctattttgttttcattttttattttctttcctacaaaatcgtgtgcttaccaccaaagtcagagattgattttgttttattttcatttgtagtcttgatgtctaacacagtacctagcacaaggcaggcactacacaaaatgtttgctggaagagacacaaatgcata

SEQ ID NO: 190070 - DNA, 441 bp, Homo sapiens
gattggcaggactttattaagttttggcagcacttaggtagtctgggagcttttttatgaggctcgtgcacattaatccaagctcctgttgtcgttaatactgatgagtgaaggyagttaattgaattatgtatgaagcactgctgattaaataatatttcactccccactacagaattcgctctgctggattaacatctactgttgtctctgacactgaatgttatacggacctcttctgaagcatacactttgattctttcccatctgttcaactgatgcagcatctcagttgccactggaaccaactatccttcagctctgacatgaggtcactttggagaactgatatagttatttattagcatccgtgtaaccatgaacagaaatcctcctcagtgcctcaggtgttctaagggcattattatttaaattcacggt

SEQ ID NO: 190071 - DNA, 441 bp, Homo sapiens
gattggcaggactttattaagttttggcagcacttaggtagtctgggagcttttttatgaggctcgtgcacattaatccaagctcctgttgtcgttaatactgatgagtgaaggtagttaattgaattatgtatgaagcactgctgattaaataatatttcactccccactacagaattcgctctgctggattaacatctactgttgtctctgacactgaatgttatacggacctcttctgaagcatacactttgattctttccyatctgttcaactgatgcagcatctcagttgccactggaaccaactatccttcagctctgacatgaggtcactttggagaactgatatagttatttattagcatccgtgtaaccatgaacagaaatcctcctcagtgcctcaggtgttctaagggcattattatttaaattcacggt

SEQ ID NO: 190072 - DNA, 434 bp, Homo sapiens
  misc_feature (1)...(434): n = A,T,C or G
catcagctcctcctggaagtcttccctcacccctttttcactgtgacaaccatcatggctccccacggatgccctccagtttataaagatgcctgtcctgtgggttcccataataccttatcatctccctacaagcaaataccacagtacatygtaagagccagattgcatatgtatttcttttattttaccatatattctttgaaggcaggggctgtgctcactgtttccccgggctccagcatggtccctgactactggtggtaagttagtatctgttaaaagaatgagtagatgaaagctntgtttacctttttaataatttttaggctacaattttgaatagtagatcaaagaaatacaaacaggaatgttcattattttattatttatccaatgatactggagtaggagaagcttcagacagagggatt

SEQ ID NO: 190073 - DNA, 551 bp, Homo sapiens
catgtaacaccatgaatgaatctcaaatacattgcactgagcaaaaacaaaacaaaaacaaaacagattcaaaggttgactattgtatatttccatttatacgactttctaaagaaacagacactatagagacagacaggtagtggccaaaggttaggaaatggggattaatattgaccacagaggggtaatactaggggatcttgaggggtgagtgaactgttctgtatcctgattctggtagtggttatgtgactcagaactatacaccacaaaagagtgaattttattgtacataaataaaaaataaaaacagtgaactgctttgattagcttctacattgtaatctaagattttaaactcaaatttgtatttatgtggcaatgaagggcatgatgatactcaccaagtagttttaggaaaaaatgatttactcagtttaaatatttaccttgaaaacaaacctataaggtgaacacaatctcatttttaaccgyattaaatattagttttcttttgtttttaacttgaactacattgaatatctttt

SEQ ID NO: 190074 - DNA, 582 bp, Homo sapiens
aatcttttctcgttttcaagcaataaactaagtcccctactttttggtcaagggaaagcaaatgaaagttgggaaaatgaacgctggcataaaacatatctctagtgaattcaatcctacarataaagccttccacttcaatatagcaatctctactttggggttataaagcatatgaatacattttaaataagaactcatatctttcccttgctcttttcctcaccaatcctgatttactgtctcttcctctcttctcaactgtaataaatctccactttgagccattattaatgagcaagtttaaaatacccactgctgcaggcttttggtctgtttctgatttgatttatttcatagatggaattggccttaaagttaacccctttgctgatgatttcttcctccattgcagggcctctgactcatagcacatggagggtctttaactagggctgcccattgttaaaggtaagttctcccattgagaactagggctgtcacttgggaacctctaaggaattgcatatatcctatttaacccataatcattaatttgtgcattcatctaaaaaattaatg

SEQ ID NO: 190075 - DNA, 596 bp, Homo sapiens
tctggctttgctttgtttccctcatgtctagggacttgatttacataaaataaatccartgtgaacaatgaatacatacacagaaaataagagttgaataaaagattacttatgtatatgactagacacttcaaaggcttatagtgaaagatgaatcaccaaaggctatatctgaaaagaactccagacccatgattttcttaaaatgaactataatggattctgtaaggctagaaagggttcaagacagaactgtaagacttctcatatggtccactatatacaacagccacctgcttgctattgccattaatttctgccttaattctcttacagatagaaccagatacaacagccaccctcttgctaatgccattaatgtttgccttaattttctcacagataaagtcaagaccaattagtggaaaacacacagtggtaaatttcaactccttgaagaaagtttctaatgatctcatctgtatgatgaaggatcagctacctaggaaggtagttaatttgctccaactagtattagtgaagcttaagttggaggactgcttgaatctagaatcagacgggagagtcccttttgc

SEQ ID NO: 190076 - DNA, 623 bp, Homo sapiens
cacacagtggtatatgatcagtccaccatagtttaagaatatagataaaacacacaaacgtgcacatatttcaagaggccgatatcccaaagtctaggagcagttgcccaaaggcctggagggaggaaatgcccaaagaataaaagattcaacgcataactatgattagagtgcagggctggggtcagggtgttatcgttttaaacaaggatgagatcagtgctggtctgagccatattgaagtctgaggcaaaaggraaaaatcaataagactgatcttgcctttatttaaagttttaaagttttgttcatcctagggtttttggcattaaaacttctgaatttttaagtacattacaagttattttaagcacgttgcaagttatttattttaagtacattacaatgttatttattttgattattgaatgttggtgccttttgaaattgtgcagggagatgggtgcctctcttccccacaccagccaatccctggccctgctagagtgtaaactacctgaagggatgtattaaatgagatctttgaactcatctggcacaagcttaaatcctggctcagatctgatcccagccacatcctgaatacgttaccatgggtaatt

SEQ ID NO: 190077 - DNA, 434 bp, Homo sapiens
atataaaagtgtattattttttcctcaatattgcggttcattatatttttgaaacagttgtgaatggcttttccttaagtaatatctgggctcttttctctagataatttacaggaaaagagaaatataccttagcaaggcaggytaaggaaaattattttaaaactcaaacatatcaggctaaaatattcatgatgtaaaaacaaagcaaacaaaacaaacagataagcaaaaacaaaacgagaagaaaacatgagaataccaatagaagaaaaatatgtaatttggtttggttccagctctggctgtgattaagcatataccatcctccattttccattgattacaaataaataaatataaggagtctatctgaaaattcagaaaagtaaataatgacaggtgaattggggaatgaaatgaaatggaaagta

SEQ ID NO: 190078 - DNA, 563 bp, Homo sapiens
agtctcaggctcaccactaattggcgcatgcattgaaattaaccaaggcagcgtaacaactgctttgataattaaactatgatatagaacaaagctcaggttgacccctgggtggttggtatgtgtgtgtggagcagacaaactagctytacaaaggaattgaaaactaaactaacacagaagccagagtctaaatagagcaggttgaggttagacttatgacaagaaccatgggagactgattacctgctaagatgaaaaaaaaaaaaaaaaaaaggaaagaaaagaaaagaaaaatcttctctagaggattttaacaggaccagagtctaatatataatactcaaatgaccataaggcaatcccaaattactaaaaataaaaaagagcatctcaaaagtcaatcaactgacatcaatccccaaggtgacccatgatgttgaaattattggacaaagattttaaaggagttattgtaactatcctctatgaaaagaaaaaaattcttttaaaatggatggaaagaaatgttgtaaaaaatagaaaatataaacacgaagtaa

SEQ ID NO: 190079 - DNA, 563 bp, Homo sapiens
agtctcaggctcaccactaattggcgcatgcattgaaattaaccaaggcagcgtaacaactgctttgataattaaactatgatatagaacaaagctcaggttgacccctgggtggttggtatgtgtgtgtggagcagacaaactagctctacaaaggaattgaaaactaaactaacacagaagccagagtytaaatagagcaggttgaggttagacttatgacaagaaccatgggagactgattacctgctaagatgaaaaaaaaaaaaaaaaaaaggaaagaaaagaaaagaaaaatcttctctagaggattttaacaggaccagagtctaatatataatactcaaatgaccataaggcaatcccaaattactaaaaataaaaaagagcatctcaaaagtcaatcaactgacatcaatccccaaggtgacccatgatgttgaaattattggacaaagattttaaaggagttattgtaactatcctctatgaaaagaaaaaaattcttttaaaatggatggaaagaaatgttgtaaaaaatagaaaatataaacacgaagtaa

SEQ ID NO: 190080 - DNA, 641 bp, Homo sapiens
aaactgaacaatatgctcccgaatgacttttgggtaaataataaaattaaggcagaattsaagaagttctttgaaaataatgagaacaacgatacaacatactggaatctctgggacacagctaaagcagtatgaagatgaaaatttatagcactaaatgcccacagcaaaacattagaatatctcaaattaacatccaaacttcacaagtgaaagaattaaataatcaagaacaaatgaaccccaaagctggcagaagacaagaaataacaaaaatcagagctgaactgaatgagatcaagacatgaaaatcattcaaaagatcaaagaatccaggagcttttttttgaaaaaaaaaaataataaattaggccactagttagactaataaagtagaaaagagagaagacccaaaaaacacaatgagaaatgacaaaggaattgttcctacttaccccacagaaataaaaacaaacatcagaaactactataagcacttctatactctcaaactagaaagcctagaagagatggataaattcctgtacatatacatcctcccaagactgagccaggaagaaatttatttcctgaacagaccaataacaagtttcaaaattgaatcagcaataaataaccca

SEQ ID NO: 190081 - DNA, 563 bp, Homo sapiens
aacacagatgacagaaacaattggaaatatatctcatgttcatggtttggaagaattaatattatcaaaatgaccatactaccagatgtggttttgctgtgtcctcacccaaatgtcatgtcaaattgtaattcccaatgttgggggaagaacctggtggaaggtaaccggatcataggggcagatatcaccctctctgttctcatgatagtgagtgagttctcaaacaatctggttgtttaaaagtatgtggcacttcctccttcgctctctctcctgctggccatgtgaatacatacttgcttccccttcaccttctgccataattgtgagtttcctgaggcctcctagctgtgcttcgtgtacagcctgtggaactgtgaatcaattagatctcctttctttataaataacccagtctcaagtggttctttatagcagtgtgagaacagaataatacagaaaattggtaccagagaagtgrggcattgctattaaagatatctgaaaatgtaaaagtgactttggaactaggtaatgagtagagcttggaagtttgaagg

SEQ ID NO: 190082 - DNA, 527 bp, Homo sapiens
ctcattctaacaaccctgaaaatactttctaaactccctgacaatgaatcctgctaaaaaggatgcttttctctcaagaatggcaaaaataaaataaaatggaagcaaacataaataaaatagctagaattgctaccactcatagtgaggagtcttcttttccaaaatgtgtagctagaatcataaagccctacaaaattgtacagcaattctgtcacygtattgacaaaaaagggaaaaaagcaaaccaacaattgcggtgcatagcaacagtaagagatggaaaaaaatctaggataattgcaaaacgatatctggttcatgattgcaaggtctctgttgaaaagtgctccaagttataatagctacaaaattcagaataactctgaaaactagaaaaaaatttcacaagtacggaaattctaagggctgaatccagctgaatagattctataacatcctatgttaatgtcaccagtacctcccattccttgcagcaaatattatgggctccattcttcccttag

SEQ ID NO: 190083 - DNA, 568 bp, Homo sapiens
cccaaatagttttatcctttggggaaaatacacatggcagccggtttgatgtgtatttagtgaatctaccrgacaccttccgttcgctgtagtatgaaaggtctttagggttctggtcgacctaaatcagggctttttttttttttttttttcttgaaacagggtctcattttcattgcctaggctggctcactgcagtctcgacttcctgagctcaggtgatccgcctacctcagcctcccgagttgctggaactacaggcgcatgccaccgtgcctggctaatttttcatatttttttgtggagacggggttttcctgtgttgtccaggttggtcttgaactcctgggctcaagtgatctaccctctgcagcctcccaaagtggtgagattacaggtgccttgtactcctagcaggggcggattggttgtaatccaggagccattgctccctgcagggtttcattcttaccagatcatacactcaatggacttaaaaaaattcttaaatatcttttgaatagtcctcagatccatgccctctgtcacattcaaatccccacagcac

SEQ ID NO: 190084 - DNA, 568 bp, Homo sapiens
cccaaatagttttatcctttggggaaaatacacatggcagccggtttgatgtgtatttagtgaatctaccagacaccttccgttcgctgtagtatgaaaggtctttagggttctggtcgacctaaatcagggctttttttttttttttttttcttgaaacagggtctcattttcattgcctaggctggctcactgcagtctcgacttcctgagctcargtgatccgcctacctcagcctcccgagttgctggaactacaggcgcatgccaccgtgcctggctaatttttcatatttttttgtggagacggggttttcctgtgttgtccaggttggtcttgaactcctgggctcaagtgatctaccctctgcagcctcccaaagtggtgagattacaggtgccttgtactcctagcaggggcggattggttgtaatccaggagccattgctccctgcagggtttcattcttaccagatcatacactcaatggacttaaaaaaattcttaaatatcttttgaatagtcctcagatccatgccctctgtcacattcaaatccccacagcac

SEQ ID NO: 190085 - DNA, 613 bp, Homo sapiens
tatttataaagagatgcttcttctgagctggtaagtaagctataggaattatctaatattatctaatgcatggtccatattcataccccaaagtacttacaacaacatttgcactactccaaactgtacactaatggtgactaatagagcctagaaacattcctacgaccagtttgggtattctctrggagtatgtttcagggtaaaactcttgtctcttcattacatctcttcctctgtaagattgggtgattggaaaatagatattataaatgagcattaatatttttaaaatattttctatcacaactaacatacaatttctagtgaaatatcaccttgagtatttgaggatgcagtcacatgaataatagaaacaaagttaaaatcattaaatcaatctcaaaatttttaggttggctaatttgaggccttaaatccatctcaacatttttatgttggatactctggggcctgtttgtgccactgcacaagaaaaatggcttagtttggcatgtgggatgagggggagaaaagcatccaagaagagaaattggataaagttagatgttttgtgattgtagctactgaacatgttttagactggcagaat

SEQ ID NO: 190086 - DNA, 459 bp, Homo sapiens
atgattttacctcacgttgataaagaaaactctatacactgtactgttggaactaatgaacaaattcagtaaagttgcagaattacaaaatcgacatacaataataggtagtattttttatgccaacagcaaaatattttttttaaaaagaaggtaatcccatttacaatagctaccaagaaaaaaaaaagaagtaaatttaaccaaggaggtcaaatatttctacaataaaaactgtaaaacattgataaaagaaactatgaacarcaataaatgaaaagatatctcatgttcatggattggaagaattaatattgttaaaatgtccacacaacccaaagtgatctatacattcaatgaaatccctatcaaatcaccattgagattcttcacagaaataaaaaaactcaatcctaaaatttgtatagaatcacaaaaaaacttgaagtaccaaaacaa

SEQ ID NO: 190087 - DNA, 555 bp, Homo sapiens
gaggaaaggctttcagcttttccctattcagtataatactaactgtgggtctgtcatatatggcttttattatgttgaagtatatttcttcaatacccagtgttttgaggattttatcatgaaggaatgttaaatattattacatgctttttcatcatcaattgaaatggtcatatggcttttgtccttctgttgatatgatgtatcacactgattgatttgtatatgatgaatcatccttacatcccaggaataaatcccacttggtcacaatgaattatcttttaaatatattgttgaattcaattttctaatattttgttgagaatttttgcatcaatattaatcagagatattggcctatagttttctttcctttgatgtgtctctctctggttttggtatcagggtaatacaggcctcatagaatgagtctgaaagtatygcctcctcctctattttgtggattcgtttcagtaggaatggagttagttcttgtttaaatgtctgacaaaattcatcagtgaattatgccagtgaattcatcagttccta

SEQ ID NO: 190088 - DNA, 555 bp, Homo sapiens
gaggaaaggctttcagcttttccctattcagtataatactaactgtgggtctgtcatatatggcttttattatgttgaagtatatttcttcaatacccagtgttttgaggattttatcatgaaggaatgttaaatattattacatgctttttcatcatcaattgaaatggtcatatggcttttgtccttctgttgatatgatgtatcacactgattgatttgtatatgatgaatcatccttacatcccaggaataaatcccacttggtcacaatgaattatcttttaaatatattgttgaattcaattttctaatattttgttgagaatttttgcatcaatattaatcagagatattggcctatagttttctttcctttgatgtgtctctctctggttttggtatcagggtaatacaggcctcatagaatgagtctgaaagtatcgcctcctcctctattttgtggaytcgtttcagtaggaatggagttagttcttgtttaaatgtctgacaaaattcatcagtgaattatgccagtgaattcatcagttccta

SEQ ID NO: 190089 - DNA, 621 bp, Homo sapiens
tatctttgaccaacatttacaacagtagatactgatagaactcaagaacctgtgattgatttccctatgagtaacatgacttagtttccaacttgtagttttatgtataaaaagaggtccaattgaacaaactagagacagctgtcaactcttatgtagatatgatcagaaagctgggaatatgtgaataaaatatgatcatggcttaacccaaaatctaagtggatagaaaggatgattatcagggaaaaagaactgggaagaagcatcaacatgtatttactagaaataccaagaaatgagaaaaaaaatcttttttatcacatacatgaaagtaatgaaactggtttaaaaaccagcatattattagacatgtatttttcataatgaaggcttttatggtagcatattagtaaaagctcagatttatggaataggtattatgtaaaattattgaagtcaactgaaggttgagttatagacaagtatttatagaaagccccaaattaaaataattgccagaactattaaccaagatcaaaaytgaaatccatgtttacagaatataaccaagtgtccaagtatagaggtggcaggtgaatattacacagagcaggcact

SEQ ID NO: 190090 - DNA, 596 bp, Homo sapiens
tgtgagttttgaaatattaatgatggcaaagcttcttattgtttaatcaattttagatcctatgattttaatgatcttgcatgttttcaaatacctgaagagtcaagcatagtttcaacatccataaccactgaagttacttaacatgaaaccatttctccctcatatatcttctctgtaaattttcatttattttagcgggccaaatattaatatagagggatatgtattagacatgtgatgcacatagataactgtgaaatagttatttattttattgcctatgtaggccagaagggaagaaaacatgacccaattataagagtgcataggcatcaacactttataacaataaacttacaaaaaaatatggctcataaggtctaaaaggaaagcctactgattttgaaaatagtgatcacataggtaggtagcatatgttcggttaatctggaaattaatcttgaaagatatggctttgtgggtgaagtcatagttcatgagttctcaagagtaagttttgctacatagaaaaaccaatgagtgatacatytgcaaattaaataaatagataaataaataaatcattttgaaat

SEQ ID NO: 190091 - DNA, 577 bp, Homo sapiens
gtgctgacactttgcatggaatggtggcaggaagggactgtggaagttgttctaggaytctagtaatggttggtttattgatctggatgctggtgactgacttcatctgttaagtttgtaaaaatccatcaagctttattaatgtttgtatgtgtatgtgtgtgtattgtcttttcacatattacacttcaataacaaattatgaaagggaatagtgtaatagatgccagaaaaaagcacatgctgtcctagggaagcagtaatgattgcccaaataaaggcttgaatttaattgagtgaatgcaatttgaaaaacttacattgctcttttgagaaccaattttgtgttcaaaaaaatgataaacatgaatcttgttactcaaattttataagatgctgtgaaagtgcaaattaatcatttaattttgatttcattaatgtccagctatatagtctacaccaactttctcattaaggataactaaaaatattggaataaatgtttaaactttttcttaaaatataaaaaatacaaaaaatatcaacagcaaaaaagaagaaaaatcttacataaaca

SEQ ID NO: 190092 - DNA, 499 bp, Homo sapiens
gatgctgacaggtttctattaatttcataacaaggaattccatgcagttgacaaacacattttgaaggttgattgttggcagagcaccatcatagccaagtgaatgtgatattaaccaagccatagttcatctggagcccattactgccttcttcmtttctcatttgtcattgagaggacaaagtttccaccaggcagagggagttggggaggcaggggttggcaagggcacaggctttgggattctggctccactgaccagctgtggaaagttgggccagaaacctaatctttctgcctccaagtttacacccctgtatgttgtatttgattcttatttgcagtgagcgctcatgaaatgcttataatgtatcctggtacaaagtaagagctcaggaaactctagttgtttttaatcctggcagcacttattttttagccataaagcatctatttgtgtttcaagagtgaacctcctcgttgtatattattctcaaga

SEQ ID NO: 190093 - DNA, 636 bp, Homo sapiens
tttggttgcagcattgtttgtgttattaaaaatccataaacaactaagtattcagccagagaaaaatattgaaataatttatgttatatccatgcaatggaatactgcagaggagagagcttaaaactgagcaatacatgagaatattaaaaagtatacaaacatacttttaggaaaaaagcattttgggggcagtctatagcatgaatgatactgtgttaaaaatagttatatatttacatccatttgcttgtatagtcatagwaaaattctcaaagcatgtatgagaaactggtgtttaccattgaaagtagaatgtatgtggagtgagtacttttccatttcactttatgtaccctctttgaattttaaaacatgggcatatattgcttttacaacttaaaaaaagttatttttaaaaatagtcaataaaaaattcctttgttccctttactgccatatattagtttttttaaaaaattagtccttcttgcaaatgtaatcctaagccttgatgtaatatttttgagtaattgagccaactatcatctttagttaaaacaggacgtgtatcaactcacggccaaagctctaatttgctcccagggagcacagaccaaaatgactaaggaaata

SEQ ID NO: 190094 - DNA, 582 bp, Homo sapiens
atatttactcttaaaattttggttataaccttttatacttttatatttatgtttgcctttgttgaaaaacaatacatcctttatcaactgcttaactgtccttgacttatgctacgtaatacagaaaagaagaatggcactacyatcccagatcatcaactcccccaagtgactggtctgagataaattagaagaacacatagaagccccagagagccttcagaagagaaaataatatgcataagctgcctcagtgaagtctttagttgaaacaaaacaaaaaaattctgattatgcatgtttaggagtcacacagcaggttgggatatttacatgaagactcataaacaaaatattttggttggagaaaaggtagggtgttttagtatgtataattctgaccaatttacttgctatttgtcaagaaccgtacagagcctgagattttatcctacttgcaagctaataagcttgctacagttttatggatgctggcagaagacacaggatgcctggatcagagacaaaggactttactagtcatggcccagcaagaaataccagtttcctgtttgtgtcagt

SEQ ID NO: 190095 - DNA, 582 bp, Homo sapiens
atatttactcttaaaattttggttataaccttttatacttttatatttatgtttgcctttgttgaaaaacaatacatcctttatcaactgcttaactgtccttgacttatgctacgtaatacagaaaagaagaatggcactaccatcccagatcatcaactcccccaagtgactggtctgagataaattagaagaacacatagaagccccagagagccttcagaagagaaaataatatgcataagctgcctcagtgaagtctttagttgaaacaaaacaaaaaaattctgattatgcatgtttaggagtcacacagcaggttgggatatttacatgaagactcataaacaaaatattttggttggagaaaaggtagggtgttttagtatgtataattctgaccaatttacttgctatttgtcaagaacygtacagagcctgagattttatcctacttgcaagctaataagcttgctacagttttatggatgctggcagaagacacaggatgcctggatcagagacaaaggactttactagtcatggcccagcaagaaataccagtttcctgtttgtgtcagt

SEQ ID NO: 190096 - DNA, 582 bp, Homo sapiens
atatttactcttaaaattttggttataaccttttatacttttatatttatgtttgcctttgttgaaaaacaatacatcctttatcaactgcttaactgtccttgacttatgctacgtaatacagaaaagaagaatggcactaccatcccagatcatcaactcccccaagtgactggtctgagataaattagaagaacacatagaagccccagagagccttcagaagagaaaataatatgcataagctgcctcagtgaagtctttagttgaaacaaaacaaaaaaattctgattatgcatgtttaggagtcacacagcaggttgggatatttacatgaagactcataaacaaaatattttggttggagaaaaggtagggtgttttagtatgtataattctgaccaatttacttgctatttgtcaagaaccgtacagagcctgagattttatcctacttgcaagctaataagctygctacagttttatggatgctggcagaagacacaggatgcctggatcagagacaaaggactttactagtcatggcccagcaagaaataccagtttcctgtttgtgtcagt

SEQ ID NO: 190097 - DNA, 410 bp, Homo sapiens
gttgctattgatctcagaaccttgagtagagaaaggttaccatttccattgactgttttggaaagaaaagcaaaaacgtgagaatactgatctacatgaccctccgtttaaaattaagaaggaaatctgcctccctgggctcatgcttgctttcttgcttgctttctttctttgctttcttttctttcttcctttctttgttttgagcyaacaagctctgagaactataatatttggtttcagtttttctacatgtgtatgtctgaattctacttttctttttcttttctcttctttgaaccatgcaagacatttgcttgtgtgaaaaaatcataaatttaataagaaaagaaaagaggtatgtaagaaaagctgggccctttattcaccaggtattattggcacacagc

SEQ ID NO: 190098 - DNA, 557 bp, Homo sapiens
ttttctaggcctttcttgcctcctgtgcccctttgaagcttactttagatttcagccacataaaagaagaaggagaggggtattccattccttcacttcacgatgcaagcttcttttaaccctgtctttacacgggattggttgcatagatggtgaggggcaagaatcaagggtgtgttcatgtctcaagcctggccttgacactgtgtttaacttcagacaagtcatttaacttccaggaamcttagatttcccatctgtcagggcaaaacaacttatgagctgaaacattccataagaccacaatattagaattggaaaggaccgtaataatttaacatatattttcaaatatgtaaataaaagcttcagaataaaggaaatatgataattctcactttattaattcatcagctgtatctcctcactgatgagaactttgtgattccatcacatatttcagccaagattaaatagtcaagggctgtcaggtgggctcagcttcctaagacttcattactattaaaaatacactttgaagaattataaataattaa

SEQ ID NO: 190099 - DNA, 597 bp, Homo sapiens
tgcatcactcaatataaaacctgccaaaagacrtgcatacggccatagaaacaaagccaaaagaccctacctagcattctctatagtcacaccccctaaggactggggatatggagggaaatggaaatttaaaaaccaataatattataaggaaaaaaagaaaaagaaaaaaatcctgcctgcatgaaagtaattacaaaaattagaagtactggcatcttcagataagaagaaacagaaaaatctgaatgtagtgacactactaaaggatcataccagctctccagcaatggtctataaccaaaatggaaactcagaaatgacagagagaattcaaagcatggattgcaaggaagttcaatgagatccaagataaggtggaaaatcaacacagagaaacttctaaattaatccaggaaatgaaggaacaaataaacatcttaaaaagaaatcagtcaatcatctggaattgaagatctcacttatggaatttcaaaatacaactgaaagctttatcaatagactagaccaagcagaagaaagaactgtggagcttgaagactggtcttttgaatcagataaaaataaagaaaaaag

SEQ ID NO: 190100 - DNA, 383 bp, Homo sapiens
agattgtgcttctatttgctttacaggtattaactcatttagttcccaaacaactctataagttttttttttttgttagccctattttacagatgaaaaaacagasgcagtaaagaagcataaggagagtttcatgggaatttggatgaggatgcaattcttcctgggaagttaggggagcaagtgttttaggggaaagatatgtgaaaaaggtgaccttccagctagtgttgaggcgagaggcccaggaaaaaaaaaatggctttgtagtggggaaaaatggcatctgcaaagcatctctgaaagacctttgtgtgtcctgtgtggctgaagcactgtgcaaatatgtggaggttaaggaaagggaagctgtggttgggttg

SEQ ID NO: 190101 - DNA, 618 bp, Homo sapiens
tgtgggacctgcagtttgattgaagacccagatcaaaataaatcaatacaaatgctttggtttattttttcctccattttcacttaagtactagcctctaatacaatgaaaagcaggcacaaagcatattagaaaggaaataagacaaatggtctcggaagtaataggaaggactgcatgtgttgcatgccacttattttaaatttaccagagccttgctatagagccatgtgggaaggcatgaagatttgcatatagagacttcactggaggggattctttttattttttgttttggagatggaatctcactctgtcgcccaggctggagtgcagtggcacgatcttggctaactgcaacctccacatccygggttcaagtgattctcctccctcagcctcccaagtggctgggattacaggcgatcaccaccacgcctggctaatttttgtatttttagtagagacatggtttcaccatgtcggccaggctggtcttgaactcctgatgtcaggtgacccacctgccttggcctcccaaagtgctgggattacaggtgtgagccactgcacccggcctcactggaggggattcttagaggaaatattgagaatacc

SEQ ID NO: 190102 - DNA, 594 bp, Homo sapiens
gtgtccatcaacagctgagcagataaagaaaagggcctgtttccctgaggttgcggtgcagtggggctgtctctactccacccacaggcagaactccaggcattcagagcacatgcttgcctggaagctttcatagattmatttcttatttgagttgtccatattatagcttctagttccatctctcctttccctgtccaatcatctccagatggaacgaaaaaaaggaaggggattatgttcatagaagtttaaggatgctgctttagcagaggaatttaccttccatttattccttgatgcctaaaatcactaaaatcttctttcaattgaatgggttgtctctggatggcagtagcatcaggttatcagtgtaaaacagcattttccaattctccctcctagtgcagccaggcagaagacactgattgagaagaggtgagggaaagttgggtgcttgtcaagggagggctggaagtaaactacttcagaaggaggacagaagttgataagggagctggacagtagctaactgtgagtgacccttcctccagtcaagcctcctttctttccgtctctgatgatactgccaca

SEQ ID NO: 190103 - DNA, 390 bp, Homo sapiens
gaattcctggcaccactacttctaggtgggtagggaatcagaaagaagggtgttggggaayaattgaatataagcagggggttccagaagttctgtgtgggctctggagctgtcattatttgggagatgagcctgtgggctcatcttaaggcaaaacaaggctactgttttcacttcgattctttgcttacctggagtggatttgagtggctgaagacattatggaaagacatgaagcctcccttctctctcccaaaataaactactccctctttggtgaaacaactgaaatcaggaggacagaccaggagcactacagagtaccacaggagtgctacaaagcaatgtacccttcttaatgtatcagagagggagcactgcaagttgtag

SEQ ID NO: 190104 - DNA, 419 bp, Homo sapiens
ttaactgctatgattttgtaatatgttttcagtacctagcaaggttagctgcctatcccacctaaattactgtttttaaaaatcttatacagtctcacctgtgtgctctttcaaatgaccatcaaaaaagaaaaacattaacacccctgaaaattcaccagaagcaaaattaagaaaagggtgtaatgacaagtmacagacttcaaaacatggctattgaggaaggaaacaaaagattctgccagagcatggcaaggcttctaatatcactgtagcctcccacccaccaagactatactaaaaagaagaggattggacaaattcctgtgagttctcctcaacctggggcaaagaagactcaacaggtaagtaagtatcccaaggaaaagtctagaaaaaacctgtcagagtacagactc

SEQ ID NO: 190105 - DNA, 451 bp, Homo sapiens
acatgtgaacttgagttcatcaaatgccagagcccagcttctgggcacctatgcaagccacttcccatctaggttccttctaggttcatcaatctcttggccaacaaggatctgtaagagattccactgtgtccatttctcctgcatcaggaccagatcccacacccagtactgggcaaagaaaataagtgtaagctaagtcaagcatgcactctgtctcttcaaggtgttatccacttcaaagtttaattctccatatartgtttctacctgtgtccctcaaagcttccccaggcactagctcccacagttccttcctatttgaacatccaccctaatacccaaagcatttaaagctctaggggatcttgatgatactccagcccaatacagtagaaatactttccccaaaaccagtgttcagactgtgacctaaaagcagacatttaga

SEQ ID NO: 190106 - DNA, 556 bp, Homo sapiens
aactaagtcctggtaacatctcatggtttgagttccttgatctcgctctgactctagggaacttygcaattacaagctttttgtcttagctattatgaattgggttttctgtttctcacaaaggtcaaaactatgacttccctgaattcagttgcactcctgtctgtgagagatctctatcgacttccagctatgaagcttgagtaccttctcttgcaacaatcaagagtcataattcaggacctttctgctttctattccataagatataatagaaagtgtaatagaaagaagtagatgagaacagtctaatatttactctgtactaggcactgtacaaggcactttacttcattacacagtcagttctgctgctatagtacaacatacacatttctaaaaattactgcattatacaaaatcatgcaataaaaactacagagtttatggggaaatgaggttaggggcacaccattcaaaaacttcatcagtgacacatttttttaaagacaggaacctcacataaaaatgttgaaagttgggcatttgggttggt

SEQ ID NO: 190107 - DNA, 556 bp, Homo sapiens
aactaagtcctggtaacatctcatggtttgagttccttgatctcgctctgactctagggaactttgcaattacaagctttttgtcttagctattatgaattgggttttctgtttctcacaaaggtcaaaactatgacttccctgaattcagttgcactcctgtctgtgagagatctctatcgacttccagctatgaagcttgagtaccttctcttgcaacaatcaagagtcataattcaggacctttctgctttctattccataagatataatagaaagtgtaatagaaagaagtagatgagaacagtctaatatttactctgtactaggcactgtacaaggcactttacttcattacayagtcagttctgctgctatagtacaacatacacatttctaaaaattactgcattatacaaaatcatgcaataaaaactacagagtttatggggaaatgaggttaggggcacaccattcaaaaacttcatcagtgacacatttttttaaagacaggaacctcacataaaaatgttgaaagttgggcatttgggttggt

SEQ ID NO: 190108 - DNA, 590 bp, Homo sapiens
atcgacttccagctatgaagcttgagtaccttctcttgcaacaatcaagagtcataattcaggacctttctgctttctattccataagatataatagaaagtgtaatagaaagaagtagatgagaacagtctaatatttactctgtactaggcactgtacaaggcactttacttcattacacagtcagttctgctgctatagtacaacatacacatttctaaaaattactgcattatacaaaatcatgcaataaaaactacagagtttatggggaaatgaggttaggggcacaccattcaaaaacttcatcagtgacacatttttttaaagacaggaacctcacataaaaatgttgaaagttgggcatttgggttggttcctggataaagaaaatgtggcacatatacaccatggaatactatgcagccctaagaaagaagagttcgtgtccttttcagggacatggatgatgctggaaaccatcattctcagcaaactgacacaggaacagaaaaccaaacacctcatgttctcactcataagtggsaattgaaccatgagaatgcactgacacagtgagggaaacatc

SEQ ID NO: 190109 - DNA, 620 bp, Homo sapiens
tactgatttcctttctttggggtatatamccagtaatgggattgttgaagcatgtggtagctctatatatctactaggtgcccacaaaaactaaaaataaaaaaaattttaaaaggagagaaatgggacctagcttggaaggttatatctagggaaggtctatgtagaagacctcaattgcatttgcatccattcctcagtcttctagtaatagcacctttactttccttcagggaaggactcgtcccccactcacactccatgtagttttgaagtgttgacacccccagctggctccagaacatgatctaatcctgaccgatcagagaatttcaccaccatctgcagacacagtgattgattcaaggatggtcatatgaccccagctgttccaacgaccctctatgccataatttatctataggaagaagctcttctccatggggattgctgagctgaggggcaaaactgctgaaggcttttgatatggtttggctgtgtccccacccaaatctcatcttgaattgcaactcccataattcccaaatgttgtgggagggacccggtaggagataattgaatcatggaggcagtttcccccatactgttctcatggtaag

SEQ ID NO: 190110 - DNA, 620 bp, Homo sapiens
tactgatttcctttctttggggtatatacccagtaatgggattgttgaagcatgtggtagctctatatatctactaggtgcccacaaaaactaaaaataaaaaaaattttaaaaggagagaaatgggacctagcttggaaggttatatctagggaaggtctatgtagaagacctcaattgcatttgcatccattcctcagtcttctagtaatagcacctttactttccttcagggaaggactcgtcccccactcacamtccatgtagttttgaagtgttgacacccccagctggctccagaacatgatctaatcctgaccgatcagagaatttcaccaccatctgcagacacagtgattgattcaaggatggtcatatgaccccagctgttccaacgaccctctatgccataatttatctataggaagaagctcttctccatggggattgctgagctgaggggcaaaactgctgaaggcttttgatatggtttggctgtgtccccacccaaatctcatcttgaattgcaactcccataattcccaaatgttgtgggagggacccggtaggagataattgaatcatggaggcagtttcccccatactgttctcatggtaag

SEQ ID NO: 190111 - DNA, 620 bp, Homo sapiens
tactgatttcctttctttggggtatatacccagtaatgggattgttgaagcatgtggtagctctatatatctactaggtgcccacaaaaactaaaaataaaaaaaattttaaaaggagagaaatgggacctagcttggaaggttatatctagggaaggtctatgtagaagacctcaattgcatttgcatccattcctcagtcttctagtaatagcacctttactttccttcagggaaggactcgtcccccactcacactccatgtagttttgaagtgttgacacccccagctggctccagaacatgatctaatcctgaccgatcagagaatttcaccaccatctgcagacacagtgattgattcaaggatgrtcatatgaccccagctgttccaacgaccctctatgccataatttatctataggaagaagctcttctccatggggattgctgagctgaggggcaaaactgctgaaggcttttgatatggtttggctgtgtccccacccaaatctcatcttgaattgcaactcccataattcccaaatgttgtgggagggacccggtaggagataattgaatcatggaggcagtttcccccatactgttctcatggtaag

SEQ ID NO: 190112 - DNA, 463 bp, Homo sapiens
tattagcactcttgctttccccactgcctttcctctcaagccacattaaaaatttgctcacatctgccctgatcaagatttctaagacttaaatgtggcttgmaaccataatcaagtcttcgcttttatttcccatagattaattctagcatttgaaaacaaaattgcttctacacacatactattatgatgaaacaagtaatgtttactgaataccattctcttcagctatgatatcaaaaacctcattttgacagaatttacatgatttggtttatactccttgatgaaaattaagtcgagttttggtttgtaaaatctctggatgttgttcctcttgtactctgtgtgtggtggggaagggtgttttcctgcccttccaaatgcattttttcttatgaaaaagtaacatttttcttctttactgtattcctagcactgcccactctactctacccatttt

SEQ ID NO: 190113 - DNA, 514 bp, Homo sapiens
agcagtgatgctcattgtattagtctcttctctcactgccagtaaagacatactcaacactgggtaattacaaaggaaagaaatttaatggactcacagttctacatggctggaaggccatacaatcatggtggaaggcaaggaggagcaagtcacatcttacatggtggcaggcaaaacagagcttctgcagtggaattcccctttataaaaccatcagatgtcatgacatattcactatcataagagcagtatgggggaaactgtccccataattcaattatctccacctggccccacccttgacatgtggggattattacaattcaaggggaatttgggtgggtcacagccaaaccatawcacccatcaactggcatctgcacccacacactctgactttccactagaaaatatgaactttgcagctactttgagatactctaatgcaggtatctccactgctgcatttgtcctcattccctgttttctattccagggcaaagcttaacca

SEQ ID NO: 190114 - DNA, 514 bp, Homo sapiens
agcagtgatgctcattgtattagtctcttctctcactgccagtaaagacatactcaacactgggtaattacaaaggaaagaaatttaatggactcacagttctacatggctggaaggccatacaatcatggtggaaggcaaggaggagcaagtcacatcttacatggtggcaggcaaaacagagcttctgcagtggaattcccctttataaaaccatcagatgtcatgacatattcactatcataagagcagtatgggggaaactgtccccataattcaattatctccacctggccccacccttgacatgtggggattattacaattcaaggggaatttgggtgggtcacagccaaaccatatcacccatcaactggcatctgcacccacacactctgaytttccactagaaaatatgaactttgcagctactttgagatactctaatgcaggtatctccactgctgcatttgtcctcattccctgttttctattccagggcaaagcttaacca

SEQ ID NO: 190115 - DNA, 572 bp, Homo sapiens
ttttctggatttattatagagtaatagtatagttttaaaaacttactgagatacatggaagtctaggatattaagataaacattctcaggttattttggtcaaaactttataggagaattttatgagctggctgtgatccattgttcaggaaccttccatttatttaatggttatcagaggatccatatatagccagaaaatrccactcagtataaagttaatttttattttctgtttattatttcactcatcattctacaaaggtttgctatacaaatctttattttatatgctgtgtaagacaaaggtgaatgaagttcatctttgaagactgctcaatcctgaagcacagatgacaaatactcagtccttagcagtttccagcctgtctcatattctaatggctaattaatagccacatctctcactgatcctgaatggaaaatcagaatcctattcagcaatacaagaactcacaacgaactgatcacataggctgctccaggaggaacttactggcaagccttacccccatactttagaagaggcccacggactaaggtgccttgtt

SEQ ID NO: 190116 - DNA, 614 bp, Homo sapiens
tcatcaaactgtagttacaaaacataagcacaaacataaaattattaagaatttcgagactgcaatagtatagcatcaaaccaagtgtggggctcttctgcaggctaaagcgtgcccagttgcacaggtggcacacccatgaaactggtcctggatttcgcaggaagaatacccagcacagaatatagcaacttggtcaacccagccactcatttggacaaattatccgtaataaaaagcagtgagcccatcctcttgtatcttcaaagttcacttctaaccggaacacgtatacctatgtatcaaacctgaatgttgtgcacatgtaccctagaacttaaagtataatttaaaaaacaagaaaaaaaagatcctagtgattacttacatcagctgcatctgctgatgaatcaaaagcaaactatttttcctgaatgggggctgaattctgccagtcctccagcatattctgcctatttgcttcaaagaaaaattttcataaactcagttctcaaacttcattctttcagaagcatyttctgagtaaggagtaagaagtaagaagtctcaaagtagatccaactctcctggatttaattcttcataaggccttt

SEQ ID NO: 190117 - DNA, 614 bp, Homo sapiens
tcatcaaactgtagttacaaaacataagcacaaacataaaattattaagaatttcgagactgcaatagtatagcatcaaaccaagtgtggggctcttctgcaggctaaagcgtgcccagttgcacaggtggcacacccatgaaactggtcctggatttcgcaggaagaatacccagcacagaatatagcaacttggtcaacccagccactcatttggacaaattatccgtaataaaaagcagtgagcccatcctcttgtatcttcaaagttcacttctaaccggaacacgtatacctatgtatcaaacctgaatgttgtgcacatgtaccctagaacttaaagtataatttaaaaaacaagaaaaaaaagatcctagtgattacttacatcagctgcatctgctgatgaatcaaaagcaaactatttttcctgaatgggggctgaattctgccagtcctccagcatattctgcctatttgcttcaaagaaaaattttcataaactcagttctcaaacttcattctttcagaagcattttctgagtaaggagtaagaartaagaagtctcaaagtagatccaactctcctggatttaattcttcataaggccttt

SEQ ID NO: 190118 - DNA, 588 bp, Homo sapiens
attttccagaggagcataagcaataggatatgtggatatataaaaaggagtttattagggagaattggcttacatgattataaggcgagttcccacaataggccacctgtgagccrgagaaggagagaagctggtaacttgactaatttcaaaagcctcaaaactagggaagcctacagtgagggccttagtcaatggctgaaggcccaagagcctctgggagtgcaagcgtcagagttcaaaatccaaagaacctggagtctgatatccaagggcaagagaagaggaagcaaacatctggcatgggaagacagagagaaaggattttcagcaagctgcctaccctcttcttctgcctgcttctttctagctgggctggcagccgaatggaatgtgcccacccacactgagggtgggtcttcttcttccagcccactagcgtaaatgtcaatcttctctggcaacatccttacagacacaccagaaacaatgcttcatcagccatctatgcatccctcaatccaatcaagttgacacctaatattaaccatcgcagtcaccaagttccctgcctcctgtaagtggtaa

SEQ ID NO: 190119 - DNA, 573 bp, Homo sapiens
gaggacacaatgccttatgtcatgggttgaattattccctccccccaaataatttgatgtaccaaatcccagtacccatgaatgtgacttcatttgaaaatagggtgtttgtagacataatcaagttaagatgaggtgatgaacataggccctaatccaatatgactagtgtccttatgaaaacagggaaatttggacacagacacacagggagatatcatctggtgacagaagcagaaattgaagtcatcgaacttcaagccatggaacaccaaggattaccagcagccatcagaatctaaaaaaaaattcaagaaaggttctcctctgcagctttcagaaggagcagggccctgccaacactttaatttttgatttctagcctccagcactatgaaacaawaaacttctgcagtttgaaagcacctagcttgtggtactttgttctaacagtcccagaaatatgaatgcaccttgtcttcaagaactgctactacacagagatttgtcgatcaccagctccatgccagacaccaggttatttctgtgcatgcacaggcaaataaaatgcag

SEQ ID NO: 190120 - DNA, 474 bp, Homo sapiens
gctactacacagagatttgtcgatcaccagctccatgccagacaccaggttatttctgtgcatgcacaggcaaataaaatgcagacgctttcctgaagaagtgtgcacactgtacaccactgagatgtttggcagagctggacttggtagcagatggagatcctaaagacagcctctttccctgcagttgtagcacattttaaaataacatttgaattgtaaacctcttcccagggttccaagatattttcagaagatgtaaatttagagtgakcaaacctaacaagagacagttacccacactgcagctttcaggtcttctatttattaaggaactatttctgtaggctaaaggattaagagcgggaacagtcaatcatttcttctatatttgctactttgaaatctcctatatatctctgaaaacaagaaatctgtgtagtcatcagtctgtatttttgttggcaattattt

SEQ ID NO: 190121 - DNA, 491 bp, Homo sapiens
agaaattgttgatctaagttaagttcatctcaatttgtttaaggaattacttttacattgattagatatgtttaatttaaatgggcaagtgatctttaaatgccttactattctgcaagcaaaattgtcattaagcagtcctgtcttataacagtgtaacaggttgtaaatggatggagccctgccaactgcctggacattactttcacgcacagacagacactaactacactctattgggtggacctgcacagttacctacagcatgaatgtgtggaggttgggtgggaaacagagtagggtggtgtcttaggtgtgtaacagtttctttctctttctcccagagggttctcagcttggcctgtccatggcccactgtctgctgcttctggatcctatttctaccataggcttttaacttgcacagacaactccccctcattacacacacacacacrcacacacacacacacacacactgacagttgata

SEQ ID NO: 190122 - DNA, 579 bp, Homo sapiens
tgtgtctgtttttatgccagtaccacgccgttttgtttactacagctctgtagtatcatttgaaaccaggtaatgtgattcctccagttttgctctttttccttaggatagtagagtcatgasttttagatggaattaatctcccttttctccctccaatgggatgcaaatcaagcttccagaataattaatatttttttttggaaaaaataaccaaaggtatgcagaggtaattagcagattttcaaattcacatttcaaactataaacacagatggagagtagatgttggagaagcatctacaattactgcactatgtatattcaggaaacataaaagtaaaataaaagaatgtatttctactattagctccaacaggaagggatcttgttttgttttgtacactaatgtacctcaagggcctaaaacagggcctggaaaagattaggtacttgataagtattgttaagcaggtaaataaatggatagatgaatttgtcaattacaaaagcaaaaaattctgtttctctcagtgagtacaatttctgtcattttagacccaaagtgttttgacccat

SEQ ID NO: 190123 - DNA, 579 bp, Homo sapiens
tgtgtctgtttttatgccagtaccacgccgttttgtttactacagctctgtagtatcatttgaaaccaggtaatgtgattcctccagttttgctctttttccttaggatagtagagtcatgagttttagatggaattaatctcccttttctccctccratgggatgcaaatcaagcttccagaataattaatatttttttttggaaaaaataaccaaaggtatgcagaggtaattagcagattttcaaattcacatttcaaactataaacacagatggagagtagatgttggagaagcatctacaattactgcactatgtatattcaggaaacataaaagtaaaataaaagaatgtatttctactattagctccaacaggaagggatcttgttttgttttgtacactaatgtacctcaagggcctaaaacagggcctggaaaagattaggtacttgataagtattgttaagcaggtaaataaatggatagatgaatttgtcaattacaaaagcaaaaaattctgtttctctcagtgagtacaatttctgtcattttagacccaaagtgttttgacccat

SEQ ID NO: 190124 - DNA, 632 bp, Homo sapiens
catatattaagagctgaagaaacacaaaatgcaagcaaatgagcaaactggtttgaagttggcttcgaattacagctacttgagaatagacagagaattgggtgatacagattaaaggacaaccttctttcaagtgtcaaagcccaaaacacactgtttataaaaagaagctcaggatgacagtggagtagagagaagaatcactaagcatctccggagctgtaggtctcaagtctggacaaaatttctagttctaaatgactttcattaattggggtgagagggcaacctcagttaactagtacagtaatcatcttcattgaatattcattttttaaaaccccagaaagatttagaactatgtgtagaaaattttcagagaatcaaaactaatgcattaatattagacatttgtactgtgctagttaagagacagtcttgtaattctaatttaaaatrtgtaattgtgtaaataatttatacttttggccaggcacggtggctatcacctgcaatcccagcactttccgaggccaaggtgggcggatcatttgaggtcaggagtttgaaaccagcccggccaacgaagcaaaaccccatctctactaaaaattaaaaaaaaaattgccaga

SEQ ID NO: 190125 - DNA, 632 bp, Homo sapiens
catatattaagagctgaagaaacacaaaatgcaagcaaatgagcaaactggtttgaagttggcttcgaattacagctacttgagaatagacagagaattgggtgatacagattaaaggacaaccttctttcaagtgtcaaagcccaaaacacactgtttataaaaagaagctcaggatgacagtggagtagagagaagaatcactaagcatctccggagctgtaggtctcaagtctggacaaaatttctagttctaaatgactttcattaattggggtgagagggcaacctcagttaactagtacagtaatcatcttcattgaatattcattttttaaaaccccagaaagatttagaactatgtgtagaaaattttcagagaatcaaaactaatgcattaatattagacatttgtactgtgctagttaagagacagtcttgtaattctaatttaaaatgtgtaatygtgtaaataatttatacttttggccaggcacggtggctatcacctgcaatcccagcactttccgaggccaaggtgggcggatcatttgaggtcaggagtttgaaaccagcccggccaacgaagcaaaaccccatctctactaaaaattaaaaaaaaaattgccaga

SEQ ID NO: 190126 - DNA, 559 bp, Homo sapiens
atttactgaggttgctgaagcttttcagtaatgaaygagctccattaaataattatttctcaaacttgagtttatagaagtacagtctttgagaatttgctgtcatccctatattcttaactgtaaatgttttgtgtgaaaagacatttttaattggtaggtactacatcacacacttttttaaaattcggatttctgtgaactctcagggtttgtgttttctgtgcagcagcacagtcattataaatgactcttcttgcacttgatgcactgacaaatatcagttttcagcccccagagaaatttagcagatttgtatttcctaatttggaagaaacagcttacaagttacgatagcatgtatctgtcaagaaaaattccaggctcaggttttcacttttcttttgcagtgaacattagaagtcaagacactggctcaccaaagcaggccaagtgacctacagctgccagtggtatacctctacatccagagagtttaagcatttgggctgtgccatcactggagtcttgccgaggatttttggtttggtttgcagtt

SEQ ID NO: 190127 - DNA, 416 bp, Homo sapiens
ctgtatctacacgaagtgtattttgcatgaaatccagaaggtctcaacacatgccatataatccaccaaagccatgccatataacgcccacatatcctgtccctggtccataactgaagacaagacatgctccrcagttcattctaaaccatcctagtacaaggatgcttttgagaatcaaccctgttctgtataacaacacaagttactccaagttaatctgatttactttgtgtgacaccttcccactccagacatgtttaaattaaaactattagatggaaatcttaaacctgtatgttttttagacctctcttggaaaggagagatttcaagaatctgaggaaagggaactttttgagaactcttaccaatcgcttggtacttacacaagtagatatttagaaacaatgttt

SEQ ID NO: 190128 - DNA, 581 bp, Homo sapiens
ggtccttcagcttttcccaagattctgttttccccaatatcgttttaataaatgtatttttaacttaaatcatttagatttggtttctgctccttaaaataacaaatcctgactggtacagtctcaaatgtgtatttcacctaatgttgaaatctatgtttctaagaggtgctgaaagacaacatgtcaaattccaaagtgagactcctaatcaccatgctcagttttacaaagggaatgattccaacgcttccttcctgaatctgtggactttaaaccagataaaaaatatagacataaaaagaggagaggccaggcatggtggctttcgcctgcaatcccagcactttgggaagctaaggctccttgagcccaggagaacgagaccagcctggccaacatggtgaaaccccatctctactaaaaatacaaaaattagctgcatgtggtggtgcacacctgtaatcccagctgtaatagtacttgggaggctaaggcccaagaatcatctgaacycaggaggcggaggttgcagtgagctaagatcacgcactgtactctagcctgggcaacaaagcaag

SEQ ID NO: 190129 - DNA, 562 bp, Homo sapiens
ctccagtccttactcaaaggactccagggctcaattcatcctgaccagattgacatattccacaaaggagctttcccttcttctgcaggtccccagccaacactgctgtctgggggcccacagagtgtttcatctgttgatataacatcaccttgagacccattctatggtgaatgaagtgtggcaaagagtccatgatgaggaaagttgctgttcctaccacaaaccaccactttcagacgattctagcctgatggagcatggaacrgtctgttgaaggcaaacccaagactggggtactgtccttcaggatgtggtaagcagcatgaagcagcagctattacatatggtgctgctttgtttttaaaaattgcagatttgcttgtgaaaggcttaattaatagtcatggtggctgggagcggtggctcacacctgtaatcccagcacttggggagaaagccaaggtgggtggatcacttgaggtcaggagctcaagaccagcctggccaacatggtgaaaccccaactttactaaaaaaaaaacaacaacaaaaaacaaaa

SEQ ID NO: 190130 - DNA, 549 bp, Homo sapiens
tgcgtaattatacctaatgcagtattatgatgatgtcagaacttgcaatgtggagtaactatggcaattttacttgtgattttacattgcaacttgactggaaataaattccagaccaaaagctcacatactagaagagctagatggatgaaccatatgttcttaactttgaagttttcatgatgaarttgaaagatttcataaaacttatgagatttccccacaatttttcactgtaggatccagatgtgaaaatgtaaaaaaatcatgctcactacttatatgaaataaattaaaaagccatataataaatagaaaactattatttatcttgtttaaatttagagaaaaggcaagtggggagaccaagaatctgtgatggtaaaaggttttgtggctccccaactgagttgaaccaaaatgttgctacaagtttctctgctcaattactccctagttgtcttgttctctttgcccccactgctttagtgcagaccttcgtttctctcctggaaaattctaattattctttattctcatctaatttct

SEQ ID NO: 190131 - DNA, 588 bp, Homo sapiens
atcatatttatcattcagagtattttctagctctaaaaaaacaagtaagtgtatatatgtgaatatatccttatttgctattgtaaaaaaaattatactaacagtttctgcttttatttctctgtaattttatagtacaattaaaactttattttatgttttagtttcctattagttttaaaagaatacagtgattaaatgttatagtattggtatattcaatgtgatcatggtttaagaaattcacttaccagtaatgccccacatagtgacatttcagtgaacaagggaccacatacacaacaacagtacaatagtggtcccataagattataatactgtattttcacctactttttctaggtttaaatatgtgtagataggtaagtaccattgtgttataattgcctaaaatattcaatacaataacatgctgtatggtaacatgctgtataagagcagtaggctttgccatgtaacctagatatttaggaggctataccatctggcttgtctrcgtacactatgatgttcttaagacaaaattacgtaatgacacatttttcagaaccattcctgtcattaagc

SEQ ID NO: 190132 - DNA, 522 bp, Homo sapiens
taagtaaattttgacaatttatatattttacttagctatagtcaagctctgccaccttcttttttaattgactcttttttaaaataatgctgctataaatatttgtgagattttgtgtgaacmtaaattttcttttaaaaaattttaactgataattatattatggtgtacaatgtgctgtttcaaaacgtgtacattgtgaaatgaacaaatcaggctaattaacatatcgatcacttcacatgcttatcatttctttgtagcaagaacatctactctttttagtaattttaaaatacacaatacattattattaacgatagttaccatgctgtgcagtgcatcaccagaacttattccttctgtctaaccgaaactttatgccctttgaccaattccccctttgcttgcatggctttcccaaccctcatggcctctgataactgacatcctaccctctacttctatgagtttaacttttttaggttccacatataagtgagatcatacagtatttgtctt

SEQ ID NO: 190133 - DNA, 429 bp, Homo sapiens
agaattcagaaatgggaccctggggaccagccaggccccaaggaggtggcaggaaaggaaggtaagacctggcaaagtagctgattgtttccctgaatgtgtgactggctaaatcttgggactgggaaagtttttttctgtgcttttctgagctcaacttytgggtgcccacgccttgctttgaaagggtttggtctgtgaacctacacatctctcagtaatgatttaagttactcagaaaactgggagccctggagtgaaaggaagagacgaaagggaaagaaatccatgtagcagtcttgctccgtttgatctggcagacagcgggcgatgatggaagaatgctggagatggaggtggagggtggtcggattctgccatcctgagccatgtctgctgtttggacttgcagacttcaaacacggctgg

SEQ ID NO: 190134 - DNA, 506 bp, Homo sapiens
gattttcttgagtcaccatattgcttcccatcaatcatgcyaagtctattcatttcattggtcactaatcagtcaaaagcaatagaaaagtcaaaggagataggaaaatagcatgccaaatatttattgtaatatatagtgccactttacccatcttttcctgagtttaggtggacaagtctcggcagaagattatcttcctcattactgttaccaaatgtgaagggtttgaatcaagttttcatatatgttgaagccactgcttgaacttcaaggcctttgtaagtgagaacagtttttttgtttcgagggcatcaggcctattttgtccttttattagatgtatctaacattctttgtttcttttctttttcactttgaggaagatgggagcagggtagtgtttttgagtgataaattcatgtcttgttaaagtgcaggtcaaatatgtataaacacgtacaccacctacagacattaccatattagcagaccttatatttgtc

SEQ ID NO: 190135 - DNA, 494 bp, Homo sapiens
attattagtgaaatagaaggaatggaagctataattraaggttttaatgagaagtagaaagttagataacaaaagtagaccacactttcaagaaactggttgagaaaggagagaagaaaaataggatggtaagtagagggctacttgtgatcaatagagagtcattttttgatgacaagaatgtcatgcagcaaataagagcacagtctgaagccatattgcctagattcaaatcctggcttcagcactaattagctgtgtgactttatgcaagttatttaaattctctgtgcctcaatttcattatctgtaaaatgaagatcatgatagcaatctcacactgttgttatgaggattaagtaggtaaatatgagtaaaaggtttagttgagtgccaggaaaacagcatttaatatccaagggttagatatgattatgattttaattattgtaactggacattcaaatacaggtgaaagagtagctttaaatgga

SEQ ID NO: 190136 - DNA, 397 bp, Homo sapiens
ttgcagtgagttgagatccactgcactgcwgcctcagtgacagagcaaaactccatctcaaaaaaaaaaaaaggaaagaaatatatgaaaagatttcaaaaagatcatagaaaatggaattaaaagataaatgtaaaaatattcacttcatttctccacataagctccataacctctatcaagttcaagacccttttctaagcaatgatacgagccatgttgttcatccctaaagaattgagggtcctgggaatttaaccatgtcaacgcaatctggttcacattattcactgaagaaaaatgggtgccctttacagatttttttaatattaggaaacaaaaataagtcaaacagagccaaattgagatgataaggtagatgcctaatgatctccca

SEQ ID NO: 190137 - DNA, 508 bp, Homo sapiens
aacagtgtaaactccagtatttaataactccccaaatatttatgtatgccaaatgcarcatggcatcatggtttggatcttggaacatacaaaagcacaagtggaaaactaatcaaatacaaagtctggagtttaatagtaattcagcaatgttgatttcttagtgtgaaaaatgtctcatagtaatataagaattaaacctttgagaaaattgtgtaaggggcacatggacacactctatattattgtgcatttttttcgtaaacctaaaatttttccaaagtaaaatctctaattgaaaatctatatatgtaattggaaagaagatggtctttgctctcctatctggaatctccttgactgccccaacttattctgtaaaattaaaataataataccagtctttcatggttgtaaggttaaataaaatgatttgtgtataagaaccttctaagccataagtcacagtacctctttgttattatttcaatcccaattcttgctggat

SEQ ID NO: 190138 - DNA, 581 bp, Homo sapiens
ttttccttattgtattctttgaaggaagtccccatgctcaatgctcagcccatccttaagggtttggtaattattctccaactttttgaggcaggagtgcttatatgaattatttgaaattatttggaatttaaacagaaagcttatgtattatccctcactttttagtagtttaaccaatcatttagatttgtatgtgatcttggttatttattttatactttgggtttaatccaatactttttattgttgttactcaartttttccagctttgtttgaccgttggtaactctttcagttggcccctgtgtccctttgaaataccttcattactgtggggttcttgttctgtttcattttggggattggtctttctgtttgttttttcatttgtttttaccatgtacatactttcttgtactacaaaatgttccaggaaagaaataattgcattttttaaagtgccaacataaacttaataatctggagcaacttattactaaggtcaggaccatgtgtttgccttccttagcaagcaacctttcctcaatttaatgcacatagataatactcctaactc

SEQ ID NO: 190139 - DNA, 521 bp, Homo sapiens
ctgtgtctttataaagtcatttataaatgaatcaatgccaaatatctgacatacttaggaaaattaggatgaacattaagaagacattttattttgaagtcaaaatgtctttctctttttaataaaatagaaaaagagaaggaggggaagaaggagaaacctaaaaagttcatattacaatcctgggtcctcctatattcctgtgctagttcacaaaggaccacatttaaagaggtttttgctttgttttgttttgttttgttttgttttgtttttgtagaccatgtcttgctctgtcacccaggctcacctcagccttgacyttctaggcttaagtgatcttcccgcctaagcctcacaagtagctgggactacaggtgtataccaccatgcctggctaatatcactgatcattaaagaaaggcaaatcaaaaccacaatgagataacatctcaaaccagtcagaatggctattattaaaatatcaaaaaattatagatactggtgaggttgtggagaag

SEQ ID NO: 190140 - DNA, 441 bp, Homo sapiens
tcatgtagatcaaaggcctaaatgtgaaacataaaacctgaaagcacaaatcatatgataccataagactgaagatttgtaagactcactacattattttaaaaacttcaaaacaaaagataccaaacaaatatgggaacaacagacgctgtggactactagagagtggggagggaggttggataaaaaactacctatcaggtactaagcttactaccaaagtgatagaatccatactccaaacctcagcatcatgcaatactctcatgtaacaaatctgcacacatacctcctgtactgaaaataaaagttaaaatttatatatayacacacacacacacaccctgtaaagataaaagctacaaagagatgctttcaatgtcgaaaggggacaaaaaattttaagtatatgtaaacaactagtacagatcaatgaaaaaa

SEQ ID NO: 190141 - DNA, 510 bp, Homo sapiens
aagccacaggaaattgccatgatgtagcctgagcctaccgcactttttttagtgtcatcacaggctctgcattgctaggacttaaagaacctttggtcctgaggtgctttgtgagtgtggcaaccatcacacacttccttccacagcttggagtggttttaattaatcatataaatgattactacaggagacttcttgggagcctcaggaattagaaggactaaagtggctcatagctcttttgactatgttacaggaataagagggcagtgttgtagatgtgttctctctcgtagtttcagaagctttgccgttggttttcttgagtgttctaagtatatgagcatatttttctctatgtaatgataattttagaaatattttcctattcctaagatttttaagtggcttttttcttaaaatcaagaataggtattgaatcttaytgaatgccaatttagcatatttaaaagtggctacatagattatttgatatttttaatgtggtat

SEQ ID NO: 190142 - DNA, 565 bp, Homo sapiens
ctaaaaccagggggcttttattatcccaggttgtgtmtgcaagacagcaaaatcaaatttcttcctatctagttcctattcatatcaagatagcctgagcccaagtagggagaaatatttctacacctgtaaaaacctatttacaaatactatacatgagttccagccaatactttaaatggtattacaatgaaatgggctacttaaaaaataaaaacttttaatgaaaacaaatttttttattgtgagattttggacacaatcatttcagtttgttgattttcatttgaccaatatcaaaacaccaaaactgttcctcttctaagagacaagattcaggtgcagtgtctcatgcttgtaatcccagccctttgggaagtgggggcaagaggatggcttaagtccaggagttcaagaccagcctggtaaacataatgagacccaggattttacgaaaaatttaaacattagccaggtgtagcagcaggcacccatagtcccagctactcggaaggctgaggcaggaggctcacttgaggccaggagtttcaagctacttataatt

SEQ ID NO: 190143 - DNA, 418 bp, Homo sapiens
gcacatcactacatacaagtggctggaacaaaatgaactatcgctggattgaattatcttttctaatagcaaaaatactaaattagattcaatttctaagcaattttttttctcttcatgattatgaaagctgattagtaacaacacacgaatttcttttcttcctcctatttgtttcttggamaggagctaacccacacaaaaatagaaaaaggttattggaaatataagggaggccatttgtaaatttcctttggtattttattaaatttcctctaggcttcttataccaaaccactttctaacacttggatttttccagatagtataagattctactatagatgcctgaaatgccagaaagtcaaagagaggtataatagcagagctacaggtacacagagtgatcagaaaacta

SEQ ID NO: 190144 - DNA, 599 bp, Homo sapiens
ataaatcctccacacttacagttaattaattttggacaggggtgatgatacaattcaatggagaaagaacagtcttttcaataaatggtactggggcaactaagtacccacaggcaaagagatattagacttctacaacagaccatgtacagaaattaattcaaaatggatcaaagatctaaatgtaagagttaaggctataaaactctcaggacaaaacagggaagtaaatatctgtggccttagattagatatattagatagattagaaatagattagatatagattagaaatagatatattagatagattagctagattagaaacaagaagtcattatttcttagatacgacaccaaaagcacagcaaaaatartaacaagaatttcacttcatcaagctaaaaacgtttgtgcctcaaatgacaccatcaggaaaatgaaaagacaactcacaaaatggaggaaaatatttgcaaatcatatataagggacacatctagagtataaaaaagactcttacaactcaataattaaaaaactcattataaaaatgggcaaagaatttgagtcttttcacacacttctctccaaagagg

SEQ ID NO: 190145 - DNA, 335 bp, Homo sapiens
tgggcaagaatttttttgagaagaccttaaaagcacaaacaacaaaagaaaggatagacaaacagaattacaagaaactaaaaacgttatgcacaacaaaaatgcaatcactgagtgaaggcataccctacagaatgggygaaaatgtttgcaaagtatgcatctaacaagggttaacattcagaatatataagaaacttaacatgaaaaaaatttgattttaaaatgagcaaaagacttgaatagatatttatcaaaagaatacagacaaatgtccaacacacacataaaaaaatgtcactatcactaattatgatggttaatattaagtgtca

SEQ ID NO: 190146 - DNA, 335 bp, Homo sapiens
tgggcaagaatttttttgagaagaccttaaaagcacaaacaacaaaagaaaggatagacaaacagaattacaagaaactaaaaacgttatgcacaacaaaaatgcaatcactgagtgaaggcataccctacagaatgggtgaaaatgtttgcaaagtatgcatctaacaagggttaacattcagaatatataagaaacttaacatgaaaaaaatktgattttaaaatgagcaaaagacttgaatagatatttatcaaaagaatacagacaaatgtccaacacacacataaaaaaatgtcactatcactaattatgatggttaatattaagtgtca

SEQ ID NO: 190147 - DNA, 571 bp, Homo sapiens
aattctcaccaaaataccaccatcattcttcacaaaactaaaaaaaaaaatcataaaattcwtatgaaaccaaaaaagagcctgcatagccaaagcaagactaaacaaaaagaacaaatctggagacattacattacttgacttcaaactatgctgtaatgctatagtcaccaaaacagcatggtgctggtataaaaatagacttatgggccaagggaaaaaaacagagaacccagaaataaatccaaacacagccaattgatcttcaacaaagcaaacaaaaacacaaatggagaaagagaccctatttaacaaatggtgctggggaaatcggcaggcagcatctagaagaatgaaactggatcttcatctctcaccctatacaaaaatcaactcaagatggatcaaagacttaaatccaagaccttaaaccataaaaattctagaagataacactgaaaaaaaaaactcttttagacattggcttaggcgaagatttcatgaccaagaacccgaaagcaaacacaacaaaaacaaagataaacagatgggacttaagctaaaaagtttc

SEQ ID NO: 190148 - DNA, 571 bp, Homo sapiens
aattctcaccaaaataccaccatcattcttcacaaaactaaaaaaaaaaatcataaaattcttatgaaaccaaaaaagagcctgcatagccaaagcaagactaaacaaaaagaacaaatctggagacattacattacttgacttcaaactatgctgtaatgctatagtcaccaaaacagcatggtgctggtataaaaatagacttatgggccaagggaaaaaaacagagaacccagaaataaatccaaacacagccaaytgatcttcaacaaagcaaacaaaaacacaaatggagaaagagaccctatttaacaaatggtgctggggaaatcggcaggcagcatctagaagaatgaaactggatcttcatctctcaccctatacaaaaatcaactcaagatggatcaaagacttaaatccaagaccttaaaccataaaaattctagaagataacactgaaaaaaaaaactcttttagacattggcttaggcgaagatttcatgaccaagaacccgaaagcaaacacaacaaaaacaaagataaacagatgggacttaagctaaaaagtttc

SEQ ID NO: 190149 - DNA, 337 bp, Homo sapiens
atcaagtttgacctcaccatctcttggctttttatgcttctcttaaagtttcaytgcaagaattctactttggttctcttttctgtttctgtctcctagtttgttgtctgtctgtctgtgtctcttgcagagttgactttcagatcctatatactatgtgtgggatgacatttcatgaaaagtcttagagatgaaacctttttactgaataatttgttaaaagaaatattcaaaattgaaggaggttgctgcccccctaatattttcccagtcagacttaatttcaagagccctcttatcctccaaatacttaatttttaaataaacagaaatgact

SEQ ID NO: 190150 - DNA, 300 bp, Homo sapiens
ccacatccctgttgaacaccctgcaagtggaaaagggggaacttctctcatttcagaaggaacatacttcaacacaataaaggccatatatgacaaaacccacaacaccatactgaatggcaaaaagttgaaagcttttcttctaagatctgtaatatgagaatcctgttcactttcaccacttctcttcaatataaaactagaaatacttgccagagcacttaggcargagataaaaaaaagacatctaaattgaaaaggagaaaatcaagttgtccctgttggcagatgacattatca

SEQ ID NO: 190151 - DNA, 582 bp, Homo sapiens
tgttttcagagttccagaattctctccatttatgtgcagtatcttccttgccacaaactcaaaacctactgtaccagccaggatagggtaagttgtactatagtcatcaacaacctccaaaatactcaatgtctcataacaacaaagggttatttctttactaatgtcatgggtccatcttgacctcactattgttcctattcagtgagcaggaagctctcttggctgaaggttgrgtctggagttgcctgagcttggcaaggcctgagcttggcaaggacactcctgacaggaggaggaaaatggcaaatgagatgagcaaatattggctaccagagagggcgatgaaaatgaggaaagattgcaatgtgcagccttattttttcctaggttgatggccttgtcagggtcttagggaggcagccagatgggggaaagggagaggtctcagtggtcattgccctggtacgtggtctgatagagcacctctgtttgtaaatctgcaggtgtttcaactgcaaaggaaagggggccaaggcaaacagcacataacatttccacttctattcagggtacaaacca

SEQ ID NO: 190152 - DNA, 499 bp, Homo sapiens
aagagatccttgatcaggaggttaaaatcctcaggctttggttttagtcattcctgagttactctttctgggccagtgaattactgttggctgtttcagaacttattttggacccagcattttactaggatcttagagagacatcataatgatatagtacttggcagtagatctctagaaagttttcttctatatctgagaattagaatgtaacagaaggaaaatggtctattacttggctaaattgtgtggcatgaatttgtgcttcctctttcatgggctgtgaggatacacagtgaaggaaatggtacagtgtttatgcctatgggatttttaaatttcttatggaatgcagaaagcacaactactatcatgtggggatgagatcatgattattttgatatagaaggtgcaatagggaaatgttartatagacaacacatttttttccagataaaaagtacagtaatagattagaaaggaaagaggtcaaaatgtg

SEQ ID NO: 190153 - DNA, 386 bp, Homo sapiens
aatctctctgcaggccatactttctcaatctgataagcctcacaagtgtttttcataaatatgccattcccaaactaggtgacaaccagattcttcactcctttgtagcatttacaagacttagaataatactaggagcacaagttgtattttgatacacataagaaatatataaaaatatttaagggaaaattracagaaccttgttactcaatatattgagctaacaatagtggtgaaatattcaagccaatcaaattttttgcctcttagtcatgaactccttgccaagtacagttcacgtgttcaagtaaatagcacacttttctagctaactgggaaataaagtatttcttaaaaagtaaaagagatcttttctgcctgga

SEQ ID NO: 190154 - DNA, 549 bp, Homo sapiens
taacaatattgatgggctgagtggaaaaagtctccagagccaatattaaggctccaacctcagctctttgaatgttagtaaatccggaaccagtgaggaaattctgtggcctccaccagacagccacttttccatgtttaagcgagccatcagtaaacagtgttaaagccgttaggtatgggggattgaatttttttttaggcaaaaccacaaaagtgtgagataagaactgaaggagtttgtcagcaggaagggcatgctctatakgacctgtgtaatcagagagtgctatttgcaggtccacagataagggcaatactgcttcaaattgccttttacttaaaggaatcctgatgatatcagggtcataacctagcaactgattgcatcttctgcagcctgaatagatgactttactgacgaactggatatggggagagagtgtcttagtcccggtatgtgaacaaaaaacccattctagaaagcatagctctggggccatctgtcctattaaccctgtagcggagtgtttggtaggaaacataaata

SEQ ID NO: 190155 - DNA, 521 bp, Homo sapiens
aatagtagaagactttaatatcccactttcaacaatggacagattatgcagacagaaaatcataaaagacacattggacttaaactgaactctagaccaaagggacataacacttacagaatatcctacccaagagcaatagaatatacattctactcaactgcacatggaatactctccaggacagatcatgttaggccacaaaatatgtcttaacaaacttaagaagatagaggtcatatcaagtatcttttctaatcataacagtatttaactaggaatcagtaacagaaggaacttctgaaactttacaaatacatagaacttcaacaacaggctactgaataaccaatgggtcaatgaggaaattaaaagagaagttaaaaatttttkaaacaaatgacaatagaaacacaacataccaaaatctatgagatacggcaaaagcagtactatgagagaagtttgtacctcaaagtactgtttatacaaatgcatatatcaaaagagtagaaagatct

SEQ ID NO: 190156 - DNA, 394 bp, Homo sapiens
tatgggatacagcaaaagcagtactcagaaggaagtttatagcaattttgaaatgcctatttcaaaaaagaacaaagatctcagataacccaatgttgcacctcaaggaccaagaaaaacaggaacaaactgaacccaaaattagtagacacaaagaaataatgatggttagagaagacataaacaaaatagagacttaaaamatataaaagatcaatgaaacaaagagtttgtttgaaaaggtaaacaaaatcaacaaaccctgtgtctgcctaaggagaaaagactcaaatgaataaaattttagatgactgttgttggtgtgttgaaatgctagtgatttttgtatgttgattttgtatcctgaaactttgctgaaattgtttatcagctt

SEQ ID NO: 190157 - DNA, 621 bp, Homo sapiens
gagcttttgaagattcctttttgtagggctgtccctatccgaggctgctttcggaggtgattttcctgtcataattttctttccgatcccttctccctacacccttcccccgggtgaggctatagtgcaatagcagccaatttttggctggcacacacatactgagccagtacacctgtgaactaagcttggacttttttcgcctctgtcctttggtgtatggcaccacctgctataggtgtcagctgaaggagaggcaagtttgcaacactgctgagctatgatcgtaccactacactccagcctggtgacagagcaagatgctgaaaaaagaaaraggaaagagaaagaaagaaagaaagaaagaaagaaagaaagaaagaaagaaagaaagaaagagagaaaagagaatttctgtgacctcaaaacaggtagagatttctccccagcaagcaagcaagcagttttgcagtgtatgccagcagagtgtcctctaattcaattgcaacatcgtctacctggagatagtgtcagatcccacaggttgagagctaggtccccaagactgcccccatcttcagaaaaatgttgtaaatccaggcctctggaacttctgaccaa

SEQ ID NO: 190158 - DNA, 574 bp, Homo sapiens
agtgttttatgcatattaacccatttcatctttctaacagcaatatagtgtaaacacagtaggcagtatatgcataatctccattttccatatgccaaagtaggcacagagaggataacaaacttgcccataatcacacagcttgtaaatggtagagtcaggattagaagccatgaaatctggtgccatagtctaaagtcttagccactacactagactgctatgaagcagcaaggtaaggatgtgggtgaaaggctaagacagtggatctgtcctaggatagagacaatggaagatgggtcagasatgagcccagcaagggtgcaatatatatccatctctcagggctgtcatatacaggattcttgcccaggcaaaaaaattgcatccgagggccccccaggtccctcctgaccccaaggtccttggaccctataatggactgggaagacaaaataatgcaatctaaagtgaacaggggctggtgaagtgggtgggaagtatgtattgggaggtgtcaggcagaaattatggtcaggaataagtgacttgcagattttatattcacagaagt

SEQ ID NO: 190159 - DNA, 574 bp, Homo sapiens
ccctcacactttaaaacaatcagatagtgagtgagaattgcaagtctgaaaracagctgggcagtcattaaatcttaaagctccacagtaatctcctttgactccatgtctcacatccaggccacactgatgcaagcggtgggctcccacaaccttgggcagctccaccccatagcttctttcacaggctggtgttgagtgcctgtgatttttccaggctcaccatgcaagctgttggtggacctaccattctggggtctggaggacgatggcccacttctcacagctcctaggcagtgccccagtagggtcaatgtgtggggctccaaccccacatttcccctctgcattgccctagtagaggtccttcatgaacgctccaccccagcatcagacttctgcctggacacggaggcatttccatacatcctctaaaatctaggtggatgttcccaaacatcaactcttgtcttctgtgcacaggcccaacaccatgtgaaagctgtcaaggcttggagcttgcaccctctgaggcaatggcccaagctgtaccttggtcccttttagccatggc

SEQ ID NO: 190160 - DNA, 583 bp, Homo sapiens
aaacttcatgagtaacagatttacccagtacataggtttataaagtgaaaaagaaaacatttttgtttctgctccaattttgaatttgagatcactgtattttatactgcawgtgttacaataaatactttacaaggcaaaatatacccactacagttatactttagttaattctgagttgttaccagttctagcaaaattaggatttctgatattgatgagggagaaatctatgaaacaggatacacacattctgggaattatgacttcattgcatcttgtagattaatttcttccatacttgaagaggagcaaagttccacaagaaactcactaagcttcaagcatcactaacaagtaacagctttgatgagtcccatatgcaatgctttcatttactattaaaaattgacactttagtcttactcttgcataataacttgttcttaaactaaaatttgggaaatctaaacaaattgttacctttggaagagattattggaaatcaggatttgggttctgtgttaaaataaaatagataggaatttgtctgggtgtggtaagacacatgtaacatgcctgt

SEQ ID NO: 190161 - DNA, 599 bp, Homo sapiens
ttcagtactatataggcaaaaaatatcaacaaaagacaacctggatagctgttttaataatcagacaacctggatagctgttttaatatcagctgttttaatttaagacaaaagaaaagctttatttgtgatttattttttaaaaaatcactatatgaagatgagaagttcaattaatcaaggtcgtttaaacatttaactttgtatacatatagttaaatagcttcaaaatactcaaggaaaaggtaattaaaactataataagaaatggacagctttccaactttgacccgagagaatggctcctgcaaagaagggtgatgagaagaaaaagggccattctgccatcaacgaggtggtgacccgagaatacaccatcaatattcacaagtgcatccatggagtgggcttaagaagcgtgcccctcgggaactcaaagagattctgcaatttgccatgaaggagatgggaactccagatgtgcacattgataccaggtgcaacaaagaggtctgggccaaaggaataaggtatgacccacayggtatccgtgtgcggttgtccagaaaacgtaatgaggatgaagattcaccaaataa

SEQ ID NO: 190162 - DNA, 606 bp, Homo sapiens
ttttatttcatacactcactaaacatgtggaatctgtccatttrccatagctctttgagactcattaatctcatctacaggatggagagaatcaactctgccatggccaggggatacgaggggcatatcaaaacactgtgatttccatgtaaaacctgagaagaactgggaagaagaagaggttttccttacaagaaggactggagaatagatatggcaactaggagaattaaggcaatcacactaatttatgtctcttacaccctgtggcccagcaatttcatttctaggactttacccacagacatatactcatatgtataaaaaaatgcttatgcagtgatgatcactgcagtactgttgttaaaaagctttctaaactaaatccaatgtccatatattggatattggtgaattaaatcacagcaaaaccattcaatgaaccactgtgctgcagataataaagtgaggtaagtgtgtgtgtgtgtgtgtgtatatatatatatatatatatatatatatatatatatatatatatggtggcatagagcaatgtccaaagatataaagttaagccaataaagtaatttgcagaagaatattata

SEQ ID NO: 190163 - DNA, 606 bp, Homo sapiens
ttttatttcatacactcactaaacatgtggaatctgtccatttaccatagctctttgagactcattaatctcatctacaggatggagagaatcaactctgccatggccaggggatacgaggggcatatcaaaacactgtgatttccatgtaaaacctgagaagaactgggaagaagaagaggttttccttacaagaaggactggagaatagatatggcaactaggagaattaaggcaatcacactaatttatgtctcttacaccctgtggcccagcaatttcatttctaggactttacccacagacatatactcatatgtataaaaaaatgcttatgcagtgatgatcactgcagtactgttgttaaaaagctttctaaactaaatccaatgtccatatattggatattggtgaattaaatcacagcaaaaccattcaatgaaccactgtgctgcagataataaagtgaggtaagtgtgtgtgtgtgtgtgtgtrtatatatatatatatatatatatatatatatatatatatatatggtggcatagagcaatgtccaaagatataaagttaagccaataaagtaatttgcagaagaatattata

SEQ ID NO: 190164 - DNA, 529 bp, Homo sapiens
aactggggctgagcttttcttttcctaaaaacctaagaaagattttaaattacttatttttatttacttgttatggatgtattcagatttttcatttcttcttgagtcagttttccttatttgttcctttctgggaatttgcccatttcatccaaattgactaattttctgtcataaagttattcaaaatctgaagttatctacaatatacaatccttttagcttctataggatcagtagtaacatctttttcatttccaaatttgataatttgcatctctctctctctctctctcttctctcctatctctctctctctctgagacagggtctcactctgtcacccaggctggagtgcagtggcgtgatcacggctsactgcatccttgacctcccaagtgatcctcccatttcagcttcccaagtagctaggattacaggtatgtgacaccatgttcagctaatcatttaaaatttttttcttgtagagatggtgtatcactacgttacccaggctggtcctgaattc

SEQ ID NO: 190165 - DNA, 478 bp, Homo sapiens
accttctcaaaaaaacctacagtattgaccatcccgtttctctcatataggcaacctctcctcactcctgctcctagaagcagcctttatatttgctcatctctcccatcataaaaacaaaacaaamacagaactgaaaacacagaggacttccctaaacacacgtccctgtctggctatcactgccttcctctacttcacagtgaacaggagtcagtcttgacccatccccactccgacccctcatgcccaagcaggcacaggccatcagcttaggtacaagtttagaaaaagagacttccaagaaaacccaagctactccacagaagtgcatatttcgaacatgaccccacaggaatgtctgccaaggacagggcagcagtgcagtgtgtgcgcgtgtgtgcgcgtgtgtgtatgcgtgcctgtgtgcgcatgcatcacacttaaaaaagactatggtctttttatgacaccaggc

SEQ ID NO: 190166 - DNA, 489 bp, Homo sapiens
ccttttgttgcctgtcaaattcacgcattatccgtctcataaataatttctgttaggattggctggcttttgtgtgtgattttaaaatctgtgttttgtttctgctggcattgtgttttgttgggggttttcatttatttaggggacgaggggatgtactagaatcccatccctttcgtgagagtggacaagaaataacatatcctacaaggagcctggagaactactttctttctttctttttttttttttttttttttttttaaatctagctgccagctgctctgtcccccatatcagctttttcaggagggagcagcttagactaaatctaagcctacatttataatatgttctgattgtgaacaaagggtttcgttccaaaaaatagaaaaraacttttcttgaagcctaggttttagaagcccgtgtgtgtgtgtgcttggatgtgtgtgtgcgtgtatgagtgtgtgtgtgcatgtgtgcacg

SEQ ID NO: 190167 - DNA, 489 bp, Homo sapiens
ccttttgttgcctgtcaaattcacgcattatccgtctcataaataatttctgttaggattggctggcttttgtgtgtgattttaaaatctgtgttttgtttctgctggcattgtgttttgttgggggttttcatttatttaggggacgaggggatgtactagaatcccatccctttcgtgagagtggacaagaaataacatatcctacaaggagcctggagaactactttctttctttctttttttttttttttttttttttttaaatctagctgccagctgctctgtcccccatatcagctttttcaggagggagcagcttagactaaatctaagcctacatttataatatgttctgattgtgaacaaagggtttcgttccaaaaaatagaaaagaacttttcttgaagcctaggttttaraagcccgtgtgtgtgtgtgcttggatgtgtgtgtgcgtgtatgagtgtgtgtgtgcatgtgtgcacg

SEQ ID NO: 190168 - DNA, 601 bp, Homo sapiens
gcctagttttgcttccagtgctggagagagaggaaagggacagagaggaaagggagaggagaaactaggagatggtggagaagagccaaagagaagctctgagtgatggggggactcctaaggactttgaatctgaagtgcacttgctgggatttaaagaatttaacaaaaatttcttttctacgttccatatgttcaaaacrtcttttcttctagacacatgaatgttcacctaagagccttcctaataatgcacattacacccgcaggtgacatcattttctgagccctagttttgttacctgtaaaatgagggatcaaagtataattcacaaatctcttgtgaggcttaaatgaaatgtgtaaatgaaggtacctaattcagaactggcatgaagtaggggctggtaaaatgttgtgcctctccttctcctcgagacgcgtcccttggcagtctggccatgggatcccctttttcacacaagctacatatacttctctaccaacaggggaggcttgtgtatttgcactgtccaccaaaacccccctttcttttcacatgattctcaagtggtgtttgaagacagagctgtaacaggta

SEQ ID NO: 190169 - DNA, 601 bp, Homo sapiens
gcctagttttgcttccagtgctggagagagaggaaagggacagagaggaaagggagaggagaaactaggagatggtggagaagagccaaagagaagctctgagtgatggggggactcctaaggactttgaatctgaagtgcacttgctgggatttaaagaatttaacaaaaatttcttttctacgttccatatgttcaaaacgtcttttcttctagacacatgaatgttcacctaagrgccttcctaataatgcacattacacccgcaggtgacatcattttctgagccctagttttgttacctgtaaaatgagggatcaaagtataattcacaaatctcttgtgaggcttaaatgaaatgtgtaaatgaaggtacctaattcagaactggcatgaagtaggggctggtaaaatgttgtgcctctccttctcctcgagacgcgtcccttggcagtctggccatgggatcccctttttcacacaagctacatatacttctctaccaacaggggaggcttgtgtatttgcactgtccaccaaaacccccctttcttttcacatgattctcaagtggtgtttgaagacagagctgtaacaggta

SEQ ID NO: 190170 - DNA, 570 bp, Homo sapiens
tgataaaagcttttttccccaaagcaaacccaagggcctgggactttaaattattttggacagctcctatttcttctggtggctcactctgcctcaggcctccagaatgttcttcgattatcagaaagggaatctaaaaccatggtatgatttcgatgacaagccaggatttcctcatgatatggtttggctatgtccccacccaaatctcatgtgtggtgggagaaacctggtgggaggtaattaaatcatgggggcagtttcccccatgctattctcatgatrgtaagttctcatgagatctgatggctttatatgaggcttccctctttgcacggctctcattcttctccttcctgccatcatgtgaagaaggacatgtttgcttccccttctaccagaattgtaagtttcctgaggcctcctcagccttgtggaattgtgagtcaattaagcctctttcctttataaattgcagaatcttgggcaggccttcatagcagcatgaaaacaggctaatacaccccaagaccatctttcctctgggtttgagtcaccctagtgaccctg

SEQ ID NO: 190171 - DNA, 599 bp, Homo sapiens
atactgagctagaagctggtgatgcagatacaagactggtgttcccaaggaacttaaaaaaccatcctccctgtcactgtagtggctgccatgggttgactataccaagtactctgctaactgctttacttatgcaatcccacctaatcctcacagcaacccagtgaggtggctactaggattatttctttttctttttcttttttttttttttttgagacggagtttcactcttgttgcccaggctggagtgcaatggtgcgatctcggctcactgaaacctcctcctcctgggttcaagccattctcctgcctcagtgtcccaagtcgctggaatcacaggcgtccactgccatgccctgctaatttttgtatttttagtagagatggggtttcaccatgttggccaggctgatctagaactcctgatctcaggtgatccgcctgccttggcctcccaaagtactgggattacaggcatgagccacygtgcccagccagattctttcatttcacagatgatggagctagttttttgtggaagggcataaaccaagctgggagtctggtaagcagtggacattggactagaccaggct

SEQ ID NO: 190172 - DNA, 575 bp, Homo sapiens
aaatggaaaatgtgatggagagtgactgaggaggacgctttagctgggatagttagggcgggtgatatctgagtgtggcctgaaagacacagggaacacggaggcccagcagctgcggaaaggccctcagggtcccactggctcttctgtcttgaagcagggtcmacactgccaggtctctcaacagtgcttgatgcaaaagggtttgggtctcctctactgtctggccgccctgccccctagatgaggcccagtttgttgcaatccacattgagataaggctgggagacctgaaggctgtcagttgtccagcttcagccttactgggcagacagtgcgggtctctactgccagttcagtatgctgctgttcatgcagagggagcccccatgagttttctggccgttccactacattgtttattcagattgagccaacccggtgacagattggatgtagaggctgacagagtgagaaaagtcagggtgtttcaagggtctggtaagttacaaacgtaaccaaaccccgtgataactgttttgctttagacacacaccactagattataaaactgc

SEQ ID NO: 190173 - DNA, 455 bp, Homo sapiens
aattcaaggggggtggggctatggaaatcacacatggaaaacatattccttattttttctgctaaaatgtgcgtggggcagattgagaaggatttgagggaggagaaatacatagcaaacatggcatttggaaaggctaattggatgtggatgagcatattgagatgatgttctattactgtcagagataatgttttacagagatgctatttgtgaagagagaccagtcattattgatgggtcaatgtgcgcttgggaatatggaagcaataatgcccaagggcagtgcctgcagaaaggtttcaatcaggcatgcarctagaggggaaggaatgggcaccttttgatttgactctgcccacaggatttgacctataggacctacctgaagagacccagggttgcataacaaaatcaaaagtggactttgactggtttgctgctcactttgtcct

SEQ ID NO: 190174 - DNA, 247 bp, Homo sapiens
tatttgttgatttaccactgcagatgccgaaagggagagtcacctgctagttcctctcccatyggtgtttcaccacagagtgtcatcttgatggttttaagtttccctgagacagatgactactgactgccaggaaatactgtccttcagtgataatgcttttattcctttcagttcttggagctgttggtgagagaaataaagcctagatcatggccagataatgaagagcctcataggccatgct

SEQ ID NO: 190175 - DNA, 597 bp, Homo sapiens
atcgaggatattggcctgaagtttcctttatgttgttgttgttcagtctctgccaagttttggtatcaggatgatgctggtctcatagaatgagttgaggaggagttcctcctattcaatttctttgaatagtttcagcaggaatggtaccagatcttctttgtacatctggtagaattcagctgtgaatccatttggtccttggctttttttgattggtaggctatttattactgactcccaggcactrgaggggtaaggaaagcaaaaccctcccacgcagaaaagcaccagcaaagcaatgtgtgggagttgtcgtgggccctggggaagctgcagtatggggagggggcatggaggctgttgtttggctgtaggggctgccatgctggagctctctgctgatcaggaacagtctgccagtgcagaagctgtggtgctggccccctgggcacccaagactgccctgccagcaggtgtggccattctgagacctgggagaagccatcagaccaaagggtgctctagtcggaccagcttcatctgatgggcagaatcgccctgcagagttcaggtctgacagttccgttagaacta

SEQ ID NO: 190176 - DNA, 597 bp, Homo sapiens
atcgaggatattggcctgaagtttcctttatgttgttgttgttcagtctctgccaagttttggtatcaggatgatgctggtctcatagaatgagttgaggaggagttcctcctattcaatttctttgaatagtttcagcaggaatggtaccagatcttctttgtacatctggtagaattcagctgtgaatccatttggtccttggctttttttgattggtaggctatttattactgactcccaggcactggaggggtaaggaaagcaaaaccctcccacgcagaaaagcaccagcaaagcaatgtgtgggagttgtcgtgggccctggggaagctgcagtatggggagggggcatggaggctgttgtttggctgtaggggctgccatgctggagctctctgctgatcaggaacagtctgccagtgcagaagctgtggtgctggccccctgggcacccaagactgccctgccagcaggtgtggccattctgagacctgggagaagccatcagaccaaagggtgctctagtcggaccagcttcatctgatgggcagaatcgccctgcagagktcaggtctgacagttccgttagaacta

SEQ ID NO: 190177 - DNA, 530 bp, Homo sapiens
aatcagtggtatatattaaaataatgactgaaaactttccaaaatcagtgaaacttattaatttacccatccaagaagcttagtggactccaagccaagtagacacaaagagatgcacatcaaatatgacacagtaaagacattgaaagacraatgcaaagagaaaatccccaaaaacaccaagagaaaaaggaccacatccatggaacccaataagataaacagctgacatctattacctacttagaagtcagacagcagtgtgatgacatattcaaagtgctgaaaataaaaaactgtacatcaataatttttaataagcaaacctatcattcagaaaggaaggcaaaataaagacactcctagataaacaaaactgagaggacttcttgctagcacatctactttacaagacatactaaaggaagttcttcaggctgaaatcaagtaacatcagacattaatacaaatcaacttaaaaaatcaagagtgctgataaagttaattatgtagataattataaaatacgc

SEQ ID NO: 190178 - DNA, 590 bp, Homo sapiens
actgccgtgctggcagcaagaatttcaagccagtggatcttagcttgccggactccatggggtgggatctgctgagctagaccatgtggctgtctggcttcagccccctttccatgggagtgaacaattctgtcttgctggcattccgggtgccacgtacaaaaaaaaaacctcccgcagctagcttggtgtctacccaaacagccacccagttttgcgcttgaaacccagggccctggtggtgtaggcacctgaaggagtctcctggtcggtgggttgcaaagaccaggggaaaagcatagtatccgggccagataggaccgtccctcaaggcacagtccctcacggcttcccttggccagtggaaggagtttcctgacccyttgtgcttcccaggtgaggcaacatcccgtcctgcctgcttctgttcaccctccgtgggctgtacccactgtctaaccagtgagatgaactgggtacctcagttggaaatgcagaaatcacctgccttctgcattggtctcactagaagctgcagacaggaactgttcctatttggccatcttggctgatttgttgattcatgatta

SEQ ID NO: 190179 - DNA, 416 bp, Homo sapiens
agcaaagaacagggaagaaaagaaaaaagatcactatgcaaactctacttaatatcagtctgtgtttattgttgccagaggcagttctctcaaaaatgtagagatagaggtcactttctaattctaaccatatgccaaatcataacccacataaaattattaactttcttttctaggctaacatggcttctttgaatcttttagtctatgtttgtaaataaaatttggggattaagacatgaattttacaaccatgcaaaataaaagccctgcttctctaaggtctaataggttttagcaaatgtgaaaacatatgaagtcttgtttgaaagtaaaaacatatctgattgtacatttctggtgakacatacctacctctagtcttgtctgttccaaggatagctgttctgcaaatg

SEQ ID NO: 190180 - DNA, 595 bp, Homo sapiens
ttggtggctcacgcttgtaatgcyagcactttgggaggctgaggtgggcagatcacgaggtcaggagttcgagaccagcctgaccaacatggtgaaatcccgtctctactaaaaatacaaaaattaacctggcgtggcggcacgtgcctgtaatcccagctactcaggaggctgaggcaggagaatcgcttgaacgtgggaggcggagcttgcagtgagctgagatcacggcactgtactctagcctgggtgacagagcgagactccatctcaaaaaaaaaaaaaaaagcatgagtcaaacagtcatgtgtcttctgtctcattccgaatggcaggtaagggagaaaccgacctctcagcaccactcttcctgctttctctgtttttttcgtccagccccaaagaccctgaacaatggtacaccactgcctgtcctggagggagagtccctgtggtctgtgtggctgacagcaccccacctcccaaccccgcccggctgagctggtcctgagagggaagaacactgaattcctcccagctctcagcacccgggggcctggagctgcctcagataggggctgggacggaggagcat

SEQ ID NO: 190181 - DNA, 595 bp, Homo sapiens
ttggtggctcacgcttgtaatgctagcactttgggaggctgaggtgggcagatcacgaggtcaggagttcragaccagcctgaccaacatggtgaaatcccgtctctactaaaaatacaaaaattaacctggcgtggcggcacgtgcctgtaatcccagctactcaggaggctgaggcaggagaatcgcttgaacgtgggaggcggagcttgcagtgagctgagatcacggcactgtactctagcctgggtgacagagcgagactccatctcaaaaaaaaaaaaaaaagcatgagtcaaacagtcatgtgtcttctgtctcattccgaatggcaggtaagggagaaaccgacctctcagcaccactcttcctgctttctctgtttttttcgtccagccccaaagaccctgaacaatggtacaccactgcctgtcctggagggagagtccctgtggtctgtgtggctgacagcaccccacctcccaaccccgcccggctgagctggtcctgagagggaagaacactgaattcctcccagctctcagcacccgggggcctggagctgcctcagataggggctgggacggaggagcat

SEQ ID NO: 190182 - DNA, 595 bp, Homo sapiens
ttggtggctcacgcttgtaatgctagcactttgggaggctgaggtgggcagatcacgaggtcaggagttcgagaccagcctgaccaacatggtgaaatcccgtctctactaaaaatacaaaaattaacctggcgtggcggcacrtgcctgtaatcccagctactcaggaggctgaggcaggagaatcgcttgaacgtgggaggcggagcttgcagtgagctgagatcacggcactgtactctagcctgggtgacagagcgagactccatctcaaaaaaaaaaaaaaaagcatgagtcaaacagtcatgtgtcttctgtctcattccgaatggcaggtaagggagaaaccgacctctcagcaccactcttcctgctttctctgtttttttcgtccagccccaaagaccctgaacaatggtacaccactgcctgtcctggagggagagtccctgtggtctgtgtggctgacagcaccccacctcccaaccccgcccggctgagctggtcctgagagggaagaacactgaattcctcccagctctcagcacccgggggcctggagctgcctcagataggggctgggacggaggagcat

SEQ ID NO: 190183 - DNA, 595 bp, Homo sapiens
ttggtggctcacgcttgtaatgctagcactttgggaggctgaggtgggcagatcacgaggtcaggagttcgagaccagcctgaccaacatggtgaaatcccgtctctactaaaaatacaaaaattaacctggcgtggcggcacgtgcctgtaatcccagctactcaggaggctgaggcaggagaatcgcttgaacgtgggaggcggagcttgcagtgagctgagatcacggcactgtactctagcctgggtgacagagcgagactccatctcaaaaaaaaaaaaaaaagcatgagtcaaacagtcatgtgtcttctgtctcattccgaatggsaggtaagggagaaaccgacctctcagcaccactcttcctgctttctctgtttttttcgtccagccccaaagaccctgaacaatggtacaccactgcctgtcctggagggagagtccctgtggtctgtgtggctgacagcaccccacctcccaaccccgcccggctgagctggtcctgagagggaagaacactgaattcctcccagctctcagcacccgggggcctggagctgcctcagataggggctgggacggaggagcat

SEQ ID NO: 190184 - DNA, 641 bp, Homo sapiens
tcagtttccagtgtgttcgtgaaaggattaatccagggcattgtatatggagccattgcattctcattgctcttcttctgcctcatcctcttgtcatgagtatcaaagttcaaattcatcagcagcctttcccaaagcctactacctttatttatgttctccttttccttcctcatactttcttccaatttattttgctttgtctattttttttttttttttttttttttgagacagggtctccctctctcacccaggctggagtacagtgggtcaatcacagctcactgtagcctccacctccctgggctcatatgatcctcccacctcagcctcctcagtagctgggactacaggtgtgtgccaccacrcctggctaatttttgtattttttgtagaaataggatttcaccatgctgcccaggcaagtttccaactcctgggctcaagtgattgacccacctcagcctcccaaagtgctgttgggattactaggtgtggcccaccgcccctggccttgtctaccttttaaaaatggattcttatatcgttaactttcagctactcttctttttcagtatttgtatttagggctataagtttccctctaagcatgactttagctgcatctcacaaatttt

SEQ ID NO: 190185 - DNA, 641 bp, Homo sapiens
tcagtttccagtgtgttcgtgaaaggattaatccagggcattgtatatggagccattgcattctcattgctcttcttctgcctcatcctcttgtcatgagtatcaaagttcaaattcatcagcagcctttcccaaagcctactacctttatttatgttctccttttccttcctcatactttcttccaatttattttgctttgtctattttttttttttttttttttttttgagacagggtctccctctctcacccaggctggagtacagtgggtcaatcacagctcactgtagcctccacctccctgggctcatatgatcctcccacctcagcctcctcagtagctgggactacaggtgtgtgccaccacacctggctaatttttgtattttttgtagaaataggatttcaccatgctgcccaggcaagtttccaactcctgggctcaagtgattgacccacctcagcctcccaaagtgctgttgggattactaggtgtggcccacygcccctggccttgtctaccttttaaaaatggattcttatatcgttaactttcagctactcttctttttcagtatttgtatttagggctataagtttccctctaagcatgactttagctgcatctcacaaatttt

SEQ ID NO: 190186 - DNA, 479 bp, Homo sapiens
tgtgggcactgagtgtttataattacctttattttccttttaatgttcatggaatcagtatagttggtcccactttcatttttttatgttagtaatgtgtgtcttcttttttctttggttagactatctggaggcttatcaattttattaatcttttcaaagagccaactttggtttcattgattttctctacggttttcctattttcaatgtcattgatttctgctcttttgttatttcttttcttctatttgttttaggtttatattgttcttctttctcagtttcctaaggtggaaattcagataatttatttagagctttcttttttaatatatgcatttaatgctataaattgttttcactgcatcccacaaattttgataagttgcatttttattttamtttacctcaaaatatttttaatttctcttgagactgattctttgacccatgtgttatttataagtatgttgttt

SEQ ID NO: 190187 - DNA, 612 bp, Homo sapiens
gacttctctgtcccccagaattgcgagaaataaatgtttgttgtttaaaagtcacccagtttttggtatttttgttacagcagctcaaaagactaagacaatgtcaattagatctagttagctgagagtgctattcagttcaactatacccttgctaattttctaactgctgaacctgtcttttactgataaatgtgtgttaaagattccaacaataatagtggatttgtttrtttctccttgtagttctatcagtttttacctaatgcaatttgacactttgttattaggcacataaatattaaggatacttatgtcttcttacagactgacccagttatcatgtcatgttcttctttattcctgatagtttttcttgttctgaagtctgctttgtctgaagataaagtgtgctaccacagcttcttttgatttgtgttagtacggtatatctttatctccttacttttaatttttctgtgtcttaatatttaaattgggctttttgtaaacaaaatataattgggtcatttttctacccactctgtcagtctcttgatgtatttacaacaatcacatttaaagtgattattgatgtatttggattaagat

SEQ ID NO: 190188 - DNA, 536 bp, Homo sapiens
ttcaccacaagctgactgaagagaccttgggccttgaatgaacatttgtggtagcaaggcaatatgtgccacagggcagaggtgccatggggaaaaactcctctgcttgtggactaaggggggaaaacagtgggaaggactttgtcttgtggcttgggtgccagttcagccatagtagagtacagcaccaggtagattcctaaggtttctgacttcaggccttggctcctggacagcatctctagacctgcccaggactggggggatcttgttaccctgaagggaaggacacaagcctggctggcttcacctcctgcttattgcagaggcctagagcattcagtaaacataggcaataggcaggcagtggttgctgcaggccttggacaagacccagggctgtgctagctttaggtttgacscagtgcagtcgcagtggtggtggccacaggggtgcttgtgtgacccctgccccaaatccaagcagctcatcacagagagactgtttgtttgggagaaaataaggaaaaagaaca

SEQ ID NO: 190189 - DNA, 330 bp, Homo sapiens
cctgcttcctgcacctccctagcgctgagcccctcacctccctgctgtgctgaggtgattgcagtgccacctgctgatgcctccttccactggcaaagcggccgctggcgggactgttctgactggtaggcaggtgggaaagtgatgctttttaggaactcaatcctcagtggctctaatacgatagggactgagcaatccaccctgctgcctccatgaaatctctagaaccrgaactgtgcccccatcccctgctctcctcagtagggcaccctgatgcccgagaaccagtgcagaccacactgccagccttggggggctggaaaggaa

SEQ ID NO: 190190 - DNA, 605 bp, Homo sapiens
tgaggaccacattttattgtcctttttttttttttaaagcctacagcctttctgaatgaagaccacgtttttagaaccaccaacttgacaaacatgttggtaatgcttattttgtgcccagtgtgttccttacatatgctttacatttgttacatactattattatcctgttttacagatcaggaaactgaggcagagtagaagtagtggagctgatggcctagtctggctctaagtgtttatgctgttaatcactatgttatgctgctacacagagttaattcacatatggtatacatgtttattgagtgaaaacttgcaaataattttctgcaaatttgggatgcttacctccaagaaaggagacttatcctctttcaagacaayagtctaaaaatccaagtattccctcaatgtgcttgtgtgtatcaattaactaattagttattatattcagtaatttaaaaattacttatatgtttaaggcccagttttatgtaatatagtacaaatgtgaattataatttgtatacaaactagtgttgttgaatcagtggttttgagacttcagagagtcacagaaattctttgggcgtcaagtttct

SEQ ID NO: 190191 - DNA, 605 bp, Homo sapiens
tgaggaccacattttattgtcctttttttttttttaaagcctacagcctttctgaatgaagaccacgtttttagaaccaccaacttgacaaacatgttggtaatgcttattttgtgcccagtgtgttccttacatatgctttacatttgttacatactattattatcctgttttacagatcaggaaactgaggcagagtagaagtagtggagctgatggcctagtctggctctaagtgtttatgctgttaatcactatgttatgctgctacacagagttaattcacatatggtatacatgtttattgagtgaaaacttgcaaataattttctgcaaatttgggatgcttacctccaagaaaggagacttatcctctttcaagacaacagtctaaaaatccaagtattccctcaatgtgcttgtrtgtatcaattaactaattagttattatattcagtaatttaaaaattacttatatgtttaaggcccagttttatgtaatatagtacaaatgtgaattataatttgtatacaaactagtgttgttgaatcagtggttttgagacttcagagagtcacagaaattctttgggcgtcaagtttct

SEQ ID NO: 190192 - DNA, 579 bp, Homo sapiens
tcaaactcattttctgtccagttttgttcccttgctggtgaagagctgcagtcctttagaggagaagaggcactctggttttggaattttcagcttttctgctctggtttctccccacctttgtgggtttatcttcctttgatctttgatgttggtgacctacagtggggttttggtgtggatgtcattttattgatgttgatgctattcctttctgttcgttagttttccttctaacagtcaggcccatcagctgaaggtytgttggagtttgctggaggtccacttcagaccctgtttgcctgggtatcaccagcagaggctccataacagcaaatattgctgcctgatccttcctctggaagcttcatcccagaggggcacccacctgtatgaggtgtctgttggcccgtactgggagatgtctcccagtcaggctacacaggggtcagggacccacttgaggaggcagtccgtccactctcagagctcgaatgccacgctgggagaaccactgctctcttcagagctgtcatacagggacatttaagtctaaagaggctgtctgccttttgttca

SEQ ID NO: 190193 - DNA, 480 bp, Homo sapiens
acagaattcagtagctacatgtgacgaagaatacagactttacaaaatttgtttagaaaagtcactaactaaacaaaacaactacaacaagaagyaacaaaaaaccccagagaaggttgaagattctgatttccagagatttcacattatacttgtcaaagtatcagatattcaacaagtataaagaaatgagaacatatggcccatggacaggagaaaaggaaattaatagaaactattcctgaggaagctcagacattggattcactagacaaagattttatatcaattattttaaatattctcaaacagctaaaggaaacaatttgcaaataaggaaaccatgagactgatgtctcaccaaatagtgaatatcagcaaagatgtagaagttataaaaaggaaccaaagagaaattatggtgttgagaagcataataactgaaatgagaaattcacaagaagtgtgcaaatcacattt

SEQ ID NO: 190194 - DNA, 480 bp, Homo sapiens
acagaattcagtagctacatgtgacgaagaatacagactttacaaaatttgtttagaaaagtcactaactaaacaaaacaactacaacaagaagcaacaaaaaaccccagagaaggtkgaagattctgatttccagagatttcacattatacttgtcaaagtatcagatattcaacaagtataaagaaatgagaacatatggcccatggacaggagaaaaggaaattaatagaaactattcctgaggaagctcagacattggattcactagacaaagattttatatcaattattttaaatattctcaaacagctaaaggaaacaatttgcaaataaggaaaccatgagactgatgtctcaccaaatagtgaatatcagcaaagatgtagaagttataaaaaggaaccaaagagaaattatggtgttgagaagcataataactgaaatgagaaattcacaagaagtgtgcaaatcacattt

SEQ ID NO: 190195 - DNA, 480 bp, Homo sapiens
acagaattcagtagctacatgtgacgaagaatacagactttacaaaatttgtttagaaaagtcactaactaaacaaaacaactacaacaagaagcaacaaaaaaccccagagaaggttgaagattctgatttccagagatttcacattatacttgtcaaagtatcagatattcaacaagtataaagaaatgagaacatatggcccatggacaggagaaaaggaaattaatagaaactattcctgaggaagctcagacattggaytcactagacaaagattttatatcaattattttaaatattctcaaacagctaaaggaaacaatttgcaaataaggaaaccatgagactgatgtctcaccaaatagtgaatatcagcaaagatgtagaagttataaaaaggaaccaaagagaaattatggtgttgagaagcataataactgaaatgagaaattcacaagaagtgtgcaaatcacattt

SEQ ID NO: 190196 - DNA, 548 bp, Homo sapiens
tgaaaaggatgcaaatgattttggcccataacaacgcaaatgattcctattcttggcaatgcaaatggactttatccagtagagaatacaaatttctgtaaatcaaattctgtaatgaatcggttttaacttactggtttcctcattaattactcagttaagtaaactctttgacactcaacattttgactcatgctgtttttaaatttatatgacttataattttacagttttggaaattacattttaaaattatgtacttgtgtaatatgagtagttaaatataagtgtatacctttggatttctctgtctctctctttttttttttttttttttaattttaaaaataaaggaaaggttttgccatgttgcccaggctggtctccaactcctgtgctcaagcaatccatccaccttaacttcccaaagtgctgggattacaggcatgagccaccacacctggcctatayatgtggatgttttaaaagtacctatattatgtgctgaaaaataataaaacagcatttatttttaaaatgaagagtaa

SEQ ID NO: 190197 - DNA, 564 bp, Homo sapiens
tcttttctgtttcccctttgctgaagcaaaaaaatctgtctcagaatctagttttaatagtataagggatacaagcaaggtaaaacagaattgtcaaaaaggaaaactttctataacatttcaaaatagtaccccactatatgttttgaaaattgtacttttttaaaaatctcattacatgacttaattccttggcttttcatgcgatgcaaggaaacattctgtctttggagggtaaaagaattggcattgctggccatttccaagttgggttacctgggacaagttacttaaactctattacatcatttgtaaaktgggaataataatttgtgggctgtgagtattaaattggttgttatatgtcaagtacctgccaccataaatgacatatagtaacacgttgattattgttaggctttagtaaggaaatacttttttaaaaatccataagtgattcaaatagaggtcaaaggcttcattcagctaatgtgcattaggaagcatctgaagattaggtaactccccaatggaagcaggatcagaacgtctacaggatagggg

SEQ ID NO: 190198 - DNA, 633 bp, Homo sapiens
tttaaattatccagtatatgcaaacaaacaccaggacatcagataggaagattaaacctctatccattgcagaatgagtcacagcccatgttttagtctctatctactttctccagttcaaatttccagtctaacactcaacatattcttcatcactgttctgcccgatccaacatccatctccattacagaaaatatggtatttccaattagtaatcctcataaattccaatgcctaaacacgaaaccgttcaacaaataataacagagatgtaggagtcttgatcttttcctctacctgtgggattatttgtgggtgtgtgacatatgccttaaaagactcagtcaagggacattgcttatgtctttatcttactacatatgctagggtgctaacttttgtgagggagacctaaagccttgtatatgtatacacattagagacttggagaaagtaagtacgcgatgtttaatttttaagagcaccatsgataagatccttggcatctgctagagtggctgttttgtaaagtaccataactgccatttatatctccagaaagatttgaaaatctactacagtgactactgtggttctcacaagacagagattttcagattaaaaaaatacag

SEQ ID NO: 190199 - DNA, 304 bp, Homo sapiens
actcaaagtgcctgtctgctgtatgaagaataccttgggccaagttgaaaatcaaaacatactgcttccttcattgacaatttcttgctccataaaaacaatttcagcaaactgagtaatgtacctggggtcataattaatctacatttggtataagtgctttatctttttgtggatcaaaagcaaagggttcatgcaatggtagctagtccatggatcccatctgagctgcagtggtctacggaaaactaggaatggattgattatcttcaraatgacctactgaataactagtcttattagt

SEQ ID NO: 190200 - DNA, 567 bp, Homo sapiens
tgaaaaatctagattaatatttggtacatatttggagctcaaaataagtttgaaatgattatgagtctcacgtttctcatccataaaataatgaaactgtatcagtgctactccaggtataatttgcaaaccagtgatgcaccgtaaactaactggtccttaatgaattaagtacagaaattgagagtgtgtacacacattttacacaatttgcaagattaactttatgtctatttaatctaaaaattaaaaactggaacttgtattcttgtaggtttttcttttttattatttcattttgtagtaattcattttttactatgttccacaaaattgttggactatagtacgttgaaaatttagaaagaaaaagctgatttttcactaactaaaaggtagtttagtatcactggaccagttgacctctatgatattctttctagttctaaatgtctgtaattctggataaacgatacacttctttttttctgrgcacggtgaaatgtattcacagcaaatacagatgttcttagtgaaaattacttcactgaattaaaattccaaata

SEQ ID NO: 190201 - DNA, 431 bp, Homo sapiens
tacacaacccttaacccacccaacagccatggatccaaagaagtgttttatggactggctgatgagtgcagacctgtggtcaatagaggacactgagaatgaggcatttgagagacaatggcaaggtctgaggtgcacagtggcagatgcaaacctacatcwaaggccgctgaggaccagtggcataaccagcatatttcctgtgcccagtgctctgagacaagagcggacttgggacatgtctggagagaccatagggcagcatggatcacgccctagctcacctgctgaggtctgtacattttccccttcagatgattttttgaaggagaagggaaagggtgaaaaaaatagcaacacaaaactattgttggagaatctgaagtttgaattaattgaatatttacctataatagattgattagaacaaa

SEQ ID NO: 190202 - DNA, 432 bp, Homo sapiens
cgtgagtctccacagtgtgtaagtgcgggagggaaactgacagctcctcacagggcctgcctgtgtcccagatgaagacagtgatggagagagcatatgaacaygccatccttgtaggaagcaggctgttagtaaggctggataaaggacacagagtctgaattgtgactagctctagagttgctgatttccgtgggctgaaaaagtaaagattacaataacacctgctttcccccaccacgtgtgtctctctttctctctctgttctctctctctctcacacacacaatcagttgtgcattataaagaccttcattttgattaagatacaaattttgctagttcacaccactcttcctttcccacatgaatattctgaaaagaactcataaaatataataaagaaaaaagaaaagcaataaaacataaaat

SEQ ID NO: 190203 - DNA, 432 bp, Homo sapiens
cgtgagtctccacagtgtgtaagtgcgggagggaaactgacagctcctcacagggcctgcctgtgtcccagatgaagacagtgatggagagagcatatgaacatgccatccttgtaggaagcaggctgttagtaaggctggataaaggacacagagtctgaattgtgactagctctagagttgctgatttccgtgggctgaaaaagtaaagattacaataacacctgctttcccccaccacgtgkgtctctctttctctctctgttctctctctctctcacacacacaatcagttgtgcattataaagaccttcattttgattaagatacaaattttgctagttcacaccactcttcctttcccacatgaatattctgaaaagaactcataaaatataataaagaaaaaagaaaagcaataaaacataaaat

SEQ ID NO: 190204 - DNA, 432 bp, Homo sapiens
cgtgagtctccacagtgtgtaagtgcgggagggaaactgacagctcctcacagggcctgcctgtgtcccagatgaagacagtgatggagagagcatatgaacatgccatccttgtaggaagcaggctgttagtaaggctggataaaggacacagagtctgaattgtgactagctctagagttgctgatttccgtgggctgaaaaagtaaagattacaataacacctgctttcccccaccacgtgtgtctctctttctctctctgttctctctctctctcacacacacaatcarttgtgcattataaagaccttcattttgattaagatacaaattttgctagttcacaccactcttcctttcccacatgaatattctgaaaagaactcataaaatataataaagaaaaaagaaaagcaataaaacataaaat

SEQ ID NO: 190205 - DNA, 559 bp, Homo sapiens
ttgcacttatcttgcatagaatttctcaccacttgtttcactcaacaatattttctcatgttacattctaattgttataatgactgcttgctgtgtacaatgtgccactaagtgactataccagagtccagctgctggacattttttctaacgttttcacgtaacttcttttgtaatcatcttcctgtatatatgtttttccatgtttgggaacattcccttawactagaattttataagtgggattattggaccacggaaatgattttttaaaagctatacacatttccaagttcctttaaaaaacacacaacacagtcacaatgaatgtacagatttcactacactgtgattagaagtgggtaatgtatacgtaatgttaattcaattttaaaagtaaagaatgttgccaccttgttgtttttatttacctaacagtgattacaagtgagaatcactgagtttttccccatattttgatgattagttctattttcctgcccatgaatgatctgcttgtattctttgggatttagctgtcaagtttacaatgttcttc

SEQ ID NO: 190206 - DNA, 581 bp, Homo sapiens
gtaactcattggaatttaaatttacacagaggaacttttaaacttacaaagctttagggatgtgtactgcatggtgagattgcagaacttagagcatttgagccatctcttgcctccatttctttggaaagcagttaatatagtccttttccttaagtattagaatgatctctgaagtttgagaccttgcgaccataacaggttccctggtctgagtcattctgaaagcaatcacagttatggtacagctactatttgtcacatttctctataggtgccatcatttatgtaatctcattcatattgaatactccaaacagacttacgcagtaggtattatgacctccatgtcagcggaagaaacttgcccaacatcatagagctagtaagaggcagaggctattcaacttgacttggagcctgcactttccccaagactttatcattctaattgtagacaggacataatatatgcaaccgtaacaaattcctgatgytcatgcagttcattctatccacagtcacatttaaagaagaaataagaattccctccaaagttattaaaaattgattctattttt

SEQ ID NO: 190207 - DNA, 446 bp, Homo sapiens
gggttgttcacttattaagggcagggacagagtgcactgctcacagttgctgaatttggtgttcgttcggtgagcttatagctgaatgaactcattttcaatcccagattattcaagggggaagctgcctttgtgtcaggcaatgggtgaagtagcttgtttgtgacttttcccagaggagggttcttgcattcacgcagcaaacatacttatcatgcactctgcggtgtttatatagctgggaaacagatgggaacttcaaaggacaggaatgctttgcttctcttgaaaattctgctctgagtatttgtcttagtcttctcgtgctgggtacttaaacaacagacatttatttctcataattctggatgctggaagamcaaaatcaaggtgcaggctgatttgattcctgttgaggccccactttctggcttgcaaacagccat

SEQ ID NO: 190208 - DNA, 381 bp, Homo sapiens
tttcttgattagctcaggctcccaacaccagcttcttcagaattattctcgtaagggattgttttgctgtagtccacattgtatctcacagatgtttaactcaaattaatactcacaggaaacttatagaggcgttcacgtatgtagtgacatttattaaagtttggaaaaaaggaggttttacattacaaaaaaaccgtcaattttattttatttatttatatatattttttgagatggagtttcgctcttgttgcccaggctggaatgcaatggtgagatctcggctcaccacaatctccgcctcccagaacccaaycaattttaaattcagtatcagtcatctctattctttaaggccttggaccaggtccacatttt

SEQ ID NO: 190209 - DNA, 581 bp, Homo sapiens
ttctgttttgaccaaacatttaaagccatttaatatatttgataaacgttctcaaaatccaatyctaaatgaagtcttattgctggggcttatcaaagctataaaactaatccctagctgggcacagtgactcatgcctgtaatcccagcacttctgggaggtcgaggcgggcagatcacgaggtcaggagtttgagacgagcctggccaagagaccagcctggccgatatggtgaaaccccatctctactaaaaatacaaaaattagccgggtgtgctggcatgcacctgtaatcccggctactcaggatgctgaggcaggagaatagcttgaacccgggaggcagaggttgcagtgagccaagatcgtgccactgcactccagcctgggtgatggagagagactctgtctcaataaataaacaaataaaccccacaaggttgtagaatctttttacagctttcagtcaaactaaaggcactccagtgtcaccaccttcagcctaataatcacatatactggaaaagacatcggttaaaggcctttctttggcccccttgaaagagtcttatcaggtgct

SEQ ID NO: 190210 - DNA, 581 bp, Homo sapiens
ttctgttttgaccaaacatttaaagccatttaatatatttgataaacgttctcaaaatccaattctaaatgaagtcttattgctggggcttatcaaagctataaaactaatccctagcygggcacagtgactcatgcctgtaatcccagcacttctgggaggtcgaggcgggcagatcacgaggtcaggagtttgagacgagcctggccaagagaccagcctggccgatatggtgaaaccccatctctactaaaaatacaaaaattagccgggtgtgctggcatgcacctgtaatcccggctactcaggatgctgaggcaggagaatagcttgaacccgggaggcagaggttgcagtgagccaagatcgtgccactgcactccagcctgggtgatggagagagactctgtctcaataaataaacaaataaaccccacaaggttgtagaatctttttacagctttcagtcaaactaaaggcactccagtgtcaccaccttcagcctaataatcacatatactggaaaagacatcggttaaaggcctttctttggcccccttgaaagagtcttatcaggtgct

SEQ ID NO: 190211 - DNA, 581 bp, Homo sapiens
ttctgttttgaccaaacatttaaagccatttaatatatttgataaacgttctcaaaatccaattctaaatgaagtcttattgctggggcttatcaaagctataaaactaatccctagctgggcacagtgactcatgcctgtaatcccagcacttctgggaggtcgaggcgggcagatcacgaggtcaggagtttgagacgagcctggccaagagaccagcctggccgatatggtgaaaccccatctctactaaaaatacaaaaattagccgggtgtgctggcatgcacctgtaatcccggctactcaggatgctgaggcaggagaatagcttgaacccgggaggcagaggttgcagtgagccaagatcgtgccactgcactccagcctgggtgatggagagagactctgtctcaataaataaayaaataaaccccacaaggttgtagaatctttttacagctttcagtcaaactaaaggcactccagtgtcaccaccttcagcctaataatcacatatactggaaaagacatcggttaaaggcctttctttggcccccttgaaagagtcttatcaggtgct

SEQ ID NO: 190212 - DNA, 394 bp, Homo sapiens
caatctaatgatagagacacctgtttgacagcaggcattctaatgccagacactccaggccgagcccaggcattataatgacagagacatatctgcaacaacatgtattttaatgggagaaacttctggccaaccccaggcagactaataatagagacacctgtgtgactwcaggcattctaatggctcccaactgaccaaaaccattctaatgatagacacacctgggcgacaacaggcattctaatgaaagagactgctggccaataccaggcagtctaataatatagatagcttggtgaccccaggaattataatggaagaaactcctggttgaccacaagccgttcaattatagagacatctgggccaccccaggaaatctacttggaga

SEQ ID NO: 190213 - DNA, 394 bp, Homo sapiens
caatctaatgatagagacacctgtttgacagcaggcattctaatgccagacactccaggccgagcccaggcattataatgacagagacatatctgcaacaacatgtattttaatgggagaaacttctggccaaccccaggcagactaataatagagacacctgtgtgacttcaggcattctaatggctcccaactgaccaaaaccattctaatgatagacacacctgggcgacaacaggcattctaatgaaagagactgctggccaataccaggcagtctaataatatagatagcttsgtgaccccaggaattataatggaagaaactcctggttgaccacaagccgttcaattatagagacatctgggccaccccaggaaatctacttggaga

SEQ ID NO: 190214 - DNA, 561 bp, Homo sapiens
tctttggtatatactcaaagaagttgaaaagtgaggtctaaacaaatctacacacagacattcatagtacctttatttataattgccaaaacatggaagcaacaaatatgtctttcagtagttaaactgataaattacagtcgatccaaatgtggaatataacttagtaataaggattatgagctaaaaaaccatgaaaatatgtggataaaacttaattgcatattactaagagaaagwaggcaatctgaaaaagctccttactgcatgattccaactgtttgacgttatggaaaaacaaaactgaacacattaaaagatttagtggccaggtacttgtcgggagtgaaggataaagagttacagaagattttcagggcattgaaactactgatgaaaaattccaattcacaagaaaatgtacttatttctgttatatcttggcagcttaagataactggaatcataactaaaagcatcattttaggaccatcggacttcagtttaaattttatgtaaatatagaataatttttgtataatctttagaatactcacatta

SEQ ID NO: 190215 - DNA, 487 bp, Homo sapiens
gggctctacaatgttccttcatagattgtacacagagagtgtttccaacctactgaataaaaagaaaggtttaactctgtgagatgaatccacacagcrcaaagcattttcacagatatcttgtttctagtgattatcatggtgtattcagttttacaccatcagcttcaatgggctccaaaatgtcctttcatagattttacaagaagagtttttccaactggctgaagcaaaataaaatttgaactctgctgatgaaaccacacattgcaatgtattttcacacatagcttttttctcgtttttaaggtgtgatattttatttttcactattggcctcaatgtgctcccaaatgtccctttgtaaattctacaaaagcagtgtttgcaacctgctgaatgaaaatcaatattgaacactgtgcaatgaatccacacattgaaaagcattttcacagatagcttgtttctagtttttcaacacgtg

SEQ ID NO: 190216 - DNA, 594 bp, Homo sapiens
cctgcttgcatttatttagtacagatttaatgacaaaggcttggagcaaaaacaacttgtgggtaataaacattgtcactccccaagtagagaacagtcctgcrtgtgaatgaccaaaagttggtttctggagacaggagtaaacaaattcatctagataagttcctttacattcccttgttatctgccctttgctctcagtctccagataagaaaatttgcctgccttatccaaattctctttcaaagcttttgcaaaacctcccagccttccaagaaggtttgcatctttccttataactttttcttacaactttttccacaaccctgactgaacttctacacccctgatgctgggttcccagcttcctccctcttcaacctcactgtcttccttgcctctccatccactcttggtgttttttctctgaagatctgctcaaatcgttaatatttttgtgtctcctggtggaagtggcatttcctggcttcatctagttggtcatcttgtctacactctatattgtttaattattttattataacaaagccaaaaatattttcaattaattttatatttttcaaatgcagaaa

SEQ ID NO: 190217 - DNA, 604 bp, Homo sapiens
aagcttttcataataatactaagacatcatttgtctttttttgctatgttgatatttgcactgatsgtatctggttgatgcaaaagcaattggggtaaaactgctggtgccttagcactaatcaaggcagtgttgctaatactagtaactgtactagtaatcattgttttcttccttgccatccattcatagtaaaagaagaagataccaattttgcttaaaaatatctttgatgaaatggcagtaacagttaatttttaaatattgacctttgagtacctgtctttttaatattctttgtgatgagatgggaagtatgcataaagcacttactctgcacactgaacaaagatgctggtttcaagggaaagtacataagtgactgaactagccatttttcttcatggaagacaatttttacttgaatgaatgactaacaaagtatggattttcggactatttggaagccattttcttaaaaatgaacaaagtccatcacttcaggaaagacaactgataatatttattgccagtgataaaatgtgagctctcaagtgaaagttagaactttgtaaaacatacgttgatcaccatgagcttgaca

SEQ ID NO: 190218 - DNA, 348 bp, Homo sapiens
cctcattttcaaatgtacttcaatgaattgttgttcatttggaatgttctacagtaagttacctttagtaagattttgccgtttctgtaagacttcactgccttctgggcataatgtataagctagaaagaactcagttttccagaaattaaggatcccatttttacctaaaatattggctttaatctcaggttctcttgrttgacttagccaatgatttttcctaagcatgcaagcaaaaggaaacaaaggggtagaacacaaaaatccccatgaattttcaaaagccaaattttataacccctgcaatattactgcttaataccagttcctttctgaccaagtcag

SEQ ID NO: 190219 - DNA, 487 bp, Homo sapiens
ttgaacctaaaatctagaatttgaattcaaagttctttctgtttcagtgcttctctttactactactactactactactactactttttttttaaagcaatggaactgtttgtttcttagatgaaatctttgtgaagtccaatatttaaaaccaataaaggtagcactattttgatggaagaatagatttggtggggcacttacttgggggttggaaccttgcatgcttaactctgtggtagcttttgggcacctctctagaatccctaggactctactaaaacagtttggacactttatgacatagccataatcatttgttacatattatgaaatctcagcttctttagatgttacagttatagtgtatctatttctgttaygcttcctgatatgtctgtaggcttcctgatatgtctgtctgtctgagtgtaatccctcttatgactcagtagcatttttctttcatgtaagtttgtgttctgat

SEQ ID NO: 190220 - DNA, 579 bp, Homo sapiens
atggtgaaattctgtctctactaaaaatgtaaaattagccaggtgtggtggcacacacctgtagtcccagccactagggaggctgaggcaggagcatcacttgtacccgggaggcagaggctgcagtgagccgagatcgtgccactacactccagcctgggtaatggagcaagactctgtctcaaaaaaaaatagagacagagatatagatatgtgaggttttgttcctgtcacagtattgttagctgccttagagtttcaactatataactgctttatagactcggtgagctttttatttttatgatggtaagtactgtcctttcgttaacatgcttagaactcctttcagtatttcttatacgatcagtatagtgatgatgaattcccttcacacttgtttgtctgggaaagactttatttctccttcatgtacaaagcttatttttttggcaggatataaaattcttggccggtggttgtgcacrgtggctcacacctgtaatcccagtatgttgagaggccaaggcgggtggatcgcttgagctcaggagtttaagaccagtttgagcaacacag

SEQ ID NO: 190221 - DNA, 523 bp, Homo sapiens
  misc_feature (1)...(523): n = A,T,C or G
atgtaaatgacctacagtgctctgatgttacaatttgctgaaatatggtgatacgtattggctaatctgagccccataacaaatatgggaggcagaggtaataacaccctctctctgcaaagggttttgtgtgagggttggatgggatgatgctcataaaagcatttagtcactgtttgaaatggaagcaatcaatcaggaaaggttattttttgtttctctttctttttttgttattactttcactatgtccatgtgttcctttttttccratcataaaacttgaaccttgccagaggctaagtgacatgtatgatgtgacatgtatgatcttaatctcaggccaagagtggcctagatttgcttttcttatcaaattgttttctctacaacgttttatgacagaagcgatgctccctcatcctaattatccaaatagtgcaaaagtagataaagaataattgtacaatctccccctatattgcttcattctcatttccttgacaggattctcaaaaatgng

SEQ ID NO: 190222 - DNA, 511 bp, Homo sapiens
tcaggagtactgtatgtattgaaatttttgcatgcataaactgtttttctatagtcttaaatatataaaagatacatcaaacagttatacttattttcttgagtttcttgatttccatataattttttgagttgttaattttaagaattcttattcctgtcttatttttgtactattattaaaagttttattttttccttttagagtctgtgaaaaatttttaatctgattttagtctaaactttttctaggatgtgtattgtagttgattgttctgagtcagttatctcagaaacatgatagattctttcaatatgtggattttatttttctttcaattttgacaagactttaaaaattgtagcttaaaattatttcagagtttttgggttgttttcttattctattttagyggctccaattatatgtctgcatgatattcattgcctgccttctactctttaattattttcattctaatacttttaatttatttatttatcttattttt

SEQ ID NO: 190223 - DNA, 625 bp, Homo sapiens
ctattgctttggtcccatttgcctcttgctgaatgacgtatattagtgcgagtgaaggattctgaaattgtcttccttattgacctcattttcaagcaccagtttttcttgagttcttttcctcccaagaatagtatatttcaaaaaygcaattgttgtcttgaaattgttaccacagggcttgaaaaattatcatcttaaagcaagtatgagtagcttatataaatagaaagtgtaggttactgtagagaatagtgttgtgttttaaatgttccaaagatttttattctgtcaattttactttctctcttctatatattgaacctgtcctcaactattggctgcttcccaacagtactgaaaatgctcaaatctctcataccttacaaaaaacaaagcaatgaaattccgtcaatttaatcagtaatccatgttctcagtaattaattcatttattcaagaaacaattgtaaaccccaagtgtaagtaatgtatttgaactacatcagtcaacgaaacaaaaccccagaactatgactttattctggtgggaggaccaacagtcaaggagaaaactagacaaagaaattaaaagccctgggaaaaataaacaggttgttatttg

SEQ ID NO: 190224 - DNA, 647 bp, Homo sapiens
tattattttacagggagaatgagctgaacaaagtcttcactctgccattaaggagctgagctcccctctgttaacttttaagagcaacaacaacaaaaacatctattacagttgtctgactgtaaaccacactagtgaatataataaaggattcagaaactaggcatcctgtgtttgaatcttggccctaccatttgttatgtaacctttggtaaataaccttttacacctttattcagtaatataatggacatcatagtagtgtctagtttataggatattctggagaatttaaaaaatgagataagtaacttggaattgtacctaycatataaacatactcaaaagttatctatttttttatgctgtaaccttaaattatcaagaaagagaacaaacatttcaccataagatgtgttcacactctctgtttctcttgcagaacattctcttctttgaagtggaataaggttactaatctgtagataagagcatattagatatggctgttattattgctaacctttagttacatcatagttaaacttgtacactaaagaaaagttacacagagtaatggagatgcactattaaagagaaagatacatgaggtgtccttccaaaaccagtctttctagggagaatca

SEQ ID NO: 190225 - DNA, 647 bp, Homo sapiens
tattattttacagggagaatgagctgaacaaagtcttcactctgccattaaggagctgagctcccctctgttaacttttaagagcaacaacaacaaaaacatctattacagttgtctgactgtaaaccacactagtgaatataataaaggattcagaaactaggcatcctgtgtttgaatcttggccctaccatttgttatgtaacctttggtaaataaccttttacacctttattcagtaatataatggacatcatagtagtgtctagtttataggatattctggagaatttaaaaaatgagataagtaacttggaattgtacctatcatataaacatactcaaaagttatctatttttttatgctgtamccttaaattatcaagaaagagaacaaacatttcaccataagatgtgttcacactctctgtttctcttgcagaacattctcttctttgaagtggaataaggttactaatctgtagataagagcatattagatatggctgttattattgctaacctttagttacatcatagttaaacttgtacactaaagaaaagttacacagagtaatggagatgcactattaaagagaaagatacatgaggtgtccttccaaaaccagtctttctagggagaatca

SEQ ID NO: 190226 - DNA, 647 bp, Homo sapiens
tattattttacagggagaatgagctgaacaaagtcttcactctgccattaaggagctgagctcccctctgttaacttttaagagcaacaacaacaaaaacatctattacagttgtctgactgtaaaccacactagtgaatataataaaggattcagaaactaggcatcctgtgtttgaatcttggccctaccatttgttatgtaacctttggtaaataaccttttacacctttattcagtaatataatggacatcatagtagtgtctagtttataggatattctggagaatttaaaaaatgagataagtaacttggaattgtacctatcatataaacatactcaaaagttatctatttttttatgctgtaaccttaaattatcaagaaagagaacaaacatttcaccataagatgtgttcacactctctgtttctcttgcagaacattctcttctttgaagtggaataaggttactaatctgtagataagagcatattagatatggctgttattattgctmacctttagttacatcatagttaaacttgtacactaaagaaaagttacacagagtaatggagatgcactattaaagagaaagatacatgaggtgtccttccaaaaccagtctttctagggagaatca

SEQ ID NO: 190227 - DNA, 608 bp, Homo sapiens
tatgaagtactatccatttctaaagtccaatgattccacatgtatatgagtatatgcatatacacatatatatacacacataagtatataatgtataaatatttttatgttcaggatacaattacaataattaattgtcaaattaatgtgtgcccaaacccagaagaaattgtggaaaagaaaatttatcaagcaaacacatccaccgttgcttattttgtttctcaacaacattcattctaacaagtaataagayggagtttggggataattgtatctagaaaaatcacttcacttattcttagacagtgacttaaacctatcttctcagcaacagaactgtctcagagctatttgcatttaaattttcatggaaagggttggcataacctttccacatagcttggtgactgaagcagacagcatctccagggctttgtcttacacacaaagcagctgtgacacagtgcaaagagcaccggacttgccactagaaaacctgagcctcactcccatctatgcctcttttagaaaccatgcggcattgggaccatcacttagcctcttggagcctcgatttccttatctccaataagattgtggtgata

SEQ ID NO: 190228 - DNA, 579 bp, Homo sapiens
tttttaactcttgtatttctagcaccaagcatagtatctgacattttgtaggtgctcaacaaatattttttattgaatgaaagaaaatatagcttagttataaagtaccttaagactatacatgagacattctggataaattaaatgtagttctctctatatatacacatatgataatattttatacacctatctataggtagatctatatctatttctctatatagacattataaaataattaaaaacagaaaagtcttattaaagttttaatcaatagtttctatcttccacccaaaactctcgtactgaaatattttcatcctctattgtaacaaatcttagctaagacattttaagaaagcaatatgaattaaatatttcataaagatgtttaatattttcaagctatatagcaaaacatcctggtattatgtaaggacgtagggaagagtgatttaagacatgcacatatcatcacaaataggctagccatctataacactggcattaaattttcrccatttgttcttgttctatttctggcattcacaaactaatgttttctattttttttta

SEQ ID NO: 190229 - DNA, 590 bp, Homo sapiens
ccaggtttcatttatttcacagtgccagatgagggtttgaaatactcttcaccactggaagtatgaaactgtctctaagcagtttatttaaaatggaggcaagattgatttttatttaagtcaatattttccagaaattgatggatattggtcattataacagtcattcaaaagttctgctacaatcaaacaaatgaatgtagaaaaccaatattaacctaaacaaagaagtaatttaaataaatataggcaaagagaagtgcaatttgtgagagatgcaaggatccttagataactagccagagagataatggtaggagttatgtaagttccaaggccggatattcacactatcgatcagaactcggtccagatttcatttgaaagggaaggacactcagaccattgtagtgataagtcttgctacttcaagattttgaactcctaaaatgtctggaaaattttttaaaaaacattgttatcttattttagggaaatgkggtgtttgtgtgtgtgtgtgtgtgttgctcaatttctaaatacaaagcatgacgctatatctatgaataaaattaaaaatttgattaatg

SEQ ID NO: 190230 - DNA, 410 bp, Homo sapiens
ttttaaatgttacaaggatgtaaatataagtaagttacattatttatgtcctagttagaggataagaggagtatactgacaaatataaaggtttttaaaactgcctcctatatttaatttacataatcaatcatccttttataagaaagaaaaaaaaatattgattgtgatctatgagccaagcacttcctagaaaaaagtgctgaataagacaaccaaaggcacataccccaagtatctgccaactgttaacactgtcataataatgaaaacaaaacaaaaaaaataatgaaactatmcttaaatgattgctgctgtctttagcctaggcatatgatctcctcagccatacatccagcatgcttcacgccttttgtttacttattagcttctgtaagcatataagattg

SEQ ID NO: 190231 - DNA, 400 bp, Homo sapiens
aagaattcaaaaacataggcaacaaaaccaaaaatagacaaatgtgactctattaaaccaagcttctgcacagcacaggaaacaaccaacacagcagagacaagctgttgaatgggagaaaatatttccaagctatttattcaacaaaggaagcatacccagaatatacacagaactcaaacaactcaacagtaaaaaagcaaaattttttaatcattaaaaatttgtcaaaggacacaaaatagacrttcctcaaaagaagacatgcaaatggctcacaggtatatgaaaaatgctcaacatccccaatcatcagaaaaatgcaaattaaaaccacaatgagatattatcttaccttagatggagtgattatcatcaaaaggacaaaaaaaaaaaaaac

SEQ ID NO: 190232 - DNA, 546 bp, Homo sapiens
tgtgaaaaacaggagtgcctgttctcacttaggtccttgggcacaggcccaagggtggagcccttgccagggacactgcccttctctacccagcacttccytgcccccttcccatatcaaaaccagaaaaagttaaccaaagccactgttctttttaggaagcagggaagaaaaaaggtaaagagaatatgcacctgttagagaatatgctacttttcgaaacaacttcctaaatgtgtttataatgcaggagcttaagtgttgtgctgcagatttctgaaagtttcacaatataaacattttgtttgggacatagaacctaggtgataatcatgttgttttatttccacttgataaccttcgtagtaaaatgtgctcacctttttatttattccaaccataggtctctcttttttgtattttagactttagggagaagggaaaagaaaatattccttgtgagaaaaaggaacatgaccacagcttcagctctgagtccattacattgcaatactgtttcccaaaacactgtaagggcccagaagt

SEQ ID NO: 190233 - DNA, 590 bp, Homo sapiens
aggctacctcctcataggtgcctccctaaatcaccccaattcaaatggatcctccagatatattctctcatagccctgtgttcttgtcctacaaaacatttgtcacactatgcaaatatgtcatttttgtttgtttatttgcttattgcttgtctctctatgaagcyaggaactatttctgtttgacaaaccacagcatctatgatttctagtatagatactggcccatagtgggcattcagtaaatacttgtttgctgaatgaatgaatcaccttttctctacctgcacccccacagggggtatggtagccatgcggagacagcttcaacagccagacagaggagaaggcaaattcatcttattcaaacctatgtggaagacttataatagcaccccatggaaaaggtcacaaatatacagggcaaacagtgaaaagcatggttaactttggcaaccaactaaagaaaacaaaacctcacacaagccacatttaccaaggcacctggtataaaaccaggggaaagggcaggacttttattgctcattttttacaaactgaggttttaaaaaagtgaggttcttatatgc

SEQ ID NO: 190234 - DNA, 590 bp, Homo sapiens
aggctacctcctcataggtgcctccctaaatcaccccaattcaaatggatcctccagatatattctctcatagccctgtgttcttgtcctacaaaacatttgtcacactatgcaaatatgtcatttttgtttgtttatttgcttattgcttgtctctctatgaagctaggaactatttctgtttgacaaaccacagcatctatgatttctagtatagatactggcccatagtgggcattcagtaaatacttgtttgctgaatgaatgaatcaccttttctctacctgcacccccacagggggtatggtagccatgcggagacagcttcaacagccagacagaggagaaggcaaattcatcttattcaaacctatgtggaagacttataatagcaccccayggaaaaggtcacaaatatacagggcaaacagtgaaaagcatggttaactttggcaaccaactaaagaaaacaaaacctcacacaagccacatttaccaaggcacctggtataaaaccaggggaaagggcaggacttttattgctcattttttacaaactgaggttttaaaaaagtgaggttcttatatgc

SEQ ID NO: 190235 - DNA, 575 bp, Homo sapiens
tgacactcaattccattcatagcagcagctgctgcagaccccaggtgagagaaattttcatttctatgctgactctgtattagtccattttcacgctgctataaggaactgcctgaggccagtgcagtggctcacacctctaatcccagcactttgggaggctgaggcaggcagaacacaygaggtcaggagttcgggaccagcctggccaacatgatgaaaccctgtctgtactgaaaatccaaaaaaaaattagccaggcatggtgccacatgcctgtaatcccaactacttgggaggctgacacagcagaatcacttgaatttggcgggaggcagaggttgcagtgagctgagattgcaccactgcactccagcctgggtgacaaagtgagacgccatcaaaaaaaaaaatcctgcctgagactgggtaatttataaaggaaagagtttaattgactcacagtttcacagggctgggggagctcaggaaacttccttcatgggcagaagaaaagcaacatgtccttctcatggcagcagaaaaggggagtgccaggcaaagagggaaaagcc

SEQ ID NO: 190236 - DNA, 575 bp, Homo sapiens
tgacactcaattccattcatagcagcagctgctgcagaccccaggtgagagaaattttcatttctatgctgactctgtattagtccattttcacgctgctataaggaactgcctgaggccagtgcagtggctcacacctctaatcccagcactttgggaggctgaggcaggcagaacacatgaggtcaggagttcgggaccagcctggccaacatgatgaaaccctgtctgtactgaaaatmcaaaaaaaaattagccaggcatggtgccacatgcctgtaatcccaactacttgggaggctgacacagcagaatcacttgaatttggcgggaggcagaggttgcagtgagctgagattgcaccactgcactccagcctgggtgacaaagtgagacgccatcaaaaaaaaaaatcctgcctgagactgggtaatttataaaggaaagagtttaattgactcacagtttcacagggctgggggagctcaggaaacttccttcatgggcagaagaaaagcaacatgtccttctcatggcagcagaaaaggggagtgccaggcaaagagggaaaagcc

SEQ ID NO: 190237 - DNA, 575 bp, Homo sapiens
tgacactcaattccattcatagcagcagctgctgcagaccccaggtgagagaaattttcatttctatgctgactctgtattagtccattttcacgctgctataaggaactgcctgaggccagtgcagtggctcacacctctaatcccagcactttgggaggctgaggcaggcagaacacatgaggtcaggagttcgggaccagcctggccaacatgatgaaaccctgtctgtactgaaaatccaaaaaaaaattagccaggcrtggtgccacatgcctgtaatcccaactacttgggaggctgacacagcagaatcacttgaatttggcgggaggcagaggttgcagtgagctgagattgcaccactgcactccagcctgggtgacaaagtgagacgccatcaaaaaaaaaaatcctgcctgagactgggtaatttataaaggaaagagtttaattgactcacagtttcacagggctgggggagctcaggaaacttccttcatgggcagaagaaaagcaacatgtccttctcatggcagcagaaaaggggagtgccaggcaaagagggaaaagcc

SEQ ID NO: 190238 - DNA, 514 bp, Homo sapiens
gtgtcattagggaagtgcaaattaaaatgacaatgagataccactacacacttattagaatggtcaaactccgaaacactgacaacgccaaatactggtgaggatgtggagcaacaagaactctcattgattgctaataggaatgcaaaatgatacaactgctttggaagacagttttgtggtttcttacaaaactaaaatactattaccatatgatccagcaatagtgcttcttggtatttatccagattagctgaaaacttatgtcctcacagaacctacacaccaatgtttatagaagctttatttataactgccagtaattaaaagaaatcaagacgtccttcaacaagtaartgaatagtgtggtacattctaacaatgaaatattattcaatgctgaaataaaatgagctatcaagccatacacacacaaaaaatggaataaagtaaaatgcatattacaaagtaaagaaatcaatctgacttcaattacatgacattctggaaaaag

SEQ ID NO: 190239 - DNA, 613 bp, Homo sapiens
aaccaaccattcatgcagcttttatattaattaaactcagttaatycaataccctattcaaccattaggataactctttgtttcacataattagtatttttgggtatattaagacagatgataatttcacactaaatggtaaattttagatgctcttcagctactggataatagagttagatgatacaaataaacaaaatacattttacaagttatgtgcttaatccagataacaacataggttggctgtggaaataaaaatgcaatgttattattccagtttccatattagtgctggctcccttgtgcccatttagtgaagttcaaggaaaatattaaatccatttgtttgcttaaaatgtctaatatgagtgctcagtcttgcaagcaaaatattctataaatatatgcactccatataagaaaatttggaagttaacatccatattttgactaacaggtttcttagttgtagtagaaagacattgaaaaagtaaatttaaaaaggaaaaagtaaatttaaaaaggaaaaagctcccctcagagggaaggttgcatgacacaatagtgaatacaacaggaagaaggctgtgtgacttagtatcttttgcat

SEQ ID NO: 190240 - DNA, 613 bp, Homo sapiens
aaccaaccattcatgcagcttttatattaattaaactcagttaatccaataccctattcaaccattaggataactctttgtttcacataattagtatttttgggtatattaagacagatgataatttcacactaaatggtaaattttagatgctcttcagctactggataatagagttagatgatacaaataaacaaaatacattttacaagttatgtgcttaatccagataacaacatargttggctgtggaaataaaaatgcaatgttattattccagtttccatattagtgctggctcccttgtgcccatttagtgaagttcaaggaaaatattaaatccatttgtttgcttaaaatgtctaatatgagtgctcagtcttgcaagcaaaatattctataaatatatgcactccatataagaaaatttggaagttaacatccatattttgactaacaggtttcttagttgtagtagaaagacattgaaaaagtaaatttaaaaaggaaaaagtaaatttaaaaaggaaaaagctcccctcagagggaaggttgcatgacacaatagtgaatacaacaggaagaaggctgtgtgacttagtatcttttgcat

SEQ ID NO: 190241 - DNA, 385 bp, Homo sapiens
gtgaggacaatagtgaattaatgtaagccaggcatggtggttcatgcctgtaatcccagaactttgggaggctgaggcaggcagcacttgaggtcaagagttcaagaccttcctggccaacatggtgaaaccctgtctctactaaaaattcaaaaattagctgggcattttggcgggcacctgtaatcccagctacttaggagtctgagggaggagaatcacttgatcccaggaggtagaggttgaagtgggccgagatcacgccactgcaytccagcctgggccatagaaggagactctgtctcaaaaaaaaaaaaaagtgaattaatatatgttaagtgcttagaacacgtctgacatatagtaagtatagtgttttctataa

SEQ ID NO: 190242 - DNA, 591 bp, Homo sapiens
ttcatagttattataatctttaacaatgattgaggatcatagtgtatgtttggagttagagcaattgctttaaatatattgcctcatcatccaccacactccatttatgaaatagaaactctgattatcccctttctacatgaggaacctaaaagacctcgtgtttaagtatattatatgaagctggactgagtatgcagagaatccaggatttaaatccagccaccttgattccaaaattatgctcctaaccagtatgctatagtactcccaaaaagtaagaagatctatgaagggamaagccagaggataaaactcaatagaatttagggaatttataactatgcctatattagcaaaaagagtctagttgattcatattttaaggatgcatatatgacttaaagcctagttgttagaaaagtgttagctaatatattgtcactaaatttattgcactacactctgggattattcaaacagcccacagaaaacaaaatgggcaatcataacactaatctgatagtattttaatttaaaaattttaattactaaaatattagtcttttgtcaactgcaagaacaacgatt

SEQ ID NO: 190243 - DNA, 531 bp, Homo sapiens
attatttactgtaaccttgtgtttctaaaggtttctgtatcaagcccaaagctaaaacaatgaaaaacatagtcactctccatagaattaaaatcatagtagttggtggaaatgctggtagcaccaggttctctgttaggtatgaccaagttcagtctttacaacgccacagaagtgaagtaattggctgtcaaaggttgactggcagttttcatatcatccattcataccaataagcaacattgtcaatatgttctactttctaaaattaaataagcatagcagtatacccctaaattttatcgtaaatgatatatttgtaggattttaattaaagaataaatcctcaaggagttaagagtgtttctaatgcttcagaagataaagaaaaatctctctcatggcctaatagaggtttttattgttcaggaaaagaagaggggaaatgagataacagtgaagatagaaggtgaaaggaaggraaaagaacttgtggtatcagtgaaagcaggtgcttgcttagagaagggg

SEQ ID NO: 190244 - DNA, 579 bp, Homo sapiens
cccagtaagtgaggcgagggttttaaaggtttacctgtgcttcaggaaatttgatcaattaaaaatgtatttaatatactcacaacttgaataagattttatttgagcaatttctgatttaaaacaaaagttaaaacccaatgtttcagcctctctgttgtctgctgagggtcacacatgaatgtggtagcagggctggaatccaagtccactggttttcaacccagtgcacatacataccatcatgcctccatattggtatctctgcattccatcttcatttttgcccagattattaactgaaaaccaattttgatgggtaccttatcatatatggattctacattayctcttcaataatgtgggcaaaacaaaatgaggcaatgtagtggcaattgcatgttatttagttaacatcctaatgttggacaaaataaaacgaggcaatgcaacaataattgcaagttatttagttaacatcccaatcactcttccaagcatccctccttacattgccattgaaacaaaattaatgtattctaaatctcctaacataaccgtaaacataataaataaaat

SEQ ID NO: 190245 - DNA, 564 bp, Homo sapiens
ggtacatatgcaggcttgttaattgggtaagttgtgtgtcatgggagtttggtgtacagataattttgtcacccaagtaatcagaataatactcaataggaaggttgttaatcctcctccaaccctccaccctcaaccaggcccctgtgtctattgttccctttttgtgtccatacatactcaatgattagctctcacttataaatgagaacatgtgatatttggttttctgttcctgcattaatttgcttgggattatgacctccagttctatccatattgctgcaaaggccatgatgtcattttttaatagctgcatagtattccaaggtgtgtatgtatcacatttctctctctatttttttcttgagacagggtcttactctggcacacaggctggagtacagaggtacaatcacacctcatgtcagccttaacctcttgggctcaagccactctcctgcctcagygtctacaggtacacaccatcttgcctggctaattttttttttctcgagacagggtttcatcatgttgcccaggctgatctcaaactcctgggtt

SEQ ID NO: 190246 - DNA, 636 bp, Homo sapiens
catttaatacatatttcaataaatctacaatgcttattaccaagtaacagagaaagatttaaaatattatcaagtgaaaacttactattactgccattagagaattgtttgctagctgagttttagttaagaatgagagctgatagtcctatactagccaaaaaaagccttgaagttgttaatgacattttgtatataacacttaaacaattccaacagtgtgctctgaatttgtatagttgaagataaaatacagtaacagactaaatacagaaacaagccttgggctgtatctttttgtttttgaattcaacatcagtcatctagctccagaaataaaacaaatgtatcacattaatgttrtaaatttaaattttattttggcattggttaatttagttgataagtttgctttgcttttatagttttattagagctaatcacataacgaatctacaaacaattttaaatggagtatctttcattaatattaaaatacaagtgattttggtcaacagcaagagtctggaagaaatgttttccttttaaaggcatctgtagctgagaaaggcttgtctaccaacgattcatttgctccctgttgtagaagggctttcctacaaacagaaacataaa

SEQ ID NO: 190247 - DNA, 596 bp, Homo sapiens
ttgtaaataaatttactattgcattataactcagcctataatgtctaacacatggtttatctattaattagattcaagaaagattaccctggaaccacctctactttgcagatgaggaaactgaggcccaaggatgtcgtgtgattagcctgagaatgaactaatggaagaaccaagattcaaattcaggctccctaaatcttccttacaccagatcataggcaccaggattcctccattacaattttttaaccactgtgtggatggcagaaggagtttcagcataattaaaacttattaattcacttactcaacagatacatatcgaacacttactgtttgttaaatatagttgtaagtgctggggatatggccaccaatgagaccaagtctctaatctcayggagcataccttttaatagatgctgaatcagaacccattgattggtgttttccaaaatgagtggtaaactttacctttaatacactgtaaaagtgttgttcatataaaataaattaccattgttgttttaaagaaaaatctcatggatatgactcaaactctcaaatctattttagatgctatcacacttaaa

SEQ ID NO: 190248 - DNA, 538 bp, Homo sapiens
tcatctagtccagtgcttctcagccctggctgcacattagaatcatctggggagctttaaaaaatatgaatgccagggctacatccattaatcacaatctctgtgggtggggcccaggcatcttcttcagcttaaaagctccccgggtgaatttaatgagtagccagggtcgaggagcagcgaggtagtcctgcagttctcacactagtgtgtcctcagaatcacctggagggcttggtgaatgcactgcgaggcccaccyccagaatttctgattcagtgggcatgagggctgagaatgtacatttctaacaaattccccagctgatgctgatgctgttactataagggtttgaaaagtactatctaggcccttatgttcaatgctgacctcaaagaaaagaggtccctaaggtcatacaaaaagttggtggcaaggagcccttggtctgaatgtgccccatccccagtttttctagttgttagttttctagttttctagtagctgactcctgaccaatattcatgaccccagcctg

SEQ ID NO: 190249 - DNA, 538 bp, Homo sapiens
tcatctagtccagtgcttctcagccctggctgcacattagaatcatctggggagctttaaaaaatatgaatgccagggctacatccattaatcacaatctctgtgggtggggcccaggcatcttcttcagcttaaaagctccccgggtgaatttaatgagtagccagggtcgaggagcagcgaggtagtcctgcagttctcacactagtgtgtcctcagaatcacctggagggcttggtgaatgcactgcgaggcccacctccagaatttctgattcagtgggcatgagggctgagaatgtacatttctaacaaattccccagctgatgctgatgctgttactataagggtttgaaaagtactatctaggcccttatgttsaatgctgacctcaaagaaaagaggtccctaaggtcatacaaaaagttggtggcaaggagcccttggtctgaatgtgccccatccccagtttttctagttgttagttttctagttttctagtagctgactcctgaccaatattcatgaccccagcctg

SEQ ID NO: 190250 - DNA, 478 bp, Homo sapiens
ccaccacaggaccatggcagaataagcaaatgaatatacagatggtgagaaagcacacggcccaggaacagagaacacaktccccatctctgagggtctcaggtcccttcttccactccacagcgacaccttgcttagttcacactgcaatgtggctgtgccccttctgaggcctcgttggtcttcagatcttgagtgaactgggtaggcagaggtaggaagggtcacatggacagaagccatcaagccctctggaggatctgagggacacacctgaacatccaggaagaaaacagaagcaggaaggctggagggacttgggatgaggcggaccaaagtgcatttgacagtgaggacttcctgcattctgcctgtgaggtgcagattgggtgggagatgggctccatcctggatctcttctcagagggcatcttatcctacctgtgaactttcattatggggaagcaagacaggctcc

SEQ ID NO: 190251 - DNA, 415 bp, Homo sapiens
tttgtctggttttggtatcaggrtaatactggccttgtattttttggaatagtctgagtaggattggtattagtccttctttaaatgtttggtaaaattcagcagtgaagccattgggtccagggcttttctttgctgggagacttttattatggctttgatctcattacttgttattggcctactcaggttttgggtttcttcatgatataatctaggtaggttgtatgtatgtaggaatttatctgcttcttctaggtttttcaatttattggcatagagttgcttatagtagtctgtaatgatcctcagaatttctacattatgagttgtaatctctttttccatctctgattttgtttaggtcttccctcttttttcctggttagtctaactaaaggtttgtccattttgt

SEQ ID NO: 190252 - DNA, 596 bp, Homo sapiens
gggcagtgttatataaagaacaccgagtaatgtttgtgaaattagaatttcagcattaaacgattttgtaatcttgggcaatataaatggtaactactaatagttgacatttattaaatatttactttatcccaggcattagactgtttttatctacattattttattaaatcctcatttcatagatgagaagactaagactcagatgtattaagaaaccacccccaaggacacatatcaactaattgcagttttggggtatgaatgtagatctctctgactccagaatccatgcttgaaaaatatttattgagctataatatacagactatagcatgcataccaaatccacccacataaagtagayaattcagtggtttctggcatattcagatatgtgcaaccatcattacagttttagaacattctcatcacctcaaaaaagaaaccctgtaccttttatctaccacatctgtttcctcccagttcttaggtaaccagtaatctactttctgtctctatagcttttactattctggactttcatattaatggaatcatatagtatactatctattgtgattggtttctttcac

SEQ ID NO: 190253 - DNA, 590 bp, Homo sapiens
acaagtaagtttaaaatgttatgtgtggatatatataatatatacatttatatatatttatatttatataatgctaatattattcagaagaaaggtggagtggytatattaatattagtcaaaatagattttatagcaaggaatactaccagattaacgatcatttcagaatggtaacaggttcaactcatcaaaaggatataaaaatcctaatgtttaaacatctagtagcacagcatcaaagtacaggaaacaaaacctgatagaattgcaaggatgaatccacaattaaaattgaagatttccagcccctctcacaataattgggaaaataaatacacagatcagtagcttacagaagatttgaacaatacttggaagcaacttgacataattaacatttgtagatgatttcatccaacaacagcaaagtacacattcttttcaaaaacacacagaacagttagcatcatataccacattctgggccataaaataagactgaataaatttagaagttttccattatacagagtatgttctctaaatacaatagaattaagttagaaatcagtggcagaaagatatct

SEQ ID NO: 190254 - DNA, 593 bp, Homo sapiens
gcagagtatagagctccattccagaaatatcagagagctttcactggcatctataaacccaacactgtcacaattaacagatcagaaatctttaacccagtcagctgcccagtcaacgtatgcagatggcatacaagattactgggctgatcacctccagctagggccggaatttcaagtgccagctgtgctccggggcccaaacaccatagcttcttcaaggcttgacaagccaagggctccactgaaccaggaggagatgagcagagaaccccagccttgtccagggaaaccaaggccagcatcacttgaatttccaggtctccttgctgtccctgaacccagaaaccctgaaccggatgcatccgatggccttgcatatggtcctccctgcgcacctgccatttctcagtcctgaagtgctgaggcttcttgaggtacatgttaaaaaatggatgcatttccagaggtgggggctcccaagacgtgtggaggagtccctgaggcagcttatgccaaacccaccattgtattaccaacctggaaatgaccagccagtttctttcaacctgaakaatacttctcaggtctct

SEQ ID NO: 190255 - DNA, 532 bp, Homo sapiens
gcaaagggcacaaggattccatgttctctgccactgtgaaggtgccaaaaccagaaaagaaaatgttgcaaagagcctggctccagccaagagccctgtggggagaagtaagacagagaagccgacagggtgctccaaggcccaatctcatcgtgctcagaagctgatgggcccagctttcttggatggtccccagtccctagacaataagcttcggttacactccagacaacctggctctgcctcaaccccaggccacccccaccactgtcctcgtcactgtcctygagtggcttgtgccccccaaccagggcacccaccctagctcctaaccctcagttcagatagaaacattggtctgctcaaggagaacacacagagccatgaaaaagagtttataggctccccaactgctgcagccctccagaggaccagtattttcatttccataaatatgctggtggggcagggtgccactagaaatgcactctatatgtttcagcaatacgttgcccatctgctccttatctcc

SEQ ID NO: 190256 - DNA, 374 bp, Homo sapiens
cagggctggcataaggatagacatgtatatcaatagaatggaattgagttgatagattaaacccatacatctatggccaactgattattaacaaggttgccaagacaattcaatgaaggaaagaatagtcttcaacaaatgatgctggacactgkatagccacttgccaaaaagaaagaagtagaaccctacctcacatcatatacaaaaatcagctaaaaatggatcaaagatctaaacataggagctaaaactataacacttgtagaagaaaatgcaggagaaaatctttataaccttggattggacaatggattcttagatttggcgctaaaagcacaagtgacaaaacaaacaaaaaatagacaaactgg

SEQ ID NO: 190257 - DNA, 558 bp, Homo sapiens
gcagcaataaaaaggaactaaatattaatacacagtacaacttggatggatctcaaggacactatctgaatgaaaaaagacgctaatctcaaaagtctcagaatggatgattccacttgtatggtattcttgcaaaaacaaaattataaagacagagaatggatcmgtggttgccagaggttaggaagggtcatgggctgggttcaggggagtaatcataaaggagtagcatgaaggagacttttgtagtgatggaatagttatgtatcttgatggtggtggtggttacacagagctatatttgtgataaagtaaatacataaaactgtatatattaatagatcgatggctatatcctggttttgatattataccatagttacataagatgcaaccaatgggagaaactgggtgaagggtcctctagacctctctcttttatctttgcaacatcctgcaaatctatatttcaatattttaaaaggtttttggaaaaataaataagactgatagtgtatctgagaccttttcagactgctgtatatgtctagtgaattg

SEQ ID NO: 190258 - DNA, 482 bp, Homo sapiens
aaggaacaaaataaatggcgtgggtgctggaagaagaatgatgccacttgggaagcagtaactgaccattccccacttggctcagtcccaatcaggccccttcaagatcattcttctttcagtttcaggccccacatcctatagagacaagacaaattaggaagaatcatcaaaacaactcttttacaaaccatgtcatctccctaaggacataggataggtaggttttacagtggagaaaagataatgttggaagagtgtgtcacttttgccttagagccagatagaagtctgggaccacaacacactggccaaatgaccttgagcaagccgcacaccatatctgagacttgtgcttctcggtattaataggacaataacagacatkttgcaagaagagatcgcatagagaaagggctcctatatgtgtgagggacacatagctaagtgtacaataacaatacatgcccctcaccctgaca

SEQ ID NO: 190259 - DNA, 481 bp, Homo sapiens
gggaggggaggggaggagcaagggcgggggagcgggggagggggggcggtggacctgatgattcaatagagagaaattgagtgagaggaagagtgaaaaaagggagcagagtagggtctgtgtttcctaaatactgagcttctcagacccactagagcctctgtgccatcctgaggataagttcaaataaaaaagaaaagaacaacaacaacaacaacagcaacagcaacaacagcaacaacaacagagaaacccatgaaggggctggtaggaatgagcccctcacgacgaaagcagatgacagacagggcaagaacgggagaaagcacttgaagaagcggacccagaactagagagaggattgggagctctggaaagaaggaaaatgtaatgatccaagaccctagaacaggcacagctccacagctccccacacagtcagccrgttccattaaccagcgttcattcgtactgcctggca

SEQ ID NO: 190260 - DNA, 647 bp, Homo sapiens
aaacaaaatgaaattcagtaagaggaattggagttagacataggggagtattttttgacactgagaggtgtaaggtagtagagcaggaagctgggagtaggaggggatttgcagttaggaagtgggytcccagagcggtggtcaaactgaaggaggacatctggactttcctgggcagtgtgggaatgtagccagacctgcattcttttttccctctcccttcctttctgtgggagcaactggcacagaagagatttgggacttggtgaggggaggggaagaggaggaggcagttcttttttcttaacctccccataaagttacagaagaaatctcgagtagtgaatcatccctctttacaatcaagcagttatttaaaatggaaaaaggaaaagagacccagagaaagggagaaagtgggagattatcgcccgccagcttgctcccaaattccaggcaatcagccactgagatgtgtctcatctcacgatgagccgctttcctgattgagggagctaattgcagggctgacacagcttcccgggaaagtacttgtagacaaaaaatgccaagagctaccaacagcaacaaaaatacatccatacacactcataatggctcaagacccaactggcctgtactgccag

SEQ ID NO: 190261 - DNA, 584 bp, Homo sapiens
taatgcttttcttatacaggcaagataaccattaagtgctaatgaattcaattatttctgacaggaaattcatgctaacaggaggcaatattaattagggaaatctaaattttgaaatatatgcagttttattgtattaattgtaatatctttagcttctgacaaggtaacaccaagatgttgtggacaaatatttactaattatgacatttgtaacttrgcaacattattaacatgtcacaaaatgcttaattatttcaggcatttagattaaatatgctttttccttctatgttcacttcttccatttcatttacccttgaaatggcttccttcatggttggcaaactgtagtccaagctttgtctgaaaccattgctaagtgagtacaatatgaaattggaaactagacaaggtatatgagctcaactacaaacctgatccccagatgcaggttaagacatgatgatgcagccataatgaagaggagcatgtaaggcccataatcagaaaagatcacctgtgtaatgggtgttcacaagaatctacatgctgataacaggatttgctgccttaagttacct

SEQ ID NO: 190262 - DNA, 528 bp, Homo sapiens
agtttagaagtaattagccaaactgaagagtatcaggaaactgggagatgagtcagaaaaaaatatccagagggaagcatgggaagagaaaaggttaaaaaatacaacagactgtaagatagacacaggggatagagtgcaaagagtcaaccggggtgtccttggaattccggagcaaagagaatgtcaagttataaggagataaagttataaagagatagtagcagagaattctccaaaactgatcccggcaaaaaatgarccctcccactacaccaggggtcagccaaattttgccagtggcctgtttcggtatgacttgtgagctaagaatgttttttgtttgtttgtttgtttgtttgtttgtttacatcattaaagggtcatgaaagaagaagaggggaggaaaggaggagagaccacatgtggcacacacagcctaaacaaattatttgcccctttacagaaaaggtttgctgacacctgaaccacagatgtaaggattcctataaaccccatgtgctcctc

SEQ ID NO: 190263 - DNA, 578 bp, Homo sapiens
tatgattagtgctatgaaaacagtaaaaggatagaaatttgtagtagggttctcagggaaagccactctaatcatgtaacgttgagcaaacacctcaatgaagtgagargaaaggccatttaggggaagaatattccaggcagagggaacagcaagtaccccaaggccagcaagaggccatggcacctgaaacagaataaggcagccaaggaacagactatggagtgcctgataggccaccattgtggattttattgtgtgagatgagaggctgctaggtctaacgttgccaacatggagaatgagatgagaactgagatctgaccattagatttggctacatggacatcactggcacctttgacaacaacagttacagtttcaatagagtgacaaggttgaaaacctgatcagaataagtgcaagaaagagaagagaaaaagcagaaacaacaagtacagagaactctttctaggagtctttcagttaaagaagcaggaaaatggggcagcagctggggtatgtggagagagctttataaagaagggaaatattccttgatcatatgagaaaggaaa

SEQ ID NO: 190264 - DNA, 546 bp, Homo sapiens
aacttctttgttgctgaggtctcagaatccaagcttccttaatcacactcatgtaatttccttttcatggagagagaaattaaaatctcaagcatagtaggtaggagtgcattggtaagaggggtggaaagtgttcctctacccaaagatgcacactgacactctggatttctagctttcctttgcccccttttaagggctggtgtcaaccataggggaaacaggggtattcagctaatcttacctctactaaagggtcttcaacctctaggggtaacaagaagttcctatgacacaagagggagttttacctagagatttataagaacctgcaagtggcatagaggagcagctgggagtcccttccagcttggcttggtatgagaaggcacagcttgttgcctttgactaatgwggatgaaacccattggtgattctctcttggagccagccttctctgtacttcttcctgcactaagtctgcttccttaaaagcctgagttactcagggaaatgtaaccgtgatgtggaacagcatgcgttttg

SEQ ID NO: 190265 - DNA, 342 bp, Homo sapiens
actgttgggaaggcatgattggttttgaaatgtgaggacatgagacttggagcggccaggagcagaatgatatggtttggctgtgtcycatccaaatctcaacttgaattgtatctcccagaattcccatgtgtgggagggggtgctaattgaattgtgggagccattctttcctgagctattctcgtgatagtgaataagtttcatgagatctgatgatgggtttattaggggtttccacttttgcttcttcctcattttctcttgctgccaccatagtaagaagtgcctctcacttcctgccatgattctgaggcctccctagccatgtggaactgtaag

SEQ ID NO: 190266 - DNA, 613 bp, Homo sapiens
aatagcacattataaaaggagctaatcaaaaaccaaccagtcaaccaattaaccaaccaaataaaaacctccataaaaatattactgtggttgaagctactgcatatggttgcctagcttatgtaatgcacaagagtagagacaccaataatattctcatgatagtttacctgaatgatattccaagggttgygaagtttacaacctcaactgtacatggaagccttagctacaggctagcctgaaattagaaaccattaatttgcagtaagaacacttggcaggtttatgtgatttttttttttttctctaagagtgagtctttgggttgatccacaatatccaaagttagagtggacttttgggagccatggagtagtaagacaagagggctgaatgttgaaaatgattgttagagggcaacagaaatgacacactttaatctttattctagctcagagctctgtatgttctcctgttgctgtactgcaagtattattggtttgtctgatgcttccacaaggtgtaagctccataaagtgaccaggcttgatgtttgtgcttagatcagcacctgcacatagtaaggactccataaatctctgctggatag

SEQ ID NO: 190267 - DNA, 572 bp, Homo sapiens
actgtttcatttgaaaggacaaatatgttttgtgaggcatggtgggctagggaaggctgtgggaggtgtgaagcacttgggtatgttgagcttgtttagagactttctggaacagaactctgggcataggcagggaaaataactagaccagtggtagtgcagatgcagattcagtgcaattagccaccttactaattctggtgcataaacagtgggccaaggtcacgatggaacaagaagagcctctgcactgctcacacagcccatctcttytgcagagtggcagaagagccacaataatctttgtacacaatggttacaggaataatagggttctcctcactgacaggcttttttctttaaatccagatagtgctttgttctccattcttcccatcctccttctcctcaacctagccagacaaaaagaagcccaactttagtaccgtgttatagtcacacacagctcacattaccctagcaaaaataaaacacagacacccctccctccaagacctttggtagaaaagctgcatctaatagtacatattcaattaacatctggacctaac

SEQ ID NO: 190268 - DNA, 627 bp, Homo sapiens
cttggcacagtgaatttattggtcttgactgttattatttcttttcatgttttgcatctccctagataaactatgagctcctgaagaatagagactttaaaaattactttccacacatgtgctagcaccaccacagtacctggcacatagtaggatctcaataaacatttgctgaattgatgcacaaatgaatgaaygacatcggtggaaaacccacatagacataattttcaaaatattccctaggattcaggaggtagttcagagcaataaataaagctaatcaaagtcgattttgtctggatctttgatagttattaaagtcgtttgcaaatgccatttctcttgctctgagcatatggaaggattgcagttttccatccacttgagctcaggtactgccacatgatttgcttcaactgatcaaatgtgaacgaagtgacttgtgccgtttccaggcagaagctttcattgtccttgcatactttgacatactcattctttctcctcagtgaccagcatcatttcagatagaagctgctgcactggcccaattactagtgtgtgtaatgcatggtagagataaagctggtgcatgatggatacattgtgtagaaaacaagacac

SEQ ID NO: 190269 - DNA, 627 bp, Homo sapiens
cttggcacagtgaatttattggtcttgactgttattatttcttttcatgttttgcatctccctagataaactatgagctcctgaagaatagagactttaaaaattactttccacacatgtgctagcaccaccacagtacctggcacatagtaggatctcaataaacatttgctgaattgatgcacaaatgaatgaacgacatcggtggaaaacccacatagacataattttcaaaatattccctaggattcaggaggtagttcagagcaataaataaagctaaycaaagtcgattttgtctggatctttgatagttattaaagtcgtttgcaaatgccatttctcttgctctgagcatatggaaggattgcagttttccatccacttgagctcaggtactgccacatgatttgcttcaactgatcaaatgtgaacgaagtgacttgtgccgtttccaggcagaagctttcattgtccttgcatactttgacatactcattctttctcctcagtgaccagcatcatttcagatagaagctgctgcactggcccaattactagtgtgtgtaatgcatggtagagataaagctggtgcatgatggatacattgtgtagaaaacaagacac

SEQ ID NO: 190270 - DNA, 595 bp, Homo sapiens
tttagagtagggtaggtatgggttcaatgttgcagctaacttcacctgtacaggatctgttcttccactggtaaattctggtaaattctttctcccctattctgatcatatgatgctggggaggctgctaattacagacaacttcccttaccctggccacagaaatggacatgtgattcaggtccaggcaatcactgtactcccattcctcccagaataatgactgggagggtaggcagccaggctaatcaaaatccttccccagatttttttcattgtagatgtggaggagaagatgacttgttttctgagtcatggatctgaaaggatgttattcagagattgtcagtcatctmctccacatgtagatggactgtctatagtaaaagaatgaatccaacagagagagaaggagacagagctaaggttgtaaccacaggaccagctcaaaccaattaaccattgcttaagttgttacagatgatacagagccaaaattgcctgggcacgtgccttctgattgctaacaccatcagcctggcagattggctacattggtattatctagaactagttagaaatgccataaaagctt

SEQ ID NO: 190271 - DNA, 595 bp, Homo sapiens
tttagagtagggtaggtatgggttcaatgttgcagctaacttcacctgtacaggatctgttcttccactggtaaattctggtaaattctttctcccctattctgatcatatgatgctggggaggctgctaattacagacaacttcccttaccctggccacagaaatggacatgtgattcaggtccaggcaatcactgtactcccattcctcccagaataatgactgggagggtaggcagccaggctaatcaaaatccttccccagatttttttcattgtagatgtggaggagaagatgacttgttttctgagtcatggatctgaaaggatgttattcagagattgtcagtcatctcctccacatgtagatggactgtctatagtaaaagaatgaatccaacagagagagaaggagacaragctaaggttgtaaccacaggaccagctcaaaccaattaaccattgcttaagttgttacagatgatacagagccaaaattgcctgggcacgtgccttctgattgctaacaccatcagcctggcagattggctacattggtattatctagaactagttagaaatgccataaaagctt

SEQ ID NO: 190272 - DNA, 591 bp, Homo sapiens
ttttttcattgtagatgtggaggagaagatgacttgttttctgagtcatggatctgaaaggatgttattcagagattgtcagtcatctcctccacatgtagatggactgtctatagtaaaagaatgaatccaacagagagagaaggagacagagctaaggttgtaaccacaggaccagctcaaaccaattaaccattgcttaagttgttacagatgatacagagccaaaattgcctgggcacgtgccttctgattgctaacaccatcagcctggcagattggctacattggtattatctagaactagttagaaatgccataaaagcttgacccacccttagattagggagacakatttgactgttgcctcctgtttccttgctagtcagcttgcaacacaaccccccaacctttctttttcttgaaagtcggtgctgcagtagtggctcctatgtgtgttgggcagcgagcctcttcctcaataacaaggtcgggggagagatgcagggctggggagaaaaactcatttgagttgctaaccactccctctctagactgcctggttacatgacccagtacattttctttttt

SEQ ID NO: 190273 - DNA, 591 bp, Homo sapiens
ttttttcattgtagatgtggaggagaagatgacttgttttctgagtcatggatctgaaaggatgttattcagagattgtcagtcatctcctccacatgtagatggactgtctatagtaaaagaatgaatccaacagagagagaaggagacagagctaaggttgtaaccacaggaccagctcaaaccaattaaccattgcttaagttgttacagatgatacagagccaaaattgcctgggcacgtgccttctgattgctaacaccatcagcctggcagattggctacattggtattatctagaactagttagaaatgccataaaagcttgacccacccttagattagggagacagatttgactgttgcctcctgtttccttgctagtcagcttgcaacacaaccccccaacctttctttttcttgaaagtcggtgctgcagtagtggctcctatgtgtgttgggcagcgagcctcttcctcaataacaaggtcgggrgagagatgcagggctggggagaaaaactcatttgagttgctaaccactccctctctagactgcctggttacatgacccagtacattttctttttt

SEQ ID NO: 190274 - DNA, 545 bp, Homo sapiens
ccttttctagggtgcaaatacattcataaaggcagacccctcatgacttgatcactgcctaaaaggtcttccccacctcttaataccatcacaatggagattaagtttcartagtgaatattgggggcactgatactatagaaaaaggaaaaccaactgtgggtttggacaaaccacttaacttctctaggctccctctgttaattgaggaaatcgggtctcagcttctaaagtttttcttgatctccttctgcaagcaaaagttaatccagaagcccaataagtaaaacagatagaaggggtgttgttctcatgatagaggtttttggggaggtaggcttgctgttgaagttcaagctcccttacctctctaacttagtcccagaagggacttcttggtgcatctttcaatagcactgtggtaaatcacttttaggggttgtttcagtttcaatgttatataatcctagtggttctcaaagtgtgatcccagaaggatcattatcagacctgcaaattttcaagtgactccccatacttaatga

SEQ ID NO: 190275 - DNA, 545 bp, Homo sapiens
ccttttctagggtgcaaatacattcataaaggcagacccctcatgacttgatcactgcctaaaaggtcttccccacctcttaataccatcacaatggagattaagtttcaatagtgaatattgggggcactgatactatagaaaaaggaaaascaactgtgggtttggacaaaccacttaacttctctaggctccctctgttaattgaggaaatcgggtctcagcttctaaagtttttcttgatctccttctgcaagcaaaagttaatccagaagcccaataagtaaaacagatagaaggggtgttgttctcatgatagaggtttttggggaggtaggcttgctgttgaagttcaagctcccttacctctctaacttagtcccagaagggacttcttggtgcatctttcaatagcactgtggtaaatcacttttaggggttgtttcagtttcaatgttatataatcctagtggttctcaaagtgtgatcccagaaggatcattatcagacctgcaaattttcaagtgactccccatacttaatga

SEQ ID NO: 190276 - DNA, 542 bp, Homo sapiens
atgctgtggcataccagacaaatccttgcttctggaccaaggcacccatttccccaactgctgggaacattggcagatgatggctctcggtgagtcatgttctaagtgctgcccaggagagccaccttacccaaggtcacacttcttcctcagtgtgtgtgcattaaaaaaatgtggaacataaagtcccccacctcaaggtggttcaactctgaagggccaccccagctcaagaactccctgtgcgattggctgagtactttagtatgactatattgcagcttaactcccccctcrgccaatctatcctgcttccttcacttccccagaagtgaggctcctgagagctcttcccaatatgcttcctgcttacaaacctccacgttgagtctgtttcctagagaagctgctctgtgacagatcttacgtataaatgagaagacaaacagtgtccacagcaacaaggattgttggatgcctgcctcacctaaagtcaagccagaccaatctggccacagctaccaattcctcgcagtgaacac

SEQ ID NO: 190277 - DNA, 579 bp, Homo sapiens
aatgaagactccagagaaaagaattaaatgtctgctggttcaattaccaaataatgaaaaggtcgaaaggagcaccatgcactgtgtgctgtgctgctagatcagcctattcttagagtraaattcttttccgtgctgttcacagtcgcattttgccacccacaaactgtacagatgagtgttggtgtgagaagcaaaaaccacgagctggtacagatcgtcctccacaaggtgaaagggtcttggtccctggggagcatctcatgacacccacgcaggagtgatgggcagagtagaggccatggatttcaggagggaccagtctgttgttaaatccacactttgagaagattctaatcatccttggtgccgaatacatttttaaccagcctgttctcaggaccacatgcaggggaagcctcgggagcaaaacagacttgcgagcgaggatttcaagggctcccggcagtccctgacagcatttggaaagccacccctgtccccaacctgccccagttgtacatagaaaagaaagattactgtaacacacacatcctctacagaagctaaaaccaaaga

SEQ ID NO: 190278 - DNA, 579 bp, Homo sapiens
aatgaagactccagagaaaagaattaaatgtctgctggttcaattaccaaataatgaaaaggtcgaaaggagcaccatgcactgtgtgctgtgctgctagatcagcctattcttagagtaaaattcttttccgtgctgttcacagtcgcattttgccacccacaaactgtacagatgagtgttggtgtgagaagcaaaaaccacgagctggtacagatcgtcctccacaaggtgaaagggtcttggtccctggggagcatctcatgacacccacgcaggagtgatgggcagagtagaggccatggatttcaggagggaccagtctgttgttaaatccacactttgagaagattctaatcatccttggtgccgaatacatttttaaccagcctgttctcaggaccacatgcaggggaagcctcgggagcaaaacagacttgcgagcgaggatttcaagggctcccrgcagtccctgacagcatttggaaagccacccctgtccccaacctgccccagttgtacatagaaaagaaagattactgtaacacacacatcctctacagaagctaaaaccaaaga

SEQ ID NO: 190279 - DNA, 602 bp, Homo sapiens
acttactaaaatgggtattatttacatgagtatctggcacagaatcttttgggggaattagtcacttctaactatctccctgtctctataaaaaactgggaaaaatgcaaaaaaaaaaaaaaagaaaagaaaaaccctgtaaaaccaaaacctagctatagccactgataattttccccttgcttcttctccatacatgttttaatctttaaaaactcaaaaagtggccagstgcagtggctcacgcctataatcctagcactttggaaggctgaagaagaagaatcatttgaggccaggagtttgagatcagcctgggcgaaatagtgagaccccgtctccacaaaaaattaaattaaaaaattagccgggtgtggtggtacatgcctgcagtcccagctacttgggaggctgaggcaggaggatcacttgagtccaggaggttgaggatgcagtgagccatcatcacgccattgcacttcacagtctgggcaacaaagtgagaccctcaaaaaagaaaaaaattcagaatctgccttcactcaatatgattagattatgtttgctcatgaaattaacattcctcaagaacataattttta

SEQ ID NO: 190280 - DNA, 602 bp, Homo sapiens
acttactaaaatgggtattatttacatgagtatctggcacagaatcttttgggggaattagtcacttctaactatctccctgtctctataaaaaactgggaaaaatgcaaaaaaaaaaaaaaagaaaagaaaaaccctgtaaaaccaaaacctagctatagccactgataattttccccttgcttcttctccatacatgttttaatctttaaaaactcaaaaagtggccagctgcagtggctcacgcctataatcctagcactttggaaggctgargaagaagaatcatttgaggccaggagtttgagatcagcctgggcgaaatagtgagaccccgtctccacaaaaaattaaattaaaaaattagccgggtgtggtggtacatgcctgcagtcccagctacttgggaggctgaggcaggaggatcacttgagtccaggaggttgaggatgcagtgagccatcatcacgccattgcacttcacagtctgggcaacaaagtgagaccctcaaaaaagaaaaaaattcagaatctgccttcactcaatatgattagattatgtttgctcatgaaattaacattcctcaagaacataattttta

SEQ ID NO: 190281 - DNA, 622 bp, Homo sapiens
gtgcagtggctcacacctgtaatcccagcacctagtgaggcgaggcgagaagatcagctgacctgaggagttcaagacctatctgggcaagctagcaagacctcatctctactgaaaattttttaaaaattagctgggtgcggtggtgcacaccaacagccttagctacttgggaggctgagatgggaggatcgcttgagcctgggagatcaaggctgcagtgagctatgatcatgccactgtactccagcctgggtgacagagcaaagaagcctttgcagttctttggaatgaaaaggagaggataaaaatttgttaccttgtttgaaatatgccagaagaaaaccagaggatagagagatgataaagacccagtaaagggctataaacattaatgaaggcattggattctagataaagtcactgaatgcagagacacaagtaacaggattggttgggtttggtgtaaaggagaaggaagaggtaaatacatgcatagtaaaatttggctttttcccccctacttaaggatgttaaygattgggttgggccaccaaataataatggagtaattaaagaagttactattaatccagacactacttgtggcaatgactgggtc

SEQ ID NO: 190282 - DNA, 532 bp, Homo sapiens
aactttcaaaatattttttttcctttgcaataaattactctatgttgcatctcttttcctgtgtgttgcttgtgtaaattatttcaaactaagaagaaaagaatcgaggtctcacaacaggcatcaatamccaaaggtaccacccatagcttctttttgctgaggtccccttaccctggctgtttgttttgtttcttatttttattttttgggaatgagctcttcaggggactttgacctgttgaacttcttcttgatcatccatttttctctcaggcaactcgtgcatcattgcccatctaaattatgaaagaatagctgccttctttgctgtgcttttcttgtcctgacattgcaagcagctcacaggatggatttttgcatttgctctagtcagccttgagtcagacaccagcttctttgcttctcacacaataggtagctctacaggtggtcttctcgaatctcctctttttagacttatggcaaagaggagtaggtgggagaatgcctcaattatccagctttcaca

SEQ ID NO: 190283 - DNA, 575 bp, Homo sapiens
tcaggcctatatatcaaaatgtataccagctctcttagacaccctgcagacaccttacattccataattcgcaaaatccagttgtctttctccaactgaaaaacctgttcattttctgtatctcagtaacctgagtgtcacagtcctcatccccsatatcctatcaaccaccatctcctgtatattctacgtattaagcacatcattaccctctgtcctccttatcgctcatttaatgccagatgccatctctcctctggattatacaaccaactacagaaggtcttcatgcttcttggtcccatagataggacctgccatgttgcccaggctggtctcaaactcccgaccacgagcaatcctcccacctcaacctcccacagcgctgggattacaggcataagcctcctcacctggcttcactctactattaataacctcaaatttgcatgctgctctttactgctattaataagcattaaaggcttgcagttggtgtcttctcagaaggctcttcttctacttcttagaaatagaataacaaattctacattgccttctattttcaagttaga

SEQ ID NO: 190284 - DNA, 357 bp, Homo sapiens
ataatttacttcctaaaattgtaaaggcaattttaaatataataaaatgtaagatgatgctatttcaggggactttcagttttggagaagatggaggaaaacacaagggaattattctccttgaaaaaaatacaaaaatatatggaacaacgttggcaagacacagtacattaggcaatgaaggacaatgatccttgaaagaggtgaaccctwtgactgtcccagtgtactgccatgaaatagtttccaggctatgtgcagagagcagaaacccaagtagagcctagtagactctttgagttgaggatttggagatgagagtccaggaaaaccaaaatagcaaaaggtcttgggaca

SEQ ID NO: 190285 - DNA, 604 bp, Homo sapiens
tgtatgggagccactggctcaggtacagaggaggagatggtgacaggagaagatgaagaggtcccaaatgaagaggccatgccattagctgttccatccatgtgaataccagagccagtcgggatgatagcagtgattgagwtggaaagaaggcctgtcatacagatgccaatgttttaaataagtaagggaaactgaactacaagcatcatttaaatatcccaaagcttgcctttgagtctactttctttgaagttcccgggattccaaaagaatattttatttattatgatttatttatttaatttatttaattaaactgagaccattttaattcttaatttagtaaatgccaagttttcataagtgctatactatttagtctagatacatctacgctctagaagagactaccaagatggaaattagaaaatttctttttcaagacaagttctatctacagaatggccaatattctaaataagaccacccgttattaatcttaaaaaaaaacactctcttctaacacatcaatcactttaccaccctcacatccaaaggtgctggaggcattgttttcttagcaaaggctttctacctaaaa

SEQ ID NO: 190286 - DNA, 601 bp, Homo sapiens
ccctcaagcatttatccttgtgttacaaacaatccaattacactcttttatttaaaaatgtacaattaarttattgttgactatagtcaccctgtgctatcaaacactaggttttatttattctatttttttgtacccattaacctctgggaaacattcttctaatctctatgtccaggagttcaattgttttgacttttagatcccaccagtaagtgagaacacacaatatttgtctttctgtatctggcttatttcactaaacagcctccaattccatccacattgctgcaaatgacaggatctcattctttttcatggctgaattgcactccactgtgcatatataccgcattttctttatccattcatctgttgatggacacttagtttactaccacaacttggctattgggaacagggctgcgaaaaacatgagagtgcagatatctcttcgaagtactgatttcctttcttttgggcataggcccaggcccagcagggggattgctgcatcatagggtagctctattttcagttttttgaggaacctccaagctgttcttcaaagtggttgtgctaatttacattgccactgaca

SEQ ID NO: 190287 - DNA, 511 bp, Homo sapiens
agacatctgtagtgatggagggggtttcatctaaaactgtatgttctagtgcctattgkatcatttttattccttgggatcttggagatttctttccttgaataatctctatcaacgtatgtttccaaaaagttttctggaaggagttaagtcttaactcactgtctgttcatatcttaattatcagttcatagctgaacagacattagtaaaaagccatctggaagtacaaatggcaatcaggatagagtatttcctgagcaaaacatggacagtgtgatgagttatacagtaaactgagaatcaaagagatatcaaaagaatattgataagtagtaaagagagtcattgacgaactaccttctgcacatgctgcatatcgtataaaacaaaagcggttagagtggggagggagctgttgatctgtacttgccagaaagatgttgctaagaattaaagagaaaagtagctgacacactttatttatttatttatttatttacttatttat

SEQ ID NO: 190288 - DNA, 511 bp, Homo sapiens
agacatctgtagtgatggagggggtttcatctaaaactgtatgttctagtgcctattggatcatttttattccttgggatcttggagatttctttccttgaataatctctatcaacgtatgtttccaaaaagttttctggaaggagttaagtcttaactcactgtctgttcatatcttaattatcagttcatagctgaacagacattagtaaaaagccatctggaagtacaaatggcaatcaggatagagtatttcctgagcaaaacatrgacagtgtgatgagttatacagtaaactgagaatcaaagagatatcaaaagaatattgataagtagtaaagagagtcattgacgaactaccttctgcacatgctgcatatcgtataaaacaaaagcggttagagtggggagggagctgttgatctgtacttgccagaaagatgttgctaagaattaaagagaaaagtagctgacacactttatttatttatttatttatttacttatttat

SEQ ID NO: 190289 - DNA, 569 bp, Homo sapiens
ttaacactggttgcaagctggggggcccctcaaagcataattgatgtctattgtttaatttgcaactttgagtcctgtgttagacagcaagccaaaaagggtgggggcatcttagtaaataaaaggagacataaaacctaccaccaaattcctccgcttccactattcattttgaagactttcatgtttagtatttaatgggtacaaatataattgatcactttaagtctttgtttatttgtacagatttaaaaaacaaccagaacagctgcctctctgctgactctgtggggtaaatgttcctggtcagtgacctgagagcaatgtagacccatttakaatagaaactttcctcttcatactttaatgtggcttcttagaaaagcattaaaatttgagccctctctggaatcacctgttgttactaggagaacattgcccttgaagtcaagcaggcatctcaagaagaattgtaggagtagaaagggtacgtttttagagtaaccttttggtcgtgttacctttggattctgttatgttcaatacacgtttacaagaacctattattg

SEQ ID NO: 190290 - DNA, 647 bp, Homo sapiens
ggttctgcaggctatatgcgatgctgcctatctacctgactacttgggaggcctcaggaaagttacagttgttgtgaaatgcaaacaggaagcaggcttatcttacatggccagagcacaaacaagagagagagagatggggaggtgccatatayttttaaacaactagatctcaaaagaactcactattgtaatgacagaaccaagggggatggtgttaaaccataagaaatcacccccatcatccaatcaccacccactaggccccatctccagcattggggaatacatttcaacatgagatctagttggggacatggatccaaaccatgtcatacattaactcaatttatccttacactaacccactgtggtaggtcatgtaggtcaggtgctatttatgaatgaggacatcaaaaatttaaggagttagcaatttgcccaaggtcacactgccactaagtgttagaacctggcctaaagacatctggctatagccgtgctctacactgttgcacttctggtctttcttattccaagatccctgtgggtgtattttcaacaagacataaggtttgggacatttaaaaaatgaattgtagcttctttaaaaagaaaatgtgtacaaaccatttccagaagaacaa

SEQ ID NO: 190291 - DNA, 560 bp, Homo sapiens
cattttgtaaatatccactaaagtcttcagacagttgttttactttaataaccatcctttttaaataactaatcaaccatagagccttagagctgaagagaacattaaaaaattacctaatccaaaactcctttctcccgttgcccagggacaaatacctgtgctgaagtaatttttttccaattacaaatttgtccataaattaaagttmtttttatcattgcaaatatgcttattaaacatgacattttcttatacaataggttatttagtagaaattttcaggagaccaatgttctatttctaggtttttcatgtgaattggactaagtaatactaaaattctggatctaagatttttgtatttcataaaacgaaacaaagggttgtaatgatactgatggtgctatagttgcatgtatattattcttttatgaaagcaatgtgatcaaagtgtgattaggactcacaatctgttgaactccttacaaaggcatacctttcataattgaaatgacttaggatccttcctgaaaagtgacgttattctcaatgataat

SEQ ID NO: 190292 - DNA, 560 bp, Homo sapiens
cattttgtaaatatccactaaagtcttcagacagttgttttactttaataaccatcctttttaaataactaatcaaccatagagccttagagctgaagagaacattaaaaaattacctaatccaaaactcctttctcccgttgcccagggacaaatacctgtgctgaagtaatttttttccaattacaaatttgtccataaattaaagttctttttatcattgcaaatatgcttrttaaacatgacattttcttatacaataggttatttagtagaaattttcaggagaccaatgttctatttctaggtttttcatgtgaattggactaagtaatactaaaattctggatctaagatttttgtatttcataaaacgaaacaaagggttgtaatgatactgatggtgctatagttgcatgtatattattcttttatgaaagcaatgtgatcaaagtgtgattaggactcacaatctgttgaactccttacaaaggcatacctttcataattgaaatgacttaggatccttcctgaaaagtgacgttattctcaatgataat

SEQ ID NO: 190293 - DNA, 560 bp, Homo sapiens
cattttgtaaatatccactaaagtcttcagacagttgttttactttaataaccatcctttttaaataactaatcaaccatagagccttagagctgaagagaacattaaaaaattacctaatccaaaactcctttctcccgttgcccagggacaaatacctgtgctgaagtaatttttttccaattacaaatttgtccataaattaaagttctttttatcattgcaaatatgcttattaaacatgacattttcttatacaataggttatttagtagaaattttcaggagaccaatgttctatwtctaggtttttcatgtgaattggactaagtaatactaaaattctggatctaagatttttgtatttcataaaacgaaacaaagggttgtaatgatactgatggtgctatagttgcatgtatattattcttttatgaaagcaatgtgatcaaagtgtgattaggactcacaatctgttgaactccttacaaaggcatacctttcataattgaaatgacttaggatccttcctgaaaagtgacgttattctcaatgataat

SEQ ID NO: 190294 - DNA, 564 bp, Homo sapiens
tgagggtacaacatatatgacaacaagtatgcaaaatgatgtcaaggataaaagtaggggttatagaggcagaaagcctggctctgtcactcactagctgtgtgaccttggatgaactacttaaacttcctatgcttctgtttccttatcagtaaaatggagataataataatgccttttttatagaaatattataagaataaaatgaacaaattaatgcaaaattattaggactatggcatataaaaagcacttaataactggtagctattgactattatgtctattaatgtgttgtttatatgggtcyagttaagaagagaagttgagtatttggggaagatcaggagtacagcgtgaaagaatcatgggtggaaaagtgaaagacattgtaaagagatacacagaaaaataagaagaaaaaatattttttaaaaagatggtagagaaaatgataaatagggggcaactcttctgaattatcactagagtacagtagaaccttgatcatggggttagggctatcaacccctccccatagctgaaaatccacatatagctttt

SEQ ID NO: 190295 - DNA, 564 bp, Homo sapiens
tgagggtacaacatatatgacaacaagtatgcaaaatgatgtcaaggataaaagtaggggttatagaggcagaaagcctggctctgtcactcactagctgtgtgaccttggatgaactacttaaacttcctatgcttctgtttccttatcagtaaaatggagataataataatgccttttttatagaaatattataagaataaaatgaacaaattaatgcaaaattattaggactatggcatataaaaagcacttaataactggtagctattgactattatgtctattaatgtgttgtttatatgggtccagttaagaagagaagttgagtatttggggaagatcaggagtasagcgtgaaagaatcatgggtggaaaagtgaaagacattgtaaagagatacacagaaaaataagaagaaaaaatattttttaaaaagatggtagagaaaatgataaatagggggcaactcttctgaattatcactagagtacagtagaaccttgatcatggggttagggctatcaacccctccccatagctgaaaatccacatatagctttt

SEQ ID NO: 190296 - DNA, 564 bp, Homo sapiens
tgagggtacaacatatatgacaacaagtatgcaaaatgatgtcaaggataaaagtaggggttatagaggcagaaagcctggctctgtcactcactagctgtgtgaccttggatgaactacttaaacttcctatgcttctgtttccttatcagtaaaatggagataataataatgccttttttatagaaatattataagaataaaatgaacaaattaatgcaaaattattaggactatggcatataaaaagcacttaataactggtagctattgactattatgtctattaatgtgttgtttatatgggtccagttaagaagagaagttgagtatttggggaagatcaggagtacagygtgaaagaatcatgggtggaaaagtgaaagacattgtaaagagatacacagaaaaataagaagaaaaaatattttttaaaaagatggtagagaaaatgataaatagggggcaactcttctgaattatcactagagtacagtagaaccttgatcatggggttagggctatcaacccctccccatagctgaaaatccacatatagctttt

SEQ ID NO: 190297 - DNA, 600 bp, Homo sapiens
cagctaggctttcagtgtggctattccaaggctggtactcagggcctgaagggagtatctacagtggcagatatgaaggctacaaacgagcccagcagcaaagattcaaaattaccaaagtttatttcgctacttccactactgaatgtctgacatgacagcaactgggaccaatactgtgctccttgatatggcatcatttcttaaggatatcaaccatccaattggggaaagytaattacaacagacccctttaaccattgagagagaatgatttgaccttgaacaggattgacatttattgtggatataaattttcctttcctaccttcaggaccccagccagctcctttttagagaacttaaaggggttttcccacaacatgagatcctataaaacattgccttagatcttgcagttgactttacagcagtatagatattgctatgggctcaggacaatgagattcactggtcctactgcttcatatcatccagaagctgccagttttatagttggatgaagtagccttttgaaagtaccactaggtgccattctgcaagtatggtgcactatcctccagggtgcacttacactct

SEQ ID NO: 190298 - DNA, 605 bp, Homo sapiens
  misc_feature (1)...(605): n = A,T,C or G
tggaggaggaggaggtatttgattagggaaaggagggggaagaagggccnagtggaggcccagtggatggggaatggaggcggtggagggggccctggaagaggagggagtgctgctgaagcctgtgcgggccttggtgggagtggtggaggaggtggaggtgcaagaggtcccaagacaatcgccttttgggctggagtctcggccagctgagaggctgcctgcaagcctgggtcagaagcagaagagtctcccagcacagagtttagacgagtctcaacagaggcaggggcagcagcatttgatattctgcgctctctctcccattccagttgttccctttctaactgttcttgtcgctccctctcttgcctctcccatttcagtctctctagcctctctctttcttgtctttcttgcctctccagattcaggagtttgctgttcctgttcttgtctctctctctggctctccagctgttcttgttccagtcgctccctctccagcttttccctttctaacctctctctctccarccttcctctttccgttctttctcaccagccttccctgctccagctccttatgaatattnnnnnnnnnn

SEQ ID NO: 190299 - DNA, 580 bp, Homo sapiens
ctctgagataggcagtacaaggtttacaattccataaatgaggacraggaaaaggattcaaggtcatacggctaaaatgtgtaaagtgagagcttgactgcaggcctttctagagtgtcttgcttgtttttcttttctctgacattgatcatctaactttgatctctctttggacacaccagtcactttggttctaaactgagtcagcatgaatttcaaaagggaaaagaagcaagatattagcagtggggaatggaccacatagaacatgaccagtctcaatgttctgacttacacatacctgcttatttctgtagagctgagaggaaagctgagcctcttcccatgagcacaagtccggaagaggaaaatttgagtcactgaatgattctgtgaaaatacaaatagataactgagaaaataatcttgtagtttctgtgtaataaagaaacttatcaaatcaaatcagaaagtttaataggttcaattatttttcttaaacagctattgctgccatacaggaaaacaagacatttaaagttttttagaaaaggcaagcaagctgtgagagacaaatatt

SEQ ID NO: 190300 - DNA, 580 bp, Homo sapiens
ctctgagataggcagtacaaggtttacaattccataaatgaggacaaggaaaaggattcaaggtcatacggctaaaatgtgtaaagtgagagcttgactgcaggcctttctagagtgtcttgcttgtttttcttttctctgacattgatcatctaactttgatctctctttggacacwccagtcactttggttctaaactgagtcagcatgaatttcaaaagggaaaagaagcaagatattagcagtggggaatggaccacatagaacatgaccagtctcaatgttctgacttacacatacctgcttatttctgtagagctgagaggaaagctgagcctcttcccatgagcacaagtccggaagaggaaaatttgagtcactgaatgattctgtgaaaatacaaatagataactgagaaaataatcttgtagtttctgtgtaataaagaaacttatcaaatcaaatcagaaagtttaataggttcaattatttttcttaaacagctattgctgccatacaggaaaacaagacatttaaagttttttagaaaaggcaagcaagctgtgagagacaaatatt

SEQ ID NO: 190301 - DNA, 491 bp, Homo sapiens
ttcttatattctttcattaacaatatacatatatgcaatatatgtacagtatactaaattcttatttttttctgagatcctgacaacatatagaatatgaaagctaagtagaatgatggcaaatgaaaaagactgtatcctcattaaaaaaaatggatgccttttgagtagagtgtgacattaagatccccttccacttgtggcacccaggtatccttggcaggataaagacacatctttcccaccttcttaggttcctaacctttttcctaggctatgcaccaaggagagggattctaggattattcgtcatgtcaatgcaaaacttttaaggaaagaaaaaagaygtaaaacaatgtatacatattataccctttgatgtggtttggctctgtgtccccacccaaatctcaccttgaactgtaataatccccaagtgtcaagggtagggccagatggaaataattgaatcatgggagcagttttcccat

SEQ ID NO: 190302 - DNA, 504 bp, Homo sapiens
gcaaattctggaataagttaagactatgggggactgtttggaaggcatgattgtgttttgaaatgtgagaatatgagatttgggaggggccaagggtggaatgatatggttttgctctgtgtgctcacccaaatctcaccttgaattgtagtaattcttacatgttaatggtgagaccaggtggagataattgaatcgtgggggtggtttccttcatgctgtcctcctgatagtaacttctcatgagatattatggttttataaggggctctccatcacttggcactcattctctctcctgccaccttgtgaagagttgtcttctaccatgattgtaagtttcctgaggcctcctcagccatgtggagctgtgagtcaattaaacctctttttaaaataaattacccagtctcaaatacttcttcatagtagcatgagaacagacrcttatggagtacatgaggtattttgatacaggcatgcaatgaataattagcacatcag

SEQ ID NO: 190303 - DNA, 554 bp, Homo sapiens
aaacttcataattgaagattcttgagtagggtcctcagagggttttttcctagttattgtgaayaattagtcccaggctaaataagtaaagggtcaaatagattacaagtaatttagccccattacaaaaaagctggaagaaatttataaaaataaaatctttgtacctgcctttttacttatttattttaaatatatttaattacagaaaagattgtgtatattcaaggtgtacaatgtggtggcttgatatacatataccttgtggaatgattatttcagtcaaattaatcaacacatcaatcacaacaaatgctttacattagaaccccagaacttgcataccttataactgaaagtttataccctttgaccaacatgtccccattttattcatctccatgaccttggcaacaaccattctattttctgtttttatgagtttgaattttttagatgatccttgtaagtaagaccacacaatatttgtttacttgtgtcaggcttatttcacctagcataatatacccctggttcatccatgtagtcacaaa

SEQ ID NO: 190304 - DNA, 554 bp, Homo sapiens
aaacttcataattgaagattcttgagtagggtcctcagagggttttttcctagttattgtgaataattagtcccaggctaaataagtaaagggtcaaatagattacaagtaatttagccccattacaaaaaagctggaagaaatttataaaaataaaatctttgtacctgcctttttacttatttattttaaatatatttaattacagaaaagattgtgtatattcaaggtgtacaatgtggtggcttgatatacatataccttgtggaatgattatttcagtcaaattaatcaacacatcaaycacaacaaatgctttacattagaaccccagaacttgcataccttataactgaaagtttataccctttgaccaacatgtccccattttattcatctccatgaccttggcaacaaccattctattttctgtttttatgagtttgaattttttagatgatccttgtaagtaagaccacacaatatttgtttacttgtgtcaggcttatttcacctagcataatatacccctggttcatccatgtagtcacaaa

SEQ ID NO: 190305 - DNA, 606 bp, Homo sapiens
cataatattagatacagccaatttgtttttttaaaaattataaaatgttakgaatttattaatgcaaataagtttagagacatagaagaactgatcaatcttttagaaatattaataacataatgaccctagagaaaataataatacaaaatactatgataacttttaaaaaaactaaatgtataatcaaaattctcccttaaaatatatcctgggctcaggtgtttttataagtgaattttgaatcaaatttttaaaaagctgatcgtctcaattcattacaaataagaatggaaaataaaagaaaaagaaaaaaccataccccaattcaaagtatgaagcaattataaccctcatattaaaatctaaacaaggacagcataataaaaaagaattattcgccaatctcttataagcacgcttgcaaagtattacataatactttagaaaatgttgcctttattttcttttgccttcatattgtttgagcagtttggctcccatcattaccatgcttaagaaatgaattttgtaggatgcttgtgctgtttgattgagtttacttggatttttagccattttctttacacttgactgccaaactcc

SEQ ID NO: 190306 - DNA, 606 bp, Homo sapiens
cataatattagatacagccaatttgtttttttaaaaattataaaatgttaggaatttattaatgcaaataagtttagagamatagaagaactgatcaatcttttagaaatattaataacataatgaccctagagaaaataataatacaaaatactatgataacttttaaaaaaactaaatgtataatcaaaattctcccttaaaatatatcctgggctcaggtgtttttataagtgaattttgaatcaaatttttaaaaagctgatcgtctcaattcattacaaataagaatggaaaataaaagaaaaagaaaaaaccataccccaattcaaagtatgaagcaattataaccctcatattaaaatctaaacaaggacagcataataaaaaagaattattcgccaatctcttataagcacgcttgcaaagtattacataatactttagaaaatgttgcctttattttcttttgccttcatattgtttgagcagtttggctcccatcattaccatgcttaagaaatgaattttgtaggatgcttgtgctgtttgattgagtttacttggatttttagccattttctttacacttgactgccaaactcc

SEQ ID NO: 190307 - DNA, 606 bp, Homo sapiens
cataatattagatacagccaatttgtttttttaaaaattataaaatgttaggaatttattaatgcaaataagtttagagacatagaagaactgatcaatcttttagaaatattaataacataatgaccctagagaaaataataatacaaaatactatgataacttttaaaaaaactaaatgtataatcaaaattctcccttaaaatatatcctgggctcaggtgtttttataagtgaattttgaatcaaatttttaaaaagctgatcgtctcaattcattacaaataagaatggaaaataaaagaaaaagaaaaaaccataccccaattcaaagtatgaagcaattataaccytcatattaaaatctaaacaaggacagcataataaaaaagaattattcgccaatctcttataagcacgcttgcaaagtattacataatactttagaaaatgttgcctttattttcttttgccttcatattgtttgagcagtttggctcccatcattaccatgcttaagaaatgaattttgtaggatgcttgtgctgtttgattgagtttacttggatttttagccattttctttacacttgactgccaaactcc

SEQ ID NO: 190308 - DNA, 606 bp, Homo sapiens
cataatattagatacagccaatttgtttttttaaaaattataaaatgttaggaatttattaatgcaaataagtttagagacatagaagaactgatcaatcttttagaaatattaataacataatgaccctagagaaaataataatacaaaatactatgataacttttaaaaaaactaaatgtataatcaaaattctcccttaaaatatatcctgggctcaggtgtttttataagtgaattttgaatcaaatttttaaaaagctgatcgtctcaattcattacaaataagaatggaaaataaaagaaaaagaaaaaaccataccccaattcaaagtatgaagcaattataaccctcatattaaaatctaaacaaggacagcataataaaaaagaattattcgccaatctcttataagcaygcttgcaaagtattacataatactttagaaaatgttgcctttattttcttttgccttcatattgtttgagcagtttggctcccatcattaccatgcttaagaaatgaattttgtaggatgcttgtgctgtttgattgagtttacttggatttttagccattttctttacacttgactgccaaactcc

SEQ ID NO: 190309 - DNA, 473 bp, Homo sapiens
ccaggagcctgagcagcctctcctcccttctttctgcctagagattcttgttcctggggtgggcaggaaggggaggactgagccagccagcctctgtaggtggaacatgtgagctgttaccaagaagctcagcagagccccactggcaaggggctccggaggcccggccatttcatgttgcttatgttcacgtatttccagcctggctcgttgttttcacacaaggttttatttttgtgcccctgccccaggccctgagacccccamcgctctttgggggacacctggctatggctctccgcccacaggcaagctcctcggcggcaccccatggccattggcagcttctgtccccgaggatccagaggtgcctgttgaaactgtggagcaaccaagcatcctaatccccctctgccgccaccccgcacagcactctctccagcctccgctgagcgctcagggctgtaaacgaa

SEQ ID NO: 190310 - DNA, 464 bp, Homo sapiens
tgtggaattataaaagcaaggaggggagtggggaggcagggagctcgggagggaagaggtggacttggctggaagggagctgagtgaccccgagttggggccaaggccacccctttctgccgtgaagcacctcccgatctgccagttccagccgagtctatgtgcttggggatcttcacggagaggccctgctttgagtcttgtcacacacacgtatgagcgatcgtcatttgatcgcataatacaggtaagggaggtgaagaaaccctgctgctgccccgggctgggacagagaccgagctggctgggagcccacggtgacctctgcccctcgcattgcccctgggctccaccacaacccttggtttagggctgcgtctatttcagccttasagtgggagccttcagcacccctcacccaggctgtaggaaatgatcctggaacagaggccacccccaccatc

SEQ ID NO: 190311 - DNA, 464 bp, Homo sapiens
tgtggaattataaaagcaaggaggggagtggggaggcagggagctcgggagggaagaggtggacttggctggaagggagctgagtgaccccgagttggggccaaggccacccctttctgccgtgaagcacctcccgatctgccagttccagccgagtctatgtgcttggggatcttcacggagaggccctgctttgagtcttgtcacacacacgtatgagcgatcgtcatttgatcgcataatacaggtaagggaggtgaagaaaccctgctgctgccccgggctgggacagagaccgagctggctgggagcccacggtgacctctgcccctcgcattgcccctgggctccaccacaacccttggtttagggctgcgtctatttcagccttagagtgggagccttcagcacccctcacccaggctrtaggaaatgatcctggaacagaggccacccccaccatc

SEQ ID NO: 190312 - DNA, 566 bp, Homo sapiens
tgagtctggaaagaaaattctccttccaccatgattataagtttcccgaggcctcttaacaggcttcctgttaagcctgcagaattttgagtcaattaaacctctattcttcataaattatccagtctcatgtagttctttatagcagtgtgaaaatagactaatacaaaaaatgggtaccaggaaagtgggacattgttataaagatamctgaaaatgaggaaacggctttagaactgggtaatgggcagaggttggaacagtttggagcactcagaagccggaagatgtgggaaagtttggaactttctagagacttgctgaatggttgtgaccaaaatgataacactcatgtggacagtgaaatccagggtgaagtggtctcatatggagataaggaacttattgagaactgtagtaaaggtcactcttgctttgctttagcaaagagactggtggcattttgccctaccctagagatctgtggaactttgtacttgagagagatgatttaggatatctggcaagagaaatttctaggcagcaaggcattgaagatgtggcct

SEQ ID NO: 190313 - DNA, 410 bp, Homo sapiens
ctctcctaatctgacaataatgaatatcaatgacatttcaaaatatctacaacaatatcacaactgtaatgcgattttaaaacatttgyctattggtgacaaagccaaggcattgctaatactgctgtggtttctttcaatcctaattataggaagtgctgaattgcagttcaaagttagtgaaaatggagacatttttcccatccaaatatatatacccggaggagtgcatgggccccaggttaagaactcgaggtagtgtgtggctctaggtggtgatggctgtcttgcgaaagatcctaaaccttattctgcagctcagggccagagcaactgggatcaagatttaggagcccaacaggtgtctcagttctctggtgttattggtgggtggggctgggataaagctg

SEQ ID NO: 190314 - DNA, 410 bp, Homo sapiens
ctctcctaatctgacaataatgaatatcaatgacatttcaaaatatctacaacaatatcacaactgtaatgcgattttaaaacatttgcctattggtgacaaagccaaggcattgctaatactgctgtggtttctttcaatcctaattataggaagtgctgaattgcagttcaaagttagtgaaaatggagacatttttcccatccaaatatatatacccsgaggagtgcatgggccccaggttaagaactcgaggtagtgtgtggctctaggtggtgatggctgtcttgcgaaagatcctaaaccttattctgcagctcagggccagagcaactgggatcaagatttaggagcccaacaggtgtctcagttctctggtgttattggtgggtggggctgggataaagctg

SEQ ID NO: 190315 - DNA, 468 bp, Homo sapiens
cagcaattgccttttatttcagccrtgctttgttattctctgatggctcccttttcttataaaaccctatttttgcttagcagaaacaatatatcttgaatctctgagaatacaaaatagtggggtttatttcttatttaccaaaaaagtattcttttgttccatgtttagctgtgtttgctttggcacatttcctttcctgtttatctagcttggtctttctagctcctagtatctgttttccttatccattgattctcaccccttctcagttaagtacaaagcagggcaaagctgcccaggagctcagtctgtgtgggtagagctcattaactggccggcttcccttcccttcgcttggctaggaatggtgggaggcgaccattatgcttcggggtccctaaatgcaagaaggtagagtgtgttgcttgggaaaccagtttccagaactacctaagttatcccccg

SEQ ID NO: 190316 - DNA, 468 bp, Homo sapiens
cagcaattgccttttatttcagccatgctttgttattctctgatggctcccttttcttataaaaccctatttttgcttagcagaaacaatatatcttgaatctctgagaatacaaaatagtggggtttatttcttatttaccaaaaaagtattcttttgttccatgtttagctgtgtttgctttggcacatttcctttcctgtttatctagcttggtctttctagctcctagtatctgttttccttatccattgattctcaccycttctcagttaagtacaaagcagggcaaagctgcccaggagctcagtctgtgtgggtagagctcattaactggccggcttcccttcccttcgcttggctaggaatggtgggaggcgaccattatgcttcggggtccctaaatgcaagaaggtagagtgtgttgcttgggaaaccagtttccagaactacctaagttatcccccg

SEQ ID NO: 190317 - DNA, 593 bp, Homo sapiens
acttgtgtcacagggatttgttgtacggattatttcatcatccaggtactaagctgtatcagtccatttacatgctgctgataaagacatacccaagactggggagaaaaagaggtttaattggacttatggctggggacctcccacatggctggggaggtctcagaatcattgtgggaggtgaaaggcacttcttatgyggtgccagcaagagaaaaattaggaagaagcaaaagcagaaacccctgataaacccatcagatcttgtgagacttaatcactatcacaagaacagcacagaaaagactgacccccatgattcaattatctccccctgggttcctcccacaacatgtgggaattctgagaggtacaattcaagttgagatttggctggggaaacagccaaaccatatcataagcctagcaccccatagctattttttctgttcctctccctcctcccaccctccaccctccaatagaccccggtgtctgttgttcccttctttgtgtccatctgttctcaccatttagctcccacccaaaagtgagaacatgcggtatttggttttctgttcctgtgttagttt

SEQ ID NO: 190318 - DNA, 593 bp, Homo sapiens
acttgtgtcacagggatttgttgtacggattatttcatcatccaggtactaagctgtatcagtccatttacatgctgctgataaagacatacccaagactggggagaaaaagaggtttaattggacttatggctggggacctcccacatggctggggaggtctcagaatcattgtgggaggtgaaaggcacttcttatgtggtgccagcaagagaaaaattaggaagaagcaaaagcagaaacccctgataaacccatcagatcttgtgagacttaatcactatcacaagaayagcacagaaaagactgacccccatgattcaattatctccccctgggttcctcccacaacatgtgggaattctgagaggtacaattcaagttgagatttggctggggaaacagccaaaccatatcataagcctagcaccccatagctattttttctgttcctctccctcctcccaccctccaccctccaatagaccccggtgtctgttgttcccttctttgtgtccatctgttctcaccatttagctcccacccaaaagtgagaacatgcggtatttggttttctgttcctgtgttagttt

SEQ ID NO: 190319 - DNA, 499 bp, Homo sapiens
aggacttccactattatgttgaataacaatggtgaaagtgagcatccatgtcatgttccagattttagaaacaatgctctccatttttccccattcactatgatactagctgtgggtctgtcatatatggsttttattgtgttgatgtatgtttcttctatacccagattttttttagggtttttgtcatgaaatgatgttgaattttatcaaataatttttcagcatcaattgaaatgatcatgtgttttttgtattttgttctgttgatataatgcatcacattgattgatttgtgtatgctgaaccatccttgtatttctggaataaatccaacttggtcatgatgaatgatctttttaatgagttattgaatccaattcagtttgctagtattttgttgatggtttttgcatcaatgttcaacagggatattggcctatagttttcttttctttttgaggtgtctttgtctggttttggtatcagggtaatactg

SEQ ID NO: 190320 - DNA, 250 bp, Homo sapiens
aaggttaccttgcaccctggtaataagsctgtttccataaagaaaattaagatctctatctgttctcaggtaccagacttgattacagcactatgaaaaccatttcttaaacacacacacacatacatacacacacacaaagaaaagatgaaattgtgcagacaactcattctcaagatacatttaagagagtaaaaactgaattgcgcatatatattcctgaacaaggagtggaggtatttgttggggt

SEQ ID NO: 190321 - DNA, 516 bp, Homo sapiens
gctgcttacccactttcttcctgsatcaaggtctccagcctgacctctgggccagccctgcctttaaggcacctacatgcaacccactagatacaggacatggaaaacagataagactaagaagcctccagccccatgcctgtgactcagcagtaggctaaccaaatcaacccagtttgctaggaactttcctgactttaccactgaaaggggattcccaggattctctacaatcctggaaaaacctggatggttgatcactctactttgccatgtgacccatgagcacacaggcatgaggccatcagaagaagggaaatcccaaaggggttttgaaaccacagcatccacttaaccactatggtagctgagcagtgtgtctgcctccaccttcaccctgaccactgattctgtttctgtatctccattttggtgagtggctgggaccaagaatgagcaatttaactttctaggcctctattgacacgtatataaaatggagatgagaatcagcta

SEQ ID NO: 190322 - DNA, 437 bp, Homo sapiens
gggctgctatgaattttcaactggtgtcagaccaacatgagagctaaagtgcacaaagcgaaatgcaggcgtggtgtggyctttacaaaacaaaaccagaaagtcttctatcaaaaaaaaaaaaaaaagcccgaatttagaatctaagtttgtacgaattttagaaatggagactttctgcttcctgcccactttcctacacaagagaggcactctacttgtagaacttttgaacaatcattgaataggatgtgtaggtagatggagcatacactagaaggactaagaaaatatcctgtgtgtgcagagagggcagtgatgagaactgccgtaaccagaaaagattatgtttatggggcctctcccatgctcatgagattatattaacactaataagcacaggtggccataatttttgtgaacagagaatcagaagg

SEQ ID NO: 190323 - DNA, 613 bp, Homo sapiens
agcagtcacagcagctagacccccagccctttgcgttttgtgtttgccgtcttcctccccgtgtaagcactgaaggyagtttcctctttgacttagtgctctgagaatccgaacctgtggggcctacactgcagttgctggtgcagacataatggttcctatcttttcagaggcaggagatgattatgcatctccctgggatccttgcccatgagttcatgtcctctgcacggacatggatgaagctggataccatcattctcaggcacacactccattttgggagccaagcgggggacccagccccagggagtatgggatgagctgccacccttatcttaagtgtgagctctggggtagctagctaaaactctagtgcttataggactacatccagtcagtgttgggagcagaaatcaagtggaaatttttccccaaaccagagagaagacttggaacggaggagcacagttgcttctcagagttcatttctccaacaaattgtcagggaagtgaccttcaaaggcctgttgtcaaagtcaccacaagctaacagagggcatctaggtctggtggcacttcctctaaccagaaagccactaaaagccaaggc

SEQ ID NO: 190324 - DNA, 582 bp, Homo sapiens
gaaattgacaaaaggcctggaggtaggcatgagatcagtagtcacctgatcatttagctaggactaaatgatagttaagagggaaacaatatagactgtaatggctatatgtccagacaatataaatatatgacaaccatctatagttatactgcaggagttttgtaaatgggaggtcagaatgcaaggatatggcaaaaatattttaatgttttaggtaattgttatggtagcattatcagtattattctgagatggttgtgtctgtgatctaggagaaagcaaatgaatcattgtggaatattctcatttgattctttgtgtccttgaaaaacagaaatatttgaattggaaatatccataagaactcatgagatctataaccagtggcatggtgaagccagttcacaccaacagtttgtacacttttttcaactccagagtcagtaactttgtgtcagtagcttgaaattagccgtrgtgggagtatttatacaccatggaaattgggaaatgctacaaatccagcctttcttccccaacagagagtcaattgttaaaccatttgccagcaccccacag

SEQ ID NO: 190325 - DNA, 384 bp, Homo sapiens
tgattcttgtctctcaaaccctgcctattgtctttgtggatgtgctccttgatgtgtgatatacagagcaggtgggagctgaggcagtgtgcagaacagcaygaccatggctccttgatacaatatttctattaatgcagcttgagatagagcatgtttttttggcagtcactttgttacaaatcactctgctgacccatattgtgcttattctcaaaaacaaaaaacgtttttaaaatgtgggctgttaagccgtgtcttctccattgtgtattgtatcatttatttgggacatattgaggcatacgcctttttaaccttggtattgtacagtgattaagagctgagtttttggagttataccaagatgggtcagtatttgga

SEQ ID NO: 190326 - DNA, 384 bp, Homo sapiens
tgattcttgtctctcaaaccctgcctattgtctttgtggatgtgctccttgatgtgtgatatacagagcaggtgggagctgaggcagtgtgcagaacagcacgaccatggctccttgatacaatatttctattaatgcagcttgagatagagcatgtttttttggcagtcactttgttacaaatcactctgctgacccatattgtgcttattctcaaaaacaaaaaacgtttttaaaaygtgggctgttaagccgtgtcttctccattgtgtattgtatcatttatttgggacatattgaggcatacgcctttttaaccttggtattgtacagtgattaagagctgagtttttggagttataccaagatgggtcagtatttgga

SEQ ID NO: 190327 - DNA, 543 bp, Homo sapiens
aatcatagtacctggcacagggaagccaggtcataaatgttgttgaatgaattaataagtaaacgacccatacaatttagtgacttctagagcttggttctttcttctatgctcaccataataatagttcgagaattattgggtgcctctttcttctttacttcactcaggattgaagagtcactgttttctcagatgatcaccaagtccttagaccagctcttctccattcacactttggagagcccttctgaattgctagctctcctcctgctggagtgatagaggtaatttccagtcaatgaaggctgggagagcagatatagcctccaawttaggaagggaagcctagatggggtggaggtgctttctgctgcttgcctttctcctctgaacaaagtatgactggagaggagaaggaatgggactctactcagcaattaaggtttagaaggaagacacacactaagtcaggatggccacagggggccttgactctgctgcagctatggacttggtcatgtctagagtagatgggggtct

SEQ ID NO: 190328 - DNA, 575 bp, Homo sapiens
cttttccttttattgggtacactgtctcctaggaccactggatgctttacttccttctgggcttaaatttgagatcagaaataggaagatggccatgcttagaagaaatgtacagcatttgtgcacacatcctattggttagaactcaatcatgtgaccaaaactgagttgatcaagataaatataatctagctacagaatttggcagtatgattgaagtaaatgataaaatgatttgagtttaattagacaatgtctaaatgtaattgatataacaaagaaatatgaaccacttcattacaaaactgaaggaattctgtgttcatatcgtatgaggattgaggagaaatggagggaataasacatctattgagtctagaaataggtgaaccaaagataaaaaaattatcactatttgcagcactgcctatgaattggggtactccacctgtccatccattaactatttactaatggcctgccatttgccaggcactgttcttggtggtggaataaaacaacttatcctctctgccaggcagatgtatccataagatagagatggacctaccaga

SEQ ID NO: 190329 - DNA, 597 bp, Homo sapiens
ttttcaatgactatgcccagatccatcagagcaatcactataatcactatttatagcagctgtagccttaggaaatgtatttcttaaataataagactttgaagtcaaaattactccagatccatgggctacagaatgaatgctgtgttagcagcatgaaaacaacattaatctccttgtacacctccatcagagctcttgtgtgactaggtacatagtcaatgagcagaaacattttgaaaggaaacattttttccgagcagcaggtctcaacagtgggcttgaaatattcaataaaccctgctgtaaacaaatgtactgtcatccatgcttggttgttgcattgatagagcacagtcagaacagatttagcagaatccttaagrgtcctgatatttttggaatggtaaatgagcaatggctttatcttataaaatcaccagctgcattagcacctaaaaagagtcagcctgtcctttgaagctctttgaagctaggcattgacttctctctagctgtgaaaatcctagatagcaccttcctccaactgaaggctattttgtccacattgaaaatatgttgtttagtgtagctgcc

SEQ ID NO: 190330 - DNA, 658 bp, Homo sapiens
ttaaggcagtgacactaaattcagatgatgtcatagtttttgtctcactttcatcaggggtttatttccatatgattatagatagactagcaaaaataaaagcagwtttacactctcagtcatatctcttctcatggtaatttatcctcctgcacattcattctagaaattgctatgctgccgtcactacacaaatatatattgacttagacaatgaagtttttgtatcttagctatgctctgaatttatacctagagagtagcaagcaaacagtttcaactatgtggcctcttaatatatctgttattttagagcaaattatccatttggcatttatgttcattctattgtccacccagaacccaggcaatgtgtcctgtgaacttcataagttaggctatgccagccaccaccagtgtagagattagcccctcatcctgagatcaggttgctggcctggaccaaaaagaaattgtcacaaggctgaaagaaattggctatgtagtttggagctgttagtttcatttcagtaaaattgcatcatgaaaatgaggtatcacaaataattagacaaaagaaaaagaagaatatataacttcatacacacctatatcagtcagggttctccaaataaatagaatcagcagaagtacttta

SEQ ID NO: 190331 - DNA, 446 bp, Homo sapiens
tcattttattacctgtttccagtttgttttctctatttttcccctctgttttcgtctcctgccttccttgaagttatttgaattgatttgttttccattttaatttacctattgaacttttgactatatctcattgtgtatgtgttttagtggttgatctasaaattacagtatgagtatataattttttacaatacattttgaattaatagtttaccacttcaagtggaatgtagaaaacttaccacttacaggtccctctactcactttcctttttgagaaccccataagacaatgttaaaatttttccttcaataaccatacatatttttaaaaccttaagaaaatatattaaacagaaatttactatttctgttgctgctccttcattcctgctgttccaagattccctccaataccattttccttccatatgaatacattc

SEQ ID NO: 190332 - DNA, 559 bp, Homo sapiens
tctaatcagttaatgttatacagaagaaatagttcatccatcctctcttaccccatcccacttgaataaaaaatgctgtactctattaactaaaggtaagattctgcccacaaagactttctttayatgcatgataatgctgagattcacaaagagttaagatttctcgattccttgtgatttactcatttaaatcagcgtcactacagagcggaaactattttggctctatgcataaatggaatatctaatatagaattacattataatgaaatatgcattaatgcaagcctcataaagtgcttttcatgttctgcgggcatccaaaagtttaaaattcatataatcttagttgcttctcaaatgataatatatcaggttaatatgcttaattaaaagtcacatttgaaacattcaaagggatagttaattcaccattgacatttgttataacacagttaagcattgtggaaacaagacaatgggatatgtcacttctgttaggaacagaaggaggacattttatgattttcaggaaacagtatgtgtttgacaccca

SEQ ID NO: 190333 - DNA, 555 bp, Homo sapiens
ttggatcttccataatttcttcttccacataataggaatgatacatactatcctctgttttggctgaatccatcagtaaagttggctagttattaaaacagcttcctactgatggcaactgattcactggcctctcagaaccaacacatttaaaacagttaaatagtgcaattttctcaagaccctatggcctaaatacactgcaatattctgtagttggtataaaactcttctggagacctgacaagtgactacacgtatgactttatgaattgttacctagrcacaatggattccccactatgattataaaatattgtggatcccaagatggtaactgatttttgcacaatgatcctgggattctacataagctttggtatctctgctttgttttgcttttttccctggaaaagttttaataatatttctattaaatgaaaatgctttcatatttcaacttcactttaaacgaatgatatgaagatctagatttacacaaataagaaatcagaaggtcacttctccccttgtagagtggataaaataaattcc

SEQ ID NO: 190334 - DNA, 532 bp, Homo sapiens
attttcaagccactcttaatgtcagtggaggtgttttttatgaaaccaggaggggccaacccttgcagaactgcagagtggaaataaaagaggttcagaatcctcattatctcaacttgtcctccttcaccctaggaagagtgagagggytggggagagaggtgttgctagctgctggcctggtatatcttacctggcacctctgctaggggctttaagacagtgttgtcccacctttgtcacagcgggccaggaatcttttgcaactctggattgtgatgcagaggatgaggagcacgttgccttgagcattaaagctatggtgggtgggggatgctggaggcatcagcccccatttcctctggatgattgccctagtatatacaggcaataggcttatacatcttttcttcactagcactcagcatactgcccagaatacagtaggtgcttaatgaatgcttgtctaaaaagatggaaaatcgggtagcagagaagaaccaaaagatgccagaaaatagaaagaaaaaaa

SEQ ID NO: 190335 - DNA, 533 bp, Homo sapiens
ggttccttccagtcttcatctttccttaattccttaaacccaattctgatcttttcccatgacagagtagcagggctatctgaaaaatgtgtctcctctacaatattaagtagtccaacataaaaaggtgactatagattaaaatggattggagaagtaaaaacctaaataaatataagtaatacagtaatttaacaattgttggcmttgtctgccaagtagttaacaatttatcaagcagtgggctaaattttatgtacactatttctattgaatccttacaacatgggtattattgtcttgattttacaggcaattgatattttcacaggtgttaaacattttgttcagagttacatgacctggaagtggcagaatcaggattttaatacacattagcttgttcccaaagccagtgtagagtggaaaggatcattcaaagccaattaataatttactacaaatgcagtcatcttttatctagaattcttggagggttattcatcaacttgtaaatagttccagattcctgc

SEQ ID NO: 190336 - DNA, 619 bp, Homo sapiens
aattgtgaataaactgtgcttttatgaaaattatggttttggagaaaaaaagaaaaaaatgtttttaataggaaaagttgagcaaactgaccccatctcagggcacccctgtgaccaaacagawctctgaagtgggacattttatatgcaaaatctggggaaatcatccaacttcttaaataatgctttcctcccagacttagaaaaatatttggtggacccacagaaagcattgcttttgttttaactttttttttttgagcaagagtctcactctgtcacccaggctagagtgcaatggcacgatcttggctcatcacagcaactccgcctcctgggttcaagcatttctcctgcctcagcctcccgagtagctgggactacaggcatctgccaccacacccagctaattattgtatttttagtagagacggggtttcactgtattggccaggctggtctcaaactcctgaccttgtgatctgcctgcctcagcctcccaaagtgctaggattacagatgtgagccaccatgcccagcaacttttatataaccaaaattgcagaacgaagtggtttggggactagattaactcttggagggagggagggtaagctgg

SEQ ID NO: 190337 - DNA, 612 bp, Homo sapiens
ttctagggtaatgataaggcttccctttaattgaaaataaagatagagactcgtctatcacaattcttctgttgtaacttctttaaactttctacaaatgatgatgaaaacagcctcataactccctgtgctccacatggccatacagggcatatktgaatattggagctgtactatctaaaatggcagccactagcctcaggtggctatttaaattgaaattaattgccagtaccatttctctgttgcggtgccctcatctcaagtggttaagagctacacatggctaatggctaccatattaaccatacatttgtatagatatggaatatttttatcatcacagaagtttctaggtactagagctgtaattcacaaataatatgtttgggggattttgatagtaaatgatttcaggtatattacctaataataagaattattacatcactgtgagcatttagggtttactaatttcacatttggtgacttctcactgattaacaaccagaatgagtgacttcagaaatgtgtcaagacgcattttctggctatgttgttttatatgactattcttgttaaatgaggtttcaagtgcaaaacagtggaaag

SEQ ID NO: 190338 - DNA, 524 bp, Homo sapiens
caatgaaagaaaaaaaaactgctaaagaaacatgctatgtatctccagcaaaattattcataatgaaggcgaaataaagtatttcccaaataagcaaaagctgagggaattcaccactaagtcgatcttacaagaaatgctcaagggagtcctaaatctggaagtgaaaggacaacatcatggaaacacacaaaagtataaaacataattgtaaagcaaatacacaaatgaaaataatgaaagactcaaatagtaccactatagataaccaccaaatcacaatgastaacaatgagaggaaaaaaacagaataaagaatatacaaaataaccagaaaacaattaaaaatataaaagaagaaaacctcacatatctataaataacaatgcatttaaattaaattatccacttaaaagatatacacttgctgagtcaatttaaaaaacaaacacctgattcaactatatgttctctacaagaaatgcatgttagttgtaaagacacatatagactaaaactaaagg

SEQ ID NO: 190339 - DNA, 455 bp, Homo sapiens
tttattgctcatgtctactatgtgttggtttgtgccttagaaactcaaataggcacagcctctttgattctattttgaaacttctgctgtcttttaattcttagtcttttatgatttcctgctcttttaattttcaartacatataaatactcctttgctaactagtttcttggcaacaaaatatgtagcacctttagaaaaaccaaatttcatctctgatgataatggcagtgaattactgcgatagatcaggagaagccaaatagtacctaaagatagaaatcctttcaaatgaggcaggggtgatataaattgccaaaagccaagtatgtttgcttatgtgaataaaaaaagtactcttcaaagttgaggtccagtgagaggagcaatttatcatgtgtaattgcctgttttctcataagagaaatacagtacctccccaatgactgtttcc

SEQ ID NO: 190340 - DNA, 514 bp, Homo sapiens
aattggaagaaaataaacacagccaggacctatgtgacctatgtgggagttaatttgggaaayagagtttttagctctccaacctttggcatgggtgctgagccagaccaccacatcctccacagaaaaggagaccatgaccttcaagcagacaggagccaaatcatactagagttttgcaaactgtgacaagcagttgcacttttaaaacaataggaagccatcagaggggattaagtaggagttagctttttcaaatgtttagtatggttttaatgtagggagtagattagaagttaggagtgaaatcaaggtgattgaaggtgattacgtcagtttaggcaagaggtgatggtgacttggaacagtgtgggaatagaagtggtgagtagatttaaaatagatttttggtattctgaaaaaaaactctagacaaattaagtttagcaaaatttatctgagcaaagaacatttacaaatcaggtagcactcagaaccatgagaggctcagata

SEQ ID NO: 190341 - DNA, 462 bp, Homo sapiens
ttagcaatataaaaagcttatttgcagtcatggggagaggaaattcctacaaaatatttcctgggttttatggaatgtccttgactgttattcaaaatccaaaattgttgagaataccaacaatacaaatactttgtctcttaaacacattaaaaaagayatacatgaatttgttttttcctgaccttccttccaaaagtactaacttacatcaagaccagatttcatgggattacttacttgactcaaaagagtttggtttttctcttttccctatgatctatgataaatctgaactcaactcaaaaaggtaaaagatactgggctgtggttaaaggtggcaaaatgccagaacaaatcaagaaaccaataattccatttgggaaatagaggctggactcttgcaaaatgacactcacccccagtggatgtgctgtcttctgtagtttgttgtaaggactg

SEQ ID NO: 190342 - DNA, 547 bp, Homo sapiens
tcggttcttgtgctgaatactgatggagtaggtagtttatttcattaatgccccccatcaatgtgcttatggaataacatgtcaaagtaaaattaagaaggaaacttaagtcagtaatatcttctgtcaaaacctgaacacattaattacatttactttcctattgcttgaacctgacttactttcctattccataaactttttcaaaatgtaaaaaccaagaccattttgtttttgttgttgctgacattgtagttattaggagtttagaaaatattttagatayggggcttctttgccaaaacattattctgattctaagtgcccgtaagttggaagacaaagtaagactgtttctctaagacattattactgatgcatgcagattttatagtttttggggggaacaaaaatatttacaaaaaatagtttaaggcatttttgtaaatcttaaacatctctaatttagtctaacctgcgaatagcagaaagggggcaagctggcaaacatgctgacttgaattcacttccactactagagctttgt

SEQ ID NO: 190343 - DNA, 602 bp, Homo sapiens
tctcaactccctgaactcggttcttgtgctgaatactgatggagtaggtagtttatttcattaatgccccccatcaatgtgcttatggaataacatgtcaaagtaaaattaagaaggaaacttaagtcagtaatatcttctgtcaaaacctgaacacattaattacatttactttcctattgcttgaacctgacttactttcctattccataaactttttcaaaatgtaaaaaccaagaccattttgtttttgttgttgctgacattgtagttattaggagtttagaaaatattttagatatggggcttctttgcsaaaacattattctgattctaagtgcccgtaagttggaagacaaagtaagactgtttctctaagacattattactgatgcatgcagattttatagtttttggggggaacaaaaatatttacaaaaaatagtttaaggcatttttgtaaatcttaaacatctctaatttagtctaacctgcgaatagcagaaagggggcaagctggcaaacatgctgacttgaattcacttccactactagagctttgtcctggccttagatgcctggtgtcaatggcatctttttgt

SEQ ID NO: 190344 - DNA, 462 bp, Homo sapiens
atcctccacaaatcacctgccccctctcctttgcttcttaccgttatgtttccagagtctgatattcctctggtaaacagtggacatcacctggtgatcagtatacatcaagaacaagagcactgatgataaatgttattaatactagaactgtcatgcaactgtctacatttcttttttttctttttgatacaaagtcttgctcttgtcacccaggctggagtgcagtggcgcatgcagtggcgcaatctcagctcactgcaacctccgcctctcgggttcaactgactcttctgcctcagcctccccagtagctgggattacaggcacccgccactgtgcccagctaattttttatttttagtagagacagggatttcastatgttggccaggctggtctcgaactcctgacctcaagtgatccacctgcctcggcctcccaagtgctaggattacaggt

SEQ ID NO: 190345 - DNA, 412 bp, Homo sapiens
  misc_feature (1)...(412): n = A,T,C or G
taacatcacccanaccagaaaaygaggatcgtaagccctttcatgggccaaatgcagggctgggggccttgggctaaccctttagtgcctctggctgcatcactgtcagagtaaggtaaccaacaagaggctacagaaacaaccagccagttccagaaatagaaaaacataattggaaggaagccaggaaatggacaggtcctgtccagtgtagataaaatgacagcagctaaggcaggttgaggggcagaggagaggctgggggatcggtattatagcaatgcaggagtcctgtcctgagtggctgctcagggtattgacatgccattttgataaatacatgaattaatgagtgagtttcgagagtagggggagagagaataactgggcatccccttctgtagatcctcag

SEQ ID NO: 190346 - DNA, 482 bp, Homo sapiens
ttagtcatcattaatcaatgccaagcgaaaaaatcttaagatgtatttaaatttgtgatgccagtgtgattcagaaatttgaaaaatggatttcaaagtaatgctgtgagcagataggtcattgtataaacataactaatggttcattcattcattcctacaataatgattcagtgtcagattttgggtgttgaaaatacagcagagaacaaacacaacagaaggtccatatttgcggagcctacattttgtgggggaagagagatgataaacaaaatgaatgagttaagtagatagcacgttagatcatccaaaatgctatggggggraaaaaccctgggaatagggagatggcatgtgaagtggaagaaggttatgattttcaatagagtgatcagagaaagcctcattgagaagacacgctaaggaggccatgtggctggaggggactgagttagggggtgaatagtaggtgagaccag

SEQ ID NO: 190347 - DNA, 482 bp, Homo sapiens
ttagtcatcattaatcaatgccaagcgaaaaaatcttaagatgtatttaaatttgtgatgccagtgtgattcagaaatttgaaaaatggatttcaaagtaatgctgtgagcagataggtcattgtataaacataactaatggttcattcattcattcctacaataatgattcagtgtcagattttgggtgttgaaaatacagcagagaacaaacacaacagaaggtccatatttgcggagcctacattttgtgggggaagagagatgataaacaaaatgaatgagttaagtagatagcacgttagatcatccaaaatgctatgggggggaaaaaccctgggaatagggagatggcatgtgaagtggaagaaggttatgattttcaatagagtgatcagagaaagcctcattgagaagacacrctaaggaggccatgtggctggaggggactgagttagggggtgaatagtaggtgagaccag

SEQ ID NO: 190348 - DNA, 348 bp, Homo sapiens
ttcattacctctgctagtgagtgttgtcagtgaggtttcacagaacaggtgatattggaaccaagttgtgaagtggggatgtgtgttctragataatcacagatcacttactgaacaactctggtgttccaggctctgtgctaagaactatatacacattgtctcatttagtgccatcaacagctctatcagctctttcaggtaggccctgctcacactgctcacataaaggcctgctagcatgattcaagaatggtttggtcacgtcgctgtcgaccagtcacagcccaaagagagagtgctggtggctggaacaataaactgtgcagactttgaaggtggcagccc

SEQ ID NO: 190349 - DNA, 320 bp, Homo sapiens
aataacatttagaagattaaagctgtagtccaataatgaaaacccttggactcttgagaaaacacatgctaacttgtatttataagatgtgaaactcattacccatttacttsagataagtgctcaacatcttacagattgatcttgtcactaaatttcctattcacagaactagatatatgtaaataagttacatgaagttaagactaacatgaaagtaatctactcttcgcactaatactgaataagtaagatttgtgactaaaaaacttaagaatcaccatttgaccttttataaggtctgatgaaggtaaaggtta

SEQ ID NO: 190350 - DNA, 475 bp, Homo sapiens
tctcttcttacaactacatgtgaatccacaatgatctcaaaataaaaagtttaattatagaaatatactatcattaacataatagctactaccatttattgatgacaaagcacctctactcaatacgaaggaggtgggtacctacataactcatttaaacttcacaacagacctacaaggtggatgttcttagcccatgttaaggataaggaggccgaccgcattgacccacacctgtaatcctagcactttgggaggctgaggggggaggatcagatcgcatgagcccaagagtttgaaaccagcctgggcaacatagtgggaccctgtgtctaccaaaaaaagtgttttaaagctgggcatggtggtgcatgcttgtggtcccagstactcaggatgctcaggtgagaggatcgcttgaacccaggaggctgaggctacagtgagccgtgattgtgccattaccctccagccc

SEQ ID NO: 190351 - DNA, 456 bp, Homo sapiens
ggagtcctaccatatccaatggcttctgatctagccccatgagccatcttactacgtttacctctgggtgtgagtgacaactggccctaagtagaatcccctcacgttaagaccatgacttctagaattaaatggacccaggttcaaatcctggctgtgccacttacggaatgaccctgagagtaacttcacctctctgagcctcagggtcttcatctgtaaaatggggattataggggggattgcctcatcttttcaaagatactaatgcagttgaacctagaggacgttatggtragtgaaataagccaggcacagaagggcagataccccatgatctcatttatatgtgaaatctaaaagaaagtagaatacacagagatagagttaaaaacaatgattaccaggggtgaaaggggtaggaagtagggagatgtaggtcaaaggatacaaagg

SEQ ID NO: 190352 - DNA, 505 bp, Homo sapiens
aaggacttcactgtaacagtgaaaactgaaattaacccaaatgcccatcaagagtaggtggtgartggttgaatacacacatatatccgtataaccaaatattctgcaaactttcaaaggaatgtagtactctatatagatttcctgacatggaaagatatccataatgtttcttaagtagaaaataagtgatttgcaaagtcatcagtataatattctatttattgtaaaatatttacatatatatatgtctgtgtaccagtgtgcatatatgtgttggcatgtgtgcagtaaagtctagaagaacttcatggcagctgttgaggacagggactttatctcatgcacttctacgatatatatgagtgtgcatccattttagaatcgaataataataaaattcagtgctgaaatggaaaacaaaacagaaccttttggaagtacagttgggcctaccctgtgtcttaggtggttttagcaaaacactcccagggtcaagagtacc

SEQ ID NO: 190353 - DNA, 460 bp, Homo sapiens
cagaaaaccagggtcaggggtcccaaaggtggccgctcatttttcttaaagcctcacgctgtaggacacattcaaccagggcttccaattataatgaaatcggtgccaggtattaagttttagaggcatacagttgaagagtttagaatgatamtgtcttcctttgagaggagccaaagaggacaccttgctctttcccctggagttgcctgacttcacaaagataataaaattcacaaattactgcagcctggctttgtccttttcttgtagagttttatgtcaataggatagatacacgctgtggaagatgccgtaagtgccccattcgtatccccttggattctcttaccattttgcacataccagtctaacttccagcagccaacatctttgccagagggtggccctcaggctgcttggagatttagtattaaaatagacgtatacattaaactca

SEQ ID NO: 190354 - DNA, 304 bp, Homo sapiens
ttgcaactcagctctttaacttgctgtacgactgtggggcagttatctcaagatctgtctgccttagttttcctttatgtaaaatagacataataggaggtatcattggggttgcagacaggattagatgtatgatatgtataaaggattttagtcaaattctgaatactcagggcatggaaktagcttgatgatgaagaagacagagaaagaggagaaggaagaggcaggaggaataggaagaaggaaggaggaggaaaggaaggaggaagaggaagagaaggagaaagaaggaggaagaaga

SEQ ID NO: 190355 - DNA, 595 bp, Homo sapiens
agctgagtgatgggaagattgaattcggcaggtccagctcagctgacacagccagagagatgaatactcatcctcaaagaactaagcagaccaggctgatggacctcttagaatctgttttcccatctgtaaaatgggactaacaatatctgccctactgaaaggaacaagtgtgatggagggtgaatgaaccattgtcaaaagcattgtgaaggtcaagaatgcattgtgctcccgctgtgggtagagcctgtgctaggtcacaggtcacctctttctggaagcttcccacatctcccaattctaacttagagaatcaacaagtagttggactagtcagtgctgggatgagaacatgctcaggatgttccagaactcggagacaagtcatctgtcacgtcattagatccaccaccttgtaggactgggagtttgctctgtgtacctagcactgtgcctggtatacagtgagtggatcctcaataagtatttgtagytccctcattcaacaggatcttgtccctaatgttttgactttagatgggaagacaaatatttaccaagcataatataagtactgatgcagagaccatca

SEQ ID NO: 190356 - DNA, 571 bp, Homo sapiens
cctgtcacttccacccacgaatccaaatgctatttgaggacccctcccaaccctttatcatccttattgcacctccacccargggacacagcatggagccccccgcccttcctgctgccccacccggggactgtctcggtgtgtctatagtcctggaagactgtggcgcccaaagctgcgttcctgcccagcgggcttagatgtcgcaagggtgagtcagctcatgcccatgataacatctgcacagcccgcctgggaggcaggtgcttcttgaattggagggatgggtttgggacacagaggggcctattctgtccctgctgagcctgcccctcaggcaaggagtaggggttgggagaacaacaggaagaaaggccccccagctctctgagaacctcccaagaaaggagtctctccctctgactccaagaaacctcgtctttaggaacctgtctggagaagtgggatacgaagtactggccaggaagggaacaaggtccttgtggaaatgagctctgtgttttctgaggctgagaggctgggaaggtcagatgacaccagtgtgatcatt

SEQ ID NO: 190357 - DNA, 418 bp, Homo sapiens
tgtaccataatgtcaaagcagactagtctgacttccagctgctgagcacctgcttctcttccaccaagggctcgctctgccccaggctgctcattcagggaacataggaggtggaggaaatcacatccaccctctaaccaataacttactggagttggtggtggacacctcagtgcccagcgttctctgggatgcatacactgaggtgtatgcttcattctcactctcaagarttccccaattggtaacttgctggctcaaacacttactgcttttctttgcttctcttctgatgtttcccatcatctgttgacaaagaaactaattgcacttgaatttttatgtcagggtctcttttttgggggaacctaaactaaaacactgatatttgtgtaactgtgaacagcttacaaggggc

SEQ ID NO: 190358 - DNA, 389 bp, Homo sapiens
gaattcttacctttgtcgtggctacrtaagacttgattgtgtagatagggggagttgagcctgcgattgaggattaactgtcattttttgttgggagaaaacttgtccctgacttggttactttgagtcagtctgaggtacccactgtccactctcctactggggaaggtcagcaccagcttcattctcctgactactgtgccctctgcatgcttccaagcccaccaggttccgccaggctctgcttatgtcctgtgagccttggctctgacccttattgcagttcacgtcttgcccatgtggcctggttgcttggtctttggctggtgctcagctctccttcaagagcttggcttggacccccactctagggattctttctggttcaa

SEQ ID NO: 190359 - DNA, 389 bp, Homo sapiens
gaattcttacctttgtcgtggctacataagacttgattgtgtagatagggrgagttgagcctgcgattgaggattaactgtcattttttgttgggagaaaacttgtccctgacttggttactttgagtcagtctgaggtacccactgtccactctcctactggggaaggtcagcaccagcttcattctcctgactactgtgccctctgcatgcttccaagcccaccaggttccgccaggctctgcttatgtcctgtgagccttggctctgacccttattgcagttcacgtcttgcccatgtggcctggttgcttggtctttggctggtgctcagctctccttcaagagcttggcttggacccccactctagggattctttctggttcaa

SEQ ID NO: 190360 - DNA, 577 bp, Homo sapiens
  misc_feature (1)...(577): n = A,T,C or G
nnnnactgtatatgaattaaaacataaaattagaaaagatacaggcctttcagattgtatctttcttttgagtaagttcgggtaattagtatcttttaaggaactttgtatttctttttaatgccaaaatgtggtacaaagttgttgcaatagtcccttattatttttaatgcctgtgaacatttttatttttaattatgtgggtacgtagtaggtgcacatagtaggtgaatattttaatgtctatcttcgttatttctggtattaattgtgtctttttttctttaagagtctagtctaattctgatttctaaaagattatccacttttagtttcatggttttcctctatgtttattcattttccagtccatgatctctgcaktgttttcctccttttaattattttgaatttacttgctcttatttttctggcttcctaaggtaaagtctcaatctttattttagatcattgtctttccttatgtaagtatttaaaattacaaatatccctttaagcatgatgttagtactcttacacaaatttagatatgatgcacttttcattggggttaaaa

SEQ ID NO: 190361 - DNA, 589 bp, Homo sapiens
aagagcaatcggacaagaaaaagaaataaaaggcacacaaattggaaagaaaggggtaaaattaaccctatttgcagatgtcatgatcctttatgtagacaactccaaagattccataaaacaactgttagaagtaacaaattccgtaaaatgcaggacacaaaattaacacacaaaaattaattgcatttctgtataycaataataatctatccaaaaaagaaatcaagaaaaataccatgtatgatagcatcaaaaaggaataaatttaactaaggaggtaaaagaagtgtacactaaaaattctaaaactgataaaagaaactgaagaatacacaaataagtggaaagatagtgtatgttcatggattggaagaatattagaaaaattcctataccatgcaaagcaatatacagatgcaatgcaactcctgccaaaattccaatggcattatttacagaaataaaaaaaaattctaaaattcatagggaagcacaaaagaccccaaatagccaaagcaattttgcaaaacaaaaacaaagttggaagcatcacacttcctgatttcaaattatattataatgctaa

SEQ ID NO: 190362 - DNA, 587 bp, Homo sapiens
cttgcctgtgctaggttggtcttgtcaatattccacaacctgtacactcaaaatgggtacattttactttaagtaaattgtgccccaataaagtttaaaaraagatgccaaccaaacccttcggtggacagaaagtttcactaagtaacaagaatcagggtctaatttagaaattctgattttagaccctcctactctcatcgtaggtattctcacttaaacatggaaaatacaaatcaattttcaaaagcttctttttaaggtgaagtcaaaaagtaaagtcacattcattaggacttttaatttctactatcttaatatgaattttgtatctccccagggattctctagcttggttctttgtactaaacaattattgtgagattgggaattgcatttttatcccagtttctgaaaaggtaaggttgtccttctgtcttctggaaatatgaccaggggttagattttcatccagggcgaataagtcccttgtttatcagtccatgtctattgcagccacaagaaacttgagacttatttagataatttccatggggaaaaaatcccttatttcaattatctagtgg

SEQ ID NO: 190363 - DNA, 431 bp, Homo sapiens
ttcttcttgtgtgaccttgagcaagttgcttaggcgcagtgcctttacctgtgaaatagcagtagtgatgacgatgatgacgatgacgaagacgacaggcactcacaatgtggagcacgtaagcccaaccaaggacctggatygtgcagggaaagcagcccctacatggtgcaagtggtggtcaggattctagtgtcgccctggtagcagtgggtcctctcagctctctccctccagcagcctgggaggccgatgatgctgaccccacaggacaggttcctccactaggcaggccctgcatctgcccagagcctcttctgcacgggagccacatggagatcgtgttaaagcctcggcgtccattgttcaatcaatcaggctaatctgcctgcccctcgataaggggagggatcgggtttcagggagatttt

SEQ ID NO: 190364 - DNA, 485 bp, Homo sapiens
aaagtgctttgcagagagcagctgtcagttcaggacatggttctgaggactgttgctcaggctcgcccagaagggacagcctgcagtgtcataggcagttgatgctgcacagccctgccttccttgggtgctgggaggggctgatgggcagagaccccagaaggctcacaagctgggatgggaagccccaggagcagtggcaggtactctgtccaaagcaagccacctgccaatacagaaccccaggttatggctcctcttgggcgcaagttgttaacagctacagcctctaaaggccagtttctctttgcttcagtgcccaatgcagacctcgagccttccagaggccttggactcttggacttagacccttggtagggaggaccctagcaatgggcagtgggacacratctcagaggtggctctgccctgacaggtcctcatgtctgcatcatgggacacacttctgaaagcactctgccttc

SEQ ID NO: 190365 - DNA, 485 bp, Homo sapiens
aaagtgctttgcagagagcagctgtcagttcaggacatggttctgaggactgttgctcaggctcgcccagaagggacagcctgcagtgtcataggcagttgatgctgcacagccctgccttccttgggtgctgggaggggctgatgggcagagaccccagaaggctcacaagctgggatgggaagccccaggagcagtggcaggtactctgtccaaagcaagccacctgccaatacagaaccccaggttatggctcctcttgggcgcaagttgttaacagctacagcctctaaaggccagtttctctttgcttcagtgcccaatgcagacctcgagccttccagaggccttggactcttggacttagacccttggtagggaggaccctagcaatgggcagtgggacacaatctcagaggtggctctgccctgacaggtcctcatgtctgcatcatgggrcacacttctgaaagcactctgccttc

SEQ ID NO: 190366 - DNA, 586 bp, Homo sapiens
ctgtatatgaatttaaaacataaaattagaaaagatacaggcctttcagatttgtatctttctttttgagtaagttctggtaattagtatcttttaaggaacttttgtatttctttttaattgccaaaattgttggtacaaagttgtttgcaatagtcccttattatttttaatgcctgtgaacatttttatttttaattattgtgggtacgtagtaggtgcacatagtaggtgaatattttaatgtctatcttctgttatttctggtattaatttgtgtctttttttctttaagagtctagtctaattctgatttctaaaagattatccacttttagtttcattggttttcctctattgtttattcattttccagtccttgatctctgcagttgttttcctccttttaattattttgaatttactttgctcttatttttctggcttcctaaggtaaagtctcatctttattttagatcatttgtctttccttatgtaagtatttaaaattacaaatatccctttaagcatgatgttagyactcttacacaatttagatatgatgcacttttcattggggttaaaa

SEQ ID NO: 190367 - DNA, 571 bp, Homo sapiens
tggtcaaaggacataaagtttcagttagaagaagttttaatgatctattgtgcagaatagtaactatagttaacaatcatgtatatttaaaaattgctaaaataatagattttaaaagttcttaacacaaggaaacaaatatgtaaggtgatgaaatmagtgtattcttgacattctgtatgtttgaaatttttcaaaataaaatgtatgcaagaaaataaaaactagaagggctatgagcataacccatagttagtactaagttaagagctgatttacctgccatctgggcacagtctcacaagacaagacaggttttccacagcaccaaagatggtgggaactaggaagtaccctttggcaaaacctggttttctccttggcattacagttctcttggtaacctgtcaacctcatcactgtctccttgttttcttagtgaggcatacggatagacccagaatggatcttatattctccacttctgcaattctgcccacactgggatgtcattctaggctacccttctgggcccaactcaaatctgacctcctcccagtactaaagaatt

SEQ ID NO: 190368 - DNA, 599 bp, Homo sapiens
gtccatcaatcaacaagtggataaactgtggcatgcattatatatatatatatatatatatatatatatatatatatatatgatggaatactactcagccacaaatagcaawgagttaatggcatttgcagcaacttggacgggactggagacttactctaagtgaggtaactcagtatatatagatatatgatggaatactacctcagccataaaaaggaatgagttaatggcatttgcagcaagttggatgggactggagactattagtctaagtgatgtaactcaggaatggaaaaggaaacatcatatgttctcacttataagtgggagctaagctatgaggatgcaaaggcgtaagaatgacacaatagaccttggggactcagagggaaagggtgggaatggggtgagggataaaagactacaaatcaggtacagtgtacactgcttgggtgatgggtgcaccaaaatctcaaaaatcaccactaaagaacttactcttgtaaccaaataccacctgtgcccccaaaacctacagaaataataaaataaaataaaacctatgttcacatcaaaactgtacatgaacgttcaca

SEQ ID NO: 190369 - DNA, 465 bp, Homo sapiens
tctccttattgccttggcaataaagcttcccgggaartgggatgctgtgctaaaactcagaagcattatcttaaaaagtgaatttattctcccttttgcctggtccttcctctggtggaaatatcaataaacaaaggaaaggtgggcgaacaggaagaagccagttggtttctttagtagacattgctacaacaaaataacttgcttcttcagaaggctgtttatcttttctcttgtaacacttcatcaaaaagtttgctcttcttgggtctgaacaataaagttctaatgaacactgaagggtctaccagcactcaggaatgcaaactaaaaacaaaattctaagctccaaaaccgtctgaatggacccctcctctcaactaagggcattctaaagtaattcaggccatgatgggaagagggggtcagacatgtctcattacacattcctccctttggaactca

SEQ ID NO: 190370 - DNA, 525 bp, Homo sapiens
tggctgtgcatttaactcctactcacatggtctccttattgccttggcaataaagcttcccgggaaatgggatgctgtgctaaaactcagaagcattatcttaaaaagtgaatttattctcccttttgcctggtccttcctctggtggaaatatcaataaacaaaggaaaggtgggcgaacaggaagaagccagttggtttctttagtagacattgctacaacaaaataacttgcttcttcagaaggctgtttatcttttctcttgtaayacttcatcaaaaagtttgctcttcttgggtctgaacaataaagttctaatgaacactgaagggtctaccagcactcaggaatgcaaactaaaaacaaaattctaagctccaaaaccgtctgaatggacccctcctctcaactaagggcattctaaagtaattcaggccatgatgggaagagggggtcagacatgtctcattacacattcctccctttggaactcaggaacaattgagcagcattaacattaaaac

SEQ ID NO: 190371 - DNA, 567 bp, Homo sapiens
actgcactccagcctgggtgtcagacagagattctgtctcttaaaagaaaaaaaaagccattaattcctagtaacttggtgtcaaatagattcccagttgttgtactgaactcaatcaatatctttattcaattctattactctgawttttttctcttttttttgagacagagtcttgctttgtcacccagaatggagtgcactagtgcaaacatggctcactgcagccttgacctcctgggcccaagccatcctcctacctcagcccttcaagtagctggaactacaggtgcacaccttcacgcctggctaatttttgtattttttgtagagacggggtttctccatcttgccagggtggtcttgaacttctgagcttaggtgatccacctgccttgacttcccaaagtactgagattacaggtgtgagccactgcgcctggccactctgatttcttaatgtagctaaaaatccaatgagaatttttatctagttttgtctactttaatcagttctaaagtttctaaatcatttggaagtgtataacctgtacattacaagaattc

SEQ ID NO: 190372 - DNA, 592 bp, Homo sapiens
ttcagagttcacatttcaaatgaacacaagaaggaatctgtggctgggcatggtggctcatgcctgtaatcccagcactttgggaggccgaggcgggcggatcacgaggtcaagagattgataccatcctggccaacatggtgaaatcccatctctactagaaataacaaaaattagctggacgtgatggcactcgcctgtagtcccagctactcgggaggctgaggcaggagaatctcttgaacccaggagacagaggttgyagtgagccgagattgcgccactgcactccagcctcgtgaccaagtgagacctccgtctcaaaaaaaaaaaaaaaaaaaaaaaagaaggaatctgtatcctgcttgaaaaagcacagagtgagaattcctccttaggtcccatcactgactcctcttttcctccttgcactttaaatggtgcacctctggcttccatccttgagcttttccccactggcatcccttatttaggtgttctttctgatgctcatcatattttcctagtaacttccaaccaatccacactattctctcaattcttctgagttcctaaaatctgatatattgaa

SEQ ID NO: 190373 - DNA, 592 bp, Homo sapiens
ttcagagttcacatttcaaatgaacacaagaaggaatctgtggctgggcatggtggctcatgcctgtaatcccagcactttgggaggccgaggcgggcggatcacgaggtcaagagattgataccatcctggccaacatggtgaaatcccatctctactagaaataacaaaaattagctggacgtgatggcactcgcctgtagtcccagctactcgggaggctgaggcaggagaatctcttgaacccaggagacagaggttgtagtgagccgagattgcgccactgcactccagcctcgtgaccaagtgagacctccgtctcaaaaaaaaaaaaaaaaaaaaaaaagaaggaatctgtatcctgcttgaaaaagsacagagtgagaattcctccttaggtcccatcactgactcctcttttcctccttgcactttaaatggtgcacctctggcttccatccttgagcttttccccactggcatcccttatttaggtgttctttctgatgctcatcatattttcctagtaacttccaaccaatccacactattctctcaattcttctgagttcctaaaatctgatatattgaa

SEQ ID NO: 190374 - DNA, 478 bp, Homo sapiens
gtgagaacaagaggctgaacgtgggatacaggagagtgagtctagaagaattttccaagttgaagaatgcagcttcttttaatggtgcacacttagtgttcagtcttaaagagaatgccctgttaagaatgctaactggggctccagtgctgatagattttcaatgaatggaacttagacaacaggccatcaatgtgtagttttataagaatcagtcacagttataagaaacatttatatctatttcaaactttatgaagtatagaaaaaatgttgaaactgcacacaccatatcacatagcatcttttttataaaacaccacagagaaatatttcttttaaytctcagagttaatagcaatatattttaccaagcaactcattttttaacttaccgatatatgaatcttaaagcaacagtgttcccttccttggattagttgataggaagatcagaaccagtctgtgactcgtttct

SEQ ID NO: 190375 - DNA, 544 bp, Homo sapiens
cttaaaacaccatttaatcacattgttgtttcaccattaattgttaacactgatatgtttgaaatattttttaagagatggttctagatattggcaacatttagtaaatacttttaagagtcacagcatayattgggaatatagtattttttgcaaatctataaaactacatagattccttttttttttctttttgagacagagtctcactctaccatccaggctggagtgcaatggtgcaatctcacctcactgcaacctccacctcctgggttcaagcaattttcctgcctcagcctcccaagtagctgggaccacaggggtgcaccaccatgcccggctaatttttttttttttttttttttttttttttagtagagagggggtttcatcattttggccaggctggtcttgaactattggtctcaagtgatccatctgcctcgggctcccaaagtgctgggattacaggtgtgagccaccatgcccggccatccttcttgaagaagtctttcattacacggctggaggtcaaaggaggaag

SEQ ID NO: 190376 - DNA, 544 bp, Homo sapiens
cttaaaacaccatttaatcacattgttgtttcaccattaattgttaacactgatatgtttgaaatattttttaagagatggttctagatattggcaacatttagtaaatacttttaagagtcacagcatacattgggaatatagtattttttgcaaatctataaractacatagattccttttttttttctttttgagacagagtctcactctaccatccaggctggagtgcaatggtgcaatctcacctcactgcaacctccacctcctgggttcaagcaattttcctgcctcagcctcccaagtagctgggaccacaggggtgcaccaccatgcccggctaatttttttttttttttttttttttttttttagtagagagggggtttcatcattttggccaggctggtcttgaactattggtctcaagtgatccatctgcctcgggctcccaaagtgctgggattacaggtgtgagccaccatgcccggccatccttcttgaagaagtctttcattacacggctggaggtcaaaggaggaag

SEQ ID NO: 190377 - DNA, 330 bp, Homo sapiens
caaatctaagagttattggccctaaagagaaggtggagagagacatagggataaaaagtgtattcaaagggwtaataacagagaacttcccaaagctagggaattatatcaatattcaagtacaagaaggttatagaacaccaagcagatttaacccaaagaagactacctcaaggcatttaataatcaaactcccaaaggtcaaagataaagaaaggactctaaaagcaacaggagaaaataaacaaataatatatagtggcgctccaaaatgtctgacagcagagagtggtatgacatacacaaagtgtggaaaaaaaaaaaaaaaag

SEQ ID NO: 190378 - DNA, 666 bp, Homo sapiens
aagatgagtactgggaatttctttcctgattttatagcacagtgtcagagcagggtgcatgcctgagtgtgcctcagcttttcatatcggttcaatgtggatgtttactcagtgcctggtaggtagaagtccctcacttcatctctgagtttctctcagagggaattgatccatgagtagatatttatctggtgcatttgggggtggagggagacccaggagcttcctagtctgctatgttgctaattgtcttcttggtcatcttttaaaaccatttctgtgaaattatagcctccttactcccttaccctgmgtctggatgtttctgaagatgactgatctctacagtgagaaggccctgggaattgactgactcactctctctgtctctctctctctctctctcacacacacacacacacacacacacacactcatatacatacacacatagatacacatatacatgcatccacacatgcacaccctgggcacacccacacaccctacaactgcacatgcatgcacacacataatgttaactgaaggagaacaatgtccagcttggctgcagccatagtcctccaaggtgaaacccacggtctagtatctgtcaagtacacagaccaactctgggggggctctgaggggccaaggtgtagactg

SEQ ID NO: 190379 - DNA, 439 bp, Homo sapiens
aacaaattcaaattcaataaacaggaaacatttgtaatataccaatcggggaaaggttagttttggcacatgtggtcagattatgaactagggcacacacaaaaaagataatgaactaaccaaaggttagaagggcaggcaaattttaacagtgaatgagtatataagataggatagaaagtggtgggaattaatttagccttctctggaccaccatcttgatttcyaaacttaagcataaatagaggaatgtgctaaacaatgatgaaacttcaaagcaagaacatatcaataattagaaatttggagattgaaactgtaaaacaagaaaactgtttcagttggagaagatgctgagggataaataaacaattgtgatcaacaatagaaatggctgttattcagattttggtctccaactcaaaaatgaaaacatggg

SEQ ID NO: 190380 - DNA, 535 bp, Homo sapiens
ctctaacacattcaatggtaagaacttagcagtgtttaaaaaccctgtatacatacacacacacacgcaccccmcacacacacacagactttatatatatgtaatttaccaagtctaggctacaagaggaaactggcaaaaattcactaattgaaatggagcttggccaagacatccatatctaatcccccttttctgattccaaatcagggagagtacatgctttgtgttttctggtaaaatacagacctatgtaacaatcagcatattttctcagaccagagcaagtaactcccaacaatgagtgtttgtcagtcctaactggtttctctacgtgggtggtgaaaaaataccttactacagtcattaattctttctttcaaaagaaccatgtgtcttgagaagttctgctccatcacagggcaatatcccattttaaatacagtgtttaccgatgtttgtccatgaatgacgtcaacaaaaatgtttaaatctcaccaggaaaggagggcttagttgccagactttgggagac

SEQ ID NO: 190381 - DNA, 371 bp, Homo sapiens
tttcttaagaggcaaaacttttgcagttgctgtttattttcagtgactacccgtttccatttatttaattagactacagtgggaccgagacaaggagcataatgaaagctgctgcactgatggtgcaaaaagacacatggcatcattaatgtctctgtggtgagcaaaggtagaacgcaagacagaaaacaaggaaacctctgygttgtaagaaaagtgttcagcatgggtatcaaccggcatgtagaagcagcaagcatacattccatttttattctattgacaaaaagaattgcaggactaatgcttgctcctattaaaatatgagaaatcacattttaatcctacaaatcaaaggtcaaatatttgtt

SEQ ID NO: 190382 - DNA, 547 bp, Homo sapiens
tcaggaactggactctgtcagaagaggagctctgaggatgtatgcatatctcccatgacgagggatttactagtcttatagacgtcctctcccacttccataaacacaatcacttctaaagaagccagtttgtgtcccaatgtaacccaactgtattttataaagttattttggataaatctacatacttggtgactgaaaacttgtaatgtggaatatagcataactttacttaggctctttataccaaatcaacagaattttcatctttttgttttaatatgtaaaaattggaagagaaatataaaagagtcagttcaaatattaattcaagcactggctgaaatcagtgtcagcaaagtaacaaggcatttatttgtttcatagaagaaacttgacaattctggaggatattcagcatgtttacaataacactgttcctgacatttttttcctccttgtttattggctcttggactaagtatcaatctttggacactgttcttttctttcttggcwtgaaagtgagcaggaatgggggtgaaag

SEQ ID NO: 190383 - DNA, 546 bp, Homo sapiens
tccaagaaagaaattggaagttgccaaagagggggtggtaggcagaacgtatttaaacataaccagggggtggtggtagaaagctgcaggcctcagaaggaattgtagcttgagactatgtgggctctgcctctacaaagtccagcctgctgtgaactattcatttgttggcagaatttgcactgagtccrtgggacaaacattttctctctagaagtttccctggattatctcttcaggctttatcatccatttataagattaaaaatcatatcacataaaacttgactctagaaatatgaaactaaccaatgttgtttttcaaaagttctctgaaaaataaaatggattatgcaggaaaattttgtaaatggaaaatattgcatattcagagtttgaggcaatccaggacattttaagccagaaagcagatggaataagagcaatataaattactgtaactgtattttgccaattgcaaagtgactctaatgccaaacagaacttcttctccccaacttgttgactgcatacgtatttgttttt

SEQ ID NO: 190384 - DNA, 627 bp, Homo sapiens
tgttgtttttcaaaagttctctgaaaaataaaatggattatgcaggaaaattttgtaaatggaaaatattgcatattcagagtttgaggcaatccaggacattttaagccagaaagcagatggaataagagcaatataaattactgtaactgtattttgccaattgcaaagtgactctaatgccaaacagaacttcttctccccaacttgttgactgcatacgtatttgtttttaatttacacttggtagagtttggtgagatgtttggagttcgaatgatagaatctacaggtctagggaacaccaaatctagccaaaccacccacaragtatccaattaaggaaacaagcacataatgtacaaaaaggtattttcagtgaaaaataatattcatgcatgttatataagccaattaacaaaaactgtgcctgtagcaatttttaaggaatgtcttacaaataggaagtacgttaaatactgaacagaaggacaaaacttcatcagcagtccttcctggccttggtgctctcaacatgatctccagcctgtctcttagatgtcttggcagcttcccaaaggaagagtcttggcctctggtcgtcagactcagagaatcctgacttta

SEQ ID NO: 190385 - DNA, 592 bp, Homo sapiens
tatctgggcactaggtgcgctcattgccactgtgatgtcattgctcccaggtcctagccatggacagaactatatttatttctatatttatgtatgtatattgaaaactattcattcacatcaatatccaattccaatscaacaatacacagggttcattctaattttctccctttctgttatccctaaaatatctacttaactgatccatcctcctatatgtaacccatctcccagctctgttgctgccccctactccttgcagctcctcttctattgtagctgcctggattccaacacctcatactcccagctccttccttgctgcatttgcactctggcttatgtctccctgtggataccccacttacctggcttgggctccaaaccccatgccaggccaccatcccatgtgaacccatttctcaccctgctcaggctttctgtcagtcattttcaatctgactcctagcagatttttaaaaggatccacttgggtagatacaaaatgagtttaagcaactaaactctgggaaaaaaaaaaacaacccaagcccaaatctatttaataacatgtattacattttaaaat

SEQ ID NO: 190386 - DNA, 630 bp, Homo sapiens
  misc_feature (1)...(630): n = A,T,C or G
aaggttgaacaaatttagagtcccaccagcaagcagtgggatttcagcacacttttctcaatgtagagcatcaccattaaagaaaaagaaccgtaattaatttgttattggaaaagttgtaactcatggctttaatttggatttctttgattcctaatgaggggaacatttttcatatgcttatatgctattcatagttttatttcatgaatgaactcatcacgcttntggtacttttattttttttcggcttactaattgtatgagctattatagagtamtaataaattacaactgatgttacttagcatttactatctaccaatattgaaggcaagcaaataacatatagatgctccttcaaatgttcataaaactctctgcattatgctttaaacccccgttttaaagacaacaatcctgagacagaaaaattaagtagatttcttatagaagtttatgtctactgcattcaaattatatctgtgatcattgctctggtcctactgtgtttggttctgtctttggtaacacctattatttgcagattgaatttcctttctttgtgctctacatatatcatcttcccatttgccttaaaaaataacacatttttttggacctccctcc

SEQ ID NO: 190387 - DNA, 538 bp, Homo sapiens
ttctattctgtgcaggcccagggcccaccagctgggcaccagggccctggccccccatttgctggccagagagtctcttcagaggggaattcaggggaggctgccttgccaccagacaatggctcygtttacataatcctcactaggctgtggctggtgtaattcagttatttgattgattttatattgtgtgatgctggaagaagtgaggaaacaacaggtttttggctgtaccctctggcctgttctgatctgtcttgttggcttcaaggatttcacgaagctttgtgctgctgccaactgtctccctgggtgttgttcacaggcagcatcctgcttcccatgtgcatatctccacagaatccgtaggaagtgggacctaacccttaagttgccggctcgtgggtggggcatgcgggcagcagaggtttgcgtggagtcttcagtggccccacatgttgcagagtttctcaaatgtttagtgctcaagctccatcttgtccctttatccccaggagaaatggctgtgtattggttt

SEQ ID NO: 190388 - DNA, 549 bp, Homo sapiens
cttttggctttttccaagcagttctaagtcctttgccaagagcaagcctaatcccgagcaccagaaaattcagactttctccctgagttgaaaaccctttcctctatctcagggaaaaattcctcagcaattcagcatttacctgcccccatttctgagtgcctcagaggagcagagctctggagggggaaaacacgatayggcctgatttacacatctggccccgatctgggtctgttttcgaacttggcaggagggacaggatgcatttgactttcatctacctctgcttcactggagatgttgtggggcatgaacaccaggcgtttctgagttcatgtggtcgatggacatggaatggaagaagcctcttttccctgaaaggacttaggacaaaatagtaaagagcatcaatgcgcagagaagaagtatggcatttctcttctttccaagacaagagctactcagtccctgttggagctgcatcttaccaacagcctttcatcccccacctcactagtaactgcagttgcctcgattagggttagg

SEQ ID NO: 190389 - DNA, 491 bp, Homo sapiens
tgtgcgactgaacacacagtactggtggactgctgggttctcactcagggatggcagaaaggtttcaatttgtgagccagccactctcattgactgggagtggctgcctggacctcctgagctttggctgcgttctgagggaaagagtgctcatgttgattattaatgtctgtcatggacaaggggtaggagaagtggttcttggattgtgygtttgctctttctgttcccgcctagtgatttctaaattcggttgctcatttagattctcctggttaaaatgccccatcaggcagatttcccatttcataggcctggatgtgacctggggtgaaggcaaggaatcttcattttttaaataaagctttccttgctggttattttgatagttgtgcaggtgtggagaggtggagcaggcatcgagtcacatgggagctccaggtgagtctcatggagctctgagcattggaagaatggagcacagaagagtt

SEQ ID NO: 190390 - DNA, 491 bp, Homo sapiens
tgtgcgactgaacacacagtactggtggactgctgggttctcactcagggatggcagaaaggtttcaatttgtgagccagccactctcattgactgggagtggctgcctggacctcctgagctttggctgcgttctgagggaaagagtgctcatgttgattattaatgtctgtcatggacaaggggtaggagaagtggttcttggattgtgcgtttgctctttctgttcccgcctagtgatttctaaattcggttgctcatttagattctcctggttaaaatgccccatcaggcagatttcccatttcataggcctggatgtgacctggggtgaaggcaaggaatcttcattttttaaataaagctttccttgctggttattttgatagttgtgcaggtgtggagaggtggagcaggcatcgagtcacatgggagctccrggtgagtctcatggagctctgagcattggaagaatggagcacagaagagtt

SEQ ID NO: 190391 - DNA, 397 bp, Homo sapiens
cccagggtgtggcgctgggctgtctgtggatttcatttctgccttttagttttttacttctcctttctttggaggcagaaattgggcataagacaatatgargggtggtctcctcccttaaccttaggtacacaatacttgggcagccatggaaggctatgtttatcaccatatatcaattggcccagataaagctcttgacaccagtacagcatttccaataattagcgtttccaagctatttctatcattttgtacatctggttactattcaggggtaaaacacaacaaaaaaaatctatgtcagaagatttttcttgtcaagtttctatacaaggaaatgattctttgggtgtctacagtagcatcctggaaagcatgccactggtacatttta

SEQ ID NO: 190392 - DNA, 552 bp, Homo sapiens
tttagtcatcaccacaaatcctgtgaggtagattaggacagattttacaactcccattttccaaatgaaagtaagaagtagagagttaaatgtgttttggccaatgtcacataattagggaatggcagagttggaattgatctagtatctttctggtacactctcattgacctagagagcctcttccaaatatgaaatgttaggatagactatgaacctcagatcctcaataaaatgaaattcattttaaccaggagataaggtctctggttttcattgatgtaattatatcttactccctaaatattaaatctgtagaccatgaatmattccatttagaccagtctccattgcccatgccctcactctggagcacagagcactctaaactcatgcttagcactcaaaagtcagacttccaatctcagaaaatggaaagaacatgccaaatagctgcaagtgtctctaaaactccagtttctcactggtactttttaatgcttataaaacacaagttttgtaggtaacagacacgcaggcagttctcatcat

SEQ ID NO: 190393 - DNA, 614 bp, Homo sapiens
ttgtgcttatgtatttcagagagacattctcctcaacacaacatacattccttcctgtgggaaagctttggactgcatggccagaacttcctacgtaatccttttatgttcacaaaatgctgatttgctactgtttaaattaatatgttcttagtattggcctgcccttaaatataaaagccactccaaaattatctgttgtctcgaacatgttttgagatggagggtgggaaagcagtgaaacatgaagagaaacaaactggctaagaaattaaactcaagttgagcagaagaggaaggggctgccagtccccaccgccaaccctgcctgataccacagagggcaatttccacctttagaaggtcattcttaacaattcaggctgacagcagtaaagaaggttttyttctcttactgtgaggtgactcacccccccttaatcgttttacatgcatagccaaccaagtatgaatagactgatatggaataccagcctgtgaacttcatattcacacaatgtggtagggcacttattcagtacaaataagcaatttaaaaatagcaaatgtatatttagtcttcataaactataaccaaattcttatcacatcta

SEQ ID NO: 190394 - DNA, 535 bp, Homo sapiens
actgcttagaattctattcaggtgtgagccctgagtgtgcagtgtccacctgctggagtcctgcacacagagtgtgcaggcatcctggacagcctgcccaaagaggagcaacaggaggcttccaggaagggaggtgtcaagaaccagctgctgagacctagtggctgattcctgtgaattgcatggatragccagatgcccttgtggtgctggcaaggaaatcttaagatcttaagaaggagaatgggagttgctgaaataacaaaccgaaacaaagacataaccatgtaaggtcaaaagcacagattaaaaaaaggtgaccacgttttagctcttggaaacaaaatgtttagagagaggcaaattgttggcagacagatttgctacggaagtctttttaaatagtgaaagccctgcaaatacagcataatcccagcatctgtgtgtatttggaatttaggcaattatagcctcaagaattcagaatccattttacatgtgtgagagtagaacacttgaaagagtaaaaagagct

SEQ ID NO: 190395 - DNA, 568 bp, Homo sapiens
cattttgaaaagaacaatttaagatttttttaaaatatcaaacaytgggggaggaatgccttctatgaaggaagacataaatcctggtttccactccttccctactcccacctaatcctgcccctctctctgccttctccagctcagttaaagatgccaccatccacccacacataacccaaatgcaacctaaacccatgactttctttcaagtctcaattccaccaccgtagtctaaaccattcttctcgtccgcagcctgacctcttgcaaaaatcttcggcatgtcttgcagctttcactcttgtccctctcccatcctttctccctgccagcaggaaaagtggtatttcaaaaacctcaagtggttttccacagttcttagatcaaaatctgaactctccacttctcttacagagtctagttccaacaccatcactgttttataccactctctcctctcaccctctgtgtccagcaacaatgtccttctttcagctctttaagcacaccacacttgtcccagctgtggaaacttctcgtctgctgggctccttgcctgccacac

SEQ ID NO: 190396 - DNA, 544 bp, Homo sapiens
gctgtgaatatcatataaacaggactttattatttcaaggagaggcacttttatagcccaatttcagtaatacttttaaaatctagatgaaaacacaaaagccttgcatcatatatctgaagtaatcatcatcaaatatagattgactgtctccatctcccaagtgtcaaaagactgattagcagtatctaacatcttggctgtaggagaccttgacgtatatgctcagcaggttataatgatttatataaattagctgccacatattctaaaagagacattaatttcccaccacctatttctaaaatgaattactaaatctcaaactcaccctcaatgaggtaatcagtcacccacaaagcatggagtcaatgaaaaggcctcatttgaaattaacagatgtcccaaacttggggcaaataggaggaaagcaatatgatgaactagatgcatggtgcagcacactctaaatggttattctagaaygctcacctccactgacatggtcacttggtgaggttcctcatcttcatcctggcatgta

SEQ ID NO: 190397 - DNA, 571 bp, Homo sapiens
aagcagtgactgatgactttggtctccctttttcataaaagcaagcaagttttcctttggacaarggatagtttcagtctattgggaagaaacatggctattctcttttgctaagtagtcaaagtagtagccagtgccaagtagtgtattatctgtcagctccacatccacccctctcttcctcctttctaacttcaagatagaagactaacagattatatttattgatctttttgccagatggcttgccgattgcattatttcaatggaagagataggcaaaagatttgaatgcaggaatttttaaagagctatttcttgaacttgttgaagtaattaaccttagagtagttataacttattaggcaagaaggaatagttgaaactgcagtaacaaataactccaaaatctcactggcatgtttattactaagactacatgttaaccactggtaatctggggattctcttctatgtcaacctaactcagaggtgcaaaattatggagcatcaatcatgtagaagattactagctgtcttagtagagcaaagattgaaggtgatgtactgg

SEQ ID NO: 190398 - DNA, 571 bp, Homo sapiens
aagcagtgactgatgactttggtctccctttttcataaaagcaagcaagttttcctttggacaagggatagtttcagtctattgggaagaaacatggctattctcttttgctaagtagtcaaagtagtagccagtgccaagtagtgtattatctgtcagctccacatccacccctctcttcctcctttctamcttcaagatagaagactaacagattatatttattgatctttttgccagatggcttgccgattgcattatttcaatggaagagataggcaaaagatttgaatgcaggaatttttaaagagctatttcttgaacttgttgaagtaattaaccttagagtagttataacttattaggcaagaaggaatagttgaaactgcagtaacaaataactccaaaatctcactggcatgtttattactaagactacatgttaaccactggtaatctggggattctcttctatgtcaacctaactcagaggtgcaaaattatggagcatcaatcatgtagaagattactagctgtcttagtagagcaaagattgaaggtgatgtactgg

SEQ ID NO: 190399 - DNA, 487 bp, Homo sapiens
ctttatacttaaagcaggtttcttataaacaccatgtagttttgttttaatttttttccatctagctaacagtctctgactttcaaatgatttgtttagttcacttagagtttctgtagtttttaatgaagttggggtttagtcttctatttgctatttcttttactatttctgtcatttgttcttttaaaatatgtttatatttttatgtcttatttttgattataagtatttttaaattttattttgtcttatgkatttaatatatatctagcatttttgatggccactaaaatatgccttttaattttttttactatcttccatcaaataaatatattttatggtataaaaactttaccagcatataattccatctcttccaacttctgcatttgtgatttatttgtcttaaatttttcttctacaaactgaagataaatgtttattatttattttttaaagaggcttaaaacattttgtaaca

SEQ ID NO: 190400 - DNA, 607 bp, Homo sapiens
tacatgtttatgggagtatactttgatgttttaatatatgtatctattgcataatgatcaaccagggtaattagcacctctttgtggtgataaggaagatgataaagaggattccaggttttcttttctaactatattgaaatgcacaatacatgttattagatatggtcaccctactacataataaaacaccagaaaatattcttctttactaactgtaactttgtactcattgacaaacctgtcccatcccctttacccccaacctctgcatgttcttggcaagtgccaaaattcagttggctgtaaattgatttctaggttctctattttcttccattgacctatgtgttagtttttatgccagtgtcatgctatttggattactatagcactgtagtrtattttgaagtcagattgtgtgatgcctccaggtttgttctttttgctcaagatccctttggctctctgggatcttttgcacttacatgtgaattttaaggttttttattttttttccctctatttctgtgaagaaagccatgggtattttgatggagattgcattgtatctacagatcactttgggtcatatgaacattttaat

SEQ ID NO: 190401 - DNA, 559 bp, Homo sapiens
aaatatagataaattaaactgtatcctttttaagaaaaaaaaatagtttgtcctatttgactataattgagagttctttcagatcagctggagyttagctagagagtttgtatgaatattaaaaatggctttcagtgagaaagtgatgattcacatggcagttctgaactctctctttactttcctgaaccagactctggaaaaattcagttccattggagaatatgtttaaggatgatacagtggtgcttttaatacatagcagtttaacatacagcctaggaaagcattgataggtttaggagatatgtgtaaaaactgaaattgagtcttgtgttcatgtacatttttgctgaaaagataactataaatttcatgagattctgaaaaaaggcatatgaactcaaaagattaaagacttcccctcttagaggtggatggcattcctaaatatagagtattataagttacagttgcttcctatagaatgtgccttttgtaacagtgttcaatgaaagtaaaattgaattcgattatatagcattctggataccaatgt

SEQ ID NO: 190402 - DNA, 559 bp, Homo sapiens
aaatatagataaattaaactgtatcctttttaagaaaaaaaaatagtttgtcctatttgactataattgagagttctttcagatcagctggagtttagctagagagtttgtatgaatattaaaaatggctttcagtgagaaagtgatgattcacatggcagttctgaactctctctttactttcctgaaccagactctggaaaaattcagttccattggagaatatgtttaaggatgatacagtggtgcttttaatacatagcagtttaacatacagcctaggaaagcattgataggtttaggagatatgtgtaaaaactgaaattgagtcttgtgttcatgtacatttttgctgaaaagataactataaatttcatgagattctgaaaaaaggcatatgaactcaaaagattaaagacttcccctcttagaggtgratggcattcctaaatatagagtattataagttacagttgcttcctatagaatgtgccttttgtaacagtgttcaatgaaagtaaaattgaattcgattatatagcattctggataccaatgt

SEQ ID NO: 190403 - DNA, 574 bp, Homo sapiens
cttaatattaatgagccttccaatctcttaacaatatatgacttacataaagaagatctaaaacctagatttatttatatcacttttaatttatctcagyagcattgtgtggttttcagtatatcattcttgcatatcttttgacaatgtgttcctaattgtttcatgctttgaaagttatgttttattttttatttcaattttcaattgtccattgctactatctagaatcacaattgataatacagtatcttgcaaatgtgttaaacacatttattggtagtagctttattgtagattccattggatattctacaaacatgtcattgcatatgtgaataaaatcagttttaatttttttctttccaatgtgatatctttattatttatttacttagaaaactcactgcacttgctgaaacctcccatacaatgcttaatagaagtggtgagtgtatatatccattttgttttgatggtattgttcctgatcttaggactaaagcattcagtctttctccttaagtagaacatcagctgtagtttttttaaatgtacatttttctggttaagg

SEQ ID NO: 190404 - DNA, 534 bp, Homo sapiens
aattctgaagcattgctaagattctaaaatactaaagtatctgaagagcttaataaattagaaacagtttgggaaattatgaaactgactttgattaaccaattatttatgcatttgaagattactcttaaatccacagaaattcctcttaatcatcaaatacgttcagatttagtttcctgcctggcgttagcccctggggaatatccaattaatctccttgttatcttatctatttgaacataaagcatgcagctttggacaatatacaaggcagtaaacaaagacacaaaaagtacttaaggttttctaaaggtgaatctgctggcaaatattattgaacactccatcagtcaggactgcagaaaacggaaactggccaaaacacttctaacaaaaaaatgattgawctcagggactcagaagggacagaggagtgcaaattaggacactgccactagacctttggcttttaggcctcaccaccaccactgctactacccaaggtcaataaaatgtccaggttgcatatgc

SEQ ID NO: 190405 - DNA, 572 bp, Homo sapiens
taccaacattaacagaagtttatgagagttagggttagttgatttcaaccctcacagaggattttgaagagttcaagactacactggagaaagtaactgcagatgtggtggaaatagcaagagamctagaattagaagtggagcctgaaaatgtgactgaatttcttcagtcttatgataaaacttgaatggatgaagagttgcttcttatggatgtgcaaagaaagtggcttcttgagatggaatctactgctggtgaagatgctgtgaacattcttgaaatgacaacaaaggattgagaatattacatcaactcagttcataaagcagcagcagggtttgaggggattgactttaattttgaaagaagttcactgtaggcaaaatgctatcaaatagagaaatctttccctaatggaagagtcaatcaatgccacaaacttcattgttgtcttattttattgtttttttagcaataaagtatttttcaattaagttagtatattttttagatatgatgctattgcatatttaacagactacaatatgatataaacgtaacattatatgca

SEQ ID NO: 190406 - DNA, 619 bp, Homo sapiens
aatgcattttacatgttatgtcatctctttttaagcgccattttagcttgctaataaatgtgtataatccattttatcactcctccttagcagtacaaaatcagaatctattggaactgtcacaaaggaacacattttatatgtttttaaactttaatgagcagtaaaaaaagacttgattctactctgagatgaggttaataatccaataattgctaagcaatacataaatgaattatttattgatttttctactcctaccyccacaaaacccacagcacaaatctatgtttttgcataccaaaagagaaaatgctgaaagattttactttttccttagaaaattgtagtaataggttaaatcattttagttatttacattttgtattttcattaaactatctgcattgatggcacctaaacttaatgcttgtcaccagttccttgactgtttactctccacatatcatgctgttctattcttccatgatacaagatggaatagaaagtgcagggtggccctcctggaacacaacatcatgctgtgtccagcactgcccagaacattttattcctctcaataggttgatgaaagaatggagtatcagatcctttcttt

SEQ ID NO: 190407 - DNA, 562 bp, Homo sapiens
tgatttatttatttatttatttttacaaatggtactaggacaggtggccatccatgtcatgtagaatgaaattatacctctttattacatcttacacaaaaaataacaccagtggatcatacacgtaaatataagaggtataatgataaaatacttagaggaatatttatcagtgaatatttgacaccttaggttaggtaatgttttattagatatgacacaaaaatcacaaatgatggaaactgaccttaccaaaattagaaaaaaagtactacaaatgatactataaaaaagtgataagacaatctacgagatgggagaaaatatttataaatggtacattgggtaatggtcttatattcacaatatagaaagcaacactacaattaaataattaaaagataaatgtgttaaaacttargcaaagctttactaggcatttctttataaaagatgcctggccaataagtacattttaaaaatgtgtagtaacatttttgattagggaaatgcaaataaaaacatgatgagacagtacttcgatacacaaggatgacttcaa

SEQ ID NO: 190408 - DNA, 497 bp, Homo sapiens
tgtgaatcattttttgttcaattaaatcctgttaagcttaatttgtctaaggtttttctattaacagccactactgctatcttctgattcattaagtttgaaggttatatattgacatyccattttggtatgtcaggatataaaaatggtgggttagttaaaaatatacctttgcaaatactcacatatgattattacagtgtgccatgattatgtttctcatttttttaatgttctggaataactgtagacttacatgaggttgtaaagatagtacagaagttgtacttttgacgcagttttctccagtgcttacatcctatagctatacagtgcagtatcaaaatcaggaaagtgaccgtggtagaatgtgatgtatggcttcacatgtccttttatcacaatgcagttttctgtaattatttgcattgtaatgaaaatacagaactcttccatcatcacggagttcttccttaagtgtttttacaccaacacct

SEQ ID NO: 190409 - DNA, 550 bp, Homo sapiens
ttgtggtttaggggctgccagatttgtgaatcattttttgttcaattaaatcctgttaagcttaatttgtctaaggtttttctattaacagccactactgctatcttctgattcattaagtttgaaggttatatattgacatcccattttggtatgtcaggatataaaaatggtgggttagttaaaaatatacctttgcaaatactcacatatgattattacagtgtgccatgattatgtttctcatttttttaatgttctggaataactgtagacttacatgaggttgtaaagatagtacagaagttgtacttttgacscagttttctccagtgcttacatcctatagctatacagtgcagtatcaaaatcaggaaagtgaccgtggtagaatgtgatgtatggcttcacatgtccttttatcacaatgcagttttctgtaattatttgcattgtaatgaaaatacagaactcttccatcatcacggagttcttccttaagtgtttttacaccaacacctctgaaatatctaactcctggcaaccctaa

SEQ ID NO: 190410 - DNA, 573 bp, Homo sapiens
aatcgcttcttgcacatcaagagttacatgttcagggaacatgtatcagcctcttctggctacctctcagacttacctggtgtcctgacactgatataatccaaaatttaaaaaaattaatagaatgtgatggaggagggcttttttatctaaagatactatgatggcttatggctttgagtaccatatttaatttgggagtactgattaatgtacctccagtttattaagaattgaagactgtttttctcttctgcaatggtaacattgattactactcttcttgttcttaggtaaatacattgcacacatctttacaatgattttatgacagcagtgatcaatctctgaaatgccagtttgaaaattaggaaacaatatttcaaaactatatttttcaagaaaaaagtgatagtgagaaatcagattattttaacsttacctgttaattctataacaatagttttcaattctggctgtgcattaaatttaacctttactctttacaggatctgggattttaaaaaattatagatgtctgcttttaagatttataaacatgacacttctaca

SEQ ID NO: 190411 - DNA, 522 bp, Homo sapiens
ttaaaaatgaaattgagcagcttgatttcgatggactgtggagaagcatttcttgggacttaatataaataattcttcctcagaaaaccgcttatacatggtgacatagtttgaatctgtgttcctctgcccaaatctcatgttgaattataggccctaatgttggaggtgggcctggtgggaggtgattggatcatggggatggtttttcatgaakagcttagtcaccattcccttggtactgtcctcagaatagtgagttcttgtgagatctggtcctgtaaaagtgtgtggcacctcccaccctctctcttgctcctgctccttctcctgccatgtaagatgcttgatctcactttgtcttctactatgattggaagcttcctgaggcctcctcagaagaagaggcagctaagcttcctgtaaagcctgcagaaccatcagccgattaaacctctttttcttataaattaaacctagtcaggtatttctgtatagcaatgtgagaaaggattaatgcca

SEQ ID NO: 190412 - DNA, 522 bp, Homo sapiens
ttaaaaatgaaattgagcagcttgatttcgatggactgtggagaagcatttcttgggacttaatataaataattcttcctcagaaaaccgcttatacatggtgacatagtttgaatctgtgttcctctgcccaaatctcatgttgaattataggccctaatgttggaggtgggcctggtgggaggtgattggatcatggggatggtttttcatgaagagcttagtcaccattcccttggtactgtcctcagaatagtgagttcttgtgagatctggtcctgtaaaagtgtgtggcacctcccaccctctctcttgctcctgctccttctcctgccatgtaagatgcttgatctcactttgtcttctactatgaytggaagcttcctgaggcctcctcagaagaagaggcagctaagcttcctgtaaagcctgcagaaccatcagccgattaaacctctttttcttataaattaaacctagtcaggtatttctgtatagcaatgtgagaaaggattaatgcca

SEQ ID NO: 190413 - DNA, 555 bp, Homo sapiens
aaatccctgtgacacgagtttacctatataacaaacctgtatgtttaccattgaatctaaaataaaagtttttttttaaagctaagataggttaaaactaaagtgwtattgagttatatctcaataaagctgttttaaaaataaaggaagagagaatgatatactatgctacactaatcaaaataaacacgtagtggctatattaaattcatacaaagcagatgtaagaaaagttatgaaggataaagggaagtattatatagtgattaagaggtcaatcttcagactatcatttaatggttatactgctaaaaatggataatcaaaatatgcaaaaaagaacaaaatagacaaaatatataaacaaacaaaaactctaatagaacatcaagaaaaatagacataagccattataattggagactttagcatccttctttcggcaattgatagattaaggaggcagaaaatcagtaagggtaaagttgatctgagcaacactatgaatcaacatgatttaattgacatttattggatacttcatgcaaaaatggc

SEQ ID NO: 190414 - DNA, 630 bp, Homo sapiens
ccttagttttttaataaaagatccagaaatccttagagaagtggttgatccagagctggatcaaggacaaaacaaaacatgcctcactgaagaagttgtcaattaaaaacaaaacaaacaaacaaacaaaaaataggtgcatgaagaaagaatgtcagtactcactcagaagaactcctaagggccaaaactggaacaacttgaacaacaaaatacataattayagtgttgaattataaaccaccccccaaataaaacaatactcctgagtccatacttatgtaagttaatgactgaataagtaaataggagggcgtaattctttccaacagaaagatttcaaattcataagtatgacagaagtgagagaaataggaaacatcattagaagaccacagtaatatttgctaaaggcaagatccacagatagttttaaaattaatggtctaaagtttaagaaaaattggatattacatggtctaaaaagaactcctgcaataatttaaaaaatactaagggaagaataaaagctttctagtgaagaaacttggcagtcgtcactttaatcaactgatcaatgttacaatcaccagtaataacacatattgagattatgaatccccaaaacaa

SEQ ID NO: 190415 - DNA, 630 bp, Homo sapiens
ccttagttttttaataaaagatccagaaatccttagagaagtggttgatccagagctggatcaaggacaaaacaaaacatgcctcactgaagaagttgtcaattaaaaacaaaacaaacaaacaaacaaaaaataggtgcatgaagaaagaatgtcagtactcactcagaagaactcctaagggccaaaactggaacaacttgaacaacaaaatacataattatagtgttgaattataaaccaccccccaaataaaacaatactcctgagtccatacttaygtaagttaatgactgaataagtaaataggagggcgtaattctttccaacagaaagatttcaaattcataagtatgacagaagtgagagaaataggaaacatcattagaagaccacagtaatatttgctaaaggcaagatccacagatagttttaaaattaatggtctaaagtttaagaaaaattggatattacatggtctaaaaagaactcctgcaataatttaaaaaatactaagggaagaataaaagctttctagtgaagaaacttggcagtcgtcactttaatcaactgatcaatgttacaatcaccagtaataacacatattgagattatgaatccccaaaacaa

SEQ ID NO: 190416 - DNA, 491 bp, Homo sapiens
ttatgaatccccaaaacaatgtgctaagaaacacaccatctcttctaaattattcttccctaagatatataacctcagtataatctgagaaagtatcaaacaagtccataatgaagggcattctaaaaattagttactagtatgcttctaaggtatcaaggtaatgaaacagaaaacacagagaaattgtcacagactgaagaaaactaatgaggtatgacagtgctgaaaacctggattggattttggaacaacaataaaaaaggtcattaacaaaaaaactgatgatatttgagtaaatctgccgcttagwtaatagtgttgtatctacagtaattgcttagtttcgataactgtattatggttatgtaaaatattaacattaggggaagctattgaaacatataacaatgaattactcttacaacatcttcatgtaaacccaaaattacttcaaaaataaaacaaataaaaattgcaacagatatagc

SEQ ID NO: 190417 - DNA, 578 bp, Homo sapiens
ctactgatgagtgaagttttttgcctttttttttttttttaacatttttgagtcatcacgttggccaaatgaatgacttatggtaacctagaattctatttcataatattaagtgttttaaacctttaacacattttataggattctcaaaatcaaatttcagctttgaaatggtcttttctgacctttaactttgggatgctacagagggcccctgaaacatccaaaagaggagtaaacaagattatttgacatgttaaggtacaagggaagcattgttaaaataaaaataatgtttaattttcaagttatattttagtaaattatattaatatatgttcctaaattttatgggattwctaaaattctaatgggggtccgagtatatgctatcaatcacaattatggctattatgttaagttattgtagaccatagcaataaccaaatttcctggttaattgtgtttttaactatatttaaagtcatttccacagttaattgcagtttatgaaaactttaaaagcatggtggtatcttttaggaggtccatgaaaggatggaaaggaccctgaaaag

SEQ ID NO: 190418 - DNA, 591 bp, Homo sapiens
agggaagtttctccccagaagaagatggtattcttgatgtgaatagcttttcccaaaatcatggatcaagatttctctactattatgakactcgtatctttgagtatttttatcttgcttatggttctataaaaaatagaagtggaaaaggggtctgttgtatgcacttatagagtatacttgtttgtgaaggattttgcagccatacttatacatggataatcctatactttgatatataaaagatgaagtcccaatgtaagtgagaaactttaatggtaatatgttgcctcctaatcagtcagaaacagaacattgatacactcctctcaacccacatcatggactaaagggaacattgccagagtccttcactcttctggaagggcatcatttgttgggttctttttccatggtttggaataaaagaggcaattattagaaatgtatccctcataatggctatatagaagattctactgtaaaggctatggttacaaaacagactttaaattctcttttaaatgttatgctaaatagtaaaagtggctagacagagaagtatctgtgcagctgctggcacctatatcc

SEQ ID NO: 190419 - DNA, 591 bp, Homo sapiens
agggaagtttctccccagaagaagatggtattcttgatgtgaatagcttttcccaaaatcatggatcaagatttctctactattatgagactcgtatctttgagtatttttatcttgcttatggttctataaaaaatagaagtggaaaaggggtctgttgtatgcacttatagagtatacttgtttgtgaaggattttgcagccatacttatacatggataatcctatactttgatatataaaagatgaagtcccaatgtaagtgagaaactttaatggtaatatgttgcctcctaatcagtcagaaacagaacattgatacactcctctcaacccacatcatggactaaagggaacattgccagagtccttcactcttctggaagggcatcatttgttgggttctttttccatggtttggaataaaagaggcaatkattagaaatgtatccctcataatggctatatagaagattctactgtaaaggctatggttacaaaacagactttaaattctcttttaaatgttatgctaaatagtaaaagtggctagacagagaagtatctgtgcagctgctggcacctatatcc

SEQ ID NO: 190420 - DNA, 579 bp, Homo sapiens
ctaaacaaaatatcagcatgtttacagaagaactgaacatcaactaactgcatataattcatattttaaaaatacctaaccccacaacagcaaaatatatgttttccctatggaatatttactaagaccatatcttgggccataaagaaaaccttaagaagttttcaaaattgaaataatacagtgttttctctgaccataatggattaaagctagaaatcaataacagaagtacaacaacaaaaacttctaaacaagtataaatgaaacraaacatttttcagccatttattggtaaaagagggagcaataaaaaagaaataaagtgtacatataatggagtgatttaaaagatgttcaaatattttgatgcaggtagtgtgataacaagagcaaaattagtagtagtaaatgcttacattataattaagaaaagatctcaaatgagtaactgaagatcgtacctcaatgaactaaaaagtaagagtaaaaaatacaaagcaggcagaaggaatcaaataacagtaataggaacataaatcaatgaactgaaaataaaaaaaaacagaaaattattaa

SEQ ID NO: 190421 - DNA, 529 bp, Homo sapiens
gctttttttaaaatttagtggtccttaatgattcttccaactaacaatggattggcaattcaagtatcattatgaaaatccttgtaacttgatatggtttggatctgtgttcccacacaaatcccatgctgaaatgtaatccctagtgtgggaggtgaggcctggtggaggtgattggattatagggacagtgtctaatggatggtttagcaccaccctcccagtgctrttctcatgataagagttctcagaaggtctcattgtttaacagattatggcacctcactccatcctcttcctgctgctctagccatgtgatgtgccagtttcacttcctgccatgattgtaagtttccttaggcctcccaagaagtgcagcagaagccagtatgcttcctgtacagcctgcagaaccatagccaattaatcctcttttctgtgtaaattacccagtctcaggtattgctttatagcactgcaagatctgatatgtaagttgtttaaatataggagtaaagagtttatataa

SEQ ID NO: 190422 - DNA, 434 bp, Homo sapiens
tttttgaaaggataacattaacctaaaatttaactacccaagaaaaggaggtctcattttaaatctgatgaaattagctgtgtactataacaaaggaataaacaaacaggcatacaactctggagaaataagacagaatccgaggtcttaacaacaaagaacatctgtaatattcagaatacaatccagcaatatgtggcatacaaataaccaagaaaatttgaccctttgtcaggagaaaacaatgattaatagagttgaagaattagaaaatatataggtgggaattgaacaatgagaacacttggacacaggaaggggaacatcacactctgyggactgttgtggggtggggggaggggggagggatagcacttaggagacacacctaatgtaaatgacgagttaatgggtgcagcacaccagcatggcac

SEQ ID NO: 190423 - DNA, 534 bp, Homo sapiens
taggctgtgttataaaaggaagatataggtttgtattttgctaaccacttattaatttaaattagcagatcccaactctggctttgcattggaatcacttgagaatatttggaaaagtgtgatgacttggccctgccccagaagttctgatttaatttttctggagagggccttaaacatcagtcttattaaaaaataataaaataagttaaataattaaccaaggtctccagaactcacaatcactgctagaggcaatgtaagttattaccaccatttttggaaaacacagcagcattatctaatacatttagagaaactaatatctcatagcaaatctgttccatagcaattccattcctacctataaaccctagcaagaaaacatgctgatatggtttggctgtgtccccacccaaatctcaccttgaattgtaactcccacaattcmtacatgtcatgagagaaactggtgtgaggtgattgaattatcggggtgggtctttcctgtactatactcatgatagtgaatga

SEQ ID NO: 190424 - DNA, 368 bp, Homo sapiens
tccatccatttatttcaaatctgtatagttgaacaarctatagaccaaatcctacctctcaacagagcggcccaatctgccacacgctgagtgcttttgttaactgcagacccttatgccttttctcataaactctaagcagcatatgacgaggcaccctcaacagctgctctgttttgatctgtaccctatgatttgacatccaacgtagggcacattacacattgtgtgctgcccttcagccttcctttttgttgcttttcaataggacggctttgctttacatttggaacaggggtttatcttaccatagtctgaagatactaattgctgccctctttgttttctgtgtggtagagaaataaaag

SEQ ID NO: 190425 - DNA, 574 bp, Homo sapiens
ctgtctttggagagaagatttggcagattaggagacagaaataagaggaagagggactttttactgtgtaccttcatctacctttttaattttgagctgtatggatatgtcatttgttttaaaaatgacactgttcatatgcacctggctgaaagttagagagcagggaccctaggtgaggcctttaaggtggtaatacctattatatatggatatcagaaaatagtggatggaataaaacagcmcctgggcaccccaggagcaaaactgtgtaactttgtatgcgagactgtgctatagtgtggatatttgtccctgcccaaatatcatgttgaattgtaatccccagtaatagagttggggcctggtaggaggtgtttggatcatggggggaagatctttcatggcttggggtgctgtctttgtgatagtgagttctcatgagatctggtcttttaaaagtgtgcagcacctcccccactcccactctgtcacctctctctcgctcgctcgctcgctcctgctttcaccatgtgatgtgcctgctcccctttgccttctgccatgattgtaa

SEQ ID NO: 190426 - DNA, 594 bp, Homo sapiens
atattatccatgcaggaccgaagtaagtcctgaagcaggaaatcagtgagtttcacagctttctgagccactacgcaacccaggaagcccagatggcccctcctttcagtatcatcaatcagagcttaaggagggcaagatacttgaagtctaactcaccaagaggatgaagttctcatcattccatctgacgaacaagcgagaactagccaagtgctggccaaaggtgagtcaaatctagaatgactgataaaggaagaagatgataaatatcagttttgcttctgggaccacctgcagtaacaaggactccatcttgtttgctaacattttttatgtctctggaggagactgaaattgacaactactttgaagaactgaacttgttccttcttttctgagaaagaagcaagggtctctttttctaataacagctttgggtaccatataaaggcataagtgctatttaattggtatgaagggtaaactaataaagattcagttcaygtaccacccagaataacttggatctcattcattttcctgccttagctgcagtgactgactctcatctctgaacacgaggagcggtct

SEQ ID NO: 190427 - DNA, 351 bp, Homo sapiens
tcaccatgatttgtgatcattaagcaacagttagatygtgttccaattcctccatttgtggggcagaaaaatcgtgtcatatttcagaaaaaaagatgcccaaataaaaggtcaaaataaaattgggtgcttaaaaatatgagttatttagctgtctctgtatttagctgtctctgaagtacaaataaccagaaaaatcaggccttttacttgtgtattttattatattatgaattcttgtgtaggctttgtaacgtttataacatattggtacagtggtataggcataaaatctacctataaataaaggtatgcatattagcggagtttgctctcacaaagttccttgag

SEQ ID NO: 190428 - DNA, 470 bp, Homo sapiens
ccagttaaactctatcattttgctttttaacatgcatgcttgagcacacttgtccaactcctgtgatcttatcgggaagctgctgatcacctgtttcaggttttgtctttctgctgggagaytgccttttgctggtgccagctgcaaccaattattattttagagagacactttaacaaccacctgaccatgacctgatggtcacttgacattcctggttgggggagggagccctcccttaccctgctcatgcctgacaagctacctactgtatcaaaatgatctgtttttttgaaaagacaaataatgaattcataacaaaataaacatagataaacaaagttgttatagattataaaagacttacaagacaacaatcaattgcaatgtgtgacttatggatcatgatttaaaccaatggattgtaaaaaatgaattttgaaataaattggcacgtttattttgggtta

SEQ ID NO: 190429 - DNA, 246 bp, Homo sapiens
gatagggacacattaaaaccatatcagcatgacatctaggattttcttcaaacatctagtccaagatgaaaaaagtggagaagaatatgaaacaaatttggagaatatgttgattattcttgaagctgggagctaaatacattaaactgtttactgttttatttttgtrtacatttttaaatgttcataataataatattttaatatatgcatgcagttgaaccattgtaatgactgaataaacta

SEQ ID NO: 190430 - DNA, 615 bp, Homo sapiens
attattaagcttcctgggatgacgtaagcttgcaaagatgaaacaccctcaaaagctgtctttcttcctctattagaagctcaaggtacttgttcccagttgatagctgggaacaggaaataatgagaacaaaagtttaaacatgaatttttaaaaatcctattatcgtttcccaggactccaacctgaggtctttttggtgcttgttttatcttctcaggcttaaacattgtgtcacttgagggatactgaggaaaggctcctcaaaatctattcaatcctaattatctgatatttaaaatcccattattagttattccttttttgagtttctgttttaaaatacaygtgttcctggtatgggcaagaaattactcagcaccaaagtagtaactgttcctcagatgttccttctggtgcagacatcagtgacttctgataaaggtggggagatagcatggttggggagggggcagtggacatattatgggatgtcgagggaattaaagagttgagtgctggacacatccactacatatgtcacaaacttatgtaggactgatcctcctgtcaaaattctttaaacgtcaaactcccatcatgcctaccaaccac

SEQ ID NO: 190431 - DNA, 543 bp, Homo sapiens
tagaagagaaaacatatgtatacacatatgtatttgcacatgacatatatttagtgtttaagggtgcaaaggtttaagttgtatattcaattattacataaatggagtacgagtatttcaaagtgcaagaataaatggttaaattagccaggcgtggtggtgggcgcctgtagtcccagctactcgggaggctgaggcaggagaatggcgtgaacccgggaagtggagcttgcagtgagccgagatcacgccactgcactccagcctgggtgacagagtgagactccgtctcaaaawaaaaaaaaaaagaaagaataaatggttattggaacacaaaggaaaatgtgaagtctaactgtgattgagtggaggagaaactatactatgcccttaaggatgggtaagatgaaagggcctcctggaggaaacagcatgtacaaaataacccaggcatattcagaaaaccaagggctttgcagttttactaaagcaagctttccaaattgtgaactgtaggcgtaaatctttagagtttcaagggat

SEQ ID NO: 190432 - DNA, 543 bp, Homo sapiens
tagaagagaaaacatatgtatacacatatgtatttgcacatgacatatatttagtgtttaagggtgcaaaggtttaagttgtatattcaattattacataaatggagtacgagtatttcaaagtgcaagaataaatggttaaattagccaggcgtggtggtgggcgcctgtagtcccagctactcgggaggctgaggcaggagaatggcgtgaacccgggaagtggagcttgcagtgagccgagatcacgccactgcactccagcctgggtgacagagtgagactccgtctcaaaataaaaaaaaaaagaaagaataaatggttattggaacacaaaggaaaatgtgaagtctaactgtgattgagtggaggagaaactatactatgcccttaaggatgggtaagatgaaagggcctcctggaggaaacagcatgtacaaaakaacccaggcatattcagaaaaccaagggctttgcagttttactaaagcaagctttccaaattgtgaactgtaggcgtaaatctttagagtttcaagggat

SEQ ID NO: 190433 - DNA, 543 bp, Homo sapiens
cgatgtggagatagggtggaagaaggtcaagttttattttgtttgtaaaaagyattccattaaagctatgtggtaaaattatgctttataccatttatgaatatcaaagtactaagataaaacacaactttcttaaaagtacagcagcaacatactttaaaaaaaaaagaaaccaacaagcaagaatatggtcactggtaaaagtgtctcattgaagaatacccccattgaggagcttgggtatcaaaggagcaataaatggaaaatgtcctgttcagtcatagaaagtttgaatctgcttcatgtcaaagtgtcactgcagcagagttttttgtcaggcattcatcctgactgctttttctggttttcctttccttcccagtcatccgagggatccccttccctatttgtttctctttcacttctttcttccattctttttcttctagtcttcacgctgttaacaaagctataattcattaaaaattgaaaatttttttattgaaatcacatgcacacagattcatattatatattagcaaa

SEQ ID NO: 190434 - DNA, 545 bp, Homo sapiens
aaacacaaataattcaaaactgaaacatgtaaaatatgttcatcaccatcattaaatggcatcagacaggattttccaatttgtgatgattgttcataaaatttaaacaaaagcaaaataatagcattgaacaattttctgtgaggtatgttctataataccyttacctgaatttaaataaacacagtaataattagttgaaaaaaatcaataacattgatttatttccctgctcctagcttgtttcacatactcttaagagcagtaatgtgtcttattgctttttttatgacaatttgttttaagattctattcaacattcaaatattcttggcattagagaattgagaaaatattaattcaaagataaaagttttccttttatttcaaagtagttcattatttattatcctacaatcattttatgtgtgattattttaatgcaagaaaagaaagatctaaagaaatcaatgtgcctgtgaggcactgctgcctttaatttgtcaatgtccaaattaaaacattaatttctgtagattttattt

SEQ ID NO: 190435 - DNA, 454 bp, Homo sapiens
ggtaggactccaggtccccgtgaaggtctgcacttacccagtgagattccccatgctcaaggtgccttcttccaatcttcccagattcagctcatatttgtttctgtagccagcttgacacaccctccagggacaagccatgaaatagaaattgtcctggtcgtgatatcacatgaattaaacatgctatttgcctttagaattggcgttgtacaacacaaggacaaaaggtaaaatttaagctaatgattgacattttaattttttcttctttagagtaatattaaaacaaatttaaaaaatcaatttgagagcaggactgcgggaacaaatcaaaagttttgtgtactataaccacaaatttttcctgctttaaaaaaaaatagkccatgtattttcacttgacaccggcgtctgcaacttatgcagccatccttgattacaagtaacagtt

SEQ ID NO: 190436 - DNA, 332 bp, Homo sapiens
gacactgaacagaaactcagagaacttcaatacatgcttcattttggagcaaaaagatatagtgactcagattaaatgaaagtatgtcttagattatctaaccaagtaaacagtatttggttttgtaaataaagcagtttgtgagagacatactgacctataagtaggagtgatatcccttggtgcagttctcctggttaaccaggttttacaagcacaggttggccatgcttctttytgcagttgtctgcaacctggacttgcccaaagcatggaatcgtattcactggtaaagacactagttaggtagccacaagaatatagtcagttta

SEQ ID NO: 190437 - DNA, 407 bp, Homo sapiens
tctcccctgctccaccatggtaagacatgcttgcttccttttcaccttccaccatgattagaagtttcctgaggcttcctagctgtgcttcctgtagagcctgcagaaccatgagccaattaaacctcttttcttcataaattacccagttgcaggtagttcttcatagcagtgtgagaatggactaatgcaccacttaatgcatctttaggtcacagttttggctgggcgtggttgtgtacacctgtagtcccagctacttgctgagrtgggagaatcttttgagcccaggaattcgaggctgcaatgagcaatgattgtgccactgcattgccagcctgggcaacagagcaagaccctatctcaaaaaacaaaacggaaacagagtaaaactaaaaagaacagac

SEQ ID NO: 190438 - DNA, 225 bp, Homo sapiens
ttgaggcacgggtgtcattgcatgtgagatgggtcttttcaagacagtataccattgggtcttgcttttttatccagcttgccactctttgcctttaaartggggcatttagcccatttacatccaaggttagtatttatatatgcagatttgattctgtcattgtgttgttagtgggttattttgctggcttgtgtatgtggttgctttatggcatcactggtc

SEQ ID NO: 190439 - DNA, 551 bp, Homo sapiens
gtttggagcaaacacgtgcaaggacaccattccatgtagacagatgaccttggaggcttgttaaaattcgarttctgattcaggatgtgggactggggtgaagtctgagatcctcacgtctaacaagctcccaggcgatgctgatgctgtcggactgtgtatcgagtccaggtgatgccagactgtgttgtgagccacaaacatttccagaacagaccctgaagctgcctctgctcccccagccttgtgggaggggtcgggatcactgcctattgcacagagctgacaggaggattcgacccactgaaacatgcaatgtctttgttctgtctgacccagaaccagcaaaaaaaatcagctattgttaacactgttgagtgttctttatttaatcattgggtggtgctagatatatactgatatcctgatcttgggaaaaatattgcttatctcacagttaaaaattgctgttttgttgtgaatatgtataaataaaatcataattttcagtgactcaaaacctattatttgatattaaaagtttgataggc

SEQ ID NO: 190440 - DNA, 494 bp, Homo sapiens
aattttctttgggtcactttggaacctggtttcatcaggcattgtcatgttcccagttattagtggaaggccccaaagtctccaagggcctcagctctgcttctctatgtgcagttcagtgaacaacctaaggaataactagaaaatacatgttttttaaaaattaacaggccagagtttagagatggatgctgactttatcttacgagcttccttgagaagccgtatgcttccatgataatgctaccactggmcaggcacctgtaatcccagcactttaggaggccgaggcaggaggatcacttgagcttaggagtttgagaccagcccaagcaacatgatgaaacaccatctctatgaaaaatacaattagccagtcatggtggcacatgcctgtagtcccagctacttgggtggctgaggcaggaggatcgcttgagactgggagatcgaggctgtagtgagctgatatcatgccactgtactccagccta

SEQ ID NO: 190441 - DNA, 494 bp, Homo sapiens
aattttctttgggtcactttggaacctggtttcatcaggcattgtcatgttcccagttattagtggaaggccccaaagtctccaagggcctcagctctgcttctctatgtgcagttcagtgaacaacctaaggaataactagaaaatacatgttttttaaaaattaacaggccagagtttagagatggatgctgactttatcttacgagcttccttgagaagccgtatgcttccatgataatgctaccactggccaggcacctgtaatcccagcactttaggaggccgaggmaggaggatcacttgagcttaggagtttgagaccagcccaagcaacatgatgaaacaccatctctatgaaaaatacaattagccagtcatggtggcacatgcctgtagtcccagctacttgggtggctgaggcaggaggatcgcttgagactgggagatcgaggctgtagtgagctgatatcatgccactgtactccagccta

SEQ ID NO: 190442 - DNA, 578 bp, Homo sapiens
tctgatttttttttattatcttagctcccgagggctgccctaatgaagtaccacaaactgggcagattaaacaacaggaatttgttgtctcacatgtgcagaagctacaaatccaaggtcaaggtgttggcaaagtgaattccttctgaaagctgggaggatgaattgttccacgcctttcccccagcttctggtggtttgaygtcaatctttggtgctcattggcttgtaaatgcatcactccaatctctgccttcatcttcacatgacattctacctgcctgtgatctctgtgttcagattccccttttgatgtggataccattagggcccaccctaatgaccttattgtaacttgattacctttttaaagatcctttctccaaataaggtcaaattctgagattgggggcattgggattttgacatatcttttttgagagggacacaattcaacccaaaacagatacctatgtgttttagcttgctttcaaagctggtgtttgtatgagatctaattattcatttataaatttctgagattgtgcattaaatgttttaatgcccaaagtattcac

SEQ ID NO: 190443 - DNA, 586 bp, Homo sapiens
agcatttaaatatataattttaacttgtatcctagttggttcagtaacttaaaaatcagctcactgggaaccatgggcccagcaccatttgcattttcagcgccttcaatcaatgactgagcaatggagactcatgaaggactagctacattaacttctgaattctaaagtgtcttctgcttattttcagaaaggtgttatctgaatctctaaatacaagctcctcctgacagaattccttcaatttccttcagaacctggagggaatctgtgccctgggatgcctggaagttggaggaaggattgtttctgcagttcctcctgtccacgccaccgttycccttctcaccccaacaacaggccctcactacctccatccttcccttccagggttagacacctgcaccagcatcccatgtcatccatatctgtaccctgcgcctttcctaggaactgacagagcagtctggaatttatcgcacaaattccatcaaattatttttttttaattttctgttaatcaccttggcagtcctgaggcaggaaccatgactatctcacatcaggtacaggtgtgtcttaaatg

SEQ ID NO: 190444 - DNA, 586 bp, Homo sapiens
agcatttaaatatataattttaacttgtatcctagttggttcagtaacttaaaaatcagctcactgggaaccatgggcccagcaccatttgcattttcagcgccttcaatcaatgactgagcaatggagactcatgaaggactagctacattaacttctgaattctaaagtgtcttctgcttattttcagaaaggtgttatctgaatctctaaatacaagctcctcctgacagaattccttcaatttccttcagaacctggagggaatctgtgccctgggatgcctggaagttggaggaaggattgtttctgcagttcctcctgtccacgccaccgtttcccttctcaccccaacaacaggccctcactacctccatccttcccttccaggrttagacacctgcaccagcatcccatgtcatccatatctgtaccctgcgcctttcctaggaactgacagagcagtctggaatttatcgcacaaattccatcaaattatttttttttaattttctgttaatcaccttggcagtcctgaggcaggaaccatgactatctcacatcaggtacaggtgtgtcttaaatg

SEQ ID NO: 190445 - DNA, 576 bp, Homo sapiens
taagaatgacaggagcgttcttcattggaagcaatgccagtgagaagacagcagagcaacacctttaaagtactggggacaggaagaactgtcaaccaagtattctatacccagcaaaagtatctgtcacaaacaaacctgtgatattaatttctttacattactacaagttatgataatttgttatgcagcacatataactaatacatactggttttgagaaatgtgatatgatatgctttagtgtagctttcataatatttcttayactcatgtttcattaaacttctgtggattcacagattgtatccatttaaatttccagggtatcatggtttttatcaaattatacttttgtggatttatagttatatgaggtttggaaaatatatggtcattgttcttcaggttgtttttttttctatctcccctttctttggaggctccaaatataaccataatggtatatttgaatttgtcccacagctagaagatgttcctatttacttatttaatcatttttcccctatgtctcattttaaatactttttattgctatatattcaacttcaccag

SEQ ID NO: 190446 - DNA, 618 bp, Homo sapiens
atgagttttacaacattcaacttgctttataacatattacataatggtgtgagttccataaagaaggttgtgtgcactgctgtaaaacttattaggtcaccaatatttctggtttcatattaagaaattagaaataatggttcagattagagttaccagaattaaaaatcctttgaattgaataagtcattcccaaggatatactaatgaatttgtagccttaaaaagaaaaaaaagtttcatttatacattcacctgaggtgaaagaagtcatgttaacattctgagttttatgtggactttccataggctgaagtactctctccactgcacctcctgctctgtatagctcaccttaatttccattttgtaggccccaatgtgagaataattttttaaaaatgagactttgagtctgaatgtagtaatgactaactatcttccttcaaatgtgactttaagtttaaaatgtttaaactacatgaagtasttcaaggtccaaaatgtgcttcaggttgctccttttccttccatctttcactcagccttctctttctctgcctttcttgtctggagaatcatctcccagcttggcattctagcaatggcatcagtcga

SEQ ID NO: 190447 - DNA, 618 bp, Homo sapiens
atgagttttacaacattcaacttgctttataacatattacataatggtgtgagttccataaagaaggttgtgtgcactgctgtaaaacttattaggtcaccaatatttctggtttcatattaagaaattagaaataatggttcagattagagttaccagaattaaaaatcctttgaattgaataagtcattcccaaggatatactaatgaatttgtagccttaaaaagaaaaaaaagtttcatttatacattcacctgaggtgaaagaagtcatgttaacattctgagttttatgtggactttccataggctgaagtactctctccactgcacctcctgctctgtatagctcaccttaatttccattttgtaggccccaatgtgagaataattttttaaaaatgagactttgagtctgaatgtagtaatgactaactatcttccttcaaatgtgactttaagtttaaaatgtttaaactacatgaagtagttyaaggtccaaaatgtgcttcaggttgctccttttccttccatctttcactcagccttctctttctctgcctttcttgtctggagaatcatctcccagcttggcattctagcaatggcatcagtcga

SEQ ID NO: 190448 - DNA, 493 bp, Homo sapiens
tgaattcctccattacctcccactttcctgggagggcaggtcttttcttggggatttatgtggtgccaaagcactttggggaggtatcctaggtaggtatgccctaaatagatatggttgacctctgtcctacttggcatctcctgatgtttggtmattaacatctcttgacatctgctgagctgttccaggcaccgccatgaactctggttattagttcacatggtttgaatcatccatgttctcataaaagatttccttcagatccactcaccatcttaacccttctgtgaccctttaagggaagtgaacagttctccaactgtcttctgtgactatggggacacaggaatctcagcagggctgtctcaggccctcccctgagccttggccctccccactacaattcccattgtacagctatggcacactctgttaggaggtagaggcacttctgtgagtcttgtgtttagcttgctgactctcagaaagg

SEQ ID NO: 190449 - DNA, 583 bp, Homo sapiens
gaattcctccattacctcccactttcctgggagggcaggtcttttcttggggatttatgtggtgccaaagcactttggggaggtatcctaggtaggtatgccctaaatagatatggttgacctctgtcctacttggcatctcctgatgtttggtcattaacatctcttgacatctgctgagctgttccaggcaccgccatgaactctggttattagttcacatggtttgaatcatccatgttctcataaaagatttccttcagatccactcaycatcttaacccttctgtgaccctttaagggaagtgaacagttctccaactgtcttctgtgactatggggacacaggaatctcagcagggctgtctcaggccctcccctgagccttggccctccccactacaattcccattgtacagctatggcacactctgttaggaggtagaggcacttctgtgagtcttgtgtttagcttgctgactctcagaaaggggtgtactgctcctttcttctcttactcttttccaaactaccccctcccattactggaaagcggtccctattcagacaccaagagagggtt

SEQ ID NO: 190450 - DNA, 406 bp, Homo sapiens
atcacctggagagacacaagcaaatcttccccgtaaaattatctttaggcagggatcggaggaagtagactcagaggtaaggagaattttggggcctaacggcttcctgatgtttgataggtgttccctcggaagttaggaattccttttctctccatattgctgcgtgggcatggaggactaggtaagcatacttaggtctgtatatatatttaccctttttccttctcccaattctagtgtataatggcccctgcttttgttaggatgtctctccctaacaaaggagtggggctttcaggcayagttagaaaggcatgtgaaaagagtaaacttccccagtcacaacttagtggctgggagaagtatccagtgactggctgtcctaggacccgtcggatagtga

SEQ ID NO: 190451 - DNA, 378 bp, Homo sapiens
ttttccttagtccttctagcatgcaagttagcaaatgtctgtggcaccaatctccatgttctgattctacgtctcaatgagggtctacactgggaactgcctgctggcctgtggggaattgttctctttcwtctgttgtcatcctatcattgacctgactgagataccagagatcgccaaactctcgggctgcagttatggtagcacttctctcatttggggttagtgtctaatttagcagtaacattatatctccatgtcagatcaaaggattgtcctaacccttgtaaaacatcaatataaccatcagggttatctgagaatttacctaggtctattttaatttgcttcaggtctgagagggaaaaaggtacatgc

SEQ ID NO: 190452 - DNA, 378 bp, Homo sapiens
ttttccttagtccttctagcatgcaagttagcaaatgtctgtggcaccaatctccatgttctgattctacgtctcaatgagggtctacactgggaactgcctgctggcctgtggggaattgttctctttcttctgttgtcatcctatcattgacctgactgagataccagagatcgccaaactctcgggctgcagttatggtagcacttctctcatttggggttagtgtctratttagcagtaacattatatctccatgtcagatcaaaggattgtcctaacccttgtaaaacatcaatataaccatcagggttatctgagaatttacctaggtctattttaatttgcttcaggtctgagagggaaaaaggtacatgc

SEQ ID NO: 190453 - DNA, 378 bp, Homo sapiens
ttttccttagtccttctagcatgcaagttagcaaatgtctgtggcaccaatctccatgttctgattctacgtctcaatgagggtctacactgggaactgcctgctggcctgtggggaattgttctctttcttctgttgtcatcctatcattgacctgactgagataccagagatcgccaaactctcgggctgcagttatggtagcacttctctcatttggggttagtgtctaatttagcagtaacattatatctccatgtcagatcaaaggattgtcctaacccttgtaaaacatcaatatarccatcagggttatctgagaatttacctaggtctattttaatttgcttcaggtctgagagggaaaaaggtacatgc

SEQ ID NO: 190454 - DNA, 544 bp, Homo sapiens
ggttcttgactctgttagggcctccaggggcaattagagatgggtgcagtggggtgggaattgagcaggggaatggaatacttgctcacaaactccctgtttgcatatttggttgggaaatggtgaggtggagagatagatcttttcaaaaatgcatttggcttgaaagatgaagtaagaaggaagggagaaaaacagtaagaactggttgatggaaaaatttattctcatggcaaaycctgacaaccaataaacaggaatgtggtgagagaaaatagatactgatggaagaaagaggagaaaagaatatcttcagtgaggggatcatagaagatcctggaaggcacccatgaaaagcaaatagattcaaaaggcttgcctgaagttaccaactttccttaatgtatggtgccctcactgaagctgcagctgtagagatgggcacatcctgttggactgctgaccctggagtgccctgactggtgattcagatacacgtggctgcagtggcagtgtattagtccgttctcacactactataaag

SEQ ID NO: 190455 - DNA, 541 bp, Homo sapiens
ccatgaagttttggcaggggtggaaaagcataattttaatacagcaagtcatgatccaatctatcagaagagatagatagtaacaaatttgagacacacggtgttgatggcaaatggcttcctgtgttggttggctagttggttggttggcttttcccctgaagtcaggcagaattcatattacaacttgcatacataatttgagaaataataaacatgtaaaattactttcaatcataaacttrtatttattcctttgaggaagggaaaagtacttattaaaaatgtccctttctttttcctcgttcagcctcgatgctgattcatatcctactgcccatggttttctgcgtcttgctcatcatggtcatgtgctacttgaaaagtcagtggtaagtgtgtgaggaaggttttatccaagaagagagtaagagaaaagtctggaaagagatttagtaagatagaaatgacattgaataatatgaaacaacgtataaaaaaggaaaagaacaaaggaggctggggtgagagtatgtaattt

SEQ ID NO: 190456 - DNA, 645 bp, Homo sapiens
cgtggctttttatttatgcctaattaaactgcaaaaaaaggaatattaatttgatctgagagcagagtagtctacattcttcctattttttatgttcatcctgcacccatatttgtataatcacacattctcatctgaattggatcaagagtctttgttctgaaaaattattacaaattctttatggataagaagacatggatagcyatactaaagaccaaagacttttttgactgctgtattctatagcatttgctttcaggtctgattgcaatgttttgtacaaagcacaccagaaatacaaacttcactggaattgcaacagcaattcactgtactcatgtaatagtaatagcaattcctgacatcttctgattttggaacaaccctttgtaggtgaaaactctgttcatggcaatttgagcataaactctctttccatattgttgttaaattttgatgtactggagctgggaaagaagcaccaacttcatgcaactccatgccaaaccaacccctgcctctgatatgccacaatgatctgatgaattataatgttctacatatgatctacttggctgcaaaatgttatcaggtatataagcacatacacttggaggcacatgactttatgtatttaatata

SEQ ID NO: 190457 - DNA, 471 bp, Homo sapiens
tctgttcaataccatgggttggactggaaacacaaacactgtcaactagtttaatcatgttgggatatatggtttcaagtgtggaaataaggaaattgccacttgcacaasactgagcttaatatgtttaaaacatgcacacacacacgttttaaggaatgctttatgttgcagaactgtataacttaaagtgagttatctataatttctcttattctgcccacctccctccctccatctcagctctaaatttataacttagtaagtgggtgtgtctttggggctggtttggatccctcaagtagaagagagcaagccagaaacacatgtgcaagagatttactgggggaaggacttgtaaggggaaagggagtaactgtaggcacagagccttcagacccagtgcaggtgtgatgcctgtggaaggagatggggaggaaggaaggtgggaaggagttgcttccagctgca

SEQ ID NO: 190458 - DNA, 555 bp, Homo sapiens
agacctgagtagcttctgttttctctcccgcttattccacatgagtcccckggaattggaagaccatagtgattggaagctgagttttcaaaaggcaggaggtcatagctggctcccatgcgaggcatcagaacatggggaattgactagcagaagtggaattcactggcacatatcgtggacctgcaatggggtcttaggtttgtgctttgggataagtcaagtcaagctattttataggacaagatggctatgtgtctccaattgttttctctttgcttttaggggaattacagcaccactgtgaagtggaaccaggttctgcattggagctgggaatctgagctccctttggaatgtgccacacactttgtaagaataaagagtttggtggacgatgccaagttccctgagccaaatttctggagcaactggagttcctgggaggaagtcagtggtaagaagtgaggtggttacaagagtgaaaagggttaatatattttttaatgaggagcaatagtcaaatagtggaaatctcctttgaggaaccctggg

SEQ ID NO: 190459 - DNA, 490 bp, Homo sapiens
ggaacatttttctgtgaaaggccagataagagatagtataagcttttcagagcatacagtcgctgttgtgactattcaactctgctactgtagtgtgagagcagccatagatagtgtgtaaaccaatgagacagctttgttgatagaaatttatttacagaaacagggccaggcatggtggctcactcctgtaatctcagcactttgggaggccaaggcgggtggatcacttgaggtcaggagttcaagaccagcctgggaaacatggtgaaatcctgtctctactaaaaatataaaaattagctgggcatggtgacgggcacctgtagtcccagctattctggaggstgaggcaggagaatcgcttgaacccaggaggcagaggttgcagtgagcctagattacaccactgtactccagcctgggccacagggcaagattctgtctctcacacacacaccaaaaaaacaacagatggtggactcaaatt

SEQ ID NO: 190460 - DNA, 573 bp, Homo sapiens
cttaactgtgcagtaaattggttccatcggatacattagtggagtgggaacatttttttatatagrtttgtgtgtgcacaactagtggcctcctgtattttgagcatctccttcccttgcacagtagggaacatctccctccctgcctcccttgccaaagtcagtctccagtctcctggatgcctggttcatctatgtccccttagcatgaccactaagggcagcagtaacgctggggatttggaggtgctttgccattccctgaacactcagctcctgcctgttgaatttagcaggtgtacaaatctgactgatttccttgcatccccgaagcattctgtgagccacagcacccgaaatgaaacattggcaggcactggggatacaacccttgtcaaatggacatagcatcagccacttgcataacatggaccatccatgcccaggacatctcagaaaatcacaagggcaggaaggagaaggggccaagatgaggtgacccctgaaaagtgacttttggaggctgttgataggtagccttccacctcagtgaccccttccttgttcacagta

SEQ ID NO: 190461 - DNA, 573 bp, Homo sapiens
cttaactgtgcagtaaattggttccatcggatacattagtggagtgggaacatttttttatataggtttgtgtgtgcacaactagtggcctcctgtattttgagcatctccttcccttgcacagtagggaacatctccctccctgcctcccttgccaaagtcagtctccagtctcctggatgcctggtwcatctatgtccccttagcatgaccactaagggcagcagtaacgctggggatttggaggtgctttgccattccctgaacactcagctcctgcctgttgaatttagcaggtgtacaaatctgactgatttccttgcatccccgaagcattctgtgagccacagcacccgaaatgaaacattggcaggcactggggatacaacccttgtcaaatggacatagcatcagccacttgcataacatggaccatccatgcccaggacatctcagaaaatcacaagggcaggaaggagaaggggccaagatgaggtgacccctgaaaagtgacttttggaggctgttgataggtagccttccacctcagtgaccccttccttgttcacagta

SEQ ID NO: 190462 - DNA, 573 bp, Homo sapiens
cttaactgtgcagtaaattggttccatcggatacattagtggagtgggaacatttttttatataggtttgtgtgtgcacaactagtggcctcctgtattttgagcatctccttcccttgcacagtagggaacatctccctccctgcctcccttgccaaagtcagtctccagtctcctggatgcctggttcatctatgtccccttagcatgaccactaagggcagcagtaacgctggggatttggaggtgctttgccattccctgaacactcagctcctgcctgttgaatttagcaggtgtacaaatctgactgatttccttgcatccccgaagcattctgtgagccacagcacccgaaatgaaacattggcaggcactggggatacaacccttgtcaaatggacatagcatcagccacttgcataacatggaccatccatgcccakgacatctcagaaaatcacaagggcaggaaggagaaggggccaagatgaggtgacccctgaaaagtgacttttggaggctgttgataggtagccttccacctcagtgaccccttccttgttcacagta

SEQ ID NO: 190463 - DNA, 573 bp, Homo sapiens
cttaactgtgcagtaaattggttccatcggatacattagtggagtgggaacatttttttatataggtttgtgtgtgcacaactagtggcctcctgtattttgagcatctccttcccttgcacagtagggaacatctccctccctgcctcccttgccaaagtcagtctccagtctcctggatgcctggttcatctatgtccccttagcatgaccactaagggcagcagtaacgctggggatttggaggtgctttgccattccctgaacactcagctcctgcctgttgaatttagcaggtgtacaaatctgactgatttccttgcatccccgaagcattctgtgagccacagcacccgaaatgaaacattggcaggcactggggatacaacccttgtcaaatggacatagcatcagccacttgcataacatggaccatccatgcccaggayatctcagaaaatcacaagggcaggaaggagaaggggccaagatgaggtgacccctgaaaagtgacttttggaggctgttgataggtagccttccacctcagtgaccccttccttgttcacagta

SEQ ID NO: 190464 - DNA, 556 bp, Homo sapiens
tctgctcttggctttcatcacccttccatcactcagtataatttaatttgtttaaaattcattttactgctgtattttttgaactgacaaatggaagtgttccagccaatgcctaatgctcaaacagggtagggatattaccctgaggaggtggtatcttgtttaatttggcatcgcagggtacctgactatctgaatttgcacatttatgactcttatcactaagaacgtaggtgattgtcctcaatatgaatgagaacttgatttcatataacactgcctgcctgttttccatttgttcaaaatgcaatgattagaataatgttctttgacaaaaatccttttgtatccacaggaagtatcattagagtcagctattacatttagagcagtagtttcaaaagagatatactaggactcaaatattctttaatgtakttgggggggcatatgtcttttgatacattcttagtttttgactatgattttggtgtggcttttaagaaataaaacttactcttaatgtagatgcccacatcctgggtatgaatataag

SEQ ID NO: 190465 - DNA, 424 bp, Homo sapiens
tctacagttgaaagtctgtggctgtgaggtatagatgaaattgagattctgactgacagaagagctaagcagagcctctggggcaagargggtgactaaccctgtgtgacttggagacgcaggcaccctgctgggaacttccccatgctgttctcagaagcagagaagccccactcttcctctaacctgctgcaccttccaaacccaggtctttgcctttcagggcctgttgatcttggggaagccaaagcagctcttcccgtgctatctgcacagtgagtgctttcctttacttggtcaatcaagtccccaaggcaggactttgagggacaccatactgaggggaagcccttaatttgagctcttgttaatgaatttgtgactagaccaggaaacttcattccaaaattggacaaattccagg

SEQ ID NO: 190466 - DNA, 424 bp, Homo sapiens
tctacagttgaaagtctgtggctgtgaggtatagatgaaattgagattctgactgacagaagagctaagcagagcctctggggcaagaagggtgactaaccctgtgtgacttggagasgcaggcaccctgctgggaacttccccatgctgttctcagaagcagagaagccccactcttcctctaacctgctgcaccttccaaacccaggtctttgcctttcagggcctgttgatcttggggaagccaaagcagctcttcccgtgctatctgcacagtgagtgctttcctttacttggtcaatcaagtccccaaggcaggactttgagggacaccatactgaggggaagcccttaatttgagctcttgttaatgaatttgtgactagaccaggaaacttcattccaaaattggacaaattccagg

SEQ ID NO: 190467 - DNA, 592 bp, Homo sapiens
ctttgagaatggaagtgtgctgaggatgagagtggaagaacaggaggaatccgagtcccttacgatgttgagattctgacttcagtaattcttttatttatttatttgttttgagatggactctcgctctgtcacccaggctggagtgcagtggtgccatctcagctcactgcaacctccatctcccaggttcaagctattctcctgcctcagcctccccagtagctgggactacaggcgcccaccaccatgcctggctaatttttgtacttttagtagagacggagtttcgccaggttggccaggctggtctcaaactcctgacctcaggtgatctgcccacctcagtctcccaaagtgctgggattacaggtgtgagccactgctcccggcccctttatatgagagaaagaaatttccgtttatttttgttatacgtagccgaacttaattgcatgccccattcccagtttaaatggagcctggccattctggctaccctcgagttccgaaagaggacccttgatcttttcagcaaaatccctttamctggacttggacaatgctcacaaaccaagcattctctaagctt

SEQ ID NO: 190468 - DNA, 531 bp, Homo sapiens
tccatttggcctcttctcacttctctgtcttcacctcctacctctcttctctgtgtctaaccctcarctgactgtcctttctgtgcttggaacccacagaacttctcagggtctttgcactggcaggtccatctgcctggggtgttcttcttataaaggttcttaggtctggcagggcctggagtagacccacctgctgcagcagtcctaacaccatgtagactattgcgagggacaaaggaaccccaggatctctgccatttgcatgagaccagtgagacagaacacttgcataaattaggcaaagcagagttattactcagggataggcagcaaggacagacagaagcctaatattcgtggtgagccagtctcctaaggctcaggaaagcgtgagccctcgggagacccagagaaggtgtagtggcatctgtgcatgccccattttgcatcatagtcgagaaaacccaaggcactccaccctgggtttatataccctgggtgtccctggggtctctgagctcaagcatt

SEQ ID NO: 190469 - DNA, 446 bp, Homo sapiens
ggtattcacaaactctcaactgatgcaggccagccaaaagagaaagttaagaacgtttcacattttcttttcttttcttttgagacttagtttcattcttgttgcccaggctggagtgcagtggcactgtcttgactcactgcaatctctgcctcccgggttcaagcaattctgcctcagcyttccgagcagctgggattataggcgcctgccaccatgcccagctaagttttatattttttagtagagatgggatttcaccatgttggccaggctggtgtcaaactcctgacctcaggtgatccgcccgtctcggcctcccaaagtgctggcattacaggcgtaagccattgtgctcggtccacattttcatattaagataaattccaaattcattaaaaacctaaatgacaaaaagaaaacaactattctgagaatgctagaaa

SEQ ID NO: 190470 - DNA, 442 bp, Homo sapiens
ttcacaaactctcaactgatgcaggccagccaaaagagaaagttaagaacgtttcacattttcttttcttttcttttgagacttagtttcattcttgttgcccaggctggagtgcagtggcactgtcttgactcactgcaatctctgcctcccgggttcaagcaattctgcctcagccttccgagcagctgggattataggcgcctgccaccatgcccagctaagttttatattttttagtagagatgggatttcaccatgttggccaggctggtgtcaaactcctgacctcaggtgatcygcccgtctcggcctcccaaagtgctggcattacaggcgtaagccattgtgctcggtccacattttcatattaagataaattccaaattcattaaaaacctaaatgacaaaaagaaaacaactattctgagaatgctagaaa

SEQ ID NO: 190471 - DNA, 446 bp, Homo sapiens
ggtattcacaaactctcaactgatgcaggccagccaaaagagaaagttaagaacgtttcacattttcttttcttttcttttgagacttagtttcattcttgttgcccaggctggagtgcagtggcactgtcttgactcactgcaatctctgcctcccgggttcaagcaattctgcctcagccttccgagcagctgggattataggcgcctgccaccatgcccagctaagttttatattttttagtagagatgggatttcaccatgttggccaggctggtgtcaaactcctgacctcaggtgatccgcccgtctcggcctcccaaagtgctggsattacaggcgtaagccattgtgctcggtccacattttcatattaagataaattccaaattcattaaaaacctaaatgacaaaaagaaaacaactattctgagaatgctagaaa

SEQ ID NO: 190472 - DNA, 548 bp, Homo sapiens
tggggtgccattacttctaagccctctcagtgaagtgagctgggaaatttatgtatttatattaatgtgtatatgcagacatccataattgtctctatatctatcaatctgtatctataattagataacattatttcatactgataacttcaactccagcttcatattattaacttcaggctgataccttcaacttccttaatctatattaaataaacagcattttgggtgcaatagagtatatattaaaaccacatttttcatttctttatgaaatgctcctctctcagtaatatatcaagagtgattcttataaagatgtccacacaagtggacatgtttatgatgcctgattctgaagaatcattaagaaagyccatggacatttattttcattcgtttctactaaagttcattacgcttgaaaaagaaaagcagcttttaataccgtgtgcatacaaccacagctacctgatggttttttcaccaaatgccatagactgcaacaataaaaaggacttgaggagatatatactgctttataagat

SEQ ID NO: 190473 - DNA, 578 bp, Homo sapiens
tgggcatagacatacatcttgtttccaatgcccctacgataatgaaaaggattttaaaaggaggtgaagtctgtactaatgcaggaaagtaaggaatggaatcagagaaattgctgctaaatgtgtgagatgttactaacatcaaaaataatccctgctgggagtggtggctcacacctgtattcccaacactttgggaggcctagtcgggtggatcatctgagttcggagttcaagactagcctggtcaacgtggcaaaaccccatctctactaaaaatacaaaaagttagctgggtgtggtggcaggtgccggtaacccaggagggttgaacccaggaggcggaggttgcagtgagccgagatcccgccactgcagtccagactggacaacagggcgagackctgtctaaaaagataataataataataatcccaagatccctgtaataattttatttaaaaaacaccatgttataaaagaaaatagaataatcccagtaaaatcccactgatatctcttgaaattagaagactgaggaactgaagtgcatctgtggtgcacggtacttagaattc

SEQ ID NO: 190474 - DNA, 536 bp, Homo sapiens
aaatgaatataataaatttaatgcatgcatagatacatgctacgcactctacttggtactgaaaatagctttagaggacagggagcatgcactatttcaaaaatagtttttttggttttttttgaaaaatttttttttttgtccttactttttcctttaagaagtatccattgagatgatctgaaagttgggtaaaatttttccaggtaattatgaataaaagaggagaaagccattccattaagatggaaaagtttatggataccgtgagatgggaggaaaggctgggtacttgaaagaaggacagaatacactgaactgagaatgggccattgggcagagtaggccacagggccttagatgagaccatgggacctggaaacaagcctgcaatgtaatgttagatacagataactaaacagacaataaacaatgtgatgggatggtcaaaacaaaaggaatctgacacaggttcyaggatgagtggacaagctgttggcagtgggatggtccagggttgggggaggcagtgttca

SEQ ID NO: 190475 - DNA, 427 bp, Homo sapiens
ttgttttcgtagctctcatcaaaatttttgctcagcaatccatcaacactgctgttgtcaacataaacaatggaatccacrttgtgattccaatcatctgtgctcagtcttgatcttttaagattcatcagcagcaattgacccagttgaaaggcttccttcatttaatttcagaacaccacacttcttgtcttcaccctacactgaccacttcttttgctctttttatttttcttcattcctctgatgtttttcactcccatgcccccgagcctagttcttggatatctattctcgtctgaacttgttgcattagtaatcaaatcctgggtcaagttgagtaaaatcattctattgtgcctgggtctgactcccaattctgccacttaccagctgtgtgatcttggaaaatattaccttagacttt

SEQ ID NO: 190476 - DNA, 454 bp, Homo sapiens
ttattttatttaaatattgtattaatctgttttcacactgttgataaagacatacccaagactgggcaatttacaaaagaggttcattggactcatggttcaacatggctggggaggccccacgatcatggtgtaaggcaaggaggagcaagtaacatcttatgtggatggcagcaggcaaagagagggcttgtgcagagaaactcccatttttaaaatcatcagatcttgtgagacccattcrctagagtacagcatgagaaagacctacccccatgattcaagcatctcccaccaggtccctcccacaacacatgggaattatgggagctacaagatgagattttattggagacacagagccaaaacatatcgattatataaatgaaagatgaatctatagccttaaaaaaactacaaccaattccgtttattctaactgccaacccccaac

SEQ ID NO: 190477 - DNA, 336 bp, Homo sapiens
aagtatgctttagaagcattgctcataatagcaaaaaaagataaccaaatattcatcaaagtagaatgcatgagtatcatayagcagtagaaatgaatgaactgaactacacacattgacatgaagaatctcaaagacaatgtagagcaaaagaagcaaattacacacaatcacagacagcatgtttgcatttatattaacttcaaaagcagacaaaactaaacattatatcttggagagatatattcaaacatggtaaaacttcaaaagaatggcaaagaaaagattgctcaaacattagcccaattgttagtcctggcagggaagagaggcaca

SEQ ID NO: 190478 - DNA, 532 bp, Homo sapiens
ctgaataacaagtttccctccctcctataatatctactagaacaataaaaatgatgcctcatatgttcttatgtatttctagttcaggttattttgctttattttgtataatcttttaagccactttatatatacacggatagatccatttttaaacctttttttctgcttgaaaacaatttgtagagaattttcatgtatgtaatctcaactgattatcaaagcaaactgagttaaagcagatttctttacccatgtttgaaactgaatcttagagaagaaactgagccacaaggaagttaaagtgacatgttcagggtcacaactacctaatttgttgcaaaggtagaaytagaatcttacttctgattctcccttcaaccttcttccgctggaccaaactagagcgtaatacatgagtttaaatatccgggtttgattctcagtcctgttttcattttccacactggctaaaatggaactaatgaagaaggcagaatgttaggttgaaaaaaaaaaaaaaaaagatctt

SEQ ID NO: 190479 - DNA, 508 bp, Homo sapiens
cctagatgaccttgggtttggtgttgattttttagatacaagaacaaagtcatgatccatgaaataaataattgataaactatacttcattgaaattaaaaacttctgctctgcaaacacaatgtcaagataatgagaagagrggccacagactgggaaaaaatatttgcaaaagacatatttgataaaggactgttatccaaaatatacaatgaactcttaaaactcaacaataagaaaataaatgacccaattttaaggacaagccacagactgggaaaaaaatatttgcaaaaggcacatctcacaaagggctgttagccaaaatatatgatgaactattaaaactcaaaaataagaaaacaaataacccaattttaagatgggctaaaagactttaacaaccacttcaccgaagaagatatacagatgggaaataatcatatgaaacgatgctccacatcatttgtcatcagggaaatgcaaactagaacaactatgagctaca

SEQ ID NO: 190480 - DNA, 508 bp, Homo sapiens
cctagatgaccttgggtttggtgttgattttttagatacaagaacaaagtcatgatccatgaaataaataattgataaactatacttcattgaaattaaaaacttctgctctgcaaacacaatgtcaagataatgagaagaggggccacagactgggaaaaaatatttgcaaaagacatatttgataaaggactgttatccaaaatatacaatgaactcttaaaactcaacaataagaaaataaatgacccaattttaaggacaagccacagactgggaaaaaaatatttgcaaaaggcacatctcacaaagggctgttagccaaaatatatgatgaactattaaaactcaaaaataagaaaacaaataacccaattttaagatggrctaaaagactttaacaaccacttcaccgaagaagatatacagatgggaaataatcatatgaaacgatgctccacatcatttgtcatcagggaaatgcaaactagaacaactatgagctaca

SEQ ID NO: 190481 - DNA, 551 bp, Homo sapiens
aggtagagttggtcaaatctgatgggacaaagaccagaacaacaacaacaacaaaaaatccaacaatatgattacagagtgctctaatggtaagcagaaattaaggccagctggttgttcatcttaactttagcccagaaaaaaaccccaattcagctacttgcctaggaacgggaccccagctaaagactgctctctagcatcctagaggcaggaaaaaaactcaagctcgcctttcctgttggaagtgagctgaaacttcagaaaggagttagttacctgccttccaccatcatggaagcaggaaaacttgccttccttgttggaagcaagtaaaattccagaaaaggagttgtacagcaacaacaacaacaaaaaacaactttagatctcaaccaaattttgggacatcagggattctctggaggcaggggttcctaggcctcagccaattgtcctrttggtttgagccataaagatagcccaagctggtaccaagcaccaatagatttgtcaaaggtcagagccacctccactcagaatccctcccg

SEQ ID NO: 190482 - DNA, 620 bp, Homo sapiens
gggaaacaaaatattttccccttaagatgtggaacaacgcaagaaggacttttctcaccagccctgttcatatatatatataatgtatatatattacattatatatatatgagaccctcaccaaaagagaccatattttggtaatatatatatattacattatatacatacattatgtattttatatataatatatatatcatatatgtaatatgtgtgtgtgtgtatatatatacaaacaaaatagatagcccagacatagtcataaacacagtaaactaatttttatcaaaagagaaaaggcaatatcrtagaacaagagaagtcttttcatcacatggtgctggaacagttggatgtgcatatttttttttaaagatgcatatcaacacagacattacacctttcacaaaaatcaactcaaaattgatcctaggtctacatataaaatgtaaaactataaaatttccataacaaaaaaatcttaggaagaaatcattgtgactttggttaatgagattttggattcaatacaaaaagcatggtctatgaaagaaaacatgacaaatgtactttattaaaattaaattttctgttaggcaaaagacactgttaagata

SEQ ID NO: 190483 - DNA, 482 bp, Homo sapiens
ttaactcaaaataaccacagattaaaggtaagaaataaaagtataaaatgcacagcagaaaacaggagacaatctcygtggtcttgaattagcaaaattttttttttaaatataacacatcatgtacagaattgatcaaataagttaataaattgaacttagctaaaattaaaaacttgtggtctttgaaatggactactaaataaataaagttaagacacaggctgatagaaaatattgatccaaaaaattatttggatcacacacagactgtcagacacagactgatagaaaatatttaatattttatatttaaaaataatatttaatccaaaaataattttactctaggacatatataaacactaaatactgaatataaataaaaaacaacccagcaaaaaaaatcttgaaacaaataaaaatagaaacacaacataccaaaacctatggcatatagcaaaagcagtattaagagggaa

SEQ ID NO: 190484 - DNA, 482 bp, Homo sapiens
ttaactcaaaataaccacagattaaaggtaagaaataaaagtataaaatgcacagcagaaaacaggagacaatctccgtggtcttgaattagcaaaattttttttttaaatataacacatcatgtacagaattgatcaaataagttaataaattgaacttagctaaaattaaawacttgtggtctttgaaatggactactaaataaataaagttaagacacaggctgatagaaaatattgatccaaaaaattatttggatcacacacagactgtcagacacagactgatagaaaatatttaatattttatatttaaaaataatatttaatccaaaaataattttactctaggacatatataaacactaaatactgaatataaataaaaaacaacccagcaaaaaaaatcttgaaacaaataaaaatagaaacacaacataccaaaacctatggcatatagcaaaagcagtattaagagggaa

SEQ ID NO: 190485 - DNA, 534 bp, Homo sapiens
gtgtggtgaacctctaggtaggttaccagtagagcagaagttagcatcatctcagtgagacgttttgaccaatataaacgaaaaggaggagtcaggtttcaagtttcagattaaaactaactgaaaacccttctgtgcagaggacctgaaacaaacacattttgaaggcatagatttctacatgctaggtttggggagagtaggagaagtttgtggagargggaggacaggtgggagaagttgaaatcacttggggacattgtgaattggaggagcatgggaacattttaaatggtggtgtgctgtagggagttgggaatgtgggtctggagctctgcctgggttctagagctctgtgttagatacagaatagggctgacctctgcattcagtttattcagtggcatattggagatatgaaagagtgtggcttctgaggctaggccttaaatcacatgtagttttggtcttgttctctctcgagtcaattaccctggggaaatacacctactatgaaggacagcactcaagagg

SEQ ID NO: 190486 - DNA, 534 bp, Homo sapiens
gtgtggtgaacctctaggtaggttaccagtagagcagaagttagcatcatctcagtgagacgttttgaccaatataaacgaaaaggaggagtcaggtttcaagtttcagattaaaactaactgaaaacccttctgtgcagaggacctgaaacaaacacattttgaaggcatagatttctacatgctaggtttggggagagtaggagaagtttgtggagaggggaggacaggtgggagaagttgaaatcacttggggacattgtgaattggaggagcatgggaacattttaaatggtggtgtgctgtagggagttgggaatgtgggtctggagctctgcctgggttctagagctctgtgttagatacagaatagggctgacctctgcattcagtttattcagtggcatattggagatatgaaagagtgtggcttctgaggctaggccttaaatcacatgtrgttttggtcttgttctctctcgagtcaattaccctggggaaatacacctactatgaaggacagcactcaagagg

SEQ ID NO: 190487 - DNA, 512 bp, Homo sapiens
actgaccacttataagagcctggcaagtgcagagctgtgaatgcaagctgtggctgtgattgctgtggtggcttctgtttctgtccagggataaatcctccagtctgcaccactggatctgctatctctgcatcacctcccctactagagaccttttcacgatggcccatttctctgaagacagcctcgattccttagcaccatgtaacaacactgcctttatatttgtttcaagcaaaggcccataggcattagcatggatgccttacaatacrggcctgatgcatttagtatttgcggcgtctcgatgagctggatgctctcatcatccctatgtgacctacaagaaaactgtgacttggagaaatcagatagcatccaggagatttccttcctgggagaggaccaaggagcatgaatggaggctctcatctctgacattgcttcctgcctctgatagccggatgagtgcacatccagagtggggagtggaatggcacaaagcctgggac

SEQ ID NO: 190488 - DNA, 512 bp, Homo sapiens
actgaccacttataagagcctggcaagtgcagagctgtgaatgcaagctgtggctgtgattgctgtggtggcttctgtttctgtccagggataaatcctccagtctgcaccactggatctgctatctctgcatcacctcccctactagagaccttttcacgatggcccatttctctgaagacagcctcgattccttagcaccatgtaacaacactgcctttatatttgtttcaagcaaaggcccataggcattagcatggatgccttacaatacgggcctgatgcatttagtatttgcggcgtctcgatgagctggatgctctcatcatccctatgtgacctacaagaaaactgtgacttggagaaatyagatagcatccaggagatttccttcctgggagaggaccaaggagcatgaatggaggctctcatctctgacattgcttcctgcctctgatagccggatgagtgcacatccagagtggggagtggaatggcacaaagcctgggac

SEQ ID NO: 190489 - DNA, 581 bp, Homo sapiens
tggttgtttttggaagaacagtgcaggtgtttgagtatgccattccagatttcaccctccaactcaatggcacaatagcagctcaggtcaagagccaaggagaggagactctaaatgtctttcctcacatatccctaaaaggaagaaaatctgtttacctaggggtgatctaatyggaatcattctcttatcaagtactatgaatggaaagaaaaaaataaatttaatttcttatttgtcaaataagaaattgtggctaaaataaccttgatcccatcttctccatatgcacgcacaattttaattcattttaatagttttaagacttaaagacaacagtctttatccttcaattagtgattaacactttaaaagttaaatgacactgtgtttacttttctggtcagaaacctacatgcagttgaggatggggaagggtgagagaagtttattacattcaccattaaagtgagatgcacagtgaggaatgtatgatgaaaatgctcacaactgaaatgtaagatggagataactaccacactcccatctctgtagctggagaatattaacctgccccataa

SEQ ID NO: 190490 - DNA, 581 bp, Homo sapiens
tggttgtttttggaagaacagtgcaggtgtttgagtatgccattccagatttcaccctccaactcaatggcacaatagcagctcaggtcaagagccaaggagaggagactctaaatgtctttcctcacatatccctaaaaggaagaaaatctgtttacctaggggtgatctaattggaatcattctcttatcaagtactatgaatggaaagaaaaaaataartttaatttcttatttgtcaaataagaaattgtggctaaaataaccttgatcccatcttctccatatgcacgcacaattttaattcattttaatagttttaagacttaaagacaacagtctttatccttcaattagtgattaacactttaaaagttaaatgacactgtgtttacttttctggtcagaaacctacatgcagttgaggatggggaagggtgagagaagtttattacattcaccattaaagtgagatgcacagtgaggaatgtatgatgaaaatgctcacaactgaaatgtaagatggagataactaccacactcccatctctgtagctggagaatattaacctgccccataa

SEQ ID NO: 190491 - DNA, 561 bp, Homo sapiens
aagctttttattttttttcctagttcatactagcattgarctcaacagatatgactcttttagataagttcccttatatgaaaaaaaaatgtcacccagccctttggagtggctgtgaatgcccttttcagtcattataatttatctttcctgatctcactacatcgattttctgctgcaagacattgcaaggtcctgctatattagcttaggttgcagaaccaaaaaagaaggtttaatcttgcaatgtgtgtgctgcactctccaaggggaaagttcctcacagcaagaaagaataaggccctttaaaatctctttctacttttggacaaaggcagactaattgagtataatgttgagttagaggtagaaatattaagcctgaaacaatctcagaggtccctcaaggctgacctaagtgtgtaatttttgttttccctgcagaatatagccttaaaactactcattttttaaatgatgaatatcgccagtctttgcttctttctagccttccaactcatctgcactttcagccagcttccaacacacacatattatcta

SEQ ID NO: 190492 - DNA, 561 bp, Homo sapiens
aagctttttattttttttcctagttcatactagcattgaactcaacagatatgactcttttagataagttcccttatatgaaaaaaaaatgtcacccagccctttggagtggctgtgaatgcccttttcagtcattataatttatctttcctgatctcactacatcgattttctgctgcaagacattgcaaggtcctgctatattagcttaggttgcagaacsaaaaaagaaggtttaatcttgcaatgtgtgtgctgcactctccaaggggaaagttcctcacagcaagaaagaataaggccctttaaaatctctttctacttttggacaaaggcagactaattgagtataatgttgagttagaggtagaaatattaagcctgaaacaatctcagaggtccctcaaggctgacctaagtgtgtaatttttgttttccctgcagaatatagccttaaaactactcattttttaaatgatgaatatcgccagtctttgcttctttctagccttccaactcatctgcactttcagccagcttccaacacacacatattatcta

SEQ ID NO: 190493 - DNA, 579 bp, Homo sapiens
gctgtgtccacagccgccccttcccccagatgttctgtcccagggagatgggaattttatctataagcccctgactggggctgctgcctttctttcagcagaaaggctgccctgcccagtgaggaggaatctagagagagagcctggttacagcrgttttgccaagttgtgatgggttccgcccagtttgaacttcctggtggctttgtttacatggtgaggggaaaaacccttgctcaagcctcagtaatggtggacgcccttcccctatcatgcttgagcatcccaggttgacttcagactgctgtgctggcagtgagaatttaaagccagtggatcgtagcttgttggtctccatgggggtgggatccactgagctaaaccacttggctccctggcttcagccctcttcccaggggagtgaatggttctgtcttgctggcatttcaggggccactggggtacaaaaaaaaaaaacaactcctgcagctagctcagtgtctccccaaatggctgcccagtttctgtgcttgaaaccccaggccctggtggtgtaggcacctgagggaatcccctggt

SEQ ID NO: 190494 - DNA, 599 bp, Homo sapiens
tgtctgcactttcctttcctgtgctctccccacagagcaggctttggccctgggctgattgccgtgtggatgcaggatgtctgccagtgtgtgtagactcatctctgcacagcttgtgatccagaggaagggaaaagaggtctccactccagtcacctcttctgagattccccagttgggagctccaggctcaggcctatccttgacgctgtgactgtggccaagaacatggaatatggtgactggcgtaaactagccgtctagctctgtgggtcttttataggaaggataaagaaatttagatgggaatgcaaaatatcttccactgaccctgagaaggggaccaacggactgaattgttgaaagcaatgaagagcaattacaacagtagtaataacattaaaaataagaaaaacactttgggaagtctcaaaaatgggcaatttccraccttgcaatggagagtcaatttagttggttcagactatggaacaatttttgtcataggacattgtagaaatcaactggcaaacactcagcaattagtggaggcggatagattagtgtgatgccaacagaagcagacaatccacaagctt

SEQ ID NO: 190495 - DNA, 566 bp, Homo sapiens
ggtaataaaaatgagtgagataaatcacaagaaaattagaaaatgctrtgaataaaactgaaaacacaacattcaaactgtgtgagctgcagatcaaaaaaattgcttaggtagaaacctatagctatcatcacccatattaaaaaaggaagctgatgtcaccttagtagcctaagcatccacctgagacaaagaagcgagaaaactaaatctcaagcaagaagaagggaggggaaagtgaagactggagtgggagcaaatgacatagagctagaaaaacaatagagcaaatggataaaacttagaacaggctttttgaaaagtttaataaaattgacaaagcttcaaaagactaaccaagaaaacaagaggggagacctcaaattactaaaaaatgtgaatgaaaacaggaacaacactactatgtttgcagaaataaaaacgtcttaggagagaatgctatgaacaactgaatgataatgaattagatgaattaaatgaaatggacaagttcctaggaagaagctaactactgaaactgaatcaagaagaaatagaaaatttga

SEQ ID NO: 190496 - DNA, 566 bp, Homo sapiens
ggtaataaaaatgagtgagataaatcacaagaaaattagaaaatgctgtgaataaaactgaaaacacaacattcaaactgtgtgagctgcagatcaaaaaaattgcttaggtagaaacctatagctatcatcacccatattaaaaaaggaagctgatgtcaccttagtagcctaagcatccacctgagacaaagaagcgagaaaactaaatctcaagcaagaagaagggaggggaaagtgaagactggagtgggagcaaatgacatagagctagaaaaacaatagagcaaatggataaaacttagaacaggctttttgaaaagtttaataaaattgacaaagcttcaaaagactaaccaagaaaacaagaggggagacctcaaattactaaaaaatgtgaatgaaaacaggaacaacactactatstttgcagaaataaaaacgtcttaggagagaatgctatgaacaactgaatgataatgaattagatgaattaaatgaaatggacaagttcctaggaagaagctaactactgaaactgaatcaagaagaaatagaaaatttga

SEQ ID NO: 190497 - DNA, 394 bp, Homo sapiens
tagaaaaagagagaacttaaaagcaagtgggaaaaaaacacaaaccaacaataaaaatgagagctgaatttttaacggaagcaatggaattcagaagacaatagaataatatttttaaaatatcgaataaaaaaagacacaaaaaaactggcaacctttatttctatgaccagcaaatttccttcaaaaacaaaggttaamaaaatgtctcaagcaaataaacgtgtcagcattccctcagggttgtcaactctaaaggaagcgcattagtttaaatgcaaatgagcccagattgaagaaccgaagtggaaggggtatgaccaaaaaatagaggagaatccttgggccagctgatttggttgtggaacctgagcacttatggcagggatggacc

SEQ ID NO: 190498 - DNA, 402 bp, Homo sapiens
gtagcattcctataatgccatgattaaaagaaacaatttacaatagtgtaagaaatatgaagtacataggagtaatctaacaaaataaaggcaagtcttctttacagagaactrtatggcattactgagagaaaatagaccaaaacatgtggaaggaaatatgagcagtggctctgggctgacagtttgcaaggaaagaaacctgaaaggaccaatgaggatatgaaagatggtcagtctctctcataatcagggaaatgcagtaacagttgtcttttaatctgtacattagggaaagataaaaatttcatatataaatggaagtgtgatttggtacaattactttggaaaatggtttgacaatattcactaaactttagatatgtatgttctatggcccag

SEQ ID NO: 190499 - DNA, 449 bp, Homo sapiens
tgtctatttatagtttttaaaaatttatcttgttttgagttctctgaggttctgggatctgtgatttcatgtctttcattaattttccataatttcyagcctttattacctcacacactgctttttttccttctctcttttttctgcttggtgttctcattaggcttaaccctttgtagagtgtaattaatgcctctgagtttgtctgttttggggcccaagcacctgtgctttgtacttctgtaccaaagtaaagttaacactaactgacagaacttttggctcctccacttgaagataaatttgctccagtaagccaaggatattccacctaaatgaatctcaggtgcacatcctcagaagtaaagcaggtagctatcacatcctagggcagtaaatgacgtctgtgtacagagcagcagaggttactttgtacacaataagagcct

SEQ ID NO: 190500 - DNA, 624 bp, Homo sapiens
caccgtgaagaaggtgcctgcttctcttttgccttccaccatgattgtaagttttttgaggcctccaaagaaatgtggagctgtaaaccaattaagcctctttcctttataaattacccagtctygggtatttcttcatagcagcatgagaatggactaatacagcgactgtccaaaaatctgaatatacctcatgctggtccactgcttctacacaaagtgatgacaaggtgcactactggaagattctctttctctactgtcttttataaacatctcacattgtcagtgcattgtggctgccattcattgtcagagtgtgcccatatcctggcttaaccaacgctttagcaggtggttctgggctacctgatcaggtagcttactcatggctctggtcgtgcttggcttgatcctggatattctatttcatcctgcaatggactgctatgatgcccttatggtattgtgacctggcgtggggtagggtagggtgatagaaatctgctcctaagggacagctctgggttcttggtctccagctgttccatggtcaagagtttcagtttggaacactcagagctccttctctagaggcttatcaatctctttgtgcatgccatg

SEQ ID NO: 190501 - DNA, 641 bp, Homo sapiens
attcattgtagtaaaggtattttttttaatttgggcttagaaataattttaaatttataaaaggttgctaaaattatattattaaaggtacactcatatacccattccccacattttataattaacattttgccacattggctttatcattccctctccttcccctctgtcaccctctctctcttctctgcttccttctttctcccttcatctcccccacaccctctaccccttctctctctgtctcctgagtcatttgaaggtaagtaacatacatcatggccctttactctaaatattttattgtatatttcctaagattaggaatgttctcayagctacagttaccaattttataaatttatattggcataatacttttgtccaatctactgtcatgttctaattttgtcagttgatctaataatgttctttatagcattttctccatctggtacaggatccactccagagtcatatataggatttggttgttagtggtcatgtctctttaagctttctttaatctggaacattttcacagcttttctttctcttttatgacattgacactttttaaaagaatctagtccccccaacttcttctattttaatatagtgttacaaagaacattttcata

SEQ ID NO: 190502 - DNA, 641 bp, Homo sapiens
attcattgtagtaaaggtattttttttaatttgggcttagaaataattttaaatttataaaaggttgctaaaattatattattaaaggtacactcatatacccattccccacattttataattaacattttgccacattggctttatcattccctctccttcccctctgtcaccctctctctcttctctgcttccttctttctcccttcatctcccccacaccctctaccccttctctctctgtctcctgagtcatttgaaggtaagtaacatacatcatggccctttactctaaatattttattgtatatttcctaagattaggaatgttctcatagctacagttaccaattttataaatttatattggcataatacttttgtccaatctactgtcatgttctaattttgtcagttgatctaataatgttctttatagcattttctccatctggtacaggatccactccrgagtcatatataggatttggttgttagtggtcatgtctctttaagctttctttaatctggaacattttcacagcttttctttctcttttatgacattgacactttttaaaagaatctagtccccccaacttcttctattttaatatagtgttacaaagaacattttcata

SEQ ID NO: 190503 - DNA, 607 bp, Homo sapiens
  misc_feature (1)...(607): n = A,T,C or G
ttcatagatctaattttaaatgamtgaattttaattctgtgctagaatgtaacaaattaagaaattccatgattttatggcatctaaatacgagaaaacattcaagaaatcataaatagtgatatccttgtttattaaattttgtcttttagaatgattttccaagacagatactttaattggaagcaaaagacaggacctgtgaaagtattttatctgaaatatttttgtatttcaacacacaaaaaatagaaatgagaacatctacattgaaattcttcattcagcagagtttttttcctacctcaggatctatagggagaatattttctcaatttaagatattgtggtctctaatgtacagtgatctctaatgtagagtcacagaaatgtaactttgcagaaattacaagcancttatgaaaaattaaaaacgaatgagaatatatcaaattactttctatagaaagagattcttaccccctattagggacagatacagttcaaaacttgttaaagtacatgaatacatatgctaaaagaaaaacttcaggggaattaaatttaaaggggtttaattgannnnnnnnnnnnnnnnnnnnnnnnn

SEQ ID NO: 190504 - DNA, 607 bp, Homo sapiens
  misc_feature (1)...(607): n = A,T,C or G
ttcatagatctaattttaaatgaatgaattttaattctgtgctagaatgtaacaaattaagaaattccatgattttatggcatctaaataygagaaaacattcaagaaatcataaatagtgatatccttgtttattaaattttgtcttttagaatgattttccaagacagatactttaattggaagcaaaagacaggacctgtgaaagtattttatctgaaatatttttgtatttcaacacacaaaaaatagaaatgagaacatctacattgaaattcttcattcagcagagtttttttcctacctcaggatctatagggagaatattttctcaatttaagatattgtggtctctaatgtacagtgatctctaatgtagagtcacagaaatgtaactttgcagaaattacaagcancttatgaaaaattaaaaacgaatgagaatatatcaaattactttctatagaaagagattcttaccccctattagggacagatacagttcaaaacttgttaaagtacatgaatacatatgctaaaagaaaaacttcaggggaattaaatttaaaggggtttaattgannnnnnnnnnnnnnnnnnnnnnnnn

SEQ ID NO: 190505 - DNA, 607 bp, Homo sapiens
  misc_feature (1)...(607): n = A,T,C or G
ttcatagatctaattttaaatgaatgaattttaattctgtgctagaatgtaacaaattaagaaattccatgattttatggcatctaaatacgagaaaacattcaagaaatcataaatagtgatatccttgtttattaaattttgtcttttagaatgattttccaagacagatactttaattggaagcaaaagacaggacctgtgaaagtattttatctgaaatatttttgtatttcaacacacaaaaaatagaaatgagaacatctacattgaaattcttcattcagcagagtttttttcctacctcaggatctatagggagaatattttctcaatttaagatattgtggtctctaatgtacagtgatctctaatgtagagtcacagaaatgtaactttgcagaaattacaagcancttatgaaaaattaaaaacgaatgagaatatatcaaattacwttctatagaaagagattcttaccccctattagggacagatacagttcaaaacttgttaaagtacatgaatacatatgctaaaagaaaaacttcaggggaattaaatttaaaggggtttaattgannnnnnnnnnnnnnnnnnnnnnnnn

SEQ ID NO: 190506 - DNA, 467 bp, Homo sapiens
ccctttagatctattaatatttgctttatatatttgggttccaaatttgggagcatacatgtttatttttgttatatccttttactgaattgacccttttatcattgtataaacaccttgtctcttgacagtttttcacttaaagtctaatttatcttatataagtatagtatattcctgcttttctttrtgtccatttgcatggtatatcttttgtcataccttcgctttcaacctatgtgggtctctataggtttagtgagtttcctatatgcagcatatagttgagtcttgttttttaagtcatttagacactctatgtcttttaattggagaatttagtccactaacactcaatgttatcattgataagtaggacttactactgccattttcttacttttttgtatttgtttggtagcttttgtctttctttcttcattactgtctcttttttgtggttaagt

SEQ ID NO: 190507 - DNA, 627 bp, Homo sapiens
gggaaccaaatggtcacagcaccatgatcttggacttctagcctccagtgctgtgagaaataaattcctgttgtttaagccacccagtctatggtattttgttatagtagaactaactaagatatgtgccttaagatgttccccataagatgtgtagatcaggacagttgcagtggctcatgcctgtaatccmagcagtttgggaggtcaaggcgggaggatcacttgaggccaggaattcaagaccagccttggccacatagtgagacctcatctctaccaaaaataaaattagccaggtatggtggtgcgcacctgtagtcctagttattcagaaggctgatgcaggaagatcattcaagcccagaaggatacagtgagctatgatcacaccactgcactctagccaggttaacatagtgagatcctgtgtgaaaaaataaattgttttaacgttttagaaaagatgtgtagggcatatgtatatgctcataatataggccagtagggagtctctgctaagaaagaaaacactgaaaagagaaagcactgtgaaaaatagaactgatatagctttttctttattagtaataaaggctaccaacatctggaacatctcacttatgg

SEQ ID NO: 190508 - DNA, 582 bp, Homo sapiens
acttggtttgtttctctgagtcttcatctatttttcataaaagatagtacatggttgtggagaaattgctctctcatctagcttcctgacagtagcatttggggaaatataattcttcttttcattttgccctctctctgcccctttcagttgaaactagcaatgtacctgctagtatagttttctcaaaaactttgtgagcctcctgtgaatcctattggggttaaatccactttaaaaacccacagccacaaatgtctttgaggaaagcccttctgtaccttgagttcgtgctgaratagctgagggacaatgttcttcagcttcctagaggctacattgcttgcctgagggaatctgtgagacttaacctgaatccctttgcgtgactgaatattaattcaatttatttttctaagaataagaatagttacaccctcaacttttctcctaggccaggattatctcgaggccatgtttttttctgacagttctctgatgccatttcttaattttagaattttttgctgcctggaggagctgataatttctcaaaattattaatttacatcttcttattgt

SEQ ID NO: 190509 - DNA, 538 bp, Homo sapiens
cgaggaaacaggatccccccgggacctacataaggggaatgcagccctgccaagaccttgattttatcccagttagagatccatgtcagacttttaacctgcagaaccataagataacaaatttgcattgttttaaaccactaagattttggtaatttgtaggaatagcaatagaaaatyaataccccccatcccaaaattgcatccaatcattttagcatgtattgctgatccttgcctaaattaagttttatactgggagttgtatgtggtggtacttactaattccatcaatcctttctcatttagtaaatggcattcttctgaaagaagagctcctttattttttcctttctctttctctctccctctttctctcttgagtatcattatggattcatagatcctttcaaaatattcaatgtgacataattcattactttcattatttttatgatgctctaattattccaaatttaaccaatggtagccattttaagctgactcctgtgcccatctggcattgccctgctaatct

SEQ ID NO: 190510 - DNA, 565 bp, Homo sapiens
acatagcttgctcttacttcaaaggaacaaagattttgggttttttttgtttttttttttttttttttttggcttttcttttcaatcctgagaacagaaaaccaagttatcttttaggtgttaagcatgaaactgggtctttgtttgaaaaagcaatatctgatgtttcctcttttttcaactcaaacaactgggcacttctgtatgacacatccccatacccctgccttggaattttgttgtgttaggcactgctgacagctaacaaactgctgtgtgaagggtgatgygtaccctcacaaaattcctgagcctgcaaaggaaagaaaaggcctctgcctctaacagggagagcacatttatagagattctctgctcctttcatgcagcaggaatctgtctcaggataagatggctctctccatctccaagcagagaatttgtctggtatccaccccagctcccctcccgaccctctgttcattggcaggcgcatatgcacttcagatcactaactacttgcgctgccaaagtcccaacacatttccagccaattctacatcac

SEQ ID NO: 190511 - DNA, 399 bp, Homo sapiens
ggagtgggggcttccaggctataggtcaatttaaacattttctggttcacaattggttgagtttgtctaaagacctgggatcacagaaaggaaatgttcaggttaagatcaaagattgtggagaccaaggttcttctgaagtcttatagtggctccccttagagacaataaatgacaaatgtttcctattcagatctttgaaaggtactagacttttagttaatctcttcaggattgggagggcctggaagtaaaagatctagctatgttaatagagattccttacagatgcagattttctcccacaaaggatggctttgcagagccatttcaagatatggcagagaaacatgttttggggwaaaatatttttattttcttccgtgtctcataatatta

SEQ ID NO: 190512 - DNA, 565 bp, Homo sapiens
acatagcttgctcttacttcaaaggaacaaagattttgggttttttttgtttttttttttttttttttttggcttttcttttcaatcctgagaacagaaaaccaagttatcttttaggtgttaagcatgaaactgggtctttgtttgaaaaagcaatatctgatgtttcctcttttttcaactcaaacaactgggcacttctgtatgacacatccccatacccctgccttggaattttgttgtgttaggcactgctgacagctaacaaactgctgtgtgaagggtgatgcgtaccctcacaaaattcctgagcctgcaaaggaaaraaaaggcctctgcctctaacagggagagcacatttatagagattctctgctcctttcatgcagcaggaatctgtctcaggataagatggctctctccatctccaagcagagaatttgtctggtatccaccccagctcccctcccgaccctctgttcattggcaggcgcatatgcacttcagatcactaactacttgcgctgccaaagtcccaacacatttccagccaattctacatcac

SEQ ID NO: 190513 - DNA, 565 bp, Homo sapiens
acatagcttgctcttacttcaaaggaacaaagattttgggttttttttgtttttttttttttttttttttggcttttcttttcaatcctgagaacagaaaaccaagttatcttttaggtgttaagcatgaaactgggtctttgtttgaaaaagcaatatctgatgtttcctcttttttcaactcaaacaactgggcacttctgtatgacacatccccatacccctgccttggaattttgttgtgttaggcactgctgacagctaacaaactgctgtgtgaagggtgatgcgtaccctcacaaaattcctgagcctgcaaaggaaagaaaaggcctctgcctctaacagggagagcacatttatagagattctctgctcctttcatgcagcaggaatctgtctcaggataagatggctctctccatctccaagcagagaatttgtctggtatccaccccagctcccctcccgaccctytgttcattggcaggcgcatatgcacttcagatcactaactacttgcgctgccaaagtcccaacacatttccagccaattctacatcac

SEQ ID NO: 190514 - DNA, 383 bp, Homo sapiens
  misc_feature (1)...(383): n = A,T,C or G
gaatgttataaatatgcatatgcccatcagtgaaatggacaaatctctgtaaagatatacagtaccaaacttcacttaaaaatagccttgatagctctgcatatattaaagatacgaaattcacaaagaaaactccatggccagttggatttactagtgaattctacatttaaggaaaaaacaatgatggttctccacaaaattttccagaaaattaaagagcaagaagcactttycaactcattttatgaggtcagcattaccttcttaccaaaaccaaatattataagtaaaggaaattacacaccaatatctctcataaacatatacacaaacattttaataaaacttataaaaataaatccaacaacatataacnaaag

SEQ ID NO: 190515 - DNA, 609 bp, Homo sapiens
atactgttggttcttaaaaactaggaggcattcttattcaaggaggtgcagttgctttgacaccaagtctcatctctttttgttctatctgcacgaaggccctcctttctcaccactatctgcactgcctgggaaatttctactcattctttaagatttgattatcaactcttccagctagcatattgtgacagcctctcccttaggtttagattggaaagtataggcatagtgacttgttaaattaaatatttgccccacatctcayagcttgtaagggagggtactagatgagaactgagttctctgactccatcatgccctgtctcctcccccatccttcctgcatggtgacttgctatgacttggtggctactgtgatgttggtaaggtggacctgacttggttgcagagctgaagaggcacagagcagagggatgtagagacatcatcaacacacggacttcccaccacagaggaacaacaacaaaataccttcatgtatccaggttgaactcgtgtcgctgccatgtggaaggagcacatgggtgtgctggatcgtcaagtccattttaccaacagtaagagagaagactggaaaccatttgc

SEQ ID NO: 190516 - DNA, 495 bp, Homo sapiens
caaataaggtcacactcacagattctggggacttagacttggacagatttttggggggccaccatctcacccactacactttccttatctcctctcccatccctcctttatcttaaagaatgttcccttcccttctctgtcctctcttcctgtcttccactgataagttggagactcaggaccttcctccttggtggttttaaccagaaatattaagtggctggtcccctgtctgtgctgcagggcagggtggctgctggctcagcagctgttggggctacttggtgtgggatggggtggaaaygggaatgctgccggttctgggttgaattgttaccccctcaccaaaattcttatgttgatatcctaacccccagtccctcagaatgcggccttatgtagcaacagggtcattgctgatgtaattagttaagaggtcatactggagtggggtgggctcctaatccaatatgacagagatccttacagaaaggg

SEQ ID NO: 190517 - DNA, 589 bp, Homo sapiens
tggccccagatggccaggacgtgattcataaatgaaagcttccctagtttttgtctctgcttccaactgaggaccaaccagagaaggccaggcatacaccccaaccaatcaccaggggtgctccacttctgkttggctcataacatctccgtgctatcagcttccaattagggcacaactgaagcttcccttttctccactataatatttaccactcttctgcctttaagtctctgccaaacacaagtgataatggccagcccccttgctataggaagctcagaatagacagcctttgcttttctcctttggttgtttatttccacaagcctgccctaccagaacaaagcgcattcattcttagtaaattgctagtgaatttccttctcaagggtctcaaaaaggctctttattaacatatactgccatctctaggatgcagtacatttgcccatggccagagctctagtgggtatgggtacctatgaagcttagatcatgcagagagatatgagttaaccaaatagaagagaattttgggtgggggacaagcattagctatatcagaatttggctggggcataagaat

SEQ ID NO: 190518 - DNA, 631 bp, Homo sapiens
ctgcgggtatcagtccacagctgaaggttgagatcaccgatttacctaagrgtaggggatagagcaggaggaagagaggtttggggaagctcaacatttactgagtgaatgaaggaagaagaatatcgggaagctccaggaaagaagttgtcagggagatggaggaaggaccagtgttgttccagaatcttcacttcccatcccagatccatccacatggagctgatatgcctctccttactgctgctagttccacctcctttcctcttgtgaattcttcaagaagaacggaaatgtttgcttccactgtgcaagtccccagattggttaacattctctgtaatgaaggattctgtcttgagtggcctcatgaatatgaagcactgtatgtcattgtgtcttttgggtccatgcccttaagaaaggctattttttcttagatgtgggatatcattacaattaccttctacagaaactagggctgctcatttctgattagcaataaatatctttaaagaatggtgcacagtttggagaaaatttgaacaagtaaacatacctgtgaacagttagatatctttcctatttaactcacaactttctcagtcactgctcaatgtgatactcattt

SEQ ID NO: 190519 - DNA, 473 bp, Homo sapiens
aggcctctctttctggcttgcagatagctgtcttctcactgtgtcctcacatgggctttcctatgtccctatatatgttcaagtgtttttttttttcttataaaaacaccagtcctgtgggattagggctccctctaattactttgttttaacttaattacctccttagaggtaatttaatagggtcacattctgaactactgtggcccgggacttcaacacatgaatttgcaggagacacagttaagcccatatcaatcccttccacacatttgtgttgagtgagcaaagtgcatgccttcctttgttacacatttctgtctctgaaagttatgactgtctgtcaaggaagggtctagactttagatggcagggccatgaggcacagccaggctgagagctcaaaatcgtgactcagttcagcgtgtggggtgcasgaatgctgaggggtgggagctgaggtgcagcactga

SEQ ID NO: 190520 - DNA, 486 bp, Homo sapiens
caaccaccactttcaactctgcattcagagacatcatattggcaggttgaaattggttatggtgtgtgaagttacaccacagaaactggcaaatgccataaatcacatatttttttttttgagtcagttgttaaatgttcaccagacaccactgttcctaagccagttcttcacaaaagacttcacaaagactccaaaatggaagcagaacygatattaccaccaatttactaatacagaaagagagacccagacattaattagcttgtccaaagaagcattcggagtcctactatactccatatttttaccattatataattttaaaatcatttattaataattgaaagagtctcaattatctatgatcatctatgataattgaaattaattattaaattcttacatttatttttactttttcctataaagcataatacattataaaaatcatggtagaaatatagattaaactagggttgccag

SEQ ID NO: 190521 - DNA, 462 bp, Homo sapiens
aatagataatgatttgtaattagcacgttgtgtgtaaatgaatgcttttaaaggcttacacataattcttctctcaagtaagtgaaactccctcttatatatgtcattgatttatactagtaatcaacctgatcttcaaagaagtggtgaacttcatcacagcagctgtctaggatgtcccacgtgtctagttagtggtagctgaatgaatgaggtttctgtctacctacagaagtccaaaagtccatagaggataaacctttgttagcctgagagctaacaaaggatgagaggaacatttggaatgaatgtgcaacatctgcaattaaatactgctaagtccaggtctactggactgcrttgctaggttggggtgccctttgctattctttgaagagctctgcttgtgtgctgctgaactccactccaacacagggctgttttccaagtgcaagacatgca

SEQ ID NO: 190522 - DNA, 530 bp, Homo sapiens
cagatcttctgttatggttgaatatgggtgtctaccacatccccacccacataccacaaaattcatatgttgaagtcctaaccctcagggcagctgtattttggaactgaagctaaagagaatgttgtgtacgtaacatatttagagaaatgcaatgtgaaattatatcataagagtattaaatatacttaacaatagatttatggttccaaaacacaggtacagttattggtagcattatgaggtgacttaaaataagatgataagatttctggttatattattaatggaatagtgtccagaactaaagaaaataataggaggtatgcattccatatatttaaatgttatgcaagaacttagcaccatttagaattcagcctgagaaaggtgaccagaaggaagttactggaaacaatgtaatgcacaggctaatggtactgggagtactttaggtggaagtgggctyccccagtcactgaaaatcctcatccagcagctgacaggaagtgaaggtgtgacttgcacta

SEQ ID NO: 190523 - DNA, 604 bp, Homo sapiens
gtgaaaaattagtgtcatacttgaagcagaagtcaattattttgaagcartcatgtttaaagatttattaaaatctaccctgctaagtggtatgaagctatacaaagttgcttggtgacaaggccatctctaaataaatatcaactgacatgattggtaaaaggagacaaaattatatacattttaaaagatttatatgggttggaagtaaatgcaatatctgaatgtttatattaattttaatgcaaaattaatatgaatttatgaacatttgaaagttctctctttatagaaaaatacaatctaagtgaatgactcagttactttgctgagagttaattttattcttacattttaaactaacatccctaaattactcaatggaaaagtaaattgatggtaaaaaattaatttccacttaaaaaatctgcatgggtataaatcactacaacttggggaaggttgaaaaatgacagtattaacacaacttcatgttcaacagacaaataaacatcctcacaaatccaaatcgctgccacatatttacccatcattagccataatctacttcagatgatgatgataaatgaacaaagaaactgga

SEQ ID NO: 190524 - DNA, 609 bp, Homo sapiens
cttaacatgactaatgatatatgaatccaataactatagctgagacagtgtcttcacttcttcaaccacttgagtatttgaactggtttaaattgtcatggatatgcaatgtaagttatttacactaaatttgaagtgaccccaatctctataatagaaacaaggcatctcatgtatctatctttgaatgaaagctataccactgtgtgctatgtaatattttactgttgaaatctaaagccaattgcacttaaagcatcttttatttttcttcttcttctttttttttaaattaaagtagcctatgatctataaaaggcaagaaatctcatttgaatagagcaaaaggattagtcattactcatgcatagaaaattttaaggattcggctgtgccggtgatggatggatagactgctgagaaaccatttgagatttctgtgattagacaggtcccaattcctattagtgagtgttgccttgctctgttgcagagaggaggcagctgtcttyctcacttttcccggcggtgctgcttgctttaactaagcctgtaacattttagacaagcaaatcaggaaggactttgtggacagatggcaatgctgcc

SEQ ID NO: 190525 - DNA, 576 bp, Homo sapiens
atctctttaaaaaatatatttacatatagataaatacagtaaatgcatatatgttacgtgtgtgtgtgtgcaactgactaaactgtcattagaatgaaaatttaaataacttatttgtactttttgaagaatgactttttttgtagccaatactatctagttctaaacaaaaaaataattactatgatacatacaatctaaattttcttagagatcatattttatatatgtaacccccttttaaccctttcataaaacataccatgggttatcatcataattaaacaagatacaaagattataattaattttgtggcacccttgtgcaatatagagaraatgagataattattaaataggtgagttataaatggatagggacttgtgaaacgtttattactgaaaatacattattcacatccacaaataatgcttctgtgggatgttatacaggaatggaaaataaccttgttatgaggtgtcacatacctcaatggccttttttagaataggattttgtctgtaatttaatgaaaggtcacttgtgacctgggtgtgcaatctcagctcttcaca

SEQ ID NO: 190526 - DNA, 610 bp, Homo sapiens
cattagctggattttctagatagcttcctgcagctgctacatcaacccttgctgcttcatgttacatttttatgtcattaagatggcttctttcccaaaaccttgtgaaccaacctctgctagcttcaaaatttttttctgcagcttcctcacctccgtcagtcttcaaagaattgagaaaatttagggctttgttctacattaggttttggcttcaggaaatgttgtagctcatttgatattctgttcagaccacaaaaaaaaattatatcagcattaagactgatttaatttattatcatttgtatttccactggagtaacaattttaatttcctccaagaacttttcctttgtatttacaacttggctcacttatgtgaaaggcctagctttcagactctcttggctttcaatatatcttcatcttcaatcatttctagcttttgatttgatttgtgagatgtgtgagtcttcttttcacttgaacacttagagaattatgaattgttattgttgtgtctcagrgaataaggaggcctaaggagagagagcgagctagaggaatggccaattggtagagcagtcagaacacacacaacatttattga

SEQ ID NO: 190527 - DNA, 574 bp, Homo sapiens
taataaagaagcagcttgtgatgttttggagtatcagagggattgggatccagtgcacacatggagaagctggctttaatttggaaagtgttcatccacagtgacaagaggggatgcrgcagctatgggtagagatagatgtaggtgggaggtgggatttttagagtctgtaaaagttattttctgatatttcccacttcctcagtcacactgaaaggaagttgaggataaggagaggggaagtattaaaattgggaaaagaggataaaccaagatacttgtagtctagaagaatgggaaaggaatataggctggggaaatgcagtaggaatgaataaatgctatgtaatagttatttgtattttaaaatttgtattatttttaattgttttttcaaaatactctgatctgcagttggttgaatctgtgcggcagatgccaaactcgctggcgcagaacctgcaggtgatgggggctgactatatttcaggaccagtgtgcctgtgcttctgtccctgtcctaaactcctaaccatctgaatgagttgttgagcacaggtgttttcccaccctg

SEQ ID NO: 190528 - DNA, 574 bp, Homo sapiens
taataaagaagcagcttgtgatgttttggagtatcagagggattgggatccagtgcacacatggagaagctggctttaatttggaaagtgttcatccacagtgacaagaggggatgcagcagctatgggtagagatagatgtaggtgggaggtgggatttttagagtctgtaaaagttattttctgatatttcccacttcctcagtcacactgaaaggaagttgaggataaggagaggggaagtattaaaattgggaaaagaggataaaccaagatacttgtagtctagaagaatgggaaaggaatataggctggggaaatgcagtaggaatgaataaatgctatgtaatagttatttgtattttaaaatttgtattatttttaattgttttttcaaaatactctgatctgcagttggttgaatctgtgcggcagatgccaaactcgctggcgcagaaccwgcaggtgatgggggctgactatatttcaggaccagtgtgcctgtgcttctgtccctgtcctaaactcctaaccatctgaatgagttgttgagcacaggtgttttcccaccctg

SEQ ID NO: 190529 - DNA, 551 bp, Homo sapiens
aattctttcgtcttctgtatcattgtgcatttgatgcttataagcaacatatttgagtgcattattttatttagttctggataatattaggttggtgcaaaagtaattgcagttttgcactaacctaatagcatatgaaggaaagtattttgaggactttggggatgtttttctttattactatagctgctattgatgataatataatgatcactcctatgaactagcattgcaggacttttccttagttcagctaaaaacagggttctttgacccacagccatgaaaattcaggctcacagacaatttaaatggtgagtaagacagggttttattgggtataaaggcagawaagggggaaacagggacttttgcaaggccagagtgtctgctagagggcctcccaaccagcacttcgaatctcagtttccacacaggaagaggaggggcctactacaaacctcatgaacttcccaaggctccacctcagtggggaggctggttgaagttcctccagggaccccctcccacctggctgtcttactagtact

SEQ ID NO: 190530 - DNA, 542 bp, Homo sapiens
tcagatttagcactttaaaatgcaagcctaatgaaaatactctattgtatgacagtattatagattattttcttagttaattttctattactcagaatgtgtggatattcctaatgattccattagagtttaaataacagaattcagcacaaatgtattttactgagcagaagaaacataatttctctggaactgcagctgccgtagttgaagatgaggctcttactatcccttagggagattactgtctckgccagctgacttagtttttatacagccagcgatttattagattgctttgctcttaagtgtgataataggccttatgcttagcaaggtttagagacttccagtgcattaatattttatggcaatgacaggcaagacacattttgtttacctaacaagccaagccaagccagggctgatgtgtattggagattagcacttttaacttggaggaactcagccaattatatatttaggactttgccatgcctcttacaattgtaatccaatcagctccttacttggtacatagc

SEQ ID NO: 190531 - DNA, 605 bp, Homo sapiens
tactgcagtactatattaatttgtttcttttctctattaagcaaagttgacagttktatcagttttcatattgaacaaaaagtgtaagtctcaatgcatagtaaatgttggaatattgatactctctaatctcaaattaccttagtatatctagcttatatgtttttgaacataaaattatatgtgcaacatttcttcaatgttaaggactgtgagtgtttcaaccaaattattaggtacttactatttgtgatattaagctgcattttatacattaattaataaacctgtaggatggattctaaatattataaccataatttaaatatgcaatggaatttgaaacttctcaagttgtctgtgtgacctcagggtatgacatgaagtatcatctgttccaaagatgacagggacctcactgagaaaggaacttaaaagttctatcaaattggttatagtacaggttttgggggaggaggagggagagggggatagcagacgtagatttagagtatgggaattggacaattaaaatggaaagaaggttcaaatatgttgagaagcaagtcagtacatgtgcaaaaacagaaaacaccatgcacatg

SEQ ID NO: 190532 - DNA, 605 bp, Homo sapiens
tactgcagtactatattaatttgtttcttttctctattaagcaaagttgacagttgtatcagttttcatattgaacaaaaagygtaagtctcaatgcatagtaaatgttggaatattgatactctctaatctcaaattaccttagtatatctagcttatatgtttttgaacataaaattatatgtgcaacatttcttcaatgttaaggactgtgagtgtttcaaccaaattattaggtacttactatttgtgatattaagctgcattttatacattaattaataaacctgtaggatggattctaaatattataaccataatttaaatatgcaatggaatttgaaacttctcaagttgtctgtgtgacctcagggtatgacatgaagtatcatctgttccaaagatgacagggacctcactgagaaaggaacttaaaagttctatcaaattggttatagtacaggttttgggggaggaggagggagagggggatagcagacgtagatttagagtatgggaattggacaattaaaatggaaagaaggttcaaatatgttgagaagcaagtcagtacatgtgcaaaaacagaaaacaccatgcacatg

SEQ ID NO: 190533 - DNA, 392 bp, Homo sapiens
tcattattgcttcctgcctctccctcactgcaccccaaagccaatcagaaccaagtccctttaagccgccatcagagtctcacgtgttcgcctctgcctttccataaccactgttctagctcagtaactcactgagctatgaatgatgacagtagcctccaaatcaggtccccttgcctgtaatttcttacctttccaatctgttctctacactattacctaagtcatcttaaaaacaagtcaaaataacggctatattcgtttcctactgctgctatatcaaatcattacaaactgagtggcttaaaataacagattatatttctggagatcagasgtcttaaaatcaaggctgttggtggggttgtgttcattctcgaggctctaggaga

SEQ ID NO: 190534 - DNA, 571 bp, Homo sapiens
gaaagctggcattagtctcagtcccagctccaaagaacgagtcttgatttgtctactgtaagtcaattgtgaccattcttgtcaaatttttagttacttagttatctataaaaaatatttgactcagatatgaggaaaagagtcatcagattttaattaacaaaggcaaaagaacaggaattataaggttgggaggaagaaggaaaaaaattcacattctgggaacagtaaatcttactttatattttgggtaaactgattagccagcagctgcttttgttcattctgctgccacattttgcaaagtcttttaccctctccaccttctgctaactcaggtattacattctttaggaaaacttcctagcaaactcccaacccctgctacacaccccagatgaattagaaaccctttctttgtttaggacacacacacacacacacacacacacacacacacacacacacacamagagtttgcatgctagatactagattactctttttctagttgggggcttaggggctaacgtttagggaagccaagaaatgtgctaccactaaatgcaga

SEQ ID NO: 190535 - DNA, 571 bp, Homo sapiens
gaaagctggcattagtctcagtcccagctccaaagaacgagtcttgatttgtctactgtaagtcaattgtgaccattcttgtcaaatttttagttacttagttatctataaaaaatatttgactcagatatgaggaaaagagtcatcagattttaattaacaaaggcaaaagaacaggaattataaggttgggaggaagaaggaaaaaaattcacattctgggaacagtaaatcttactttatattttgggtaaactgattagccagcagctgcttttgttcattctgctgccacattttgcaaagtcttttaccctctccaccttctgctaactcaggtattacattctttaggaaaacttcctagcaaactcccaacccctgctacacaccccagatgaattagaaaccctttctttgtttaggacacacacacacacacacacacacacacacacacacacacacacaaagagtttgcatgctagatactagattactctttttctarttgggggcttaggggctaacgtttagggaagccaagaaatgtgctaccactaaatgcaga

SEQ ID NO: 190536 - DNA, 540 bp, Homo sapiens
taggacattataaattaaatattccgttacttgagactgaacagcaactggctaataacataaaagaaggaagtggagtgaggaggaaggaaggaatgaaggacagtgatgctaatagccttgtcttacatagggtaggattgagaaactgacttctgtcattggaatcttgcctgttttgatatttaatcattgctcatctacctccacatttttttttgttttttaatcctgagatcttctccctatttaataaaatattttaggctgaggcattctaggcattccagaggagggccgatgaggctacatgcattgatcaaattcttggcttttgaaattctaagtgtgcttttgaaatttattttcttgaaatccaaaggcttttgctttgcaagagaaagaaatatgtcattgaattccaaaagcttggttttaagtagccaaggaaaaatctctgaaggaattarggcataaaggttagtttgcctgaagtgaggaaggaggatagaggtttagagagtcagggggaaagcaagt

SEQ ID NO: 190537 - DNA, 562 bp, Homo sapiens
gaattctttcttgtgagaggtccaagaaccctctcttggtgtctgaatagggaccgctttccagtaatgggagggggtagtttggaaaagagtaagagaagaaaggagcagtacacccctttctgagagtcagcaagctaaacacaagactcacagaagtgcctctacctcctaacagagtgtgccatagctgtacaatgggaattgtagtggggagggccaaggctcaggggagggcctgagacagccctgctgagattcctgtgtccccatagtcacagaagacagttggagaactgttcacttcccttaaagggtcacagaagggttaagatggtgagtggatctgaaggaaatcttttatgagaacatggatgattcaaaccatgtgaactaataaccagagttcatggcggtgcctggaacagctcagcagatgtcaagagatgttaatkaccaaacatcaggagatgccaagtaggacagaggtcaaccatatctatttagggcatacctacctaggatacctccccaaagtgctttggcaccacataaatcccca

SEQ ID NO: 190538 - DNA, 361 bp, Homo sapiens
aaagattcccattaaaatagatttaaggcaataaaaagaaaaaaatttctttgacctttacaagataatgtagagtggttatgtgcctgacaaaccaagctcaagayctggctttgcctcttactagctgttgactccaggcaagtttttaatactgtgtcttttttaatgaaaaaatggacagaccatttaaaaaccattaataccattgacagaggtgtagttgagaatatctttgccccatctgaggggcatcactggggaccccattgtctgccagcttctccagtcctaaagcctcatgtttggtggcagtcaagttcccctcaaagctcactgatttgtggagagaagagggtag

SEQ ID NO: 190539 - DNA, 504 bp, Homo sapiens
aagggcacttcaataactatttaatgaataaaagaatgcacatgtcatacttaacaacaaattgtaagcacaatgctttgattttctaatgatttaccaaaattttgagatgtttgcatagttttagggctgaagactaaacccaaaagaaataatgagagactcgattaacactcacttttggtaaatctctattcttaaagctaacctgattgcttgtcagtttgcttgaatagcctattaccttattttgaagtagatgtatttaaatttatctaaatgtgttttccttgaataaaatgccagacttatgaatttttaaaaaatctctcgatctctcatgtccatgcatatattcctatatatatatgaattttgtatatttgatgatggtagtttccattagcaagccttcttaaataatttgcttttataagtaaagtgttgacctaaaaacaaatcagtgcagatactgkgttttccgtccaacagtagagcagaaaa

SEQ ID NO: 190540 - DNA, 267 bp, Homo sapiens
ttataaggccttaagcaaattacctagtccctcctcaaaggacagatttttacccagagtccattcatcttattcttcctgaaatctcaacaatgttcagttatctcctctgtaaacaatgggagggaagagaaaagctgattccatctccaacttcaggaatgagctctgatttgtataaagttayagtaattcccttccctcttgctagggattggctcagaaattggcacaagaccagaaatgactgatgcgatttgcaatttg

SEQ ID NO: 190541 - DNA, 427 bp, Homo sapiens
gcacattggtcagcctgtgggaataacttccacaggaggtcagacagacaaatgctaaggctggggttaaaaagggatcagataattttatgaccattaataacatttcccttgctgcaagctcacacacacataaggggaatccagtcatccttttgggctcagactaattaccttctggstgacaaagagactgctaggccagcacacagcatggaccacttgtgcccttttggaggggggaggtttgcttccatttcagtgaagaacaaagtcagctaaagactcttacttagaggccctaaaacctgaaaagaatatggtacttctttcgtttgtaattttttaaaagaaccaaaatacaaaatcataaatgcataatttcatgcatgtgctgaaattaaaatggattttgtcccctagattt

SEQ ID NO: 190542 - DNA, 611 bp, Homo sapiens
cattaattttatttataagatatatatttatgtataagatatacaacatttcgtgtcccttctttcatgcctcatgtctttatctgtgccttcccaattaagttaaaaagtaaattttttgtgtggtcactgcattgttttttcagctgccatcctcttaatttaacctctttttgttccctgacttgctattctctggatctttgggttcttctacttcaaccaacgttccatattgatttcagattgtcttaaagtgcatctttcatcacttaacttttcagctcaaatacttttaccattcatkttttttaaagaaacattttactctaccaaaatctaacttccgtattatagcctcaaaagtttcattcatttaatagtaattaatatgtgcttattatatgtcaagtatgaggttttgctggtcagcaaaaacataatctattctttcatatcctttcattatagtgagaaagtaaaatgtcaattaaacaactacaaactcatgaaatttcagaagtgccatgatacaaaggagaagaaccaattctatgactgtgaaatagaagtatttagctagcaacatcagcagttcttccctaaagaag

SEQ ID NO: 190543 - DNA, 611 bp, Homo sapiens
cattaattttatttataagatatatatttatgtataagatatacaacatttcgtgtcccttctttcatgcctcatgtctttatctgtgccttcccaattaagttaaaaagtaaattttttgtgtggtcactgcattgttttttcagctgccatcctcttaatttaacctctttttgttccctgacttgctattctctggatctttgggttcttctacttcaaccaacgttccatattgatttcagattgtcttaaagtgcatctttcatcacttaacttttcagctcaaatacttttaccattcattttttttaaagaaacattttactctaccaaaatctaacttccgtattatagcctcaaaagtttcattcatttaatagtaattaatatgtgcttattatatgtcaagtatgaggttttgctggtcagcaaaaacataatctattctttcatrtcctttcattatagtgagaaagtaaaatgtcaattaaacaactacaaactcatgaaatttcagaagtgccatgatacaaaggagaagaaccaattctatgactgtgaaatagaagtatttagctagcaacatcagcagttcttccctaaagaag

SEQ ID NO: 190544 - DNA, 359 bp, Homo sapiens
gggaaaacctgactccatgattcagttacctccctccaggtccctcccacaacacatgggaattcaagatgagatttgagtggggacacagaaaaacgatatcatgtatggtttaaaaatttaaaggaaatttagtataatttaggcagttatcagggaaaatacatcaaaaagtattgttcaaaaaataaagttaagaagataagcagttttgtcatacaytaactgaaattctcttaatatatttaaatgtcattattgtgaaagaacatatgtatattttatgtttcaaagtttaggaagctgtagtcaaactgttagttactttcatttagaattacaatttttaagttgtttct

SEQ ID NO: 190545 - DNA, 435 bp, Homo sapiens
ccatacacataagattggctaagataaattttgtttgtttatttttcctctattaaaacaaattctagcaggaaaaaaaagcctaaaagaagttgtataaataaacttctttttagacttagaaatagagtaagaaaatagtgtatagttatttcattcttgattttctaaattttatttagtaaaacatcaacttgatttattagcatagtaacatgggagtaacaacaaaataataaaacagacaaaaaacacaatatttaattaatagtaaatgtataaaacatcttcmattcttttaatttgctttgtattaaccattttagggtatatatttttgaaaaagcagtgagatgtttagatttcaatatccatatttcaatcttttaagtagagggataaatggcactggtaaaataaatccctgttgcccta

SEQ ID NO: 190546 - DNA, 590 bp, Homo sapiens
gttgtcaccttttgttcaaagctaaataataaactaagttcctcccaaagttagttccgtctatgcccaggcgtgaacaaggatggcttggaggttatgagcacgatggagccagttatgtcaaatctttttttcattgtctttgttataattttgcaatggtgatttcagaacttcaaattataactatcacagttttcataaataatctaggtaaataattaaaataaaataattaggcaaatataatgggataaatacttgtagacaaactggttataatttagaatataaagttacattaaattaaataataatattccattatttgggtgtttgggtgttttctaataaatatatattgtaggaaaacattcttgctaaataaaagaaaatgaaaatgtatgkttttttttccaaaaaaaaaaaaaaaaggtgaacaaattttgtctgattaaaagctcatttaagggttatgtataaaacaaggtaaaaggaaccaggaaaaaaaatgcgaagaaagttataaaaataaagaggtatttttttgaggtataaaagcttaaagaaaaaataattttgtataagaa

SEQ ID NO: 190547 - DNA, 554 bp, Homo sapiens
aagtccatgggaagtcccaagctgtgctttttagagtcaggggtgcatgtaccatgtcaggctcaactgtacaatgactaccacacttagtaccaagactacaggctcggtctggaaatcatgttcttaatgcaaatatggtgacagttccagaagtgtggcctcacagcaagagatatgagtggagcattttcatgggccaccacgttgttgaatcactaatatatattcttaaagaaggtgatttaaaatacctagtgtgtgattttttaaaatttatrcacttctttctttctttactttcttttttcttctttttctcctttctctttttctctcatatatatatatatatagaattacatatatattacatacatatatattgttacatacacatatatgtaattcttcccataaaattgtgagcaagttcaaaaacattattttgaagattaaaatttggttgcttacaaattagtattttatttttaaattttctgctgaacttaacaaaaattgtttaaaagccaatgttttctaagaagaataat

SEQ ID NO: 190548 - DNA, 590 bp, Homo sapiens
atacccagacttgcccccaaatgtcctttatttattattagttttggagtaaagtgaaagcaagtttattaagaaagaaaagaaataaaagaatgacaactccataggcagagcaactccccaaatgtcctttatagctatgcatatacacgattcccccagaacaagattcacttatgaatcacgttttgcatttcaatgacatttttctttaatctttattctggaacaatcaccctgcttttcataacattgatatttttgatgagcccataccagtagtcttgtatcttcctttgttttttaaatcatgtgtgcrtgtgtattttgtactattgggcagatcttattgtttaaaagtacacactgtgaaaagtggtggcttcagttaccaccctaggtctatttattagctttaggctcttagacgttatttaaactctctgtgcctcagttgcatctaaaccatggttataagttacccgaatgttcagaaggataccaagcacatccaaatggtcagctattgctgtttgttttatggtatcattagagaatatattctgatttgatcttggagcaggtgggat

SEQ ID NO: 190549 - DNA, 617 bp, Homo sapiens
tgtgacagcagtttcacccaggatagcttttgcacatcagtgcaaatgtccacatagtggaaaaaagcaaatacaattattactattayaaaaatccatttgatcttgtagacccagctctgaaagggtctcagagaccccccagaggtccgtggaccacacattgaaaacattgttaaaggatatgggtcaattcagttttaatcctgctggtatgctttctgcaaggcttcagtgagaatactaaatcatctgaaatctagtattgaggagctaaaaatctagtggagaaaatagacacatacacaactaaataaaaccccctctacacacagggggctatggatgctgaggagagggcaaaacttttggcttggggataggagaaggctcatcagaaattatcattctgggccttgcaaaccacctgtgattacccagttccaagaagaaacattagcctatacacatacagctctctgaacctttagggaatggcaggggggctggactggctggggtgtagggtgcttcagagtaggtgaccgcatagcactggaaaggtgggtaggcagcacgttttacaggatcttgagaggattgacaatacaccacct

SEQ ID NO: 190550 - DNA, 527 bp, Homo sapiens
accccacccagtgttttaactaattcacagatgttgcaagcacctgcagaatgctggagttagccctgggcagggcagaccctacctaaatttactgaaactggccgaagggcagagctggatcggaaagcacagttcacggccttaacataggagaagggtctgtctatgasagttgagagacatatttttaaaaggaatcatttggaaagacttgcctggccattcatcaaggaaagcaagttttacctgatgaggccttccaggcttctctgtgttaaaattattcgtgccggtaagactggccatttcccaagtgggaagaaatgctgtttcttctgataggcagaaacctctctgatatgcactatccatctggaagaagcagtttaagcaagcatatgcctgatgttgctttcttgccaaaacctgcagtgctcaaacgagtatccccttaacatttcataacattatgaatacaccctttcaaagtaagctaacattgattgtgacccttcatatgcaaa

SEQ ID NO: 190551 - DNA, 527 bp, Homo sapiens
accccacccagtgttttaactaattcacagatgttgcaagcacctgcagaatgctggagttagccctgggcagggcagaccctacctaaatttactgaaactggccgaagggcagagctggatcggaaagcacagttcacggccttaacataggagaagggtctgtctatgacagttgagagacatatttttaaaaggaatcatttggaaagacttgcctggccattcatcaaggaaagcaagttttacctgatgaggccttccaggcttctctgtgttaaaattattcgtgcyggtaagactggccatttcccaagtgggaagaaatgctgtttcttctgataggcagaaacctctctgatatgcactatccatctggaagaagcagtttaagcaagcatatgcctgatgttgctttcttgccaaaacctgcagtgctcaaacgagtatccccttaacatttcataacattatgaatacaccctttcaaagtaagctaacattgattgtgacccttcatatgcaaa

SEQ ID NO: 190552 - DNA, 413 bp, Homo sapiens
ataccatcatcattcttcacacaactagaaaaagcaatcctaaaattcacatggaaccaaaaaagagctcacatactcaaagagtaagcaaaaagaacaagtccggaggcatcacattacatgacttcaaactataatgtaatgccatagtcaccaaaacagcaaggtactggtataaaagtaggcacaaagaccaatggaacaggatagagaggacagaaataaagcaaaatacatatagccaaccaatctttgacaaagcaaacaaaaacataaagtggggaaaggacaccctattcaacaaatggtgctgggataattggcaagccacatgtagagaatgaaactggatcctcatctctcaycttatgcaaaatcaactcaagatggatcaaacatttaaatctaagacc

SEQ ID NO: 190553 - DNA, 445 bp, Homo sapiens
tttaagtttgacaaagtctacattttgaggaaatcttattatccttagaatatttagaataatgctagtagttaagagtgaacaatactgtctctgtttctatatagcagaatgagcacatgcatctaattgcaatattatctgacagtctacttaaactacagtaaagtattttttaaaagatttaaacccacaaagacacaaagaataagaataaagataacactgcattgtgagagttgaatgacacacacagacacacacacacacacacasagagagaaagagagagattgactaacggctatttcctcccactagtagttatgggaaacttagggtaaaatctaatttatgtcagagaatactcaaaaggcataggaactaacagcaacaggtgactttataatgagggtttatgggagacaggagataaaataaagag

SEQ ID NO: 190554 - DNA, 539 bp, Homo sapiens
atttagagtaatcacttttaatgttatttttggaaaactttgtctttgtagccttcaaaaacaagatttggtgctttacattagactgttttgggatgctcctcacagagggtctttcttcaggacttccgttctgcactgttattatcagttctgccagctctgggctataatctattggtatctctggcagcttttcttcaataatttcataaactaaagaattggtatttttacattgaaagtatgctttgggtgaccatttcacaaacacagcatcccagagtccaaacatcagacttatagctctagtgtttgtttgagaataattgaggactcaygtagtaaggtgtgccagtgagggtactaaccatgtcacagttgctatagtgatccagggtggggcactgccctcagacacttgattttaagtagtccatagaatatcaaagaaagagttggtcaccaaatacagatttttaaaataaatgtaaaccattagcatatatagataaaatataaaaatgaatgcaaataat

SEQ ID NO: 190555 - DNA, 610 bp, Homo sapiens
tcagttttcaattactaaattaagatcattataacatagtccaaaaaatgacaatttagttttaataggaaagaaataaactgtcaactaggcatgtctggagatatgatcaattacgttcagtgatttgaccaatatggctgcatgggaagaacatttctgaccctttttggtcaggccaagtatttttttgtcaatagttgtcagtagttgatctaaacacttaagaaaagtgacattttactctgaagataatcagcaaaatacagaacaaattatggagataaatgtaagtatatgtgtgcaggaatacatcctgaatataccaaaacagggcacatatttgcctttttataactttttttaaaaaaagraaagttggggattaagatggcagataggaggcaggactagcttgcagcttccgcttggacagacagagcagcatgtggagattcacatcatgaacttctccaaaaactacggcaggagcataaccaggaaagccaagagaatccacagaccctttgaaggaactgaatcaccaatgcaggctccctgagatgctgaaaaactgtgagtccacttgctttctcaatggggaggctcg

SEQ ID NO: 190556 - DNA, 577 bp, Homo sapiens
cagcctggcaaacacgatgaaaccctgtctctactaaaaaaaataaaattagccaagcatgctggcggtcacctgtaatcccagctactcaggagtctgaggcagggaaagttgcttgaacatgggaggcagatgtkgcaatgagccaagaccaggccactgtactccagcctgggccacagagcaagattgtgtctcaaaaaataaaaaaaaaaaaaagaaagaaaagaaaagtatgttggtgagtatatctggagagatttgtcaaaaacaatggaactaataaagtacaaatggaaccaataaaataaactattcctagactgtggtaagtttcacatgctctgagaaggcatatagatatagactttatattatcatcaaaaggtaactaacatgaggagttaatcaaagagtaatatggttatgttttgctttttttctttcagtaacataactttaatagcagtaaggagttatggattagagacagaaaaagagtagatatgtgtatatccattaggaaaactttgcttaagccgagaagggaatgaagagatgataataaagtcaacat

SEQ ID NO: 190557 - DNA, 593 bp, Homo sapiens
tctgagaaggcatatagatatagactttatattatcatcaaaaggtaactaacatgaggagttaatcaaagagtaatatggttatgttttgctttttttctttcagtaacataactttaatagcagtaaggagttatggattagagacagaaaaagagtagatatgtgtatatccattaggaaaactttgcttaagccgagaagggaatgaagagatgataataaagtcaacatttgaacttagcaattggttctttgcaatacactgtggagattaacaattcaggctttaaactagacttctagggtctacagctacttctgctattataaaaccacgaagaaactaactcctctaaacttcagttatgtgtcagttaaatagtacttcctggataagattatgyttgacataatgcatgtaaaagtactcagcgccatttgtggtacacagtaagaattcactgttaagtgtcattactagctatggtgaggagataaaagtagagaaagagaaatccagaatgattctccgatttcctgcttgaataatgaagtactaggtaatgttggaagaaaaataggttttgcaa

SEQ ID NO: 190558 - DNA, 593 bp, Homo sapiens
tctgagaaggcatatagatatagactttatattatcatcaaaaggtaactaacatgaggagttaatcaaagagtaatatggttatgttttgctttttttctttcagtaacataactttaatagcagtaaggagttatggattagagacagaaaaagagtagatatgtgtatatccattaggaaaactttgcttaagccgagaagggaatgaagagatgataataaagtcaacatttgaacttagcaattggttctttgcaatacactgtggagattaacaattcaggctttaaactagacttctagggtctacagctacttctgctattataaaaccacgaagaaactaactcctctaaacttcagttatgtgtcagttaaatagtacttcctggataagattatgcttgacataatgcatgtaaaagtactcagcgccatttgtggtacacagtaagaattcactgttaagtrtcattactagctatggtgaggagataaaagtagagaaagagaaatccagaatgattctccgatttcctgcttgaataatgaagtactaggtaatgttggaagaaaaataggttttgcaa

SEQ ID NO: 190559 - DNA, 591 bp, Homo sapiens
gggggatatcaaagagagtatatatagataaaacaaatgaatttcatggccccaaggagctcatagtgtaggaagaaacaggcatccaaataaatcaattgcaatgcagatttgtacgtgtactcttgggtgtacttattgttttcataacatccatctccttgtaatgtgtgcatcgttttatcacactggagattaagttcctctcgtaaaggcctttacatttttgagactcacttttaacagagctctttccaaagcactattgtgttcagtacatgggtggctgccttacttcctaaccgagggctggggaggacctccatgtctcatgcatgcatcattgtcatcgttataactccttctgagaataggaagtcaggaacacaatggggcaccccacagactgtcaatggtttagaaatgtggagacttaattcctctctctgcaggagaggatggaggtttcagaatgtctagacttagagtgatgaaagacaacctcagtactttttggagacaaatgcttttgctggagtgacagyttaattacccaggcaatcaggtcagttttcagaaaatccagtttgt

SEQ ID NO: 190560 - DNA, 370 bp, Homo sapiens
aataaaataaaataaaataaaataaagagaaatattggcaatgataaaggccaggagaatggttcattctgaaactgtgtttagcagtcctgtactaaacctgcactccatgaaaggccaagctggcaagtttggactcaatcctataggctgtgaaaaggcagggaggtgacactaggctttccaggcaaggaggtgacaaatgtatatggtaaggtaaaaggacagggagtgaagagggraaataacacaaagaaaaagcaaagggaataaaaaatagtcctattttatgaaaggttctcatgcatgcactgtcagcctgctcagaatctggcatcaatagagaagggtgtgttttgggatccataag

SEQ ID NO: 190561 - DNA, 620 bp, Homo sapiens
aaacaaatggagcactttataataacatgcccttgactctrtggagcattgccccaattctgagtgaagctgcaaagctgagtgccttctgtggttcccatggcactggacaaaaggcaagcttctggggatgcctacagtagcctctgtttatttcattgactggatattggcatttccagtatcttctctttgcctctctctttcctcagatgtaagagtctgaaatcttgaccttagtttcttcgctctgctatttagcaaaccggacatttaatcttatttgatcttatgtgttgtagtttgtggttaagtaggagataccaatcttctaaacagaaaaatatgttagctgctgaaagaaatatatattttttttgtttccaccacttggtctttgttctttttctctctgctccttttccaccactagaaagcacttagtgtctgcttggtttgggtcataaaattgctcacttggactgtgttcacagcagctctgacagtgtttcagccacatgtcctcaactttctctcagtaagctgttagcagatgatctgcctacaatgagaagctgaaaccctccctacagccagctgatctgctctccgtgaagcct

SEQ ID NO: 190562 - DNA, 492 bp, Homo sapiens
tggcttgttgaataactttggtttcttcagtcwttgataagtggcaggtgggtgggtacaacacagaaactatgaatagtaggcagaaagagtttgaggaaaagagagggcatttcatcaagactcctctggtattggcaactttcaccagccagtgccctgttggcggcggggtggggggtggtttatcctcccaccttggcagatggcaggtggtttagatgtgaggccttcctggaggggggttggatcattcagcctctagattatgccatctccccaccagtccaactcccggaagcccggcccagttttagtgtctcctagtggtaccttggggtttttgcaggagaaacaagtctacttctgaaggtggcagcttcaattacatagaaaagtggcacaacatagttactaggaacccagagctgtacagatggattcagttcaaaacctggctttactacttaccagctgtatgatcttgggcat

SEQ ID NO: 190563 - DNA, 492 bp, Homo sapiens
tggcttgttgaataactttggtttcttcagtctttgataagtggcaggtgggtgggtacaacacagawactatgaatagtaggcagaaagagtttgaggaaaagagagggcatttcatcaagactcctctggtattggcaactttcaccagccagtgccctgttggcggcggggtggggggtggtttatcctcccaccttggcagatggcaggtggtttagatgtgaggccttcctggaggggggttggatcattcagcctctagattatgccatctccccaccagtccaactcccggaagcccggcccagttttagtgtctcctagtggtaccttggggtttttgcaggagaaacaagtctacttctgaaggtggcagcttcaattacatagaaaagtggcacaacatagttactaggaacccagagctgtacagatggattcagttcaaaacctggctttactacttaccagctgtatgatcttgggcat

SEQ ID NO: 190564 - DNA, 548 bp, Homo sapiens
cttggtgatcctttgccaaatacaagaggcctgcaggaaaccagtgcaaaccagaactggctaccccttgttccgtttaggtcattaacatagcgttacaatgctgggctccccayccctagaagaaaactgccgccattttctctccataggacgcatggagaaacatgtttatctgtgtctgtgcctctgtactttctccctgcatgtgtttacatagctccccgccccacatctaactcatcacaatcctgcagcttcccacagctagggagaaggtgactttttagagcaagaggtctctcattttccatttctggccagtgaataaaaccagcttgtcctttttcaattgggtgttctctctctggaacctatacagactagagaaagaactcagtctaccagtgacagatacactaagattcattcttgtcagcttctttactgccatttcccccagatttggatttcaagtggaaatgaacaaatgttattccaagagaatcttacataatgttttgctccagctacataaaggcaactcc

SEQ ID NO: 190565 - DNA, 582 bp, Homo sapiens
cttcccttggctaggaaagggaaatccgccaaccctttgcacttcctgggtgaggcgacacccagccctgcttctgctcgccctccctgggctgcacccattgtccaaccaatcccagtgatatgaaccaggtacctctgttggaaatgcagaaatcacctgtcttctgtgtcaatcacgctgggagttgcakaccggagctgttcctattcagccatcttcactccttccgtctcaaaacagtttattagtcaaacacagtggctcatgcttataatgccagcactttgggaaacccagacaggaggatagcttaaggccaggagtttgagaccagcctgcacagcatagtgagacctcatctctacaaaaagtaaaaaaaaattaaaaagccagatatggtggtggtgcatgcctatagtcctagttacttgggaactgtggtgggaggatagcttgagtccaggagtttgaggctgcagtgagctatgatcatgccactgtactccagccggggtgacagagcaagactttgtctctgaaaaaaaaaaaaaaaaaaacagtttatccaaagatatgcct

SEQ ID NO: 190566 - DNA, 355 bp, Homo sapiens
atctgttttcagagcacatatttgtataaatgaaacacaaattagaggcccacagcactttggaaggccaaggcaagaggttcacttgaactcagcagtgtgaggccaacctgggcaacatgatgaaaccttagctctacaaaacatataaaaattagctgaacatggtggcatgtgcctgtggtccctgctactcaagggacggctaaggtgggaggatcacctgagctcaggaggttgaggctgcagtgagctgtggtcacaccactgcactccagcctgggtgacagagcaagaccctgtctcaaaaaaataaaaaaatwaaaaaaacaaaacaaaagaaatacaaattagt

SEQ ID NO: 190567 - DNA, 611 bp, Homo sapiens
  misc_feature (1)...(611): n = A,T,C or G
ccatttctttatgattcagtctttgtatgttgtatgctntggagcacctaaacatataaaacagatatttatatttatacaatatgtaaatattgtattgcaacccatctctttcttcagatccacaggatctgatggattgcaatrtaacagtagaaaacttccatacctcactttcaatgctggaagatcatccagacagaaaattaataagaaaacattcaacttgaacaacactttacagaaacactttacaggacctaaatgaacagaagaatttaaccacttcttcttagttatccaatttgttgatgtataattgttgatgatagtccctgatgatcttttgtatttttgtggtattatgaatcttcttttttttaaattaatctagtttgtcaaatttgttcatcttttcaaaaaagaacttattttatctatcttttgtattgtttttctagtctctatttcatttatttctgctctgatttttattatttcctttcttatgctaactttggcttagtttattcttctttttctgtttccttgaggtatgacattagcttatttattttaaatctttcttctctttgatgtagacatttatt

SEQ ID NO: 190568 - DNA, 605 bp, Homo sapiens
atgtattatattcttaaaaactcctaagagagtagattttaagtattctccctacaaaagtatgggaggtaatgcatatggttaattagctcaattgagccattctacaatatatacatattttataacatcatgttgtgcacaataaatagacacaatttttatttgtcagttaaaagaaataaattacaaagataaataaatgcttttttaaaaaaaaacataaaaatttggtacaatcctgtcaaactctatctcctaccgctgaattctctaaagacaagtaagggttgggtgatgccatggacacacaaattgaaaatactcagtagacttaaatggtttcgagcatttccttaaggtccsatcatcttttaatcccttattccactccggttctctctgactacagcactccggagggataccaagaggagagaaaacctgaatgaagtagcagtgcaaatggctgattttaaaaagaaaccaagcttcctaagttggtaatcaaggttgaagcacagcagtaggcagggggcagtgactctcatcttattctttagtactgtgggtggtccgtttgatgtttaaaacactcctgaggc

SEQ ID NO: 190569 - DNA, 586 bp, Homo sapiens
cacacacagtggctcatgcctgtaatcccagcactttgggaggctgaggtgggcagatcacttgaggccaggggttcaagaccaccctgggcaacatggcgaaaccctatctctactaaaaatgcaaaaattagctgggcatgctcgcatacgcctataatcccagctacttgggaggctgagatatgagaatctcttgaacccaggaagcaaaggttgcactgagccaagatcataccactgcactccagcctgggtgacagagtgagaccccatctcaataataataataatactttactgctaaaaaatgctactgaagtgaatatgtgccattggaaaatcagtactgatagttttgcttaacacagagtttagcacaaaccttccatttattttttaaaatgcaatatctgcaaagcgcaataaagcaaagcacaataaaatgaaatatgcttgtattttctctcattctgtaggttcttttttcactttctggtgagaaaagttttaatagactttcgatggactaaagtttytaattttgataaagtccaatttatctaatttgtctttgggtgtttat

SEQ ID NO: 190570 - DNA, 562 bp, Homo sapiens
tcctcctgcctatcttctcattagtaaccacttgtgttagttttggggcaccctttcagtgttcttttcatacaaatataagaaaatacaaggccaggcgcagtggctcacacctgtaatcccagcactttgggaggccgaggagggcagatcacaaggtcaggagttcgcgaccagctcaaccaacatggtgaaactctgtctctactaaaaatacaaagttagcyaggcatggtggtgcatgcctgtaatcccaattactcaggaggctgaggcaggagaatcacttgaacccgggagacggaggttgcagcgagccgagactgcgccattgcactccagcctgggcaacaagagcgaaactccgtctcaaaaaaaaaaaaagaaaagaaaatacaaatatatgcttttatttctcctcttacacgtaatttgtatatgcaaactccctgtatgtatgtgtttgtgtttgtgtttgtgtttgtgtttgtgtgtgtgtgagagagagagtgagaaaaagagagagagagagagacagacagagacagagagacagagagtt

SEQ ID NO: 190571 - DNA, 562 bp, Homo sapiens
tcctcctgcctatcttctcattagtaaccacttgtgttagttttggggcaccctttcagtgttcttttcatacaaatataagaaaatacaaggccaggcgcagtggctcacacctgtaatcccagcactttgggaggccgaggagggcagatcacaaggtcaggagttcgcgaccagctcaaccaacatggtgaaactctgtctctactaaaaatacaaagttagccaggcatggtggtgcatgcctgtaatcccaattactcaggaggctgaggcaggagaatcacttgaacccgggagacggaggttgcagcgagccgagactgcgccattgcactccagcctgggcaacaagagygaaactccgtctcaaaaaaaaaaaaagaaaagaaaatacaaatatatgcttttatttctcctcttacacgtaatttgtatatgcaaactccctgtatgtatgtgtttgtgtttgtgtttgtgtttgtgtttgtgtgtgtgtgagagagagagtgagaaaaagagagagagagagagacagacagagacagagagacagagagtt

SEQ ID NO: 190572 - DNA, 562 bp, Homo sapiens
tcctcctgcctatcttctcattagtaaccacttgtgttagttttggggcaccctttcagtgttcttttcatacaaatataagaaaatacaaggccaggcgcagtggctcacacctgtaatcccagcactttgggaggccgaggagggcagatcacaaggtcaggagttcgcgaccagctcaaccaacatggtgaaactctgtctctactaaaaatacaaagttagccaggcatggtggtgcatgcctgtaatcccaattactcaggaggctgaggcaggagaatcacttgaacccgggagacggaggttgcagcgagccgagactgcgccattgcactccagcctgggcaacaagagcgaaactccgtctcaaaaaaaaaaaaagaaaagaaaatacaaatatatgcttttatttctcctcttacacrtaatttgtatatgcaaactccctgtatgtatgtgtttgtgtttgtgtttgtgtttgtgtttgtgtgtgtgtgagagagagagtgagaaaaagagagagagagagagacagacagagacagagagacagagagtt

SEQ ID NO: 190573 - DNA, 562 bp, Homo sapiens
tcctcctgcctatcttctcattagtaaccacttgtgttagttttggggcaccctttcagtgttcttttcatacaaatataagaaaatacaaggccaggcgcagtggctcacacctgtaatcccagcactttgggaggccgaggagggcagatcacaaggtcaggagttcgcgaccagctcaaccaacatggtgaaactctgtctctactaaaaatacaaagttagccaggcatggtggtgcatgcctgtaatcccaattactcaggaggctgaggcaggagaatcacttgaacccgggagacggaggttgcagcgagccgagactgcgccattgcactccagcctgggcaacaagagcgaaactccgtctcaaaaaaaaaaaaagaaaagaaaatacaaatatatgcttttatttctcctcttacacgtaatttgtatatgcaaactccctgtatgtatgtgtttgtgtttgtgtttgtgtttgtgtttgtgtgtgtgtgagagagagagtgagaaaaagagagagagagasagacagacagagacagagagacagagagtt

SEQ ID NO: 190574 - DNA, 381 bp, Homo sapiens
gagaattcatggaattacagatgaatattattcaatgatttctttttctctctcaaagtgcttccaggataaaaagacacactagaaaaggcagatgtaattaaaggtaatgagagatcaaactttaattgaactataaaaaaacaccacctcttctacttgataattacactaacaccaccaggatcagctccaccatttttatttcccttgaacctttattatcacattattggcatgtatatcytacaattaaaacatcttgaatttataaaaatgttagttatcaaagaaattaaaaagaaataagatgcagtgatgtgcagtggcataacatcagcccatgaactcattgccccaaatggtaatgctctaaagtaa

SEQ ID NO: 190575 - DNA, 561 bp, Homo sapiens
agaatttatgtaaatttatgtaaactgtattgtagtttagagataggttgtgatttatttatttagggctcttataaagtttaaaattgttggagagggcagaagaatatgaagaaaatgagttaaaaacaaaccaaaacaaataaagtaataaaaataattgtattatttataaattttacaatatcaaaatgaaaatattcctccattaacctatggattatttttctccataagtatgttaaagtctttaactattactgaatcagcaatttaacagatttaatcacacaagaggatgtagtcagccttctatgattgataatacaatgacttaccttaattttttcatcaatattttaggaaaatgacagcaaacaagtaacagcataataacaaagaagacaaccatacgcatatactcacatgcatttttttctctctacacacaaaaatctgacaaaaatctgctcaaaactcatagaygacatcacttctgtgaggtaactttctaaagcagataaaaaatgccttagtatgatagatgcctctcaaatatgc

SEQ ID NO: 190576 - DNA, 433 bp, Homo sapiens
catccaggctggagtgctgtggtgcaaactctgttcaattcaacctctgcctcccgggtttaagagattcttttgtctcaaccccctgagtagcagggattacaggcatgtaccaccacgcctggctaatttttgtatttttagtagagatggggtttcatcattttggccaggctggtctcgaaatcctggcctcaagcgatccacacacttaggcttctcaaagtgccaggattacaggtgtcacccttygtgcctggcccatttatcccatttttaaatagctgttcaaagatttctatctaggatgagttgcttgactctcccttagtttttgctttttgtcattctcttgtgaatcatcttaattttcttagctattattgcttcaaggccctttcagctgacagagaaagaaaaaaaaaagatatat

SEQ ID NO: 190577 - DNA, 544 bp, Homo sapiens
tgggtagaatcaatattatgaaaatgagcatactgccgaaagccatctacaaatccaatgaaatacccatcaaaataccaatatcattattcacagaggtataaagagcaatcctaaaattcytatgaaactaaaaacaagaccacatagccaaagcaagactaagcaaaaagaaaaaatctggaggtatcacactacatgacttcaaacaaaaacataaagcggggaaaggacaccctattcaacacatggtgctgggatcattggcaagccacatgtaggagaatgaaactggatcctcatctctcaccttatacaaaaatcaacttaagatggatcaaagacttaaatctaagacctgaaatcataaaaattctagaaaataacactggggaaatgcttctagaaactggcttaggcaaagacttcatgaccaagagcccaaaagcaaatgcaacaaaaacaaagataaatagatgggacttagttaaaccaaaaagcttctgcacagcaaaagaagcaatcagcacagtaacacagacaa

SEQ ID NO: 190578 - DNA, 536 bp, Homo sapiens
gtgaattcctagacacagcaaacagctgcctacctgcaaacctccttatttcatatgcaaaccatctaatctagggaacatatccaaccacctccatgatcaggctctcactttctggaccactgtctccctcccctaatcactccagggtcaggtgccagacaactggggacagcccctccacccaacaccactgaaaaatycctcaaactagcccatcctaagcttgctatgtctttgcttggtctctccatggaacccacaatagaggctcctgcccacattttcccttcactccctgtgcctcctgaccaacccccaaggctttcccatgtgacccctcttgagtggcatgatatgcctctgcctctagggatctgtaggcataaggttcttccatcctgacagtactttctatgtctgcttgttttaactgtaaccaagatttgtcataattggttatagtaaaacatctttccaagtgcagctcaaaagctactttctctgtgttggcctctccatttctcttccaaaga

SEQ ID NO: 190579 - DNA, 574 bp, Homo sapiens
gcctgagtgctctggggaggagaattctgcacctggggaagggtatggcccattaatgatggctgccaaggtgtgaggccaaagacattacaggaccagagtggtcagctcagctctgacattgtatgcctaatgcagtcagtgagtccctggtagttctttcttatagggaaacagagacaatgatagcaaatgagcttccctctatttgatcgcttccttgagttttgccacaagtaaaggtaaagaagaatactgaccaaatagtgtcaaagatcaaaagtaagatatttgtcttttgaagggaagtataaaggaaagagatgtatgtgtgcagaaatgctgacttgtttagccacacacacagataaytgagtattacaattttttcctaaatgtgaggctaacaacccaggtattttccggtcttttttttttttttttaagcttgacctaagcatacacagaaaaaattaatatttttgttgttgttctagattctattattcaggcaggctttctatattttccccttaggtatctatactttagtatagatgctgtcactgtgaga

SEQ ID NO: 190580 - DNA, 615 bp, Homo sapiens
tccagcgtaatctgatgtcttttatggttttcctttttagaccttagtgctacaaaccaaccaatcacggggtctcacccctaagagtgaccagcccaactcttctgcatgagatattgaacaagagtgcttggagtgagtctggggtctggacgccagcagcatcactggccaggctaggacccacgccgctgtcccccaccatctacttctaagtaagtgactaagcaacacacagcttgcttttacatcccatgtgtgcaaatctcagcctgatgcttgagtgtcatctcaaaaaatatcaaatcttttatttctctcctatcacaaaacttcccttgcttgtaaagtaagaaaaagtaaaaccttgttgagggaaaagaaaaatccaaatgccacccaggcctacaaatactacttcatttaggcttgcagggccactactttccaaatggcatccaggactgtctaagccagtgatgagttcattctgggctctttgaaatccacatcatctgccagccatttggcttrtctatcagcttttaagatgtccagtcataactaagtcattcccctccaatcacccaaagtaaactataggtaacaagataa

SEQ ID NO: 190581 - DNA, 478 bp, Homo sapiens
tttatattctgaatttacattctgaacttcattttaccactatgcactctgcttaataagtcaaagggaggacaatttaacttataccatrctgtctttcaccttgaccaaaaccaaaataaaacaaaatgatattgaactctatgaaatgtccttatagatcacctctccagcagtatcaaaaatttagtcatggacattctacctgcattttcatttccttttttttttttaatagaatgcttttcttaaaactaaaaggcaactttgttctattatcatacatgggaaatcaacatcccttgtcccaaagaagataaccaaaaaattaatacaataaacacacaatgctttatctagaagctattacataccaaaaggctctgatttcaaagtccgttcttatcctcaaaaagcagaacaagtaacaccaagtaaccccaaaactagcaccacaagacttaatctttggcttaat

SEQ ID NO: 190582 - DNA, 451 bp, Homo sapiens
tttctgtttaatcccagcttcctgggtagccctgagctcatttattttgatttttccaattcagtgaggttgccagaatctcttgattgctaatttctgatckgcctctatgcttttccctaaaaattggcaagagcattatggagggaaaaaaataatgaatatagagattttctcaatacattttccttctctccaggatcttgatctattgaatcccggctgctttagttattctctgattaatgtaaacagtttttttttataatgttaatttttcctagattttatagttgttttcagtggggagtttactgtgaatgaaacttctctgtgacagctagaagtacaatctacaaattattgtttgtttttaatgaaacatgtattaaaaggaagtctctcctcacccatatggtggcctttcagatattttcccacagcttctata

SEQ ID NO: 190583 - DNA, 509 bp, Homo sapiens
acttatttacaggaccagcagtctctaagcaggctaggggcagatatgacatgttgaaaaagtaaagatttctctggcaactgcctcttctctttctgttttctccctcatggttctcacaatgatctcaccttgctactaactcagtatctcaagcccagctttaaaatattccaaccctttagcaaagtgtagcaatcagctggaaggaacctyggaggccacatggcccaacctgctgctaatgcagaacaggagtcccttccacgggtattctgaacagatggtattcggcttgtgctctgtgcatctctagcaatgattatgccttactgcaggagacaactgatttccctgttggaggatgacttggaaagtttgcttcagagaagcagagtcttaaagtgcacagctctggagacataccagccctggagtcctggttctgctcctaacccattgtgtgtccttgggcaaggtacttagcctaggtaagcctcatttctctg

SEQ ID NO: 190584 - DNA, 509 bp, Homo sapiens
acttatttacaggaccagcagtctctaagcaggctaggggcagatatgacatgttgaaaaagtaaagatttctctggcaactgcctcttctctttctgttttctccctcatggttctcacaatgatctcaccttgctactaactcagtatctcaagcccagctttaaaatattccaaccctttagcaaagtgtagcaatcagctggaaggaacctcggaggccacatggcccaacctgctgytaatgcagaacaggagtcccttccacgggtattctgaacagatggtattcggcttgtgctctgtgcatctctagcaatgattatgccttactgcaggagacaactgatttccctgttggaggatgacttggaaagtttgcttcagagaagcagagtcttaaagtgcacagctctggagacataccagccctggagtcctggttctgctcctaacccattgtgtgtccttgggcaaggtacttagcctaggtaagcctcatttctctg

SEQ ID NO: 190585 - DNA, 567 bp, Homo sapiens
gatgcaaaggaaatgtgggtgcagtgcctgtagttgaaggatatgtcaccaaggcctgggagcagactcagaaaagatatcaattctcgcccctgcctctcttctccagggcactgttgcatacgtactgtaaaacaaaaggggcacctggctgaggaagagcctatctgtgggccttacattaagtgccatctactggattgcagcttgagttacaccaccaaacaatgcaatgcctctgaaacccacrgcaggaaaccatctacaacctaggaacccattcagagcctcagccctctgagagcacccagcaaagaagccaaccaactaaacacaacattaacagcagtcaaaccctcaagggaaaaaagaataggaaaacaaaaagacccatccaaattcaaaaagaaaatgaaatcccaggtccctcagatgataaggaaccagtgcaagaactctggcaattcaaaaagtcagaatgtttcattatctccaaagaattgcactagctccctagcaatgaatcctaaccagattgaaatgtctgaaaagatagacacagaattc

SEQ ID NO: 190586 - DNA, 383 bp, Homo sapiens
gaattctttccagtcctcttgtcctcctttatttgccatcagcaagggctgtgctgtgattctgyctctgagtgacttggaccactgacccttagatttccagccttaaaatcctccttccttctcatgtccctcttaaatcacagcctgaccattccagactccctgtccagatcttctcagcctctttcactcactcatgcccctaccatctatcacggaataacatctgagaacgataccttgcatattctttcagtttctgttttgttctcccgcatattctcttcaatgttcaggaagcctgccctgtgcttgagagtacaaggctggacacaggctcgtgggtctccacattgggtccctgtctctggtgcccacag

SEQ ID NO: 190587 - DNA, 501 bp, Homo sapiens
agaattctttccagtcctcttgtcctcctttatttgccatcagcaagggctgtgctgtgattctgtctctgagtgacttggaccactgacccttagatttccagccttaaaatcctccttccttctcatgtccctcttaaatcacagcctgacmattccagactccctgtccagatcttctcagcctctttcactcactcatgcccctaccatctatcacggaataacatctgagaacgataccttgcatattctttcagtttctgttttgttctcccgcatattctcttcaatgttcaggaagcctgccctgtgcttgagagtacaaggctggacacaggctcgtgggtctccacattgggtccctgtctctggtgcccacagtgagctccttctttgctgagcaggcatggagactgtaggtttccagatttcctgaaaaataaaagtttacagcattatctttccacaacctcactaaacgattggccaagagatttc

SEQ ID NO: 190588 - DNA, 486 bp, Homo sapiens
cctcttgtcctcctttatttgccatcagcaagggctgtgctgtgattctgtctctgagtgacttggaccactgacccttagatttccagccttaaaatcctccttccttctcatgtccctcttaaatcacagcctgaccattccagactccctgtccakatcttctcagcctctttcactcactcatgcccctaccatctatcacggaataacatctgagaacgataccttgcatattctttcagtttctgttttgttctcccgcatattctcttcaatgttcaggaagcctgccctgtgcttgagagtacaaggctggacacaggctcgtgggtctccacattgggtccctgtctctggtgcccacagtgagctccttctttgctgagcaggcatggagactgtaggtttccagatttcctgaaaaataaaagtttacagcattatctttccacaacctcactaaacgattggccaagagatttc

SEQ ID NO: 190589 - DNA, 486 bp, Homo sapiens
cctcttgtcctcctttatttgccatcagcaagggctgtgctgtgattctgtctctgagtgacttggaccactgacccttagatttccagccttaaaatcctccttccttctcatgtccctcttaaatcacagcctgaccattccagactccctgtccagatcttctcagcctctttcactcactcatgcccctaccatctatcacggaataacatctgagaacgataccttgcatattctttcagtttctgttttgttctcccgcatattctcttcaatgttcrggaagcctgccctgtgcttgagagtacaaggctggacacaggctcgtgggtctccacattgggtccctgtctctggtgcccacagtgagctccttctttgctgagcaggcatggagactgtaggtttccagatttcctgaaaaataaaagtttacagcattatctttccacaacctcactaaacgattggccaagagatttc

SEQ ID NO: 190590 - DNA, 500 bp, Homo sapiens
gaattctttccagtcctcttgtcctcctttatttgccatcagcaagggctgtgctgtgattctgtctctgagtgacttggaccactgacccttagatttccagccttaaaatcctccttccttctcatgtccctcttaaatcacagcctgaccattccagactccctgtccagatcttctcagcctctttcactcactcatgcccctaccatctatcacggaataacatctgagaacgataccttgcatattctttcagtttctgttttgttctcccgcatattctcttcaatgttcaggaagcctgccctgtgcttgagagtacaaggctggacacaggctcgtgggtctccacattgggtccctgtctctggtgcccayagtgagctccttctttgctgagcaggcatggagactgtaggtttccagatttcctgaaaaataaaagtttacagcattatctttccacaacctcactaaacgattggccaagagatttc

SEQ ID NO: 190591 - DNA, 478 bp, Homo sapiens
gggggttctctgaactttctgctcaatttttttgtaaacctgaaactggtccaaaaaatagtctcggccaggtgtagtggctcatgcttgtaatctcagcactttgggagggtggggtggctggattgcttgagctcaggagttcaagaccagcctgggcaacatagtgagaccccatctctctctcaaaaaaaaatacaaagttacctgggcatggtggtgcccgcctgtagtcccagctacttgggaggctgaggtgggaggatggcttgagtccgagaggcagaggttacagtgagcaaagatcgcacttctgcacttcagcttgggtgacagagtgggaccctgtctcgaaattaaaaggaataacaatttaaaaatctcttaaytttttaaaaaagtaattttagtgatactaaaatccaatataggcaaaccagactattaacttccatatacatccttttacatctcttcg

SEQ ID NO: 190592 - DNA, 359 bp, Homo sapiens
ctatgcacctgttacccagcctttcaaccccaaaagactgttcattccaagtctctgaccataaaaccaactcattaaccatagcttataaatcaatatayagctgtttctattctgtcttttatcctggaaaatgtgaacagcaaattatattgctcaaaattctggctacctggataattttccctcacctatgtcatttagggacatccctgtgtgatgccataatattgtagctgtcaaccattggttagtgccaccatattgtaaaaatgatctacatacaaagcctgaatattattcttcttcctcagtcaactaatccatagggaactctgcatgaggtcctaggtgtgagg

SEQ ID NO: 190593 - DNA, 359 bp, Homo sapiens
ctatgcacctgttacccagcctttcaaccccaaaagactgttcattccaagtctctgaccataaaaccaactcattaaccatagcttataaatcaatatatagctgtttctattctgtcttttatcctggaaaatgtgaacagcaaattatattgctcaaaattctggctacctggataattttccctcayctatgtcatttagggacatccctgtgtgatgccataatattgtagctgtcaaccattggttagtgccaccatattgtaaaaatgatctacatacaaagcctgaatattattcttcttcctcagtcaactaatccatagggaactctgcatgaggtcctaggtgtgagg

SEQ ID NO: 190594 - DNA, 536 bp, Homo sapiens
tctcttgcccactgctatattcactcccatagtgtttgttcttgtgtcttcaccccttaaaaaagtcatttgctgtacttaggttgaaaataggaggcagaggaaataaacttacatggccattcctccaacttgacttgacttacctatgtctctccccttcccatagatcactttagtggcagcatgaagaaacgatttgaacaggaggatgttggtggcaaagactaattgagaggcyctctgaatactctatgcaaggctctgttgttgattcttttaagggaacttaaactatgaaacagatcccacataagccaagtaattgctcatcagtggatcacggggacaaatgttatccaaatgctgtgtatataaagcaattctttatgccttgtccatatctaatgactctgaaaccttacagcaggcagcccctgtaaactttcaggtgtacctctttgcccaaagctggtaggaaactttggatggtggtgttgtgagcgttatcagggaagctctgtagccatgcagtg

SEQ ID NO: 190595 - DNA, 460 bp, Homo sapiens
ttgtcatggctggaaaataattgtttgggagccagaattmtgtgtgagaatcctcttgagagaactagcgtggttcatttcataaatgccaaggaaacttgcctgctacatttcccctctggaataagttctggtaagcatatccatggggtgctttggcaaggtctcaaaaataaatgtgaacaaggagacagaaatcctcaatgctaaagtagacttctatttttatggcttgtcctaatttttttttttttttttgagatgaagtcttgctctatcgtccaggctggagtgcagtagtgtgatcttggctcatggcaacctccacctcccgggttgaagcaattctcctgcctcagcttcctgaatagtggggattacaggcctgtgctaccacacctggccaatttttgtacttttagtagaggcagggtttcaccatgttgcccaggctggtctt

SEQ ID NO: 190596 - DNA, 391 bp, Homo sapiens
  misc_feature (1)...(391): n = A,T,C or G
tgcaggtaccagggaccctgggcactgcaatttcatgtcaacaaatggctcctaattcagtatctaacactgaacgagatgtatgaacggtatcagagcccaggaacatagaacctttccgttgatctcggagartcctttgccatcctgttagcatgatgttgttagagactctagcatttcccggtggacacggtgggccctggccaggctgctgttgaacttcaacagaaagttcaacttcttgggtagaaggtcggatgggttgctggtgaccagtgaggtggtgtgccggagaccctacagagtggacagcacattttttcccacacacaatcctcaggggtgacctctgtctcttctcaggtcccagggagatnnnnnnnnnnnn

SEQ ID NO: 190597 - DNA, 391 bp, Homo sapiens
  misc_feature (1)...(391): n = A,T,C or G
tgcaggtaccagggaccctgggcactgcaatttcatgtcaacaaatggctcctaattcagtatctaacactgaacgagatgtatgaacggtatcagagcccaggaacatagaacctttccgttgatctcggagaatcctttgccatcctgttagcatgatgttgttagagactctagcatttcccggtggacacggtgggccctggccaggctgctgttgaacttmaacagaaagttcaacttcttgggtagaaggtcggatgggttgctggtgaccagtgaggtggtgtgccggagaccctacagagtggacagcacattttttcccacacacaatcctcaggggtgacctctgtctcttctcaggtcccagggagatnnnnnnnnnnnn

SEQ ID NO: 190598 - DNA, 546 bp, Homo sapiens
gattctacccctctggttagttaaagccatttgtsatcattccatagtaagatccttccagtgaataattcagaaataggtaggagatttgcgccaaccatagaaataggctggtcttgtaaaaaagagaagcaaacctctcttctaccctcatccctctgtacagacatataacaaagaagtataaggacctaattatcatagtctgccctcttatggccataaaaggaaagagtatagcaaatgtgaaaaacataaagaaactatgttcttgatgacattagcaactgatcatattgaacctggaatccttcctatctctgggcttccattatggtagaaaatatatatatatctttatcattaacatcattctgaatttggtctctttttcttgtagcctggtccaagaattccaatcaaagtataaaggtgaggtttcagctgtagatcctgggaatcatttcagccagtttacagaaagggatttgatctagctatttggtgttgtatcaccattgtgtgggcttgaagaacagatgcttc

SEQ ID NO: 190599 - DNA, 573 bp, Homo sapiens
gctcataagaaagactgagagcagagcaggaaacgggaagaaccattcyctcagaagggtaggcttggaggaggggagctactgtcatggtcgaaaatgcgtaaagccccacttagacctatttctcccagaacaaaagccttacactgcaggaggaggagcagcaatccctgctttgtataagtgtatacccactgcagttggaaacagagcaaacaaaatccatctattcctggagaaggtgcagaaaacagtcctaagcccaggatttaatgccattattattacaaaactcctaccactacactaagtgaaggggaggaaaccttctccactgtagacttgccaaaggtgtcaggcagagtctggatgccatgagaaggggtagtatcactaaccaagcctgtcactgaggaccagggacagaggacctgcccaaggctgagaatggaataggacaacaaagaatgacttggccctccctccccaggcacgcaagcaccagtctactgctggaagacaggcaggagaaggaaagaaagcccttctaaagcacaggcacacagcggaggc

SEQ ID NO: 190600 - DNA, 573 bp, Homo sapiens
gctcataagaaagactgagagcagagcaggaaacgggaagaaccattctctcagaagggtaggcttggaggaggggagcyactgtcatggtcgaaaatgcgtaaagccccacttagacctatttctcccagaacaaaagccttacactgcaggaggaggagcagcaatccctgctttgtataagtgtatacccactgcagttggaaacagagcaaacaaaatccatctattcctggagaaggtgcagaaaacagtcctaagcccaggatttaatgccattattattacaaaactcctaccactacactaagtgaaggggaggaaaccttctccactgtagacttgccaaaggtgtcaggcagagtctggatgccatgagaaggggtagtatcactaaccaagcctgtcactgaggaccagggacagaggacctgcccaaggctgagaatggaataggacaacaaagaatgacttggccctccctccccaggcacgcaagcaccagtctactgctggaagacaggcaggagaaggaaagaaagcccttctaaagcacaggcacacagcggaggc

SEQ ID NO: 190601 - DNA, 622 bp, Homo sapiens
gctacatatttatgattccatttatacaataccttgaaaaagacaaaagtaaagagaatgaaaatagattactggttgctaggcaccggtggtagggtaaagggttaactataaaaaaatacaagagaaatgtggggggagatagaaatgtactataccttgattgtgatggtaaaccttggtcaaacctcatagaactgtatgctaaaagggtgaattttactgtatgcctcagtttaattaagcatgttttaattaattaaaaattatgtctcgttttataaaagcatattcttataaactatttttgtaggagatctgcattttaataattgcataaggtgatattttcttaactggrtttgacatttttcaaataaagtcattagagaagatgtttccaacatttgatgggatgttggttatggatgacctctaagatcctctccaactccaaggtttttgaggtgtgcatgtgatcccccaagtttacaaacacaaattttataaatatatatatatatatatatatatatatatacacacatacacatatatgttaagtatatattcatagttctaattacatttatattatatatacatgtaaatacgtatacac

SEQ ID NO: 190602 - DNA, 394 bp, Homo sapiens
aacatgattagaagagataaacatccaaactataccatacaggaagtccttgccagagcaattaggcaagagaaacaaacaaaaggcatccarattgaaaagaaggaacaattaggcaacagaaacaaataaaaggtagccaaattgaaaaggaggaagtcaaatttgtccctgtttagagatgacatgctcttacaaatgcaaaaacctgaagaatccaccaaaaaactcttagaactgataaacaaattaagtaaagttgcaggatacaaaatcaacatgcaaaaatcagtagcatttctataaaacaataacaaactacctgaaaaagaaatcaagtaagcaatctcatttacaataactacaaaaaataatacctaggaataaatttaac

SEQ ID NO: 190603 - DNA, 516 bp, Homo sapiens
gcagtctccatactttaggggtaagcctggatgcccttcacacatcagtctggatgagttcatgcaccactcatccaaaagtgaatccaaaagtgattccaaaagcagaggccagagatctagttgctaatgttgcctctcctcatggttctaggattcagccacacagggcttcccattgcagcttcaggtcctcctcactccccagtgcaggcccagtttcactctcaggtcctccagcccaggcctcagttctgcctcttttagtccatccctccagatccactttccaacagggctgggaagtcgcttggttgtcccctgcctgctgcaccacakcccccagacaccgcctccttatttcctgcatggtctgaggctcaatgctaatccctgggtgtcttagtctgttttgtgctgctataacagaattcctgagcctggataatttgtaaagaacaaaacatttttttctcacagttctggagaatgggaagtccaagatcaggtgccagc

SEQ ID NO: 190604 - DNA, 516 bp, Homo sapiens
gcagtctccatactttaggggtaagcctggatgcccttcacacatcagtctggatgagttcatgcaccactcatccaaaagtgaatccaaaagtgattccaaaagcagaggccagagatctagttgctaatgttgcctctcctcatggttctaggattcagccacacagggcttcccattgcagcttcaggtcctcctcactccccagtgcaggcccagtttcactctcaggtcctccagcccaggcctcagttctgcctcttttagtccatccctccagatccactttccaacagggctgggaagtcgcttggttgtcccctgcctgctgcaccacatcccccagacaccgcctccttatttcctgcatggtcygaggctcaatgctaatccctgggtgtcttagtctgttttgtgctgctataacagaattcctgagcctggataatttgtaaagaacaaaacatttttttctcacagttctggagaatgggaagtccaagatcaggtgccagc

SEQ ID NO: 190605 - DNA, 545 bp, Homo sapiens
tatgattaccctcctaaagcatgaaataggtatatgtgatctagtgcaaagaagagaggtattggaatcaggaaaatcaggctttttaccttcttacccctccttcaccctgcattggtggtaccaccatttccccaaggcttcctcatgccaaagcttgattgctctctttcctcatgcctgtttctaatcccaaagtagtctcctgaactccgcctcccagwtgtatcccaaatctggctgcttcttaacacttcagctacagcctgagtccaagccacatcatgttgacctgaatgactgctgcttgacctcctttagtccctgtgcaccagtaacccgagtggcccctctgaagaacggaggagggcatttcctgcttaaccctccgtgccagcccagtggcttcccactgcatgcaggatggtggcatcatgctcctctgatccccaaggccctccagggtccctgccacctccacaacttcctccacttctgcttcattaacgatggcccaagcacacttgtatttttgtccctcaaac

SEQ ID NO: 190606 - DNA, 332 bp, Homo sapiens
tttatgtagttcttttttgagacagggttttgctctgttgcccaggctggagtgcagtggtttgatctccactcacttcaaccttcccctcccggcccccggggtttaagcgattctcatgcctcagcctcccaagtagctgggactataggcatacaccaccacacccagctaatttttttatttgtagtagagacagggttttgccatgttggccaggcttgtctcgaactcctgagctcaagtggtctscccacctcagcctcccaaagtgctgggactataggcgtgagccaccatggccagccaggataaagttaagtttctaagct

SEQ ID NO: 190607 - DNA, 467 bp, Homo sapiens
aatgaagtggaaaggtaagagtcattggctcaaaccaccccaggtgcacagacacaggcaygtgcacacacacacactcgcacacagtcacactctctcacactgacacagcctccttcctgccttcacctcacatctcagtccccagcctgcctgccatattcctcccatcactgcagggagtcccagccggccccacaggggaagcccccgccccagcctgcacagaacagccccgtgctctctgggcacacagcagctgcagccgtcctggcctaggacctctggggtctctgccaccattccagtaggtcatgctgctcaggggggccagatggccaaaccaggtagggcccagtggacataagcccagtgacacggccgacattattcagggagggtgtgtgagggaggctgctcgtgctgggaagaaggagcacccacacctcatggctcggagctgcttg

SEQ ID NO: 190608 - DNA, 449 bp, Homo sapiens
agaaaatgaagtggaaaggtaagagtcattggctcaaaccaccccaggtgcacagacacaggcatgtgcacacacacacactcgcacacagtcacactctctcacactgacacagcctccttcctgccttcacctcacatctcagtccccagcctgcctgccatattcctcccatcactgcagggagtcccagccggccccacaggggaagcccccgccccagcctgcacagaacagccccgtgctctctgggcacacagcagctgcagccgtcctggccyaggacctctggggtctctgccaccattccagtaggtcatgctgctcaggggggccagatggccaaaccaggtagggcccagtggacataagcccagtgacacggccgacattattcagggagggtgtgtgagggaggctgctcgtgctgggaagaaggagcacccaca

SEQ ID NO: 190609 - DNA, 397 bp, Homo sapiens
gaagttattgggaactggagcaaaggtcacccttgtgtgccttagcaaagagcttggctacattgtatttgtgtcctagtgatctgtggaagtttgaacttaagaatggtaacctagcacatctggcagaagatatttctaagcagctaaacattcaagaggtgacatggctgcttctaacaacctatgatcagataggggagcaaatgaatgacttaaagttggaatttatacctaaaaggaaagcaggstgtaaaagtttggaaaatttgcagcttagccatatggtagacaaagaaaaaaatgttttcaggagaggaatccaaacaggctgcagagcaaccacttactagagagatttgcatggctaaaagggagccaagtgctaatatccaag

SEQ ID NO: 190610 - DNA, 397 bp, Homo sapiens
gaagttattgggaactggagcaaaggtcacccttgtgtgccttagcaaagagcttggctacattgtatttgtgtcctagtgatctgtggaagtttgaacttaagaatggtaacctagcacatctggcagaagatatttctaagcagctaaacattcaagaggtgacatggctgcttctaacaacctatgatcagataggggagcaaatgaatgacttaaagttggaatttatacctaaaaggaaagcagggtgtaaaagtttggaaaatttgcagcttagccatrtggtagacaaagaaaaaaatgttttcaggagaggaatccaaacaggctgcagagcaaccacttactagagagatttgcatggctaaaagggagccaagtgctaatatccaag

SEQ ID NO: 190611 - DNA, 397 bp, Homo sapiens
gaagttattgggaactggagcaaaggtcacccttgtgtgccttagcaaagagcttggctacattgtatttgtgtcctagtgatctgtggaagtttgaacttaagaatggtaacctagcacatctggcagaagatatttctaagcagctaaacattcaagaggtgacatggctgcttctaacaacctatgatcagataggggagcaaatgaatgacttaaagttggaatttatacctaaaaggaaagcagggtgtaaaagtttggaaaatttgcagcttagccatatggtagasaaagaaaaaaatgttttcaggagaggaatccaaacaggctgcagagcaaccacttactagagagatttgcatggctaaaagggagccaagtgctaatatccaag

SEQ ID NO: 190612 - DNA, 397 bp, Homo sapiens
gaagttattgggaactggagcaaaggtcacccttgtgtgccttagcaaagagcttggctacattgtatttgtgtcctagtgatctgtggaagtttgaacttaagaatggtaacctagcacatctggcagaagatatttctaagcagctaaacattcaagaggtgacatggctgcttctaacaacctatgatcagataggggagcaaatgaatgacttaaagttggaatttatacctaaaaggaaagcagggtgtaaaagtttggaaaatttgcagcttagccatatggtagacaaagaaaaaaatgttttcaggagaggaatccaaacaggctgcagarcaaccacttactagagagatttgcatggctaaaagggagccaagtgctaatatccaag

SEQ ID NO: 190613 - DNA, 534 bp, Homo sapiens
gaagacatttcaaagatcttcgcagcagcccctcccatcacaggcccagaggcctagagaaaagaatggcttaatgggccaggactaggrccctgatgccctgtgcagcctcgggacactggtccctgtaccccaacttcttcagctacagtggtggttcaacagtctccaggtacagtgtggactgctgctctagagggtaagccttgctggcttccaagtggtgtgaaatctgcaggaacacagaacacaagagtgaaggggcattggcagcttccccctagattacagaggatgtatgggaaaacctgggtgcccaggcagaagcctgctgcagcagcagagccctcacagagatactctatgagggcaatgttgggaggagatgtagggttggagccccacacagactcccgacaagggcactgcctagtggagctgtcagcagagggcttctgccctccagaccccagaatgtttgatctactggcagcttgcaacctcagcctggaaaagccgcaagtactcaactct

SEQ ID NO: 190614 - DNA, 534 bp, Homo sapiens
gaagacatttcaaagatcttcgcagcagcccctcccatcacaggcccagaggcctagagaaaagaatggcttaatgggccaggactaggaccctgatgccctgtgcagcctcrggacactggtccctgtaccccaacttcttcagctacagtggtggttcaacagtctccaggtacagtgtggactgctgctctagagggtaagccttgctggcttccaagtggtgtgaaatctgcaggaacacagaacacaagagtgaaggggcattggcagcttccccctagattacagaggatgtatgggaaaacctgggtgcccaggcagaagcctgctgcagcagcagagccctcacagagatactctatgagggcaatgttgggaggagatgtagggttggagccccacacagactcccgacaagggcactgcctagtggagctgtcagcagagggcttctgccctccagaccccagaatgtttgatctactggcagcttgcaacctcagcctggaaaagccgcaagtactcaactct

SEQ ID NO: 190615 - DNA, 534 bp, Homo sapiens
gaagacatttcaaagatcttcgcagcagcccctcccatcacaggcccagaggcctagagaaaagaatggcttaatgggccaggactaggaccctgatgccctgtgcagcctcgggacactggtccctgtaccccaacttcttcagctacagtggtrgttcaacagtctccaggtacagtgtggactgctgctctagagggtaagccttgctggcttccaagtggtgtgaaatctgcaggaacacagaacacaagagtgaaggggcattggcagcttccccctagattacagaggatgtatgggaaaacctgggtgcccaggcagaagcctgctgcagcagcagagccctcacagagatactctatgagggcaatgttgggaggagatgtagggttggagccccacacagactcccgacaagggcactgcctagtggagctgtcagcagagggcttctgccctccagaccccagaatgtttgatctactggcagcttgcaacctcagcctggaaaagccgcaagtactcaactct

SEQ ID NO: 190616 - DNA, 534 bp, Homo sapiens
gaagacatttcaaagatcttcgcagcagcccctcccatcacaggcccagaggcctagagaaaagaatggcttaatgggccaggactaggaccctgatgccctgtgcagcctcgggacactggtccctgtaccccaacttcttcagctacagtggtggttcaacagtctccaggtacagtgtggactgctgctctagagggyaagccttgctggcttccaagtggtgtgaaatctgcaggaacacagaacacaagagtgaaggggcattggcagcttccccctagattacagaggatgtatgggaaaacctgggtgcccaggcagaagcctgctgcagcagcagagccctcacagagatactctatgagggcaatgttgggaggagatgtagggttggagccccacacagactcccgacaagggcactgcctagtggagctgtcagcagagggcttctgccctccagaccccagaatgtttgatctactggcagcttgcaacctcagcctggaaaagccgcaagtactcaactct

SEQ ID NO: 190617 - DNA, 561 bp, Homo sapiens
gaggtggatatttacatgcaggaggtttatgggggagtgttctcaagaacaacacctgtatgggagtgaggaaagcaagactgagcagagggagaagttgaactgtgatgtagttgccatttattgggcttggtgcatcccatgtgtgttagtccatttgcattgctattaagaaacatctgggactgggtaatttataatgatgaagtttatttggctcatggttctgcaggctgcacatgaaccatggtgctaacatctgcttctggtgagggcctcaggaagctcacagtcatggcagaaggcaaaggagagccggcgtgtcacatggtgagagaaggagcaagagaaatgccrggctcttttaaataaccagctcttgtgtgaactcactgagtgagaactcactcattaccacgaggacagcaccaagccattcatgaggaatccacctccataacccaaacacctgctaccagacctgacctccaacattggggatcacatttcaacatgagatttggagaggacaaaacatccaaaccatatcaccatggaact

SEQ ID NO: 190618 - DNA, 492 bp, Homo sapiens
tctggtttcccaaaaccagattatgaaatattaggttgagcttttttacacacgaactcaaggagaaactgggaagcaaatttgacacatttgaaatagacacagccaggtgtggtggtatgcacttgtaatcccagcactgtaggaggctggggcagaggaatcatttgagcccaggagctcaagaccagcctgcgcaacatagtgggaccctgtctctacaaaaaaaaaaaaaattagccaggcatggtggcatttacttgtagtcccagctactcaggaggatkgcttgaacccagaaggtcaagactgcagtgagtcatgatcacaccattgcagtccagcctgggtgacagattgagacctatctcaaagaaaagaaatagacacttagaaaattactgaattgagtgtgagtgccaaacatacatatctatgtgtatatgtagattcttaatatatgtaaaatactattatactcaagtacacaaa

SEQ ID NO: 190619 - DNA, 566 bp, Homo sapiens
cagaatttgtctgcacacacctctgaagacaatgcattctgatgaatacacattccaggcagtgctcttgctttctgacctcgtctgacaagctgaattcagtgtcttggcatgtgccccctattgctttataacaaagaacaaggtactcctgaggtcattttggctccttctgaacctcgagaagtgttaccttcttagaaagagcatgtgggcacttttaaaacacacttcctgaaaggcaagaggcagtcgtgggcctgtgtatgtgcagcctaatgtggtggtgccttttatgggtctgagaggagcccctgtcagtatgattttcatgactgcttaatacattgagtcacaatagggatgtgatgccgctgcacaagtctcgtggctttgaggagacagaattacagaccccaagtgtctgwttcatgatcagcgaatgtgggatttggacggccctcagagatgaaggcttgcccaacggccttattttaatagatgaaaaacctgtgtcgtagcttaactaagtgcactgccttctgtcccagctaaccagtggggaa

SEQ ID NO: 190620 - DNA, 484 bp, Homo sapiens
gttatttgttcctccatttcctatttattgtcttctttgcatgattattatttttgattccatttgtttctactactattacataactttataaggaatacatcaccttacaatagtatacttacagcttccatcccttgtgctgtttttgtcamacgttttaattctacaaatgttataaaattcataagacattgtggatttgttttgtacgaaaccatgaattgtctttcaaatttattaaaatatacaaaggagcactttatatatctgtctatacattgatcacttctggtgctcttcattactttatatagatccaaatttctatctggaaccatttttcttctgcttaaataattttagcatattttttcttgtggatgtctcctgttcataaattctccagcttctgctactgtaataaatctttgtatcttttttatttataagagatatttgtgctagattttaaaaattgaat

SEQ ID NO: 190621 - DNA, 531 bp, Homo sapiens
taaaatatatcactttcttggagcttataaacttttgtttggattactgtagtttcatacatatccaagttaaatgcaggagccctaaatacataaactactggtgcagtttaattcttatttctacggaaaaggtgtgatatcgatatttaaacattgtaatatttaaaatgttctttcttattcaatgttcttctttccattttcaataatatgggagcattctggaaaggaaatacatggaccaagcaaggtctcacattcagtcattggcagggaagatctctcttggggggcactgctgcctttacagtcagataaaactgtttttgtgaatgcaagaaaagagaggagatttgagtgttaccctagagccaattggaagattctagaagactsgtcactggataggtaaaaaacacaaaagatgttaaaacatttaaatatgacagggtttgggagggaagatgggaaagatggggagatgtttgaagaaccccaaagtagctttcctcagaatgagcaaaggcc

SEQ ID NO: 190622 - DNA, 551 bp, Homo sapiens
catctttaatttataattaagtaaattgtaagaggggcagcatctgactaaaaatggctctaaagcagaagattcagcctctctattcctgtgttctgctgtcacctgcaacataacattgagcacactctgttacatcttctgtgaaatgagaaattggacttaaaattctctccatcgcttcagatgctttgggccatgaggcaacagaaaccctgattcaaagtggtttaaacatttaaggaaacgtcytatcctgtataacagaaagtagagcagcagggaagcttaggggttgactgattgggtggctcaacaacgtcatcaagaacctgggttctttctatctttctctctctctcgccatacctgggtatcagcttcatcctcgtgctggtagtgagactgctgttgcatctccaggcatcacattcagacacaaagaatccggaagaaaaggaggaagactccccagaagatgtcccttcacatagtattggccattattgagtcacatgtgccaatatctgaataaatcaccagaaaggaga

SEQ ID NO: 190623 - DNA, 394 bp, Homo sapiens
tgagcaagaggcatggagcttcatgcagcgaccagtctaagggatcctgaccacaygaaaaccataaccaccagttgcattgtaacacctgatttccaacagtggccccgggtgaggcctcatggtattggtgatatagataaatgagagaaaatagttgctgttaatttaaacaagttacatttaaaacattgaccaatcaacatccctgtctaccctcggacaacctaaagaactctagtggtgttacacagtaaaaagcggggtagtaggtggtgtgttacattttcttaaaagaaaattcaaattggctactagagtttttgacctcacattgacccatgggcagactgtgtctttttaaactcatttccagagtgcttgaatgaggaat

SEQ ID NO: 190624 - DNA, 621 bp, Homo sapiens
ggtaaacacacaggagcaggattgctgggtcatatggtaagtgcatgtttaactttgtaagaaacttccaaactgttttccaggatgggtcctgcattttgcatccccacctacaatgtgtgagagtttcatttgctctgcatcttcaccagcactttgtgttgtcaacatttttcttttacttcaatagatagaagttaaaactacaattagctatcactacatttgtggtggcaacttagcctcttaagtttttaagtgcactacatttgtagtggtagctaattgtggttttaatttatatttcccttatgactaatgatattgaacatctacttaagtgtttatttgccttctttatgtcctcactggtgatgtgttcaaaaccttcgcccattttttagtgggttaactgttttcttcatgttaagttttgaataatctttacctattstagatacaagtccttggccagataggtaattcgaaaatgtattttcccagtgtgtgtattgacttttcattctccaagatagatctctcacagagtaaaagttcttaattttgataaagtccatttgtcaatttttaaaaataaattgtgcttttggagtcatgtct

SEQ ID NO: 190625 - DNA, 497 bp, Homo sapiens
cagtgccaaaaatgcacaatggagaatggatagtctccatataaattttagaatcaacttgtctctacctacaaaaatgccaggtaggatattttgattggaattgtgttaaatctacagatcagtctgaggctaactgacctctttacaactttgagtttttcaatccaygaatggggtatgcctcttcatttatttaggtctttctgattcctgtaattatcatttgtagttttttgcacagatccgtgggtgttttgttatatttatagctaaatatctcacttttcaaagctactataaatttttaaaatttgttttctaattatagcattgctattacataaaaatattattaatttttctgtacttaccttgtatcctgcaatctcattaaactcacttctttgttctaggagacttttttgtagatcccttggaattgccttcatagacatatatgacacttggtgaatagggatagtattatttcctcc

SEQ ID NO: 190626 - DNA, 497 bp, Homo sapiens
cagtgccaaaaatgcacaatggagaatggatagtctccatataaattttagaatcaacttgtctctacctacaaaaatgccaggtaggatattttgattggaattgtgttaaatctacagatcagtctgaggctaactgacctctttacaactttgagtttttcaatccacgaatggggtatgcctcttcatttatttaggtctttctgattcctgtaattatcatttgtagttttttgcacagatccgtgggtgttttgttatatttatagctaaatatctcacttttcaaagctactataaatttttaaaatttgttttctaattatagcattgctattrcataaaaatattattaatttttctgtacttaccttgtatcctgcaatctcattaaactcacttctttgttctaggagacttttttgtagatcccttggaattgccttcatagacatatatgacacttggtgaatagggatagtattatttcctcc

SEQ ID NO: 190627 - DNA, 593 bp, Homo sapiens
aagctttcctcttctgatagtgaagcacttggatttaggagaagtaaaacaacatttaatcaaatattgatgacattttatttagwgttggcatgtataaaataagacatatatatatcatcattatgaatgtaagagtttcaaagacagctttattcaggtgtgtcctattggtgactcagataccatgatgtgacttttggaaatggtgactaaccctggggaagattttaaacaaaacaaggtaaatatttccccaattttcactgtagtttcatgattggataattcagtatatattgaattgtgcaaaaaaatattttgtgtttatatgcaaaacatagtctgagaaaaatataaatagatttttcacctatacgtatgtcaggtgggacttcaaagtcatgtaggacattgaacaattcttggttgggaccacctctatgaggcattgcagaatgtctacagctctgcccctgcccaataaatgcaccagtgcttcccaatcattggaacaaccaaaaatatgccctcaagtttccacagtgccccacccctgagaaccagcaacctagaggaactgaggaagaaga

SEQ ID NO: 190628 - DNA, 623 bp, Homo sapiens
attgatgttcccttagaattaaaaaaataattctatctgtggattctcgttctgtagaaaggcaatgttgcatgagagaaagcatatacattttgaatcagggaaacgtggctttccttattgggataatgcattgatgtcctagtgaccagaaatggtatgtaaattagcaaggcatgcacttgcgcatatcataacagatcacaaaaagacaccccttgctttgggatgctacagacgccacaaagacaaagaatttgcatgtggatttcagtcctcacgtgccttgcagccagacacctttatgcagagcacatctgtaaattgtggcctccgtaaaatacctggcatacagtaggtattaaataaaagtagcaattatatttatagttattattagtacatcattattattattatatacagcacccacctggcattgcatgcagacagatccttggattaacattcctctgcagttgaagtttttctattttaaagatttaaatcataggcacatagtagcacagtctgtcttgaagaagaaaaatgaaaggctgtagtaaatgrtgctattagaattatactttcctcattacagaagtaatatgaccctgctttgg

SEQ ID NO: 190629 - DNA, 489 bp, Homo sapiens
gaattcctcctgcctgccgagattggctttaggacgagggcatgtgtccattcctctgcctctccttccctggggatggtttctttgagtatcacagagtagcactccagtttgggtcgaggaggttggctgagctgctcgactctgctggcactgaggggcatcaaaccccagaatgcagtctgcagctgtggtgggcttcagccatattgaatcctatataaccttggaggctgggatgcacacttcrtttttatgcagcttgctttgcactttcattggcggtttattattgcaaagcatgatgctcccctcccccactcgcctctccacccaaagaagtgaattaataactagaaaacgagagagaaatgagatccagaagggtctgggcttctgaatgtcactgtgagcaaacagcggtggagagaaaaggttcctttccatctttatgtgcagtgctgtctgtgcattgacttgtttcctgac

SEQ ID NO: 190630 - DNA, 614 bp, Homo sapiens
acatatttggtaatgctgattaagtctccattcaggcataagtgtgcttgggtgaatgtggagtactatcacctggtttggagtttgcatgatcacctggactcctgtgtgcaactttactgggcctactgcctgaccttgacatgtcagagttcaaagacaaaggctagaaacggccgtgggttatccctggtattttacagctaccttctctaaattctgtagccaggcaaaaggggagaggggccaaatgagagagttttatctgacattctgaaagacatttttgaacaagattaaagatgaayttttactaaaggcatacacataatttacatatttaacacttctgctttcttttattttttcttctagtcagctaaattaacattaatctttttcagcaaatcatatgaagaatacttaggaaatttcaaaaatacttggattttttatgcctcacaaattaatggtaatgataacagagcacatcttttggcagtaatcatggattatgcttcattgtgcatcaagaattcatacttttcaagaagctaatttcaggtttcatggctgaaatttattcttggcctggaacaaactgtattctagaa

SEQ ID NO: 190631 - DNA, 544 bp, Homo sapiens
ttattgtttctgtagctgtgtaattttctttaaatttcttatttatactccaattctctgcagaaagtattcaatttggttttagttttctaaaaacatattagccacaattattctcatgtcacatctaataaactccaatatctacatcttctgtgttctgtttctattgtatgtttttactcttagttttttgctatagatcttctccactggattagttgcattttaggaacaaaaagcaccttaaaaggcctatagtaaactgaaagaattatattccttgaccatttacattatgatgggaaaagatcttatttattgaagtgaaaaatatgattttcttttttatctgctttattctcatcagaagatgatccrtacaaaatcttctttgttttacatatgcgtatatacaaacatgatattacaaaataatagatcatgtctatgccttattaaaaaatatctaatattttgagatatatagtttttaaacactgtgaaaatccatgaacaagacattagaaaaaaatttcataaa

SEQ ID NO: 190632 - DNA, 344 bp, Homo sapiens
attaccacagaaagatttttggacagtgctcttccagaataatattttctttttaggtatttgaatcatgtttgaacaaatattaaaattgccccatgtcaactgtgtacmaattaatccgtgcatattttatagtatttaataaaatactgtaaaggatagttgtcatcagccagccaacacctgttccctctagagaagtttacaagcaaactcacgtgaactgaatgagttgactgtagttatcttaatttgactttctttaagctatttcaagctttcctccacctcaagtgcaattgtttgaagctattagctagcattaatgtcaagtgactcccatt

SEQ ID NO: 190633 - DNA, 519 bp, Homo sapiens
ggcaatgacgcttagcagttcaaaaggcagcatgtgctccaagtttcctccaaataacacttaacaaaaaagctcagcggacttcctgtcycacacaggaagctggaatgtgttagcaagaaaaagagtgtttcggagaaagcaacatggatcctatttattcttccatggcaaaatatgcttgcaaatgggcttttctgagatacaatgatagaaatatatctcttagatggttctcttccttctcagaaacatttttagataaatcaaaatttcacagtcacagaggattttttaaattaattggactttttttccagttataaaagtaaaacctagagaaattttcttgctgacctagaatagtcacctgccatgttgtgagtctgtctgtgaaaaggccacgtatcaaggaactgcaggtggcctctaaaagcttagaatgctcccagacaacagcctgcaagaaaacaggaatctttgtcctacacctacaaagactcaactttgtcaacaacc

SEQ ID NO: 190634 - DNA, 589 bp, Homo sapiens
agactcctgacccatggagataataaatgtattttgtttcaagctgctaaggaaaaaagtagtgttagtttatgaaaacagtacagaaaagcataggtacaaaaattatccttaccacatcccacactgttaggtgaccactctaaaagctgtgtgtgtgtgtgtgtctgtgtgtgtctgtgtgtgtctgtgtgtgtgtgtgtgtaggggatgtatatgcatgtgtcttcggtaaaggctcacctcttctaatttagtaaggagtgcaattcaaagggcaggaatgagaacaagagaggtgaatccaaaaaggagtgatttctgacccagggaatatcaggttggggacagcttgatgatactaattgcttcatctctcaaggatctaaaaaaagaagtcatataagctgtaccttgggacatccatccagcagtggctagagcaagaggtgagtgaggttgagatgatctgaagtgyctgagatgataagatatgtctgatgcaagatccttcttgatattatttataaattttaatatatacactatcccacaacttactttttaaatgtactattatttacattag

SEQ ID NO: 190635 - DNA, 605 bp, Homo sapiens
attttatattcattaaccaatttctccccattctcccatccccacttccctttccagcctctaatacaattctactctctacttccattcgctcaaaatttttgtagaagaatgaaactagacccttatctctcaccatataaaaaaatcaagatggatgggttaaagacataaatgtaagaactaaatctgtaaatcattaaaagaaaacaaggagaaatgtttcaggacaaagattttaatgtgtaagacttcaaaagcacagacaataataacaaaaatagaccaatcagactatattaaactaaaaatcttttgcacagcaaaggaaacaatcaacaaagtgaagagacaacctgtagaataagagaaaaccttggacaacttctttaacgacactgagcctcagcttccccatacgtaaaatgggggaaaacattagggtagtctctatcagawggggctgtgtgagaattaaatgagtttgtacatataaaatgttcagaacagtgtctggtacaaagcaagcattaattaatcttggctgctattaatattatagagctggaatttgttgaagatgataatgtcagaggtgtttgaac

SEQ ID NO: 190636 - DNA, 548 bp, Homo sapiens
gcatggccagggtgcaaagcatgcctgtgactcttcataaaaagtatgggaactcttttttatttctggtcaagatgtatcagattatttattcttctgtgtgaagtaataaatcaggcacaatatataaaatcatttttagatattgaataacagtcagtgaaggacagtcatcagtgaaagaggggaaacaaataagtgagttctataatcaacaggccacagtcaaaggcagagtttgstggtctctttccctggggacacggagctgggagtatgagggaattgggggcacctagggtttacatgaatgagaactgattgcctcaatattggggcaaattagccttagactaaagatctagtcctaccttacaaaatttaaaaacaaaacattaaaaaattaaactgtttttatataactgcatccctgaaaaaaagtttaagattataaaagaatacagagatatctagcactcagcagagtaacatttataatgtttggtctccaataaaaaattatcagatatgcaaagaagcagaaaaat

SEQ ID NO: 190637 - DNA, 548 bp, Homo sapiens
gcatggccagggtgcaaagcatgcctgtgactcttcataaaaagtatgggaactcttttttatttctggtcaagatgtatcagattatttattcttctgtgtgaagtaataaatcaggcacaatatataaaatcatttttagatattgaataacagtcagtgaaggacagtcatcagtgaaagaggggaaacaaataagtgagttctataatcaacaggccacagtcaaaggcagagtttgctggtctctttccctggggacacggagctgggagtatgagggaattgggggcacctagggtttacatgaatgagaactgattgcctcaatattggggcaaattagccttagactaaagatctagtcctaccttacaaaatttaaaaacaaaacattaaaaaattaaactgtttttatataactgcatccctgaaaaaaagtttaagawtataaaagaatacagagatatctagcactcagcagagtaacatttataatgtttggtctccaataaaaaattatcagatatgcaaagaagcagaaaaat

SEQ ID NO: 190638 - DNA, 597 bp, Homo sapiens
tttaatattttaaaatatattgagacttgtttatgacctactagatggtttacactggtgaatgttccacatgcacctagaaagaatatgtattctgctgtctttggttggaaagttgcataaatgtcagagaggttatgttaggtcactgtgtttttcaggttttctacatccttactggttttctgtccacttgctctatcagttactgagaaaggggtactgaaatctcaactrtaactgtagatttgtctatttcttttcacttctatcagtatttgcttcattcacatattttgaaactctgctatgaagtgcatacatgtttattattattagtctttgaattgaccgctttaccatttgaactatccttctgggttagatttctcattctgaagtctactttgtctgatagtaatatggccaccccaactttcgtatcattactgtttgtgtggtattatcttttccagccttttatttttaaactatatgtgtcattatatataaaatggatttattgtagacaccatcgagttggttgtgctttttatccaatatggcaatctctgttttttaattagagtttccatt

SEQ ID NO: 190639 - DNA, 597 bp, Homo sapiens
tttaatattttaaaatatattgagacttgtttatgacctactagatggtttacactggtgaatgttccacatgcacctagaaagaatatgtattctgctgtctttggttggaaagttgcataaatgtcagagaggttatgttaggtcactgtgtttttcaggttttctacatccttactggttttctgtccacttgctctatcagttactgagaaaggggtactgaaatctcaactgtaactgtagatttgtctatttcttttcacttctatcagtatttgcttcattcacatattttgaaactctgctatgaagtgcatacatgtttattattattagtctttgaattgaccgctttaccatttgaactatccttctgggttagatttctcattctgaagtctactttgtctgatagtaatatggccaccccaactttcgtatsattactgtttgtgtggtattatcttttccagccttttatttttaaactatatgtgtcattatatataaaatggatttattgtagacaccatcgagttggttgtgctttttatccaatatggcaatctctgttttttaattagagtttccatt

SEQ ID NO: 190640 - DNA, 598 bp, Homo sapiens
aagcttcattctgaactgggcaacgtgatggaagcagtgcatctcctcttagccccccagaaaggcactagggaacaggtggcatttcacaagggtttaaactaagtttgtccaactcatggcccatgggccacaatggcttggaatgcggcctaacacaaattcataaactttcttaaacattatgagatttttttttttttgcaattttgtttttagctcatgagctatcgttagtgttagtatattttatgtgtggyccaagacaattcttcttctcccaatgtggcccagggaagccaaaagtttggacacccctggtttaagccatggggcagagaccactggtggggctgtgtgtaagggcattctgtcatatggtgcagcattaaaccataggtgaaagcaggagggagctgagtgaaccaaaggactctttgttagtgcattgtcctagaaagggtaggtcacatcatgacctgataatgtcaacaatgagtttcccagggatcttgtcattgactcactcattcattcaatcagcaaatatttattgagtgactgcaacgtgccaggagctggacagtcagcaagacag

SEQ ID NO: 190641 - DNA, 592 bp, Homo sapiens
tctggcatcatgtttttgttcattttctgttgttataacagaataccacagactgggtgatttataaggaaaacaagtttattcctgcagttctggggactggggagtccaagagcacagcaggcaccagatctggtgagggccttcttgctgcattgtaatgtggtggagggcgtcacgtggtgagagggtattagcatgcaggtcagccaccagtcctgtcatgggggccccatgctgatggccttatctaatcctaattatttcccaaaggccccacctccaatcatcatatgaattttgtgattaagtttccaacacataaaactaacatgtaggacacattggggacacattcataccatagtatatcacattgctcctgtttttgaattctggctcttctacttactggccgagtcccattgggcaattatttaatgtttyccccctcaaagttttctctgcaaaataagggttactagagtaataacaataaaaacaataattcgtgtttattgggtacttatggtgtgtgtcaggtatggtgccaggtgctttcccaacatttactttcagtctcacagcagcc

SEQ ID NO: 190642 - DNA, 545 bp, Homo sapiens
tttcttgtggctttcttctttgtttccttttaaattctgtttaaagaaatcctcctattatttgtactagagtttctgtgtgtgaagactagttttttcaaagaaaaaaaaaatgaaggtaggttcagcaatccaggcagacctatcaatcttgtctgtaattgggtctgccattggtragtagccacttgggaggaaactgctcacccaggtggagtgaatgaactgtttcagggccccgggcctccacagagggctgcacggtggcctcttgccagacagtatcctcgtggtgcctgtctcagctgcagactcaggttcagatcagagagcagtttgttcctctggtcatgcagataagcatctgtttgctctctctcttcctgccttcagcagggttggggtccctttagagaggcattgccattgaaaggcatgaagacttttggtgacaggaatagggaaactgagtcaccaagggctttgagtgcctttgtttggtggagggaagagcaagtaatagtagtttcatgacattcaaggtg

SEQ ID NO: 190643 - DNA, 545 bp, Homo sapiens
tttcttgtggctttcttctttgtttccttttaaattctgtttaaagaaatcctcctattatttgtactagagtttctgtgtgtgaagactagttttttcaaagaaaaaaaaaatgaaggtaggttcagcaatccaggcagacctatcaatcttgtctgtaattgggtctgccattggtgagtagccacttgggaggaaactgctcacccaggtggagtgaatgaactgtttcagggccccgggcctccacagagggctgcacggtggcctcttgccagacagtatcctcgtggtgcctgtctcagctgcagactcaggttcagatcagagagcagtttgttcctctggtcatgcagataagcatctgtttgctctctctcttcctgccktcagcagggttggggtccctttagagaggcattgccattgaaaggcatgaagacttttggtgacaggaatagggaaactgagtcaccaagggctttgagtgcctttgtttggtggagggaagagcaagtaatagtagtttcatgacattcaaggtg

SEQ ID NO: 190644 - DNA, 415 bp, Homo sapiens
tccaccttgcctactggatatgctaaatatgtgaaatgtattgtaaactgcaaactgaaatatatacattgcatatgttttcattgaaaatattcacttcttatttctgaggatgggttttcatacaactcaacccctttccaaatatrggaagagttgtagcaaaaaatgttattgagttaggaacaggacatcgcctccatgcctgccggctatactgcatttggattcacagggaccaggggtgaaaaggccagctttcttggtcctgaactcgttccctcaaattttagttgttcagttcatacataagccagtgacacactttcttccctgaggggtttcagaattatgggccactaaatgctgctgatacaaacagttcagcattacttgaaagaatggagttactgga

SEQ ID NO: 190645 - DNA, 415 bp, Homo sapiens
tccaccttgcctactggatatgctaaatatgtgaaatgtattgtaaactgcaaactgaaatatatacattgcatatgttttcattgaaaatattcacttcttatttctgaggatgggttttcatacaactcaacccctttccaaatataggaagagttgtagcraaaaatgttattgagttaggaacaggacatcgcctccatgcctgccggctatactgcatttggattcacagggaccaggggtgaaaaggccagctttcttggtcctgaactcgttccctcaaattttagttgttcagttcatacataagccagtgacacactttcttccctgaggggtttcagaattatgggccactaaatgctgctgatacaaacagttcagcattacttgaaagaatggagttactgga

SEQ ID NO: 190646 - DNA, 415 bp, Homo sapiens
tccaccttgcctactggatatgctaaatatgtgaaatgtattgtaaactgcaaactgaaatatatacattgcatatgttttcattgaaaatattcacttcttatttctgaggatgggttttcatacaactcaacccctttccaaatataggaagagttgtagcaaaaaatgttattgagttaggaacaggacatcgcctccatgcctgccggctayactgcatttggattcacagggaccaggggtgaaaaggccagctttcttggtcctgaactcgttccctcaaattttagttgttcagttcatacataagccagtgacacactttcttccctgaggggtttcagaattatgggccactaaatgctgctgatacaaacagttcagcattacttgaaagaatggagttactgga

SEQ ID NO: 190647 - DNA, 415 bp, Homo sapiens
tccaccttgcctactggatatgctaaatatgtgaaatgtattgtaaactgcaaactgaaatatatacattgcatatgttttcattgaaaatattcacttcttatttctgaggatgggttttcatacaactcaacccctttccaaatataggaagagttgtagcaaaaaatgttattgagttaggaacaggacatcgcctccatgcctgccggctatactgcatttggattcacagggaccaggggtgaaaaggccagctttcttggtcctgaactcgttccctcaaattttagttgttcagttcatacataagccagtgacacaytttcttccctgaggggtttcagaattatgggccactaaatgctgctgatacaaacagttcagcattacttgaaagaatggagttactgga

SEQ ID NO: 190648 - DNA, 479 bp, Homo sapiens
ccttacttcaaaatgcggacttagttgctccttcatccatgttcctactgcagcktgttcatcccttcatcatagcttgtacaatgtcattttttcataggtcaggttttctcctgagtgcctgtctccccagctggtccacattactgttattgtttcagtcttgtgactcagtcccggatcatggaatgagagcagaagagaggtctccatcttccagatcgctttcttcttgtccacaggctgggtcatggcatgatggtgaaatgctatcttcatccactggtgtggccaaagccaagggcatatcctagaggatgctcagtccctgatttaatcacccatctgccctgggcagtgcatagaaccccttgagttagaacagctgggtttgtgccacaagcaacataaattatagactacttcacttttcttcatgagcttcgctaatcgttactataagtcagaacataacatgt

SEQ ID NO: 190649 - DNA, 628 bp, Homo sapiens
ggaaataccacatgatctcacttatatgtggaatctaaaattgtcaaactcatagaagtagaaagcaggatgacgcttaccagagactaggttgggggaagaatgcagggaaagggaagacattggtcaaagagtacaaagtttcacttagacaggaaggataagttctggtgtcctactgcacagcattgtgactacagttaatamtaacatattgtatatttcaaaattgtggaaagagtggatttgaattttcccatcacaaagaaataagtatgtgaagtgatagatatattaattagcattatttaatcattctgcaaagcgtatatgtaccaaaacatcagtttgtaccgtgtaaatctatacaattattatctatcaattaaaaataacatttaaaaaactgaagcaaatgacacatttgattagtttcagttagaaaactagaaagaaaatgcattctatacacaataattttgcctatgtttgtctccaagaagtctaacatattaatttttattccagatatatacatacatgaagaattttcaggaaattgttataataatgtacaagttttcagaattaagttcttgagagtaatagtcaaaggaaattgccagac

SEQ ID NO: 190650 - DNA, 628 bp, Homo sapiens
ggaaataccacatgatctcacttatatgtggaatctaaaattgtcaaactcatagaagtagaaagcaggatgacgcttaccagagactaggttgggggaagaatgcagggaaagggaagacattggtcaaagagtacaaagtttcacttagacaggaaggataagttctggtgtcctactgcacagcattgtgactacagttaataataacatattgtatatttcaaaattgtggaaagagtggatttgaattttcccatcacaaagaaataagtatgtgaagtgatagatatattaattagcattatttaatcattctgcaaagcgtayatgtaccaaaacatcagtttgtaccgtgtaaatctatacaattattatctatcaattaaaaataacatttaaaaaactgaagcaaatgacacatttgattagtttcagttagaaaactagaaagaaaatgcattctatacacaataattttgcctatgtttgtctccaagaagtctaacatattaatttttattccagatatatacatacatgaagaattttcaggaaattgttataataatgtacaagttttcagaattaagttcttgagagtaatagtcaaaggaaattgccagac

SEQ ID NO: 190651 - DNA, 473 bp, Homo sapiens
tgaattctttgatgaccctttctctccaggccatgagtttggagaaatcgaggagaggaaggtttacttctggttcatgcttagtytgaatagcctctgaatttcaagtaaatgtgggaaggatctcttataagactccttaccttgatagttctgggcctgattagtttctacttttcctaactgaaactccattgtgaggtattagaaaatgatctcaagacaaaatcagctgcgatgctctcacattttttgttacctgagttcataattttctacaaaaactggcacaaatattctgcactattttaagcactccaatcccattaaaaacttaaagaaaatattttgagcatttataaagcaagataaattatcctactaaactagctcattgctacaggacatggaatgtcaaatatactttttataaagtactattttaggcatttattttaaaataacaaaatatg

SEQ ID NO: 190652 - DNA, 473 bp, Homo sapiens
tgaattctttgatgaccctttctctccaggccatgagtttggagaaatcgaggagaggaaggtttacttctggttcatgcttagtctgaatagcctctgaatttcaagtaaatgtgggaaggatctcttataagactccttaccttgatagttctgggcctgattagtttctacttttcctaactgaaactccattgtgaggtattagaaaatgatctcaagacaaaatcagctgcgatgctctcacattttytgttacctgagttcataattttctacaaaaactggcacaaatattctgcactattttaagcactccaatcccattaaaaacttaaagaaaatattttgagcatttataaagcaagataaattatcctactaaactagctcattgctacaggacatggaatgtcaaatatactttttataaagtactattttaggcatttattttaaaataacaaaatatg

SEQ ID NO: 190653 - DNA, 526 bp, Homo sapiens
  misc_feature (1)...(526): n = A,T,C or G
agcacatggtatgttctgaatcttaaaagtctataatctctcanggcattaactaatattttgacgggctgaagtacaggatgaaagtaccattgaagcactctattctataagcttctccaaacaaatctcagataaaatgattctttcagtaggcagatggataatttattttctatccttctacactaaatctttttatcttctatctacaaggtaataaatttccaattcakgtgcctcaagctgtgtgttgccatttatctttctctgaattgaagacatatgcatcctgttaagtctataaaactttcttcttttattgttattgaatgtttatctccccactggccactggctttatctgtttacaactcctaccatgacacctcatagatagattatctctgttgctcttccagctttctattgctgcatatcaaaccaatcccaagttcacatattactgaagttgtgaagaaacaggagttctcacacaaagttgatgagaattttaattggcaca

SEQ ID NO: 190654 - DNA, 556 bp, Homo sapiens
gaaatcgtgttctttgcagcaacatggtggcaggtgaaggccattatcctaagcaaattaaagcagaaacagaaaaccaaatactgcatgttctcacctacaagtgagagctaaacattgggcacatctgggcataaagatgataacaaaagaaactgtggactagtagagtgggaaggcggggagggaacagggttgaaaaactaactattgggtactatgctcagtacctgagtgatgaaatcatttatattccaaacttcagcatcatacaactgcacatgtactccctgaatctaaaataagrgtttaaaaaaattaataaagtagtcaaaaaataaaaaatgaaataaaaataaaataaaataaaaaacaaaagcaacaaaatagacagaagttagacaaagaacagacaatgattttcacaaagaggctgtctcaggaaaacatgttatggtatttttcatgttcttctatgtgatcctctgcatttttttttgttataatgaatatgtattgtgaaaagaaaaggtcttttccttaattctaaaaatgt

SEQ ID NO: 190655 - DNA, 525 bp, Homo sapiens
aaacagtttctctctgaaaagagggagtgaatctttgtggcttaaacaaagatgagtaatcttttaaattggctacattctgaagctcagttcaactgacaaacctaaactttctttttaagtgtccaaaataataagaggttttctataaggataagttctgaagataagagacaattcttcccagctgaaagccaccgtaagtgactaaggtcttatggaagtgttggagcttatcactcacaatgaaatggtcttacaaggagtccattaagaagaacaggaaaccttgcttaatctggtaggcacaactaaaggctgatcacctggtaccttaagcatccaagtttyctgggaccatcaagacacataaaaaggaagaacttactcaaaggtaaaataaggagcagttattctgataagcagcacacttattccaaagcaactcccattagatctttttggtcattcaaaaggaaagtctaaattatgggaaatcatacttctaaaactgaatcttcctcc

SEQ ID NO: 190656 - DNA, 606 bp, Homo sapiens
tcattggtatgatcattcagcttccatcttcatactacaaatgggtattgataatgtcatttagcataaagaagccctaaccaattacacacaaatgatagctacatgggtattttgttattaaacaataaagttatcttatgagaaaaagctatattatagaacatctggcttcagacatatagcagcccaaggggaaacttgcatgatcattaaaactgagtgctatgtctatataccagataaatcagataatattattaaaccaatggctaatatgaaaacccaaataaataaccttttgaatccaacaccctttctaaacaattggctaagaagatggtttggatcttggggaacttggtggcaaaaactgttacttactctaggaattataatcatttattgtgttttattgtttttgtcttcatttttgctgcaacatctctttgcaatggagtaaataaatgcatgaccaaaaaaactaaaataatggttgctcaaagaattgcattaattgaagatgtagctgtttagcctgtwttaagccacaaattcactttctttatgttgtcttaaatttggtctgtactctattttatagct

SEQ ID NO: 190657 - DNA, 517 bp, Homo sapiens
cacaccaactcctccacatccagaccctgtccatcacagagataaacttgtctggttcattgttcgtaaaacccaggctagttgaaaactattttgggtttcttactcaaatcagatttcaactgtgatttttcaaaagtcaataggttagtacagtggcctgttgtgtcaacagagccctggaaaaaaattaatcatgaaagcaatagaaaaggtcaaaaggaagaacctgaaaatgctataataaagacatcccagagcctattaygtgtatttctcaggtgttttaattcaaaagcagaagcatgacaaagaaaataagatgatagtgctcaatcatggttgctgaaagggaaaggtgacataagatattagcagggcatgggaacaaatttcagcagcttatgctgacttaatattctctaaagaatctaatgaaagaggagaaattctaatagaagtaggaaaagaatctctgtcaacaaattatcttttaagtattaggtgaagttaatga

SEQ ID NO: 190658 - DNA, 625 bp, Homo sapiens
ttcaacatgggttataagacattgcaaaaacctaaggcagaacttggttccacatggaagctttggaaagccttgaggacttgaaagaagaatgcttagcactacccattgggggcttttctgaagagctagcattcaagatgggccttggagcaagggctggctttcatcaaaagggacttaagtgtgttggaaagagaaagcagttttgataaacagaagagcctgcctaagtggaagtctagatttgggagatgcagcacgtttgaaaaacagtgtctgatttgattagccaggggcagtggtgagagacaaggtctaaaaggaaggtgtgggtaggcaggacccttaagtagtttatagttagtttggaaaaaatgtagaaggtgttttctcatctgtcctctgttttgggaaaaggactccagctctgttttactttaatttaattttactttaattcttcacaattttatgagagatacatagatacattcttaacataggaattacaataytgaaaagaaagacaaactccctttaccagcattgtagactttttcctctctctgtctctgtctctcctctctctctctctctgtgtacatataatacacacacaaac

SEQ ID NO: 190659 - DNA, 641 bp, Homo sapiens
agcttccaagcttgggtcagaattgaatcaaggtccacagaactgggatcaaacagawatcaagtctgtaaggggtaaatctctggaatattaaagggtcagactggagagcaggaagattagttgttatatggaaagttgcaatcacaaggtttttttgttttgttttctttttttccctccaaggcagagtcttgctctgttgcccagcctggagtacagtagtgtgatctcagctcactgcaacctccgcctcccaggttcaagcaattctcctgcctcaacctcccgagtagctggaattacaggtgcccaccaccatgcccggcaaatttttgtattcttagtagagacagggtttcaccacgttggccaggctggtctcgaactcctgacctagtgatccgcccgcctcggccttccaaagtgctgggattataggtgtgagccactgtgcctgtccttttttttctttttctttctttcttttttttaattgaacaaggaaggcaattctcttttactcaattttatcaaattcttgagtctatggtttcctagaaaattaaaggcaaagcgttcatctttagcccctcctgttcacaggcattcctcatgcaactctttttgcagtgctctgt

SEQ ID NO: 190660 - DNA, 641 bp, Homo sapiens
agcttccaagcttgggtcagaattgaatcaaggtccacagaactgggatcaaacagaaatcaagtctgtaaggggtaaatctctggaatattaaagggtcagactggagagcaggaagattagttgttatatggaaagttgcaatcacaaggtttttttgttttgttttctttttttccctccaaggcagagtcttgctctgttgcccagcctggagtacagtagtgtgatctcagctcactgcaacctccgcctcccaggttcaagcaattctcctgcctcaacctcccragtagctggaattacaggtgcccaccaccatgcccggcaaatttttgtattcttagtagagacagggtttcaccacgttggccaggctggtctcgaactcctgacctagtgatccgcccgcctcggccttccaaagtgctgggattataggtgtgagccactgtgcctgtccttttttttctttttctttctttcttttttttaattgaacaaggaaggcaattctcttttactcaattttatcaaattcttgagtctatggtttcctagaaaattaaaggcaaagcgttcatctttagcccctcctgttcacaggcattcctcatgcaactctttttgcagtgctctgt

SEQ ID NO: 190661 - DNA, 641 bp, Homo sapiens
agcttccaagcttgggtcagaattgaatcaaggtccacagaactgggatcaaacagaaatcaagtctgtaaggggtaaatctctggaatattaaagggtcagactggagagcaggaagattagttgttatatggaaagttgcaatcacaaggtttttttgttttgttttctttttttccctccaaggcagagtcttgctctgttgcccagcctggagtacagtagtgtgatctcagctcactgcaacctccgcctcccaggttcaagcaattctcctgcctcaacctcccgagtagctggaattacaggtgcccaccaccatgcccggcaaatttttgtattcttagtagagacagggtttcaccaygttggccaggctggtctcgaactcctgacctagtgatccgcccgcctcggccttccaaagtgctgggattataggtgtgagccactgtgcctgtccttttttttctttttctttctttcttttttttaattgaacaaggaaggcaattctcttttactcaattttatcaaattcttgagtctatggtttcctagaaaattaaaggcaaagcgttcatctttagcccctcctgttcacaggcattcctcatgcaactctttttgcagtgctctgt

SEQ ID NO: 190662 - DNA, 616 bp, Homo sapiens
taccatacagtgcagacacagcactttttcattttttttcttttcttttttataatttttccattccatgaacgctctctacagtttttctttgagacttttgtgacttctgatctgcagtctttctgcctggaccgcactcctctaactcttcactcttgaaaaaatcttacatctttcaaagcccagatccagttcatttctgtgaagctttccctgacccatccaaggagaattaattactctatattttttgcttccatatttttttcatccaaccattatagcatgcatcacattcttccagagttaatttctgagaggtctgattcactagctagattgctagcttcttgaaggcaacagctgcagctcattcatctccaaagcctatacattaagcacagtactgggcatataataggccctcagaaaatgtttgctgaattaaacttaatttaaatgatacataatgggaaaaataatatttcatatatargattggcaaactcactttagagacaactgtttagagacatatctattccgaaaatgagatgcttcaacaatcacagtgcaaaaggaaataattaggtctgccatacacacaaactta

SEQ ID NO: 190663 - DNA, 571 bp, Homo sapiens
ctgaggtgggaggatcacttgagcccaggagttcatagttgcaaggagctatgatttgatcatgtcactgcactccagcctgggtggaagagtgacaccttgtctcaaaggaaaaaaataaataaataacaaaaaacttagagtttcagaccatcctgtatggctgagaaaaatgttacaaaacttttcacatactgcagtagtagattttgatagagagattggaacagtgacaaaaattttattcttgtcattattgaaaacagtaggccataaacatgcattacaattgcatagtattattgatattattgtcaggtgatgtgtgtaggagtctcaattgttgagcaaagtttgcattcattggataaggggatcttgcccatgaaaatggagggctgtctgtagtaggtaactctgggaagctgctattccaatcatttaaatgtgttggcattaattttttttaatttttatatgtaaggttagggtaggagtagggaaaaaaggaagaattaattcctttagttggaaagtagatatccygtgataaatatttgtaggaattctt

SEQ ID NO: 190664 - DNA, 573 bp, Homo sapiens
tttcaatttctgtcaccatcaaacgggtataaaagagaaaaagcataatacataatcctgttgtcagctaacagggagagcaaggagagagagagaagcagaaagcatgcactatgcgctaagttattttatggttaaataattatactggtgttaatttcatgtggtgactttgacttcattaacatatatcacattttatggctattttgtcaatttctggatatcataaaactattcaccagtagcttgtcataatcaatcttcctcttcctaccccccagcccatgaaaatgtttaactggatatagagtatcttaactttttgagtgatttctggggcagaggagctgaggctgtacagaggtgtggraaagattaggagggagctatcttatgtggataaagtcgtgatgaataagtgtagtattgagaggtgaagccagctggacttctgggttgggtagggacttgaagaactcttctgtggctagctagaggtttgtaaaatgcccgaatcagcactttgtaaaaacgcacccatcagtgctctgtggctagctagaagtttgt

SEQ ID NO: 190665 - DNA, 231 bp, Homo sapiens
gtacctgtttggtttatttttgctttctggtacctcatactgtgcctggcacataatatgtgctaaagctatacatgatcagaaagwcatatttctttccccatatatgggagaacaatacactggatttttttatagtgttgattttatggttgttttgagtggtttagggcagtaccaaggctagtcagtaaccttcacaaagccattcattcgtaaatgaaattgtca

SEQ ID NO: 190666 - DNA, 538 bp, Homo sapiens
agacaggccattttattcttccctggactagttattttccgtcatagagactgtatggcagtgatatcagggctctcagccacccccgacctctttcttcttctcctttttttttttttttttttatccaaaggaacaacatctgggtaattagaatgattagcgtttttttatagctagaattcttgaacatttgtgttggctgagataatggaatttcccctcacataatctatcttcagcaatgctgagaaacataattttcatattatgaaagctcggtctttccttttggggtaaaaatycaagctatctctgagcatagatgagaaaaagtgattttctaaatcaacacctgtcagagtaagtttctctttcagaagttttctgtaagttactctaatttttatcacggttcttaattgatcccactgtttagccagatataattttgatgtttactccttgtcctttctattgaacttacattatccttcttattcttcatgccttcttaggaaacacttccttccagata

SEQ ID NO: 190667 - DNA, 623 bp, Homo sapiens
tttttcttttataaaatcaatttcattttattaacttttcaattatttttctcattatatctatcacctccttttttggttttctgttttgttacatttgtctgtcatctccctgccctccattttattcttttatttcctcttctcaaccactggagtgattctcccttgccactcttctgtattgcactcaaccttaggattgcataacaacccatgaacaaataaatccccagaaacttcttttttcagaaatcagataagaagcaggacccagtagaaagaaatctgctggagtttgatccagtgtcctatctcaagattgctatcctttgcaagtgtgtcttcttcaccttcctgtgaagtcccctctactcctgaagctgtggctcagagagaacaagaccaaactccctgcacagaatgccatactcttttgatggtgaagcaagatattcagcatgggttttttcaggacctccaaaactgcattctgtttttagaatagctgtttaaataccagcttagaaatgccagacctttcctaaggacacaatagtaagagattytaaagcaaagaaagttggcaatacatcttcaatcatgctacttaaaaaagtaaa

SEQ ID NO: 190668 - DNA, 618 bp, Homo sapiens
agaccagtgctcaataggccacaggtgggtacccaattcacaaacatggttaggactttgttgtgtgggagactactaaaccaaagaaatggtgagaatggtaacattatcctgacatcaaaactggaagcagaggccaaacactggatgataaagaggataaacagctgtggcttcttggtagagacttgcaaagtttatgttccttaataacatgtttatggataaagggrtagaagtagtacctacttttttgatcaacatacatatctattgtagatgtctgtatattatttatgtatgcactatggagacattgggggagaaagagagagagagaatagaaagcgggccaaaagaacagagtgaggaaaggagaaaagaaaagagaatgcgagctaaagagacagagagagagagagagagagcgtatgactgagaatgaggatgtgagagagaagcttgattttcttatatctacaaataaatacatattttgaaacatgcactgttcattcattcagtgaacgtttattatgtacctatttagtgcattggtggtctctttggatcctaaaagaaacaaacacaaacaaaacaaaactaaaaaactgacag

SEQ ID NO: 190669 - DNA, 430 bp, Homo sapiens
cactcttcctgtgaaatcttttgaagtctcatgagctgatgctgactgaaaagaggctgctgatagcaagtgtttgtcattcacagtggccgcctgatatctgcccatccatgtgtacgtytggagatttccattccccttctaaccacatttgatgtctcagtgaagagattacttccactactggagaggaaactgactttctcagcttccccttcagctgtggcataagctacattttgagacctacattttgggaagaaaataccccagggccactggctatgcttaagacactttgagaagcaagtggtacaagttctctctctggaagcagactttttttttttcctgctcagaaccaattctaaggtggtttggggcattttcttttcccgtaaccttgagccttgttctccagttctgtcat

SEQ ID NO: 190670 - DNA, 514 bp, Homo sapiens
aagtatcttttagccatttgcttttttttaagtagaatatcaatttattttataagacatagatctaccttcttcttcgtaattgttgcataatgtttcatagtttggatgtaacacagctyattcgactatccaaacaattcccaattataaacagtgatacaatgaatatctttgtagagcttttttatacattgaataaatttttcaacatgtcagctgtaagcctaacaggaacaaggcagtgacatttctaacaagcagtcagtaactcatcacaggctatcaaggcaaaaattacctgccataagatgttaatattttgctttcatagatcagcttcatggaagtaacatgcaatgctaggatagtagcaaaaacaaaggaaattggcatacatttaatgaataaatacaacttaatcaatccagaaatatttatcaaagacttgcctacctggtgccagggtttctgttacaggtaaggaagaacaatggtgcacaagacacagatt

SEQ ID NO: 190671 - DNA, 514 bp, Homo sapiens
aagtatcttttagccatttgcttttttttaagtagaatatcaatttattttataagacatagatctaccttcttcttcgtaattgttgcataatgtttcatagtttggatgtaacacagctcattcgactatccaaacaattcccaattataaacagtgatacaatgaatatctttgtagagcttttttatacattgaataaatttttcaacatgtcagctgtaagcytaacaggaacaaggcagtgacatttctaacaagcagtcagtaactcatcacaggctatcaaggcaaaaattacctgccataagatgttaatattttgctttcatagatcagcttcatggaagtaacatgcaatgctaggatagtagcaaaaacaaaggaaattggcatacatttaatgaataaatacaacttaatcaatccagaaatatttatcaaagacttgcctacctggtgccagggtttctgttacaggtaaggaagaacaatggtgcacaagacacagatt

SEQ ID NO: 190672 - DNA, 581 bp, Homo sapiens
aaaacaaagataaaatcctctggagcatggggtaggaggcaaagcttagagagttctgatctcctggcatttattcatagtcacaatttttacgaagattggtgatccagctcattcagggaacgtttgaactgtcatcacatttgtgccattgcctttcaccaccaaactagataaacattttaccaatggttcttttttccatttctggtcacatcgcctgtaaacattcaaaaatggtgtcttttcacttctcctttgagattgcattcttcaatgtcatccgtaactccatagtagccaaattcagtgatccttttttaacgttcatgctccttaattttctgcaacattcaattgtaattatattgcctcttttctcaaatctcacccataccrctttggcttccatctttctttctgttcactaattgataaccttcaccaaatgacagaaagcagaaaagagagcacacatttatgaacttgcattatgacctaaaatgattaattcatattcttataagtttcattgaatcactctggctgctctgttgagaataactataggaagccaagaa

SEQ ID NO: 190673 - DNA, 581 bp, Homo sapiens
aaaacaaagataaaatcctctggagcatggggtaggaggcaaagcttagagagttctgatctcctggcatttattcatagtcacaatttttacgaagattggtgatccagctcattcagggaacgtttgaactgtcatcacatttgtgccattgcctttcaccaccaaactagataaacattttaccaatggttcttttttccatttctggtcacatcgcctgtaaacattcaaaaatggtgtcttttcacttctcctttgagattgcattcttcaatgtcatccgtaactccatagtagccaaattcagtgatccttttttaacgttcatgctccttaattttctgcaacattcaattgtaattatattgcctcttttctcaaatctcacccataccgctttggcttccatctttctttctgttcwctaattgataaccttcaccaaatgacagaaagcagaaaagagagcacacatttatgaacttgcattatgacctaaaatgattaattcatattcttataagtttcattgaatcactctggctgctctgttgagaataactataggaagccaagaa

SEQ ID NO: 190674 - DNA, 497 bp, Homo sapiens
cttatacacgactactctttaatggtaaaaaaawtttttttaagtcatcaaaaaatggaaagaagttataaaagaaaaacttccagaataatggctattagtcaaagtctcacaaaatattaatgttctgccttatgtgtgcatgtttatatgtggagggctaatatatgaaagtagggttaacagataaacattaaatcctataaaatgatacaaaacaaaaatatttgcatggttagattgacccacagatgcgataaggaaaatacgtgactaggcaactcagcctaggtgaaaatgaaaaaagttattaatatcaaaacagaaattccattttgaagatactattaggttaaattacttaaataatgttccagttgtcacactgcaatgacacagtgacatgacgccactacctacttcctcttccttaaatcacttcctcaactgttcttttctaaaatacgatcatacgttctgagaattctatcaagaga

SEQ ID NO: 190675 - DNA, 497 bp, Homo sapiens
cttatacacgactactctttaatggtaaaaaaattttttttaagtcatcaaaaaatggaaagaagttataaaagaaaaacttccagaataatggctattagtcaaagtctcacaaaatattaatgttctgccttatgtgtgcatgtttatatgtggagggctaatatatgaaagtagggttaacagataaacattaaatcctataaaatgatacaaaacaaaaatatttgcatggttagattgacccacagatgcgataaggaaaatacgtgactaggcaactcagcctaggtgaaaatgaaaaaagttattaatatcaaaacagaaattccattttgaagatactattaggttaaattacttaaataatgttccagttgtcacactgcaatgacacagtgacatgacgccactacctacttcctcttccttaaatcacttcctcaactgttctyttctaaaatacgatcatacgttctgagaattctatcaagaga

SEQ ID NO: 190676 - DNA, 526 bp, Homo sapiens
atgacagtggaagacgacctgcaggtgtcacaaaggtgctgatggtctcaggtccctgctggtttgcttgacacaaggcaagggaagttatgaaggtggcctgtgatctgtatggcagtgagaaagtcactacttgacattctcatcctttagagagtgtatccacaaggggatgcgttaaaatgcaggtccctgggcccctcagccaaagtttattattattattattattattttgagacagagtcttgctctgtcacccaggctggagtgcagtggcgtgatctcgtcagccagaggagtttttaatccagtgggtctgagctggggcccaggaatctgcgttttgaacaggtttacttccatccccagytaaagtactttggctggtccctgggctagactgtggacaaccttggcctctacagaagagaggcaagacaatacagattaagagcttggctttggagtcaaacagttctggggtcaaattcccattgcctcttagctgtgtaacctggaaagg

SEQ ID NO: 190677 - DNA, 423 bp, Homo sapiens
ttttgcactttgagaaaaatgctatagtgtgtaatctttcaaatcccttccccttggtgggaagaagaagttatatacacagagttactcagaggtggaaagggggacccttggttggattcatgttcttggaataaattgctctattgaagacttcaggtttcacagggagagaagatcatgttttggtatwcacactaaagaaatttagctggaacatccccatcatgaagtccacagaggacccaaggacagtgacaatgacagtgagttcaaaatgaagtgtgttgtcaggtaaaatggactctctttgaagtccaggattgcagagcaggggtcttcagtccctcctcccaccccataactgctaacagccaatctgggaactggtgaatcagcagtaagggtcactttttctgtgcc

SEQ ID NO: 190678 - DNA, 527 bp, Homo sapiens
ccatgcccagctaatttttgtatttttagtagagatggggtttcaccatgttggccaggctcttctcgaactactgacctcagatgatccacccgcctcgacctcccaaagtcctaggattataggcatgagcaaccatgtgtggcttttttttttttttttttttgagacagggtcatgcactgttacccaggctggaggrcagtggtgcaatcacagctcactgtagcctcaacttcctgagctcaagtgatcctcccatctcagcctcctgagtagctgggactacaggtgggcaccaccatgcccagctaattttttattttttgtagagacggggtttcgttgtgttgtccaggctgttttccaactcctgggatcaagtgatcccccaggccaggcctcccaaagtgctgagattacaggtgtgcacagctgtgcctggcccaggctcatttcttactctgtttctctcttgcctgttaaagagagcagttcagcagggctgctatcacactgggtgagtg

SEQ ID NO: 190679 - DNA, 600 bp, Homo sapiens
tgttggtttcttagtttaaaggattttttttttttgagacagggtctcactctgttgcccaggctggagtgcagtggcatgatttcggctcattgtagcctccrcctcctgggttcaagcgattctcttgcctcagcctcctgagtagctgggatcacaggcatgggccaccacacccagctaatttttgtatttttagtagagacagggttttaccatattggccaggctggtcttgaactcctgacctcaggtaccctcccgccttggcctcccaaagtgctgggattataggagtgagacaccatacctagccaattttaattttaaaattgtatttattgatttattcatttatttttagattcagggtctctccacctcccgggctcaagtgaccttcccatcccagcctcttgagtagctggaactacagggtcacccaccacttttgactaattttttattttttgtaggatggggtcttgctatgttgccaaggctggtctcaacctcctaacctcagatgatcctctcacctcagcctctcaaagtttggggattacaggcatgagcctccatgcctggcttgcctccagg

SEQ ID NO: 190680 - DNA, 534 bp, Homo sapiens
cctgagaggacagtggaggacagtaacacagtacctagatacaggcacagataagggaggtcagtgatctcagagaagtggtcagaaaactctcacacaagaaaccacagtaatgctgacttcataaactggggctggaacttagctctgcattgttaacaaagtaaattacatgaaggaaagcatgttttggtaaggattttaagagtataaacagggttattgaggcataaagatccagaaaccattaaattttaaattattcttgtatttttaactgatgtaggcctcctaagaatctttatcaggaacaatttattagccyaatttgtactaataaatatgcctaaaagaagaaaagaagcaactttaaaaaaattattttggcctttttatttgtttgcttgtttttgtttatttcagtttagaatttagatcatattttcaatcttactcggcctgattcagcccaattgaactggttagaactcccagtataatcttgtatagatatagtgaggacagacattactg

SEQ ID NO: 190681 - DNA, 534 bp, Homo sapiens
cctgagaggacagtggaggacagtaacacagtacctagatacaggcacagataagggaggtcagtgatctcagagaagtggtcagaaaactctcacacaagaaaccacagtaatgctgacttcataaactggggctggaacttagctctgcattgttaacaaagtaaattacatgaaggaaagcatgttttggtaaggattttaagagtataaacagggttattgaggcataaagatccagaaaccattaaattttaaattattcttgtatttttaactgatgtaggcctcctaagaatctttatcaggaacaatttattagcctaatttgtactaataaatatgcctaaaagaagaaaagaagcaactttaaaaaaattattttggcctttttatttgtttgcttgtttttgtttatttcagtttmgaatttagatcatattttcaatcttactcggcctgattcagcccaattgaactggttagaactcccagtataatcttgtatagatatagtgaggacagacattactg

SEQ ID NO: 190682 - DNA, 613 bp, Homo sapiens
cagtcacttatgttcttggaatagttgacacagttataagttaaatctaatttttttccawagaaatattacctcaaacgtagcacacaatggatactcaacaaatcttaggatctactctattattttctgtgctgttgtggaaatgaccacaaaaataccacctatatttaactataaattatatattagtaacttccctatgtatttcacaaagttgttattgagatcaaatgagatcaaggatgaaaagcgtatgataaactgaatcatactactaatatataaatgcaaagtattaatatggcattatacttaactgatgttctcaattttcttacaaatgtagcactaaatttagagctagatagatctttaaagatccttgtatccaagcttccaatttgaagttgatgacactgaggttttaggatgcaaaggtgacttctcaggccaaacagatggtcagtataaaagctgagactagaccccaagggccctaacttagacctcagtgctccattccctacactgtgctgccaataattctttccttgttttgctacaacaaataagaagtaaaagagacaccttaattagggtcttggaattc

SEQ ID NO: 190683 - DNA, 606 bp, Homo sapiens
ttatgttcttggaatagttgacacagttataagttaaatctaatttttttccatagaaatattacctcaaacgtagcacacaatggatactcaacaaatcttaggatctactctattattttctgtrctgttgtggaaatgaccacaaaaataccacctatatttaactataaattatatattagtaacttccctatgtatttcacaaagttgttattgagatcaaatgagatcaaggatgaaaagcgtatgataaactgaatcatactactaatatataaatgcaaagtattaatatggcattatacttaactgatgttctcaattttcttacaaatgtagcactaaatttagagctagatagatctttaaagatccttgtatccaagcttccaatttgaagttgatgacactgaggttttaggatgcaaaggtgacttctcaggccaaacagatggtcagtataaaagctgagactagaccccaagggccctaacttagacctcagtgctccattccctacactgtgctgccaataattctttccttgttttgctacaacaaataagaagtaaaagagacaccttaattagggtcttggaattc

SEQ ID NO: 190684 - DNA, 606 bp, Homo sapiens
ttatgttcttggaatagttgacacagttataagttaaatctaatttttttccatagaaatattacctcaaacgtagcacacaatggatactcaacaaatcttaggatctactctattattttctgtgctgttgtggaaatgaccacaaaaataccacctatatttaactataaattatatattagtaacttccctatgtatttcacaaagttgttattgagatcaaatgagatcaaggatgaaaagcgtatgataaactgaatcatactactaatatataaatgcaaagtattaatatggcattatacttaactgatgttctcaattttcttacaaatgtagcactaaatttagagctagatagatctttaaagatccttgtatccaagcttccaatttgaagttgatgacactgaggttttaggatgcaaaggtgacttctcaggccaaacagatggtcagtataaaagctgagactagaccccaagggccctaacttagacctcagtgcyccattccctacactgtgctgccaataattctttccttgttttgctacaacaaataagaagtaaaagagacaccttaattagggtcttggaattc

SEQ ID NO: 190685 - DNA, 480 bp, Homo sapiens
aggagcatggttgcaggaggaggccaggggaagctattgctgttcttcagcggtgagataaccatggcctgagccagggtagtgcaggccagatggacagaagtgaggggagtcgatgtaactgacaagcactgggaattcctggatgagagagctgagcatgaaagaagactggaggayaacacccatctttctgacttgggaaatgagaagaccaaggcatggactgtgaaaggatgacaatatacaggagaaggtaaaggagtcagtcagaagtagaccctgtaaccaagagaccacccaatattatccacccaacatctctactaagtgccacattttacattatgaaaggaaagaagaaaaactacttaggtatccaacctggcttggttatagtgatgagacttttatctcttctatttcaaatattgaaaaattaacccaaaaatcgaaatgcatccttctatccggttttac

SEQ ID NO: 190686 - DNA, 308 bp, Homo sapiens
  misc_feature (1)...(308): n = A,T,C or G
atccggttttactttcttcatctccctttatatttctagacccttcacaatgcagctgaggacaaaaaacgtaaggatggttgctatagtttataagrtgtctggaaacaaaaatatgtttccatttaggaacactaactacatatataccagacacggagttaaattttctacatacattttccatttaattctcacaaccctgtgaggtagttattattatcttcattttacagacaaggaaacagatgctcagaaaggtgaagtcacctgcccaggtttacacagctatgcagattattgaattn

SEQ ID NO: 190687 - DNA, 308 bp, Homo sapiens
  misc_feature (1)...(308): n = A,T,C or G
atccggttttactttcttcatctccctttatatttctagacccttcacaatgcagctgaggacaaaaaacgtaaggatggttgctatagtttataaggtgtctggaaacaaaaatatgtttccatttaggaacactaactacayatataccagacacggagttaaattttctacatacattttccatttaattctcacaaccctgtgaggtagttattattatcttcattttacagacaaggaaacagatgctcagaaaggtgaagtcacctgcccaggtttacacagctatgcagattattgaattn

SEQ ID NO: 190688 - DNA, 315 bp, Homo sapiens
gctcagtttgtaaaatggaatacacccatgggtcctagatttttgtgtcctggatcactaagaacctaatgaaaactatgaactgcctccaaaaatgcatgtattaatatgcagtcttgtgaaaagttttagggtagttgtagatcttaagaacagttctatgaaatgaatgtgtttttataagaacttgtacgcaccactttttatkagagaaagctgaggtggtggatttaaggttcactcttatggctaatgggtcttcctttttgtcagtaagatcagaaacacgaaaaaggtcgagcttgatttatccca

SEQ ID NO: 190689 - DNA, 606 bp, Homo sapiens
ggaagtgcagagctagtaaggttccaaacagtaattgtgactttgttaaagtgaaaactttttttttttttttttttttttttgagacaaagtctgggtctatcacccaggctgcagtgcaatggcacaatcttggttcactgcaacctctgcctctgaagtggggtttcctgatgatgcccagctgctcttgaacttgtgagctcaagcggtctgcccacctcggcctcccaaagtgctggaattacaggcatgagccactgcactctgccttggagcgaaaatattgaatgtgatattgctttcaatgttgaccactgattaccaagatgcgtcttaagttttgaagcagtttctcttttcattcagagattacatgcagggttttgattagtagtcaccacaatgatattttctcacattttatgtacctcatacaacccttaatgagggagaagaaaaggaaaaatcaattaggtagacagttaaacctggtcctcagagaagcatcctgcctgaaaaatcatggttacaggcaaaaatagagcagcctggggaaaactcacactgcayctgcacagataagcaggcagggtccagcacaga

SEQ ID NO: 190690 - DNA, 565 bp, Homo sapiens
caggataatgcataagattaggagaattctatttagaatgtagacaactgaggaattcacttttataaggaattcacttccataaaatgacagagaasgttaggcagattacaaagtctaattgcaaaggccaacctactgctgttataccaataaaaaaagaagtctggattttcatatcttctttgcattaaagggcttgcgcaaataactttattactgatcctaggatgccccttccacagagataatatgtgatgaaagatcaacttgaatagcagtagtttatttttcttatgatgttaaagaaaaatccaggaggcaggcactgcagaatccagcgctgaatcataaatgactgcgacacctaagcagatctttttttttgtttattctctatgacaaaaacctgtaaccatcttctaaattttgaatcacaatatataattaccttatttactattttcttatttgttgtctatattctcactgtattgcagactctctgaaagcagggaccttgtctattacattttatggtgtatctcctgacgttgcattgcct

SEQ ID NO: 190691 - DNA, 565 bp, Homo sapiens
caggataatgcataagattaggagaattctatttagaatgtagacaactgaggaattcacttttataaggaattcacttccataaaatgacagagaaggttaggcagattacaaagtctaattgcaaaggccaacctactgctgttataccaataaaaaaagaagtctggattttcatatcttctttgcattaaagggcttgcgcaaataactttattactgatcctaggatgccccttccacagagataatatgtgatgaaagatcaacttgaatagcagtagtttatttttcttatgatgttaaagaaaaatccaggaggcaggcactgcagaatccagcgctgaatcataaatgactgcgacacctaagcagatctttttttttgtttattctctatgacaaaarcctgtaaccatcttctaaattttgaatcacaatatataattaccttatttactattttcttatttgttgtctatattctcactgtattgcagactctctgaaagcagggaccttgtctattacattttatggtgtatctcctgacgttgcattgcct

SEQ ID NO: 190692 - DNA, 543 bp, Homo sapiens
acggagacaggaaacttattttgtaaactcttgaaatctgaatgtgtaatatatctctcaataaactataatatcctgagttatcacagtttattcagaggcatatttaacagaaaaaaggcaggaggtatattttctgcctcctgagtgtgacatttagggattatctttctggttaaagcaagaaactaggggtgccacctccctttccacattccagattccccagtctyttctagattccccagtctcagccctcacctccaatgagaagagactgttcatttgagctttctagactaagacacctaaaagaggggcaataataggcacctgcagcaaatctgctggcttatagtttggagaaagaggacatatactcctgttcatctgaggttaagttttgatttgatctgaccatcacaccactctcattgggaagaggagatgcaacacaactgagttttgcttccctcagcccctgctcttggctaaactgggtcccccaccaaattcacatgttgaagccttaccactaaatat

SEQ ID NO: 190693 - DNA, 543 bp, Homo sapiens
acggagacaggaaacttattttgtaaactcttgaaatctgaatgtgtaatatatctctcaataaactataatatcctgagttatcacagtttattcagaggcatatttaacagaaaaaaggcaggaggtatattttctgcctcctgagtgtgacatttagggattatctttctggttaaagcaagaaactaggggtgccacctccctttccacattccagattccccagtctcttctagattccccagtctcarccctcacctccaatgagaagagactgttcatttgagctttctagactaagacacctaaaagaggggcaataataggcacctgcagcaaatctgctggcttatagtttggagaaagaggacatatactcctgttcatctgaggttaagttttgatttgatctgaccatcacaccactctcattgggaagaggagatgcaacacaactgagttttgcttccctcagcccctgctcttggctaaactgggtcccccaccaaattcacatgttgaagccttaccactaaatat

SEQ ID NO: 190694 - DNA, 543 bp, Homo sapiens
acggagacaggaaacttattttgtaaactcttgaaatctgaatgtgtaatatatctctcaataaactataatatcctgagttatcacagtttattcagaggcatatttaacagaaaaaaggcaggaggtatattttctgcctcctgagtgtgacatttagggattatctttctggttaaagcaagaaactaggggtgccacctccctttccacattccagattccccagtctcttctagattccccagtctcagccctcacctccaatgagaagagactgttcatttgagctttctagactaagacacctaaaagaggggcaataataggcacctgcagcaaatctgctggcttatagtttggagaaagaggacatatactcctgttcatctgargttaagttttgatttgatctgaccatcacaccactctcattgggaagaggagatgcaacacaactgagttttgcttccctcagcccctgctcttggctaaactgggtcccccaccaaattcacatgttgaagccttaccactaaatat

SEQ ID NO: 190695 - DNA, 543 bp, Homo sapiens
acggagacaggaaacttattttgtaaactcttgaaatctgaatgtgtaatatatctctcaataaactataatatcctgagttatcacagtttattcagaggcatatttaacagaaaaaaggcaggaggtatattttctgcctcctgagtgtgacatttagggattatctttctggttaaagcaagaaactaggggtgccacctccctttccacattccagattccccagtctcttctagattccccagtctcagccctcacctccaatgagaagagactgttcatttgagctttctagactaagacacctaaaagaggggcaataataggcacctgcagcaaatctgctggcttatagtttggagaaagaggacatatactcctgttcatctgaggttaagttttgatttgatctgaccatcacaccactctcattgggaagaggagatgcaacacaactgagttttgcttccctcagcccctgctcttggctaaactgkgtcccccaccaaattcacatgttgaagccttaccactaaatat

SEQ ID NO: 190696 - DNA, 560 bp, Homo sapiens
catgtggtgattatgggaacgacaattcaagatgagatttgggtgagaacacagcaaaaccatatcagacagtctgactataatgtaccctagaaaaagctttttgcattataactacctggggaacactgagccatctgtatctgagtgtctacatctctagctagtcttggaaagactttattattttttaaataagttttttaatcccttcattttctctatgtcctcagtgatacaaaaaaattaaatattcagtcattttatgttgtcccaaatgtcmcaaaggctttgttcattctttatttttcttggctggattatttcaaaagatttgtcctcaagttctgagattttttttttcttctgcttgatctaatctattgttgaagcttatatatatatttttttgtatttcctccaaaacattttttgttccagaatttctatttgattctttttcaaaatagctatctctttggcaaatttctcattcaaatcctgaaccgctttatagatttcattgtattgtcttacagaattcacttgtatctcactga

SEQ ID NO: 190697 - DNA, 533 bp, Homo sapiens
gaagaatttcatatggcttaagagaagacaaaaataactgagagtagccaacttcaacatcagccctctccagctatggagatcttgtgaagtaagaaatctctaaaaaccttgactattctcaggccactcaaaggaaacacagaatggtgaaatcaaagatagatgtgagtactcccawacccaaagcatcaggagcttcaaataatagttattgtgtgttctgatgactaaatttaaaagcaaattacatcagattgcctcttaacaatccagtctctattaagttatttgtggttcataagtaaactagcctctttgctgtttctacctccaaaatataatattaactccagaagcctccactcagctagatgctgccatcctacatggctaattgcctcctgaaagtgtcaatttagatatgcatattttttcaacactaattttacctctcataaacagaagatgctattttctttttttataccaaacatatggcttcttattgtatgaaaatactggagttgttc

SEQ ID NO: 190698 - DNA, 533 bp, Homo sapiens
gaagaatttcatatggcttaagagaagacaaaaataactgagagtagccaacttcaacatcagccctctccagctatggagatcttgtgaagtaagaaatctctaaaaaccttgactattctcaggccactcaaaggaaacacagaatggtgaaatcaaagatagatgtgagtactcccaaacccaaagcatcaggagcttcaaataatagttattgtgtgttctgatgactaaatttaaaagcaaattacatcagattgcctcttaacaatccagtctctattaagttatttgtggttcataagtaaactagcctctttgctgtttctacctccaaaatatratattaactccagaagcctccactcagctagatgctgccatcctacatggctaattgcctcctgaaagtgtcaatttagatatgcatattttttcaacactaattttacctctcataaacagaagatgctattttctttttttataccaaacatatggcttcttattgtatgaaaatactggagttgttc

SEQ ID NO: 190699 - DNA, 560 bp, Homo sapiens
tgaaacagtttcctggtaagtaattacaagagaactttattgcatggtttttcttcaaaggatatcgaataatgcaacagacaatgcctttgataccatcatatagaagatgcaaaaatgcccttcatgtgccaaattagaatattcacttgaatagaagtacaatattaaattctgtgaagacttttttgaattatatgtgtaggttggtataagggagttgtcacaraggaagcaaaaatggagaggaaaatgatgtagccaggaggtaatattttagatcccagttgcttctttcgaagcaaatgggctgaatgtgaacagttgcacaactaagtgtggaagtgcaagtctccctcagaagcctctagtcagttgatagtgatgagaactgagccctcatttacaactctgtaacctcacagtgctggctaccttgagtagtcacaggcattttgaatgctactcttcttgacatgttttcaaatcaagaaactaggaatacagcacagttaaaaagcatttgttttaagaagtagcggaagttgcagtatcatagc

SEQ ID NO: 190700 - DNA, 560 bp, Homo sapiens
tgaaacagtttcctggtaagtaattacaagagaactttattgcatggtttttcttcaaaggatatcgaataatgcaacagacaatgcctttgataccatcatatagaagatgcaaaaatgcccttcatgtgccaaattagaatattcacttgaatagaagtacaatattaaattctgtgaagacttttttgaattatatgtgtaggttggtataagggagttgtcacaaaggaagcaaaaatggagaggaaaatgatgtagccaggaggtaatattttagaycccagttgcttctttcgaagcaaatgggctgaatgtgaacagttgcacaactaagtgtggaagtgcaagtctccctcagaagcctctagtcagttgatagtgatgagaactgagccctcatttacaactctgtaacctcacagtgctggctaccttgagtagtcacaggcattttgaatgctactcttcttgacatgttttcaaatcaagaaactaggaatacagcacagttaaaaagcatttgttttaagaagtagcggaagttgcagtatcatagc

SEQ ID NO: 190701 - DNA, 557 bp, Homo sapiens
caaaggctttattttgtgaaaactatcggtcttaatccttattacatctctgcctgcttttacatgaatctgtcaggatacagaagctttacatattctatctttccacgtgattgtaggggagtgagttcatgaaatacacattggtatgatttgttgaagggtttttctaatacccagcacctcatatggcttggattgagcatttatgtttatattgcactggttaacttctatcttttccctatattttayccattgcttctttttcctaatatctatcaattccatgtccaacatcataaatttcttattggctttccctattcttcttttaacaatacttgtattctttatgctgagaaaaaaggaaaactgtctcatttgatatatgagacattgattgccacatcatgctgcttacatcaaccactttaaaagttagtgacataaagcaacaatcatttattttcatccacaaatctgtaaattggctgagggctaggtggtctagactgagcatggctggggttttttcaagttgcattttgaattca

SEQ ID NO: 190702 - DNA, 583 bp, Homo sapiens
gaatgtgtattctgaatatccattggttccattcagtctacagtgcagataaagtctgatgtttctttgttgattttctatctggatgatccctccaatgctgaaagtggggtgttgaagtgtccagctattattttattgaggtctatctctcttttgagctctaataatacttgctttatatgtcttggtgctccagtattgggtgcatatgtgtatacaattgttatatcctcttgctgaattaaccctttcattattatataatgaccttcttggtctctttttatagtttttgtcttgaaatctattttcagagatacttacttttaaccatttctatattttgttctttggtgattacaatatccctatatgaatgtctatattacaatttcattgcttttcaaccttagaaattttctatttaatttttgctktgaaaaatcaacatttgagtttagttacacaatcaaccccctccattctcccctcaatatagttataataccacagattcatcatcttttatccacagttttatcattgaaaggccactaagtctaaaaggttttcttggtgg

SEQ ID NO: 190703 - DNA, 192 bp, Homo sapiens
ttattttgatcattacataatctaccatgttcagtagctactaatgcacmtatgtatggatgctgacatcagaagttgttttactgaagtcccaaataatgtgtcatttttctcccttgtgacaaaccaaagaggtaaaccatggctttctccccataagaataagtgttggaatttaagcaagagccaact

SEQ ID NO: 190704 - DNA, 460 bp, Homo sapiens
tatctttaatatgctcaaagaatagtttggagtctgatgaacctatgcaagtccatagtaagaaacgyctaaaacctcttatacctggattaagaaagaaattgaaaagatctaatccattcaatgaaagccaggaaaaaaatcgagagtcctctgatctgcttccatctccaagtgttattactactcaatctgagaatattagcagctcagcaactcaggtatgtgataactactgtattttatagtttgtatgagatgggttggatatgagattcaactagggaaaacatagtaatttgttatttttatttgatgtcagaaattattttagagcaactcccatccttctctccatcgtgttcctccataatggaagaagaaaaggtgttgagtcaggaagttacagttagattagtacagagccattgaactaaccataaatggacacttaatagcc

SEQ ID NO: 190705 - DNA, 548 bp, Homo sapiens
accactttcaagttatttaaacacaagtacatttctgaatgcctcaatttcttcacctatggaatctggatgataggaatattttactagcaaagttgttgtataatctcctcagaactatacttatatattgatataattatttcacctcttatttaatactttgtgtactttttaaattttgtacaataaacatgtatttcctttgtaagttttataaaatatatttttgaaagctaaaacttctctggttttgtacagtctttcttccatgaatagaaaaaaattcactttgagtcccacwtttccctctacccagttacaagttaaggctgacattattacatgggcaatggtgtaaagtcagaaatggctgacctgtgggttcctaagaagcctgagacttctccggcttaagctcacatttttgcagtgaggcactactggataccttcctgggcctctaaggctatttatttccttgagctattttccttcccctctcacatacctgagatgttccaccctttagaactatcatgacctgc

SEQ ID NO: 190706 - DNA, 626 bp, Homo sapiens
aattctcgctttgcagagggtttttttgtttttgtttttttcagawttaagattccaaatgactgcaaacccaatgcaaattgacttaagcccagaaggaaatgtattgcctcattgatgtgccttgtttcagggattccactcatgtcatagacctagacttgctttagttcctcacttgccttctgcttgattggttctcttgtgaggtaggctttcctcgttggtggcaagactgctgacattagcttccagctcacttcctcacagctcagaccacaggaaaatagagagggtctctatctgttaaaagtcacaataaacatctcaagattgtgtatccttgacttcatttgagtcaattgcctatccttgagccaattgtgcccatgaatgaaatcaacgccacctgaactgcattgactgagaatgagggaagtccggttctccagaggcaaacctccaaatgcagagaatgaaggtggcaaaaacatgaaatatccagcactgctttggactctgtcaataatatgctttaataaaaactgagcatcaaatattaggatgtttgtgaatattctgaaacttgatcatggaatctaacttaggaagagacaaccaagttt

SEQ ID NO: 190707 - DNA, 524 bp, Homo sapiens
ttgaaatagagggtgttaattaggtcatacctgggattttagagccataaaagttttgtaagaaaaacagttttgttccaggcagccgcacacactagagagtctgttagactttctcaatgttgatttcactttytaatacttagcttgtgtctgctaaggtggatggattagtggactggttttggagaacatccccaagtcactgatttcatttaaagccgagatatgggagaaagttgcctttctcctaagagttggtttatatggctataacttggaggatggtatcacttgaggttattcttatctggatagttctctaaagagtttgcatgagttgaacattacagtccaggaatgagagaaccctggagcaaatagaacgcagggacatttatctttgcatccaatcttccctgctcagtgcccctagtacctgcttgctgcctaaaactccagggaacaattgtatgtatggttgtaggagcagtggagaaaagaaagatgccataaggacccaa

SEQ ID NO: 190708 - DNA, 524 bp, Homo sapiens
ttgaaatagagggtgttaattaggtcatacctgggattttagagccataaaagttttgtaagaaaaacagttttgttccaggcagccgcacacactagagagtctgttagactttctcaatgttgatttcactttctaatacttagcttgtgtctgctaaggtggatggattagtggactggttttggagaacatccccaagtcactgatttcatttaaagccgagatatgggagaaagttgcctttctcctaagagttggtttatatggctataacttggaggatggtatcacttgaggttattcttatctggatagttytctaaagagtttgcatgagttgaacattacagtccaggaatgagagaaccctggagcaaatagaacgcagggacatttatctttgcatccaatcttccctgctcagtgcccctagtacctgcttgctgcctaaaactccagggaacaattgtatgtatggttgtaggagcagtggagaaaagaaagatgccataaggacccaa

SEQ ID NO: 190709 - DNA, 441 bp, Homo sapiens
catgcctgtaatcccagtattttgggaggaccgaggcaggtggatcacttgaggtcaggagttcgataccagtctggccaacatggtgaaaccctgtctctactaaaaaatacaaaaattagccaggtgtggtggctcatgcctgtaatcccagctactcgggagtctgaggcatgagaatcacctgagcctgggagtcagaggttgcagtgagccgagattgtgccactgcatttcagtctgggcaacagagcgagactctaaaacaaataaataagtaaatatctagcaaaatctcagctaacccattgtggaactctggggaaaatatygcttgttagggaaattcaacattggacagaaatgactagaccctcataccattgccatgttcagtcattggctgagggctgccagagaagacgttgcctcaactggtat

SEQ ID NO: 190710 - DNA, 496 bp, Homo sapiens
cagtggcaaactttgctgcgggtctccatcttgttttacttccttgaaagcgtgacctgtaaccacgtggcagtgctttcttttagcctctgccattttacaatggtggcctgggttcaatcctggcttaggtaatgggtcctttctggtttgattcttgattctctttctggtttgattgttgattctctcccccttcatgaaccaccttcaattttcctytctctgagcacctgggaggttacctttggtaaaattcaaaagccagaaatattggctgcttggcatgggtaaaatcaggtaataagggatttaaaaggattttcttaaagagcactcagcttaattaaaagtggatatccaagttataggtatatttaaaaggcctttatgtttttctcctcttggatcttattttgctggaaaaaggttgttttctcagttgactgaattctttttctccattttttcttgccacccttaatgcacacatgag

SEQ ID NO: 190711 - DNA, 569 bp, Homo sapiens
taattaataatagtacaaagagcatttttattttagcagaagttaaagcattagggtcaaaggaataaagctcaaatgaacagagtttaaatattaactaaaagaatttgtttgttttggggggtggagcagttcaagagcggcttggccagggacttggaaacaggaagtagctcaggaattcccttagttgtagcactatgagtctgtttaagttaaatattgttaattaacgccttgcaccccaagggagaaaagacaatatggattacaagtggatgtgtgttagcaaaactacctcttgagaatttccaaattctctgaggatttcagaatctatcctgaggatagaatcttgagaatttcgttattttgggaaatctcccttgccgcctctgctgactaccagctgctatcatttatatttatttattactgactgattgactgagacaggatctcactctgttgcccaggctagagtgagtggtgcaaacacagcagcctctaccccatgggctcaggtgatccttccayctcagcctcccgagtagctgggaccacaggct

SEQ ID NO: 190712 - DNA, 537 bp, Homo sapiens
cattatcaaacacatcacatttgttaatatcacttccaatctcatcagaagaagagtctttaagttttttttttttttttttttgagacggagtctcactctgtcgcacagtggggaatatagtggcacgatctcggctcactgcaacctccacctcccgggttcaagcaattctcctgcctcagcctcccgagtagctgggactacaggtgcgcaccaccatgtctggctaaatttttttgtatttttagtagagatagggtttcaccatgctggctaggctggtcttgaactcctgacctcaagtgatccgcctgcctcagcctcccagagtggtaggattacaggtgtgagccaccacacccggccagaatctttaagtatttggaagcaatcaagatcacagtgatgatgcaacctttaccaaatkgttatttttgcttgaaagttcagttatatgaatgtcaacaaatagatgttatttattttcatgaaaatgttttccaagtacctaagtgtgaataaccagcttgtcag

SEQ ID NO: 190713 - DNA, 555 bp, Homo sapiens
atttcccagcttcacatttctgagaagagttataaaaataaaattaagaagcaaattattaaaatgtactaatgtgaatttatttatctagcttagatcatttaaactgcctaaaattataacagctatagatgaatttctatgctacagctaaagatcattatctaatagcttcatcagatggaacaaataaaaagtaatagattagatttcactatacctctaaatttactctattttttacttatgctattttatactaaacatttttcaacagcacctgacacctaaaattgaaaagcaagactcaaatccaatcatatttttattagataatcccagcagaattggtgaagaactaagcatttatgttaaatgaagaggtccttcatttctcaaaacacactgaattctaaggcaygagtttagcaacaagaagccctggacataaactagtcaggcacctatgataaaaaagataaaaatattcttaaaactgattgaaaataaaaagtgagagaactctagtgctacattgagagaagtgtactattg

SEQ ID NO: 190714 - DNA, 523 bp, Homo sapiens
tgtggttgaatccctcatggacattcaagttttatttcccatcaagacatctacctagagaatcttsaagattataaaacacacataccttgatatttagtggggaaaaaaattatggtctttacttctttttttttaatagttcctctttccaacccgcatttggtaaagttttttctcctcctgtagtgtatagattctgaacgatacctcttcagacctgggttttctttttccacataagagcaaggaaaacaaaatgatacgcaaaaaagatattctgcctagaatcttaaagtcggagtaaactgtgtttgagtttgcatctcacgtgatgcacatgttctctatacagcgtgagtcttataaaataaacagtttttcttcagacttaattaaacagaatcaagtttcagccatagtatttagtcttggatttcagaatgcttcttgtagaaagcactagggaaagggaatgtacagaaaaatcaaggaatggtaggtaggtagccactaattaatg

SEQ ID NO: 190715 - DNA, 563 bp, Homo sapiens
gctgcaaaatgccaggcatcaggccaagcactttacatatattgtctcattaattataacaattttgaagataagcactcagcagctaagacagattaactaatatactccacaaaagttaactaaaggggatttattttaaaaatcaacatatttgctgaaaaatatgtatggagtaactgcaatgtaccagccatcgtgagaatcacattgtgggmagctgtggacaagacacatgagctccctgctatatagaaacgtacatccgagtaagggaagagatgccatacacatgtagataaataggtaaataaatatacaatatactgataattatataaaggagtttaagatattttataattaactattaaataaatttgttcacaaactaatgctgaatttttccagattattttgactttttgagcctaaatttggacttttacattttgttctatttaattctgtacattttagtcagtttttctcatactttaacttctttttgattcctgatattttctttcactgaaaaggtatggccaggcagaccataccac

SEQ ID NO: 190716 - DNA, 563 bp, Homo sapiens
gctgcaaaatgccaggcatcaggccaagcactttacatatattgtctcattaattataacaattttgaagataagcactcagcagctaagacagattaactaatatactccacaaaagttaactaaaggggatttattttaaaaatcaacatatttgctgaaaaatatgtatggagtaactgcaatgtaccagccatcgtgagaatcacattgtgggaagctgtggacaagacacatgagctccctgctatatagaaacgtacatccgagtaagggaagagatgccatacacatgtagataaataggtaaataaatatacaatatactgataattatrtaaaggagtttaagatattttataattaactattaaataaatttgttcacaaactaatgctgaatttttccagattattttgactttttgagcctaaatttggacttttacattttgttctatttaattctgtacattttagtcagtttttctcatactttaacttctttttgattcctgatattttctttcactgaaaaggtatggccaggcagaccataccac

SEQ ID NO: 190717 - DNA, 389 bp, Homo sapiens
gtcactttgggcaatttatttaatttcccctaggctcagttactttttcttctcattaaggataatatctgttttgggggattgttatgggaatcaacttaacacaagtaaaacggtttggtacatgctttgcattcaataattttgactttatgtttacttagaattgagattgaacttgtgattctttttatttttccatagacgtttgagagagattttttttcccaaaagttgagtcgttttgtcagatgctctgtgtttagttccatgacttaccatagtctgcatagagtctgccatatattcattcatcattcattcactcatttatttagcaagtaaggcagcaagcaagcatrcgtaatagaattattatgccagactct

SEQ ID NO: 190718 - DNA, 477 bp, Homo sapiens
caacgtagccaccaaaattgtactcaaaggagattcaatattcctccacattttcctatttttatgacttcccttgctgccacacacaattgaccacaatctcctcatggacaaattttatagccttacctttataaacttcattgttttcctaatgttttctaattgattctcactagaatttaagctctaagaaagcagtgttctcacttgttttgttcactgasatatcctaaactctgcaacagtgccagatgcatataggcactcaatacatacttgaaaacaatacattgttaacttcccactttgtgggaaaacaggtagagactactaaaaacatgaacaatgtatttttagttctttctgtccttttcactagatgtcagtttcttttttcgatgacattatatgagaaagattatttaacattaggatataaatacatgtttattgcaaaaaaattagaaataaaac

SEQ ID NO: 190719 - DNA, 645 bp, Homo sapiens
ctacatgtaatattaagagatttttatagaaaaaaaacatgcagcttaagaaaaaatcctttcagtaacaaatcaatgtatyccaatacatctactcagtagctgtagcttaactacggtttgggaggtttcatgaaagagagagaaggaaatgaaggcaagaggagtgggaaggaaaattaaaaaaaaaaaatgatactgcctagctacaagctgcagagggaaattaatattcaaaaggttaaggtgtctgtgaaatgtatgtaatgagtaacactcatagtttgttactataggttcattgcctctaatgttgaggacggcacatggataatttacgattcccattgtcccctctgcagggattaattctgaattatttatgtacctatatacgcacagaactgaaacattttagttaaagtcagccactcactcatagtcttgaaattatgcagcccttgttgctaaaaatgatgttagcctcttgtgatttaagtcataacattttattttcggtcccactgagagagaaggcatgcaggaggggggaaagatatatttttctaggataaatctcagaatgcattttttaaagatgtaaacagataatggtaatttcgttgagtcaaattattgttgtag

SEQ ID NO: 190720 - DNA, 638 bp, Homo sapiens
tacttcgtgacctccatgattctaaaatttaccatggaacattcggaaatacatgacctttcaatccttccttaggttccttctgcaggtaacgggtggccttaggcctagaggcaatcaattttgaagcctgaactgcaactacataaatatagctgttaatgaaatatgtcattacttttctcttctaaaacctagaaacaaattattttgttttggctcttaaatattgatcactgttgaaaaaattactaatatattaatttttaagttcgtgtcataaagtatagaaaattatttcttatttttcttcattatttttactttatttatatattccctaaaaactaattagaaaacatgctttggttttgttttaggcctcaaatatwctcaaaggtaggctgcttgtattccttgaaatattctatctagctttgtgaaatcttatataaatattaaaagcctctgtatcataatgtccacttacaatgtgtcgtaaccttaaggaattcacttttgtcctattcctcttgggctgcatatttctacttctgcctcttgtggctgtgtcttctctgtgttgccctggcgctaatgtgagtctgggatgccgttccttttacatcccagagtaa

SEQ ID NO: 190721 - DNA, 548 bp, Homo sapiens
tgtactctatggtagatattagtattcatcatgagagagccagatttaagaaagacaaaaatcctataaagacaccgaactgttcattccaagaacataggttttgtgtgattaaggaatttgacagggaggaatacacaaagataacagactgaatcaaaccataccaagatctctgaatacatgtcaagaagtaaaacaaaatakttatcttttaaaaaccagttttggatcaggtactattagggtcttttacgtatgttcttccaggtattcctcaaaataaaactgaatctcatagcgattgattgaatagagccagacaagagcacgtggaaatcccacttgccttcgtgtgcaccttgatgtgcagctactgacacagaaaaataggaagtgcattgtggaagagttaaaggggcgcaaaaagttttattctgggaaaaaatgctagttactagagtacagtcttaactgaccaagaaaaatgtatattttgtcacaatttcctttatgtttccattgggacaaagctagtctaatatatg

SEQ ID NO: 190722 - DNA, 523 bp, Homo sapiens
ggcttcaacttacgccttttgggtggatacaatttttcagtccgtagcagaaccaaccctgccaacaccctgatttcagacttctaaccttcagaattgtacgacaataactttctgttatttaagacacctagtgtattatggcagcactagcaaactaatagagttatttgtacacagatgtagttgcttttttaaattattaagtaatctattatagtcattttctttttcaaacattaaaacttttcactcagtaattttcaacctttttctcaacattgaaaggctgtgtattacttaacctttaggagcttcacgttttctctaaaagtaaattcagattgtttcacttccaygcttaaaatcctctagtggcttccaattgcagcctaacatcaatataagatttcaaggccttagcataatccataaatactttatgatctggatattgcctatatctctaaactcaaatcctttttcttgcctctttttcttttcccttcagtgatactgccca

SEQ ID NO: 190723 - DNA, 324 bp, Homo sapiens
actgtgaactgcgcatgtgagggatctaggttgtgygctccttatgagaatctaactaatgcctgatgatctgaaatgaaacagtttcatctcaaaaccatctcccacccccaccccatggccttggaaaaattgtcttctatgaaactggttcctagtgccaaaaaatttggggactgctgctctagtggaatacaattgcttgagaaaccagcagacaaaatcagcaaatgaactgtccaaaatcgtaatagatgataatcataacagtaaatttagtgttttaagcccctaaattttgaattggcttcttaggcagcaata

SEQ ID NO: 190724 - DNA, 586 bp, Homo sapiens
tcccagcattttggaaggcaaagtgggaagggttgcttaagaccaggagtttgagaccagcctgggcaacacagtgagactctgtctctatttaaaaaaaaaaaaatgtgacaaaaaacttcagacacagcagaattcagagcaagaaagattaccaaagagaaaaaataagtatgtcataatgataaagaggtcatcttcaaaaaagatttaaggatcttatatatgtatgcatataacattgtcaaaatgcatgaagcaaaarccaatagaactaaaaggataaatagacaaatccaacattagagttacagatttaaaccctctctatcggtaacttacatgtcaagtaggcagaatattagtagggatatgatatccagaacagaattaacaatcaacttgatctaattgacatttataggttgtttttaccaaacataagcagcatacacattcttttcaagttctcatagaacgcccaccaagataatctacattctcagccatgaaacatacttaggcacatttaaaataacagaaattattatctaataaccttcaaaaagcctataattaataactt

SEQ ID NO: 190725 - DNA, 315 bp, Homo sapiens
gaatcaagtggcaggaggagagaaagacaggagaaaatccaacagagtctgccccatccgcttggagacacacacacctccacctgagggaaaataaatttcttattccttaaagttttagctgcagggtcacctgggtgtacrgtgcaatagaacagaaaaataaggtgaggaaaaaaatcaagagatttccctcactctctctgaggtttcggagttgccatttttgctcctcaagcctgaactggagggtttctctttgatctgtctgaaccacaatgctgacttccaacttccaaattgcattgggttcag

SEQ ID NO: 190726 - DNA, 507 bp, Homo sapiens
tctgctttattttcaggatgttagggaatgatgggatgtactgagaaaaaaaatgaagcaataaatagaaaggcaagcagagaactcaaaagaaatgagcgtacactactatgacagagattatgacaaactttgattaaaatggtgattaaatatgcaacacagragtgtggaggaagatggccaaatagaagcctttactgatcgccacccccacctccccccaccgctggaacacccaatttcaacaactaactacacacaaaaaagcaccatcataagacccaaaagtcaaatgaacaatcacagtacctggtttaagcttcatatcactgaaagagacactgaagagggtaggaaagatagttttgaatcatgaacaccatccctcccccatatcctggcagcagagctaagtctgcaaagagaatctatgcacttaggggaaggagatcaaagtgaatggggaacatggcattgaactcagtgctgccctgtcacaatgga

SEQ ID NO: 190727 - DNA, 511 bp, Homo sapiens
gaaagaaagcatatacatttttaatctgctttagtttaataaaaagtrctgtccttaatactgactttgcttgtatttgctgatcaccaactgtaaccccaatgtactgagaatgtcccaggacttttcagccattgactgcccatcgtatgctctaatcattgtcatgatactctttaaggatgggtcaaagatgaaacagaaaatgttttcctgttccccacactcagaaaatactgttgaatatttttgtgacagttaggtgtatcttttgtcttatatccaaatagctttccatctgtcctttaggatagcacaagaaggaaagtgtttatatctttacccttagtcaccatgatgttgcatacttcaacccatttgctccagcccaccacattcagagcccccttccatgtctcagtctacaattcctttacatcccaaactggataggtgaagtccgtcaactggttttgggtttgtgcccagtagaccatgagtaatgcagagc

SEQ ID NO: 190728 - DNA, 511 bp, Homo sapiens
gaaagaaagcatatacatttttaatctgctttagtttaataaaaagtactgtccttaatactgactttgcttgtatttgctgatcaccaactgtaaccccaatgtactgagaatgtcccaggacttttcagccattgactgcccatcgtatgctctaatcattgtcatgatactctttaaggatgggtcaaagatgaaacagaaaatgttttcctgttccccacactcagaaaatactgttgaatatttttgtgacagttaggtgtatcttttgtcttatatccaaatagctttccatctgtcctttaggatagcacaagaaggaaagtgkttatatctttacccttagtcaccatgatgttgcatacttcaacccatttgctccagcccaccacattcagagcccccttccatgtctcagtctacaattcctttacatcccaaactggataggtgaagtccgtcaactggttttgggtttgtgcccagtagaccatgagtaatgcagagc

SEQ ID NO: 190729 - DNA, 364 bp, Homo sapiens
agccatctgctccaaggagtctccatgccttccaaatctctgttggtacttctctcatgtctcacctgttatctttgatcacttggttaaggtagtgttagccagctttcttcactgtaaagttactattattccctttatatctaagaattatgaacagtgggatactttgagactacatcaacagcctgttggttgtaaaactttaacctaccactyttactctctgctgatgattttctaataccttcattccttctatactttaatggcattctctttgctcccattgacttatttttcattgacttatttataacagtatggattaactgattcttattttgttcaatgagttataatt

SEQ ID NO: 190730 - DNA, 585 bp, Homo sapiens
agggagcaatgtccttttctaccactgtaaagacaaagtgattgggcggtcatcaatcaaacggttagaatcagtgaggtcaaccctcccaatatcctgcccagaccattggccttatattcaattttttaaaaaagagaaatgtatttcacagaaggtagttaccaaccaaagactaatcgttattttctaggagacaaatctggctttccatttatggcacatccatcaaatctgacaaagccaatttatcctctcattttaaagtgatgtctgcaactagtgtttttcttttctttttctttttttttttttttttttgcctgctttacagctctatgatatcaattctctggggtctttctttgctccattctaaacttggaggctttcttaccagcaagaagtgttctaaatagcaaacatctctaccatgtctctttccaaaaagtagaaaaaacacttctgggcttgaataaaaagataaatactyggacatttacacaagtcatgcctttttaaacattgactaagaatttaaagctgaaggccatggcataagacactggctattttaaacaccta

SEQ ID NO: 190731 - DNA, 604 bp, Homo sapiens
aaatctggacatcttacttctaagacctacaattgtcctaaaaackgaaagtctcactaccagtgggatgtctactttgtcaggttccacaggcagttgttggggtgtcctaacaagttcatcttaggaagaactattaggtttgataccagaagtgtcacatagacatagttggttacttttctaattattggtaaatattagccagctggtgaattgtgacatgacacacatgtaaaataatgcacaatagatgcctggtgaagctttgagaaaagaagagtattaggagaacatccaagcttatatactatcaataccaaaaccatcatgattgttgtacattggttttctgccctattttccattttttctaaaaattaattcagttgaagtgaagtggagtggtgtctgtcttgtgtaactcaaggagtattccccactacctgagtgtcaaccccatctcagggattgacactccaggctggagtgcaatggcgcatctcagggatggggttgcatacctggggatgggtttctctctgtggcactcagaaaaggtaggtaaatcagcctactggtccataaccttgcacaacccaga

SEQ ID NO: 190732 - DNA, 560 bp, Homo sapiens
ttacttctaagacctacaattgtcctaaaaacggaaagtctcactaccagygggatgtctactttgtcaggttccacaggcagttgttggggtgtcctaacaagttcatcttaggaagaactattaggtttgataccagaagtgtcacatagacatagttggttacttttctaattattggtaaatattagccagctggtgaattgtgacatgacacacatgtaaaataatgcacaatagatgcctggtgaagctttgagaaaagaagagtattaggagaacatccaagcttatatactatcaataccaaaaccatcatgattgttgtacattggttttctgccctattttccattttttctaaaaattaattcagttgaagtgaagtggagtggtgtctgtcttgtgtaactcaaggagtattccccactacctgagtgtcaaccccatctcagggattgacactccaggctggagtgcaatggcgcatctcagggatggggttgcatacctggggatgggtttctctctgtggcactcagaaaaggtaggtaaatcag

SEQ ID NO: 190733 - DNA, 560 bp, Homo sapiens
ttacttctaagacctacaattgtcctaaaaacggaaagtctcactaccagtgggatgtctactttgtcaggttccacaggcagttgttggggtgtcctaacaagttcatcttaggaagaactrttaggtttgataccagaagtgtcacatagacatagttggttacttttctaattattggtaaatattagccagctggtgaattgtgacatgacacacatgtaaaataatgcacaatagatgcctggtgaagctttgagaaaagaagagtattaggagaacatccaagcttatatactatcaataccaaaaccatcatgattgttgtacattggttttctgccctattttccattttttctaaaaattaattcagttgaagtgaagtggagtggtgtctgtcttgtgtaactcaaggagtattccccactacctgagtgtcaaccccatctcagggattgacactccaggctggagtgcaatggcgcatctcagggatggggttgcatacctggggatgggtttctctctgtggcactcagaaaaggtaggtaaatcag

SEQ ID NO: 190734 - DNA, 585 bp, Homo sapiens
ttaatatatatgagccttgtgtataaaatggaaactatgtcctctgacactactttgaggtttttgaaaggataaaacaatatcgagtatctgacttgaaggtattcaatgcatgtaagattcctgttggacaaaaggagatggaaaagttggrcttcactcagggtaagacttttcagtggaagaatgttggggcaatgttaagcaacagggtaactgatctcagtgggtagggactgcaggaaaagagaaaggaggggaacccaggacaaacttggctaaattcacaattttgcccagaccaggcttacacttctgtcagattctcatcctcattcattgtgctctctcatttggtgagacttagtagaaattatgataaattagcctatggaaagactctgaactttcctaaaacacttagacaagcttttggctctctatttatatacatgtgacctttaatgtcccacatagagtgatgaccctgaagacacctttggtgttcaatcacaagggaaatgaggaaggcactttgaccaccaaaatgagactggctcaagagaaaggaatttattttccaga

SEQ ID NO: 190735 - DNA, 642 bp, Homo sapiens
gaccaaggtaagccaacaagaaatgggaagataattaggtcttccacttctagtcttgtgcctacaagagcaccatgcaggctgcccagcaatccatccttaggaaaacaaaccgacacaggaaaatgaaaatgagagaaatgactttcaatttgagaaagtgaaaaaaaaaaaaaaaagccctgcttactcactgtttcatagataaatatcctgtgtcctcccccagattctctaagtctatggggcagcgctggctttcagcaataatagtgtgacagttatttgttgagaactaataattactagacatactgmaagtaaaatagataaacacacacactctcttaggctaagtagagtgtgtatgaagtagagatcatcacacccattttacaaatgatgaaactgaggtagagacaaactaaacattttgcatggagctatacaactgcaagtgattggccccaaatatcatcaccacaattcctactagctacactaaccaccacacaacacccctactacacatggtagactgcacaagcacttggccaaagcacaggaactaggccggttcacactgaggtgtatgaagcttcatgcagaatgctgtgttttaacacacatatatcgttcatt

SEQ ID NO: 190736 - DNA, 642 bp, Homo sapiens
gaccaaggtaagccaacaagaaatgggaagataattaggtcttccacttctagtcttgtgcctacaagagcaccatgcaggctgcccagcaatccatccttaggaaaacaaaccgacacaggaaaatgaaaatgagagaaatgactttcaatttgagaaagtgaaaaaaaaaaaaaaaagccctgcttactcactgtttcatagataaatatcctgtgtcctcccccagattctctaagtctatggggcagcgctggctttcagcaataatagtgtgacagttatttgttgagaactaataattactagacatactgaaagtaaaatagataaacacacacactctcttaggctaagtagagtgtgtatgaagtagagatcatcacacccattttacaaatgatgaaactgaggtagagacaaactaaacattttgcatggagctatacaactgcaagtgattggccccaaatatcatcaccacaattcctactagctacamtaaccaccacacaacacccctactacacatggtagactgcacaagcacttggccaaagcacaggaactaggccggttcacactgaggtgtatgaagcttcatgcagaatgctgtgttttaacacacatatatcgttcatt

SEQ ID NO: 190737 - DNA, 642 bp, Homo sapiens
gaccaaggtaagccaacaagaaatgggaagataattaggtcttccacttctagtcttgtgcctacaagagcaccatgcaggctgcccagcaatccatccttaggaaaacaaaccgacacaggaaaatgaaaatgagagaaatgactttcaatttgagaaagtgaaaaaaaaaaaaaaaagccctgcttactcactgtttcatagataaatatcctgtgtcctcccccagattctctaagtctatggggcagcgctggctttcagcaataatagtgtgacagttatttgttgagaactaataattactagacatactgaaagtaaaatagataaacacacacactctcttaggctaagtagagtgtgtatgaagtagagatcatcacacccattttacaaatgatgaaactgaggtagagacaaactaaacattttgcatggagctatacaactgcaagtgattggccccaaatatcatcaccacaattcctactagctacactaaccaccacacaacacccctactacacatggtagactgcacaagcacttggccaaagcacaggaactaggccggttcacactgaggtgyatgaagcttcatgcagaatgctgtgttttaacacacatatatcgttcatt

SEQ ID NO: 190738 - DNA, 575 bp, Homo sapiens
agtaaaggaaaattttctacccttggccatggtacaccattacatgggccccaaagctgatgctttcaatatcacatagcggttttaggaaaaattgcatatttgcttctgctcttgccctttcttcttcagaggcttcattatgcaggactctggcacaaacctaaagtgaaagaaagagaagtagagaacaacatacacccagctgtgctcacaaaagtcatcccctctcacacccctgcccttgaaccgtacttgtgtgaatcacatttttctttccttargacgtgttatttttcatgaaattcttcatttcctcatgcaaacattgtctttgaggccctacccaccttgctcagacaggtgtggatttgtatggtacataactcaagttcctaagttgagtacatttccttctacaacaatgaaagaatgcatttaacttaaagatgtttctgatttctaccagagttcaagacacagagaggctttttgtcaagtaattaatttattttgattcatagttattcataaaacttgaagtcaatatggtatcatttgtagtacaaatgacg

SEQ ID NO: 190739 - DNA, 600 bp, Homo sapiens
acagactggaagacgtgatttatagcaatgtaactgacaagaacttacatataatttaaaaggatatataagttgtataaagagcttctaaaaatcaagtaaaagtaaaacatcttaatacaaaaatgaacaatggaagcttatgtgttctgttgatggaagtataaagtaatacaagcactttaaagaataaactttaaccaacaatttcactactaggtacaaacctgcataagaatatatatgcacaaaaattctataaagcattgttaataattagaaacatttgtaaagaacccaaagtccatccacagaggaatggttaaataaattatcaactagagacaacaaaagatacaaaaataataaactctcaagtaaatcatttgtttatacatggtgtcattctacaaatacttgttgagatttacaatgttctccccacagtacagttgccattacaaggagctaacacctggtagcaggaggtgggtaccacaaataaacacagtgaagtgttgtgtagccargataggcatgtgcacaagttacagtgagggtacaaaggagaaagtgcttggttttctctgagtcaaaaag

SEQ ID NO: 190740 - DNA, 629 bp, Homo sapiens
gcctggtctgaatgtgtccttccaaaacttatgtgttggaacttaaaccccagtataataatattagaggtgggggctttaggaggtgattaagttatgagggcagagacctcatgaatgagattaatgtccttataaaaagaggtgcgagggtgctgcctctctcactttttcccttccatcccttctaccactgaggacacagtatttgtcccctctggaggactcagcgacaagctgccatcttggaagcagagactgtgccattactgcacactgaatctgccagcagcttgagcttggacttccagtcttcaggactgtgaaaaataaaattcctattatttacaaattacctgttgtggtattttgttatagcagcagaaatggagtaagacatctgacatcctggccccaatatctttctcatcattccagtctgctctgagaaactctctctcctagtctggtggtacaaactcctgggatccaagcacggtgasagcccctaaagaatgacctcttttgctaatggggaatctttcttggttcctacactgctgtgatactgctatcctgggggtagaatgccagttcccaaggtagttagaggctgggaagaggacatt

SEQ ID NO: 190741 - DNA, 365 bp, Homo sapiens
ctcgggaagcttaggtgggagcatcacttgaacccagggggcagaggttgcaatgatccaagatcgcatcactgcactccagcctkggcaacagaatgagaccctgtatcaagaaaaaaaaaataaagagagagagagaaatagagaggagggagatgccaggttctttttaacaaccagctcttatcggaacaaataaagtgagaactcactcattttctaccactgcagggagagcattaatctattcatgatagatctacccccatgacccaaatatttcccattaggccccacctccgacactgggggtcaaatttcaacatgaaaccaattgatatggtttgactctgtgtccccaccca

SEQ ID NO: 190742 - DNA, 365 bp, Homo sapiens
ctcgggaagcttaggtgggagcatcacttgaacccagggggcagaggttgcaatgatccaagatcgcatcactgcactccagccttggcaacagaatgagaccctgtatcaagaaaaawaaaataaagagagagagagaaatagagaggagggagatgccaggttctttttaacaaccagctcttatcggaacaaataaagtgagaactcactcattttctaccactgcagggagagcattaatctattcatgatagatctacccccatgacccaaatatttcccattaggccccacctccgacactgggggtcaaatttcaacatgaaaccaattgatatggtttgactctgtgtccccaccca

SEQ ID NO: 190743 - DNA, 365 bp, Homo sapiens
ctcgggaagcttaggtgggagcatcacttgaacccagggggcagaggttgcaatgatccaagatcgcatcactgcactccagccttggcaacagaatgagaccctgtatcaagaaaaaaaaaataaagagagagagagaaatagagaggagggagatgccaggttctttttaacaaccagctcttatcggaacaaataaagtgagaactcactcattttctaccactgcagggagagcattaatctattcatgatagatctaccyccatgacccaaatatttcccattaggccccacctccgacactgggggtcaaatttcaacatgaaaccaattgatatggtttgactctgtgtccccaccca

SEQ ID NO: 190744 - DNA, 545 bp, Homo sapiens
aagatcgcatcactgcactccagccttggcaacagaatgagaccctgtatcaagaaaaaaaaaataaagagagagagagaaatagagaggagggagatgccaggttctttttaacaaccagctcttatcggaacaaataaagtgagaactcactcattttctaccactgcagggagagcattaatctattcatgatagatctacccccatgacccaaatatttcccattaggccccacctccgacactgggggtcaaatttcaacatgaaaccaattgatatggtttgactctgtgtccccacccatatcttgcctcaaattgtaatccccataatccccacatgtcaaaggcgggaacaggtggaggtaattgcatcmcgggggtagtttcccccatgctgttctcatgacagtgagtgagttctcatgagatctgatggttttataagcatcgggcatttgccctgcttgcactcactccgtcctgatgccctgtgaagaaggtgcctgcttctcctttgccttcaatcatgattgtaagctt

SEQ ID NO: 190745 - DNA, 545 bp, Homo sapiens
aagatcgcatcactgcactccagccttggcaacagaatgagaccctgtatcaagaaaaaaaaaataaagagagagagagaaatagagaggagggagatgccaggttctttttaacaaccagctcttatcggaacaaataaagtgagaactcactcattttctaccactgcagggagagcattaatctattcatgatagatctacccccatgacccaaatatttcccattaggccccacctccgacactgggggtcaaatttcaacatgaaaccaattgatatggtttgactctgtgtccccacccatatcttgcctcaaattgtaatccccataatccccacatgtcaaaggcgggaacaggtggaggtaattgcatcaygggggtagtttcccccatgctgttctcatgacagtgagtgagttctcatgagatctgatggttttataagcatcgggcatttgccctgcttgcactcactccgtcctgatgccctgtgaagaaggtgcctgcttctcctttgccttcaatcatgattgtaagctt

SEQ ID NO: 190746 - DNA, 601 bp, Homo sapiens
  misc_feature (1)...(601): n = A,T,C or G
ggttgggggattctgaaggacatatatttatcttttaagtttgcttacaatgtacccatcaccatcaggaaatgtcaagttcctagccctgtgakttcatcctgaggactcctgggagttaggggaatcaccatgtgggaaaaaaaagacaataccttttattcaaatttttaagggccagtgtgagttgtcatctttccatattcctgagtattcattcatttttatcataaggcctgtgggtctgcggttacctttgtcaaaattactggcactaagaaaccaggatgcaagttaaaagttctcagtattnatctaaatagaaaaataagtgatnatcggtaacatataagtgattgtcttgaataattgtttatttgtgccttcagagttaacctagacttatgttcctcctgtccagtggactgtcttatttattgctgaagacctaactctgacaggcagctagacattttttcagtagctgtggaccattaaaacaattggtcagttaagtcctttcaggaggaaaatctctgacttgtttgtaactgtgtaagtaggcaccttctgggtccacacagcacaaatcctaaatagc

SEQ ID NO: 190747 - DNA, 280 bp, Homo sapiens
ttatttacagcataagaggctcaagtttgccgctcatgcctctcagaagataatcactagctaagcatctttataagaatatctgtgtcttttaaaatgcctacaaatcagaaagtgagcttttatagatcaggagcggcctgtggatgctgtgatctaaagacttgggagtctttcatatagctccagcccagggaacaaagcctcscctatccccttctccttatgtctttcagaactgcccccacccagcccctgagccctggggtaagccaccttg

SEQ ID NO: 190748 - DNA, 605 bp, Homo sapiens
ccttatcattatataataaccttctttgtttcattacagcttttgtcttgaaatctattttgtctgatatagctactccttcttcatttccatttgcatttgactatctttttattttctttattttaaatctgtttgtgtcttataggagaagtgaatttcttataggcagcaygtagttggcatacctttgacaggcttggtagagcattcctttttgttgataatgttccactgaatggatgtaccatcatttgtttgcctttcacctatgcaaggatatactgtttgcttctaacttggggcaatataaataaagcaattataaacattcatgtgcagattttgcttagttataagttttcaaatcatatgaataaataactaaaagtgtgatgactagattatgtggtatgtctatgatagggtttgtaaaaatgactgccaaattattttccagagtgatgtatcattttgtattttcattaaaattaatgtcagtttctcttgctctgtattcttaccagcattaaatattattttttaaaaattaacatatgtagtggtatctcattataattttaatttgcttttttctaattaaa

SEQ ID NO: 190749 - DNA, 598 bp, Homo sapiens
  misc_feature (1)...(598): n = A,T,C or G
gactgtttttataaaaatatcacaaatattataaaaataaagaaaaataaaatattatttaaatagttaatgttttataataatttctctattcttaagttacactgaactcagcccccatctgtttgcaattttctttcctctgccttactcttagtatgttaatgttcataattaattcaaatcctaatgatggtcatatacattcctctagttttaattcttaagtccttttttgtatattgtcattataagatatccntgttggtgtttcaagtgtaatataatgagctcagcatattccagctcattccactgaccaatccrctgtgggaagtcagggacctgaacggaggaccagctggagctgtggcagaggaacataaattgtgaagatttcatggacatttatcagttcccaaataatatttttataatttcttatgcctgtctttactttaatctcttaatcctgttatcttcgtaagctgaggatgtgcatcacctcgggaccactgtgataattgtgttaactgtacaaattgattgtaaaacgtgtgtttgagcaatatgaaatcagtgcaccttgaaaaagaac

SEQ ID NO: 190750 - DNA, 637 bp, Homo sapiens
tcttgcctgccaccatgtaatatgagcctttggcttccaccatgattctgaggcttccccattcatgtggaatggtgagtcaattaaacctctttcctttttaaattacccagtcttgggtatgtttttatttgcagcatgagaacagacgaatacagttatgattgttgcttttcatttctacaaaaacagccatgtcatctgagataaagaaaattttacgtttatattttccaatatgtataatttctttttaactttaatagactacctagacccttctctacagtatggtacagtaagtaaacctacttgcatgattggatatccttgaagagagagagcattttttgctagcttatgatcttgggaaaaagttattcactttttctctattaaggttgatatttgccatacggtttttgagatagcctttaaaagtttgatggtattttcttcaatacctactgttgtgagagttttttatcatgaatggatataytcaattttgtcaaatgttttaatgtatcattgaggaggaattattctgagcttttttttgaagttagtgatataaagctaactatattatcctcagttaatattttaatatttcaatgctctacagagatattct

SEQ ID NO: 190751 - DNA, 557 bp, Homo sapiens
tctcaataagtattagggcaaatcccacatttagttttttctgcagcagtattttgcctgttcttggatgtaaaatctactattttctctttctaattttgtaattagatagatatttgggcataaaatctaccaaatgcatttcaaatcctcttaatagatattttaaaaattctgtagaaatcttattgaaatcaatggcattgactgtacaaataaacttgaggaaaattgatacctttttattatattttctaatataaatagacaaattcctccacatttttaacaattgtgttttgtgtcttctaagaaatgaacaatttaattttatttttcaattatgtatagaaagacaccagcaatttatattaattttatgttcagataccttattaaactttccaaacaacttaaaaaacatatttcaggatattatcyataaaaacttcctcagtctcactagacaggccaacaggcaaattcagcaattacagagaacccctgaaagattctacaacaagaagattatctccaagacacataattgtcagatt

SEQ ID NO: 190752 - DNA, 516 bp, Homo sapiens
aaaaacacacttaagtacatagacaagtgacattgtaaagcaaccacataaacaagttggcataataaccagctgataacataatgacaggatcaaatccacacatatcaatactaactgtgaatgtaaataggctaaatgtctcatttaaaaagcacagagtgacaagctggatacaaaagcaagatttgttgatatgtggtcttcaagagaccagcyttacacgcaatgacacccataggctcaaagtaaagacaaggaggaaaatctactgagcaaatggaattcagtaaaaaaaagcaggggttgcaatcctaatttcagacaaaacaaactttaaagcaacaaatattaaaaaagaaaaagaaaaagaaaaagaagggcattacataatggtaaaggattcaatttgaaaagaagacctaactaccctaaatacatatgcaactaccacaggaacatccagattcataaagcaagttcttagacacctacaaagagaattaggctcccaca

SEQ ID NO: 190753 - DNA, 505 bp, Homo sapiens
acaaaaaacccaatagtctttattacttctttttaattgtttaactttattactgttgcaccatttatacaattacatataatttcaatgcatccattgtacatttttttgttttttttttgttttttttttccattttccaatgagtggtgtgttggtgtctgtgacacagaatggaagagaaactggaactgcaatgaacgcagactttttttttttttttttttcatttccactgaccaataaacagaactacaggtgcacccaaccacggacatgcattaactcgtcatgaraaatctaggtaggctaagtaggatgagagaatgtttgtcactcccaaaaatatctggagaggaagaatggaggattggcattgagatccatgtggacaagctaagtgggctctgtctgaaagctggcattcatccacaacattaaaaaaatatcaaaataagaaaggctgtaaattaaaaagaaaacacagaaaatactgctctcataa

SEQ ID NO: 190754 - DNA, 505 bp, Homo sapiens
acaaaaaacccaatagtctttattacttctttttaattgtttaactttattactgttgcaccatttatacaattacatataatttcaatgcatccattgtacatttttttgttttttttttgttttttttttccattttccaatgagtggtgtgttggtgtctgtgacacagaatggaagagaaactggaactgcaatgaacgcagactttttttttttttttttttcatttccactgaccaataaacagaactacaggtgcacccaaccacggacatgcattaactcgtcatgagaaatctaggtaggctaagtaggatgaragaatgtttgtcactcccaaaaatatctggagaggaagaatggaggattggcattgagatccatgtggacaagctaagtgggctctgtctgaaagctggcattcatccacaacattaaaaaaatatcaaaataagaaaggctgtaaattaaaaagaaaacacagaaaatactgctctcataa

SEQ ID NO: 190755 - DNA, 505 bp, Homo sapiens
acaaaaaacccaatagtctttattacttctttttaattgtttaactttattactgttgcaccatttatacaattacatataatttcaatgcatccattgtacatttttttgttttttttttgttttttttttccattttccaatgagtggtgtgttggtgtctgtgacacagaatggaagagaaactggaactgcaatgaacgcagactttttttttttttttttttcatttccactgaccaataaacagaactacaggtgcacccaaccacggacatgcattaactcgtcatgagaaatctaggtaggctaagtaggatgagaraatgtttgtcactcccaaaaatatctggagaggaagaatggaggattggcattgagatccatgtggacaagctaagtgggctctgtctgaaagctggcattcatccacaacattaaaaaaatatcaaaataagaaaggctgtaaattaaaaagaaaacacagaaaatactgctctcataa

SEQ ID NO: 190756 - DNA, 551 bp, Homo sapiens
tggtacaatttaggtggtaggtatatgggtgttgacttaaaattctttcaaattcatagtatgttttgaattttttacaayataacattgaaataaaatgaaaacaaaatccatatacatccagaacattcaaccaacctaaatctgttctccctggattattctcttccttcctttccttcttcccttctttcgtttttcattatcactcttgattgtggtcactaaaaaataatcttaaaagaagaagcacttatcatcaaaaatatatttcttggacctgagcttatttgggtattttacaattaaaacattttaatcttggaaaacatcaactctgacacttgggctacaaatgctgctttagatgcttttattgaaacagtcaatctacatgagataatttgatactaaagagtgaaaattatttttaagtattttgatggcttcaatgaaaaatgtgaccaaagtaaagaatatgtaaattactctagttgttccataatatttcagcatcatcacacccccaaaaaatgataaactgtgacaac

SEQ ID NO: 190757 - DNA, 540 bp, Homo sapiens
cagtcttccttactcagtcaaccaactcaaaggctaatctcttccaaaaacaccctcacagacatacccagaaataatgttttagcagctacttgggcatcctttaacctagtcaagttgacacataaaatgaaccagtacaatggccatgcaatgctagagaagaattaaatgtgtacccctgtcaacctaagggaagaaactggggcacaaaatataattttaaggagtttgctcagccargtgcagtggctcatgcctgtaatcccaacattttgggaggctgaggcaggtggatcacttgaggccaggagtttgagaccagcctagccaacatggtgaaatctcatctctactaaaaatgcaaaaattagccaggttggtggctcacatctataatcccagctactctggaggctgatgcaggagaattacttgagcttaggaagcagaggttgcagtgagccgagatggtgccattgcactccagcctgagccacagagtgagactccatctcaaaaaaaaaaaaaaaaaaaaaa

SEQ ID NO: 190758 - DNA, 554 bp, Homo sapiens
ggaattccaggcatgttcaaaagcatagcagggagaattgtacgatgggttggaaagtgtcccgtacagctagagtcaagggaacaaaccaggaagtgggaagagatggggctgcactttttctttgatctcttactaggttttagatrctgtgctttagaccacttacgtcatttgattctggtgacaacgctgtgagttgagccagattattactcccagtttacagataaggaagataaagcacaaagaggttatgtaacttgccccagagtctcagtgccaagcttcaagcccggggtctgctagcatcttctagtcatgagagagggagggtcaagaagcataaagccacgcaagtcttcaaagagatttgaggtgacagaacagtgagtacctaacccgagtgtaaagtacgcccgcccactcatgcttggtttgagggccagcctactaggtggacggagacaaagtgggggacagcttagagaaaattcagggcttcctcctttgcgctcattaagatagcaccaacctccaagaagttatgaccc

SEQ ID NO: 190759 - DNA, 268 bp, Homo sapiens
tactatgcctggatgtgcacgtaatccagatttatgtttctctccacccaaacatctcagcggagtaaagaataacaaggcagcattactgcaaacatatctcgcctcccaccatagggcggttttkctactatctcagaattgaacaaatgtacaatcgggttttataccgagacattcagttcccaggggcaggcaggagacagtggccttcctctatctcaactgcaagaggctttcctcttttaccaatccacctcagcacaga

SEQ ID NO: 190760 - DNA, 268 bp, Homo sapiens
tactatgcctggatgtgcacgtaatccagatttatgtttctctccacccaaacatctcagcggagtaaagaataacaaggcagcattactgcaaacatatctcgcctcccaccatagggcggttttgctmctatctcagaattgaacaaatgtacaatcgggttttataccgagacattcagttcccaggggcaggcaggagacagtggccttcctctatctcaactgcaagaggctttcctcttttaccaatccacctcagcacaga

SEQ ID NO: 190761 - DNA, 573 bp, Homo sapiens
aggaagtttggtttcatgattaatagtctccaaaataccactgcttatctgctaaaatatttgaaattcctgaactaaggacttatgcctttgatcatgaggtatgatgttttcagcagcattggttgcaactctatgggatgagagagggaaccttgagtgtgacattttagattgggaggctgactggatttgtatagtcctgttaaaagacaggtcattagtctgtaggcaagccacagcactgcgttcacaaagccaacaacccagtctcctcagctctcctccctagaaccgcacctgcttattttggtgatttaggcaacttttgtgcaatgcagttagcactgtcatgagctgagtctcaatttcttcatctgcaaaatgggattaagaataatacrtaccacatgcttggctaagcttcttcaccattgtgagcacaaatgaatataacctccaggtaatgggaactgtaacaagtactgtcacgaggaatctccagcagcccctccagagaagagaagagtgcatgggagggaaaacgttgaacaatagagggtcctaattaag

SEQ ID NO: 190762 - DNA, 573 bp, Homo sapiens
aggaagtttggtttcatgattaatagtctccaaaataccactgcttatctgctaaaatatttgaaattcctgaactaaggacttatgcctttgatcatgaggtatgatgttttcagcagcattggttgcaactctatgggatgagagagggaaccttgagtgtgacattttagattgggaggctgactggatttgtatagtcctgttaaaagacaggtcattagtctgtaggcaagccacagcactgcgttcacaaagccaacaacccagtctcctcagctctcctccctagaaccgcacctgcttattttggtgatttaggcaacttttgtgcaatgcagttagcactgtcatgagctgagtctcaatttcttcatctgcaaaatgggattaagaataatacataccacatgcttggctaagcttcttcaccattgtgagcacaartgaatataacctccaggtaatgggaactgtaacaagtactgtcacgaggaatctccagcagcccctccagagaagagaagagtgcatgggagggaaaacgttgaacaatagagggtcctaattaag

SEQ ID NO: 190763 - DNA, 488 bp, Homo sapiens
acaaggtgatctttttctcctagaatctcaagaaaggaacacagcactgccaacatcttcatttcaggttagggaaatctgtactggatttaaagaattagaaaataataattttttgttgttttaacctactacatttttggtcatttgttatggcagcaacataaaactaatgcacagttttcatccaagttatacttctaattaaaaccttaccactttaacaaatcctgttctttctagccacagcctcttagcrtgaactccagtttctttttgtaaagtaatcctctataaccttttatactaaactttctatactaaaagcatcagtagatttccttgctgtatttcagcccaaattagctgggcttgactaatcacagcagggtcatttaggagtgacataatcctaaacacaatcctgaaggtgaatgcatgctctcttttctgacattaaaggtggtttcaatcacgtctggcaccga

SEQ ID NO: 190764 - DNA, 593 bp, Homo sapiens
tgatctttttctcctagaatctcaagaaaggaacacagcactgccaacatcttcatttcaggttagggaaatctgtactggatttaaagaattagaaaataataattttttgttgttttaacctactacatttttggtcatttgttatggcagcaacataaaactaatgcacagttttcatccaagttatacttctaattaaaaccttaccactttaacaaatcctgttctttctagccacagcctcttagcatgaactccagtttctttttgtaaagtaatcctctataaccttttatactaaactttctatactaaaagcatcagtagatttccttgctgtatttcagcccaaattagctgggcttgactaatcacagcagggtcatttaggagtgacataatcctaaacacaatcctgaaggtgaatgcatgctctctyttctgacattaaaggtggtttcaatcacgtctggcaccgactgaaaaaatgtattctggaatgcctcaggatgaaggaaagaaaaacatagatactgatcttccaacatcgcaatctggttctaatatcagttgtctacaggaagaattca

SEQ ID NO: 190765 - DNA, 616 bp, Homo sapiens
tgatgaagtagccagtggtccccacacttcctggacagctagcttattaggaataagtctttgtcatcaaattgcagagaagactgcaaactcctcttactggttttatgagtaactgtacccgagggaggcttgcatgactgtctggtaaactccaggctgggaaccatttgtgaatatggttgcagaggatttcagtgtgaataagaccaggtgcctgaaaagctagattttaatagaatgatacaatcaataatattaccatttaacatgttgtatcagttagaattgggcagttgcatggaagagaaggcccaaacagtgctttatccaaaayagaaatatatttgttgcacctgtaaaagcagagtcccaagaaaggcatcaagggagtgtgtggacctgctttcctaagtctgcaggacacaggatctgtccagctcataccgcttctgttcccagaatgtgtctcgtgacctcagtgtccaggcaggatgtcagagctccagccatcgcagccatggtccagggaggaagaaggtggccctcttccattcagagacactttctgggaattgcatgaagcacttgtacttacatttcatgggccgaaaca

SEQ ID NO: 190766 - DNA, 357 bp, Homo sapiens
gtgcaaacacccatccaggtctgatggctgctgatacaatgacatgctccagtgtatggcacactatatagtgtccagggaagactgcaaagtatttctatacctatttttttaagtacagtgcattgtactacatacagaattaaatattgttaaattatgcaggaaaatcctttaggtacataatgccatttgattgtatcttttygtttgtttgtttttgtttttgagatggagcttcgctcttgtcacccaagctgaagtgcaatggtgcaatcttggcccactgcaacctccacctcctgggttcaggcaattttcctgcctcagcctcccaagtggctgggactacaggca

SEQ ID NO: 190767 - DNA, 627 bp, Homo sapiens
aaacttcttttacataaaactcagattgctaattaaataatgcacttatttatatgatcattttactctcatctcaaaaaatgatttatttttccagttcaagctcaatttcagaactggaaacactgtgatgtttatttttcaggggaccttttactgtgattatggaaaaacaagtacatataaataattgcacttcttatttacatgatcattttacaatcatctagaagaatgatttatttttccagtcaagctcaatttcagaacttgaaacactgtgctgttcatctttgaggaggaccttttactgtagttacagaaaaacragcacatttaatttgtaactaaaataaaaagacaacaactataataatcattatttaacagttaccaagtgcttcctctgggtcagggactgatctaagtatttcacagtaatgaattatttaaccctcccacaaccctctgaggtacataatattcttccccgttttgcagctcaagaaacagaagcataggaaatttggtaatttaagacggtattgctgatacatggagagacaggatgaacatgcagccagtctggcaagaaactccacgctcaggcactcgatggcatggggt

SEQ ID NO: 190768 - DNA, 498 bp, Homo sapiens
tggctctctggaccttttcttctctactgtgatgaggacatagttcattttaccaccttcacatatctgatgccatcttggagggatgcagggaagagagtggaactctgagaaactgattatttttatcaaaggaaagcaagcagtacctaaagggaccatttaaattgcattaaagttaccaggttgatttattagattcactttttgactcatgaggaagatcagaatagtttttaggaaactgttcaattgcaagtactgtgggaaaacttacaacattaaaatgtgtggactgcttaytataggctattggtaacatccatgtaagacaggtattatcacctcattttacagacaaggttactagaacctggtaaggtaaactcacttccccaaagttacatgctcagtaaataaaagaggcagaaacttagcacaggttattgtaatgtcagatctcatactcagctactatgctatgccatcttccttgta

SEQ ID NO: 190769 - DNA, 594 bp, Homo sapiens
cctcagcctcccaaagtgctgggattacaggcatgagccacctggccagccacatttttttcttaatcacaataatttcctcgggcaacacatgaatcatttataccttgataatgaatttgaggtcagtcacttgtattcasttttcaagtaagactttttaactttcttatttttatcactttttttcaatcacaagcatagaaagtgtaaaatcaggtatttctagaaattgttcttagagataattctgtccaaccctttagttttactgctaagaagttgatatctcgaaaagttaaatgattttcttaatgttacatattgagtttctaaccaaagaaggctttttgactctgagttcaacagttactgaagggtggtaactcttcaaattaatactcacatatattatattgagccacacagtattgaacttccaactgttttttaacttaattttatgccaaggaagaagattccattggatttactaatagaaaattaattgcaacaccaacacctgatatcatttaaaatctccccatctcgcaagaactaaaaactacctacctcactggcacataaacaggt

SEQ ID NO: 190770 - DNA, 561 bp, Homo sapiens
ttggctatttgtatatcttctgatatggtttggctctgtgtccccacccaaatctcatctcgaattgtattccccacaatccccatgtttcaagggagggacatggtgggaggtgattggatcataggagcagtttctcccatactgttcttgtgatagtgagtgggctctcacgagatctgatagtttwataagtgttcaactcttcctccttcacacgctctctctcacctgccaccatgtaagatgtacctgctttcctttctaccatcattgtacatgtcctcaggcctccccagccatgtagaaatgtgagtcaatgaaacctctttcctttataaggtacccagcatcagtaagttcattatatcagtgggaaaatggactaatgcatcttctttggacatgtctattcatgaccttaactcattagaggcatcacacataatgatttcaaaatatattacaaggctacagtaatcaaaatagtatggtactggcattaagacatgccatatagacccaaggaaatgaatagaaagcgcaaaataaactgttgca

SEQ ID NO: 190771 - DNA, 561 bp, Homo sapiens
ttggctatttgtatatcttctgatatggtttggctctgtgtccccacccaaatctcatctcgaattgtattccccacaatccccatgtttcaagggagggacatggtgggaggtgattggatcataggagcagtttctcccatactgttcttgtgatagtgagtgggctctcacgagatctgatagtttaataagtgttcaactcttcctccttcacacgctctctctcacctgccaccatgtaagatgtacctgctttcctttctaccatcattgtacatgtcctcaggcctccccagccatgtagaaatgtgagtcaatgaaacctctttcctttataagstacccagcatcagtaagttcattatatcagtgggaaaatggactaatgcatcttctttggacatgtctattcatgaccttaactcattagaggcatcacacataatgatttcaaaatatattacaaggctacagtaatcaaaatagtatggtactggcattaagacatgccatatagacccaaggaaatgaatagaaagcgcaaaataaactgttgca

SEQ ID NO: 190772 - DNA, 595 bp, Homo sapiens
aatatagaaaatttagtaatgattataataataatgacaaaaacaataaatatttctgaagtaaaaggcacaagtttccatcttgaatgagctctctcagagcctagcatcataagtgagaaatgactcataccaagtcatgatatgrtgacatttcagttactgggaaaacagatcttaaagcttccaaagagaattaagagtatgtcctgtataaatgatcgagaatcaaaatgacattagacttcccagaagtaaaactagaagctagaacatggtagagtaaagccttcaaaattttgaaagaaaatgaatcaaacttggaattctgaaagtaactgagttatcagctgggtataaagttaaagaaataaaatttaagatattaatggtcttacaggataaatgacttctagatatctgctgtagtgtctatagttaacaatacaagtggtatgcacttaaaagttgttaagacagcagacctcatgttaagtgctcttaccacaaaataaataaagttaaaaagcaaagagacacaaggaaactttggaagtgacagatgtgcttattgccttgattatggtgatggtat

SEQ ID NO: 190773 - DNA, 572 bp, Homo sapiens
ttctgttaccccagtccccatgctccttcccaccccagtaccctacaggggctcttttctcattgggcaatggtctcatctcatttctacctggctaattcttcctcaccttttcagtctgaggtcatgccacttccatagaggacacattttactgccaaattcagattagattccacttaatataccctctgatacactatagttttcctccatgacacttagcaaaattgttgtgacataacagttatttggtagttgggttttttgtttgtttttaatatccctctctcctacacagatgtaagatccttgggacaggaacagcatcttttctgttaccacctaatctcagcatggtgctgatacayaattaatgctcactaggtatttggtgaatgtaggatttcaccaaatcctttcatcccccaccaggacctgaaggagtagtaatattgttagtatccaacattttgccacaagtaatatgtattttagtagcacttctagaaaaatgagtttaagacatcatctaaacagtaagatttgcaaagactgtactaggactgagt

SEQ ID NO: 190774 - DNA, 508 bp, Homo sapiens
ttcaagcctcattcatgccttcagatggcactttaatacacacaaattatatcacagaaaataagttgtctagtttttaaagcataatggagataatctcaaacacactttgtctccttcaaggttttcctagggctagtcctaaactgtcctcctaattccttataggatagtctataaggaattttgtgtctccagtagaaatcttgtgtctgtatttttgtgcctccactttttttcttttgactcctctgccaaactcagatttatgaaggacataatgttccattacctgtctaagatttaggtgcattaattatcctccttcttccactgctttcaccagcttttcactttccaggcctctrttggtgcaatgctgctgctggtcagagcttcaggaagctttccatacacggggcgcctggaatacttcaacaaacacaaatcagatttttgacaacagccaaattgcttctttccaatgctgagccactgacatgtacca

SEQ ID NO: 190775 - DNA, 480 bp, Homo sapiens
acagctggagtggctatgtgatatgaaacgaaattgacagtaaaaaaatgttactaaagataaagattgatattttatggtcaacccarcaggaagataacaattaaaacttataagtacctaacaacaaagaccaaaatacatggagaaaaactgacagaattaaaggagaaatagacaacaataattcacagagacttcagtaatctattttcaataatgagtataacccaaaataactggaaacattcacacaaatgtcatagcagcattatctgatagcctaaaaatagattcaacccaagtgtccatcaattgatgaacgggtaacaaacatagcatatctatacaatcaatattattcaactttaaagagaaatgtctaccagtacatgctacaacacagatgaacctagaaagtataatgctaagtgaaaaaagctagtcacaaaagaccatacacatataccgtgtaatttc

SEQ ID NO: 190776 - DNA, 430 bp, Homo sapiens
aaaaatatttgataattcatttaaaataaacaataaacccattacatattgcattagtttcctgaggatcccgtcacaaattactacaaatgtgatggcttgaaacaacagaaattttttctctcagagctggagagtcaagaagtctgcaagtaaggtattgccaaggttgataccttctggaagctctgaaggagaaggtgttccaagccattctcctagtttcccatagcgatgggcaatccttgrtgttccttgacttgtgaacatatcattcattccaatctgtatctttgtcttcagtatgccattcccctcccccaaccctgcccctgtatctttgtgtctgtgcatctcaaatcttccctcctcttataaggtgtgttagtccatgttcatactgctatgaagaaatacccaagacagggta

SEQ ID NO: 190777 - DNA, 495 bp, Homo sapiens
agaattctataaatagaatgatgtcctttgtttccaaagtggatgtgctagagcaatgcgaaaataataataaaagtgagatatttcgtggcaaagttatctcggggtaaatgctgcagcagcaagcgctgctcagggcaaatgagaaaaacgttaattttatgggccgactttactggactgtgggatgcycagatagctggtaaaacattatttccagtgtgtctgtgaggttgtttctggaaaaaattagcatttgaattagtagagtgagtacagaagatcactctcccaaagcaggggacaccattcagcctgctcaggaccaaaatttcatctctttacttcagcggggacatctgtcttctcctgtccacaggcctggcactcctggttcttgggtctttagatttacactgagggttataccatcagttcatctggcccttcagacccagactgaattgtactaccttctttcctggttcgccagct

SEQ ID NO: 190778 - DNA, 495 bp, Homo sapiens
agaattctataaatagaatgatgtcctttgtttccaaagtggatgtgctagagcaatgcgaaaataataataaaagtgagatatttcgtggcaaagttatctcggggtaaatgctgcagcagcaagcgctgctcagggcaaatgagaaaaacgttaattttatgggccgactttactggactgtgggatgctcagatagctggtaaaacattatttccagtgtgtctgtgaggttgtttctggaaaaaattagcatttgaattagtagagtgagtacagaagatcactctcccaaagcaggggacaccattcakcctgctcaggaccaaaatttcatctctttacttcagcggggacatctgtcttctcctgtccacaggcctggcactcctggttcttgggtctttagatttacactgagggttataccatcagttcatctggcccttcagacccagactgaattgtactaccttctttcctggttcgccagct

SEQ ID NO: 190779 - DNA, 590 bp, Homo sapiens
tgggcatgtctccagaaatcaccaacagctgtgcgtttaaagataactaaaaataatatttcatattgagaaattggaatatcggggttgagtagaccggaaaatagggaagaaaaggagaagacacagaaaaaaaaagccttaaaacttcgtgcttcagcagttgaacctctcttgattatcattcccagaattccattctactttttccattttttttttttttttgagatggagttttgctctgttgtgcaggctggagtgcagtggcacgatcttggctcactgccacctccgtctcctgggttcaagtgattctcctgtctcaggctctgagtagctgggattacaggcgcccgccaccacacccagctaatttctgtatttttagtagagacggggttttgccatgttgcccaggctggtctcgaactcctgacctcaggtgatccacccaccttggcctyccaaagtgctgggattacaggcgtgaacctccgtgcccggcctactttttccagatttggtcatgagtttcctagggctgccataatgaaggactacaaactgggtgacctaaaacaagagat

SEQ ID NO: 190780 - DNA, 553 bp, Homo sapiens
aaaaaaaaaaaaaaaaaaaaaaaagaaaaaggaaaaagacagaaatatcaggcttcaattgacataggactgcaccttcttaaactagacattaggccaaatcattctgttatgacataccataaacatttacgtttttcttcctagaaaaactgattttcctcaatgaagaacgtttttatcaatggtttcaattcattattccttgtaagttactgataattttcattttaraatttagtagcttgctttttaaaaaaatatacttgtatttagatacagcaaatgattctggttacactaagaacataaagctttgtcttacattaactttattaagttaaaaaaggtgaatctatctgatgagctagcaaatggcaaacatgggcagggtctgggaggagtgggcaggcacctggcgtcctccaggaaagaactgggtcctgcccaacagtatggactccatctaagcaggggtccatcagagcctggtcagaaccaggcagggtcatggctgaacctcccctccttgctactgtctgcagtgaggtca

SEQ ID NO: 190781 - DNA, 614 bp, Homo sapiens
aacatgtttgttgtttaaaattaattcagatgttgaataataatggcatatagatactacaagatataatgcgactttattaaaaagagtatcttaaatctctacatattggtatgtagggtggccataacacgttttctatggaaaagggggaatttcagaatcctccatttayatttgcgtgttactgaagtaaaacagttcccaggagtgtctgccccacactgagcggtgtggacagagcaggaaggggtgcaggcaggggttactgaccgggcagtgggaggctcaagggtgaccgtggatgttttctttacataccatggagtagtttcagttgttacaataaccatatctagttgtgaaattttaaaaataaagtgaaataaatctaaaagcaaataaaatctactttaatcaagtgattcaccatctgaaagccatcggtgactctcagccacagcattcagctggaaagttcgaagcgtgtcaggcaacaccacttgcatctggatcctaactgcctctccagcctcgtcttctacagcctggtcccaatcccaccctgcagctcatcacagggtcctcctgccaggtacaatccccgcttttgc

SEQ ID NO: 190782 - DNA, 614 bp, Homo sapiens
aacatgtttgttgtttaaaattaattcagatgttgaataataatggcatatagatactacaagatataatgcgactttattaaaaagagtatcttaaatctctacatattggtatgtagggtggccataacacgttttctatggaaaagggggaatttcagaatcctccatttatatttgcgtgttactgaagtaaaacagttcccaggagtgtctgccccacactgagcggtgtggacagagcaggaaggggtgcaggcrggggttactgaccgggcagtgggaggctcaagggtgaccgtggatgttttctttacataccatggagtagtttcagttgttacaataaccatatctagttgtgaaattttaaaaataaagtgaaataaatctaaaagcaaataaaatctactttaatcaagtgattcaccatctgaaagccatcggtgactctcagccacagcattcagctggaaagttcgaagcgtgtcaggcaacaccacttgcatctggatcctaactgcctctccagcctcgtcttctacagcctggtcccaatcccaccctgcagctcatcacagggtcctcctgccaggtacaatccccgcttttgc

SEQ ID NO: 190783 - DNA, 596 bp, Homo sapiens
gaatgtgattctccggagccggtcactgagccgtgctgcgggacagagacggggtgggccaggcaccttctgctgtgggcccaagcccctgggctcmttcccttccccagttgagctgtgtaggtggactcaccccatctcctgtcccagcaagctgggaaacagcagagctgcatttttctttagaatcctgagagactgccaaggaaaaggataaaggaagcaaattgaaatttagcatatttcaaaggtgtcaaggatgaaatgtgaaagcagaaccctcctaaaagtgacggttaagactcaagcatattaggtgagtatcgtaatcaagctttttaaagtttgagctttataaatttcttcctaagggaggagcattttgggtgcccactgggaaggtggtttcgtgaattccaggtgatcccagagctctccaagggtggtaggggcacttcccatgcagggctctgggtgctacaataagacaaatgttgacactctaatctgaccttttgtggactgcaacaggcccccctactgagtaaaaatctttttttttttcccagaagagcatcaggaacttgaactaaatc

SEQ ID NO: 190784 - DNA, 528 bp, Homo sapiens
tgaaaccaaaacctataaaacccatgtatccagttttattagaatctaatgtgccaaatatgtactttatattttgttgatcacctatttatacctacaaggtttttctatagagtcttttcgttaaaccaatgacttccttgataacaggctggacctccaccttgtccatttgcactcactattcccrcagaggctgtgagtgtcatggagctagtgcagtagacagaccattccgcgtcagttggtgaattacattaattgattttcaactgttaatcaaccttgcttttctgggattaaatataccaaagcattatatataaattgctggattcaatttactagttttttataaaagatttgtgtgtctagtttcatgaggaatactgtcttttcaatttttgtaaaagaaaagattttataaaataattctcagcactctcagctttacaaaataagttgggaagccgctctctcttctgtatttcctgaaagtgtttgcagaagattgccatggaagagagg

SEQ ID NO: 190785 - DNA, 519 bp, Homo sapiens
aacctataaaacccatgtatccagttttattagaatctaatgtgccaaatatgtactttatattttgttgatcacctatttatacctacaaggtttttctatagagtcttttcgttaaaccaatgacttccttgataacaggctggacctccaccttgtccatttgcactcactattcccgcagaggctgtgagtgtcatggagctagtgcagtagacagaccattccgcgtcagtyggtgaattacattaattgattttcaactgttaatcaaccttgcttttctgggattaaatataccaaagcattatatataaattgctggattcaatttactagttttttataaaagatttgtgtgtctagtttcatgaggaatactgtcttttcaatttttgtaaaagaaaagattttataaaataattctcagcactctcagctttacaaaataagttgggaagccgctctctcttctgtatttcctgaaagtgtttgcagaagattgccatggaagagagg

SEQ ID NO: 190786 - DNA, 617 bp, Homo sapiens
caatttctgggcaaatcctagtgctccgctggactcagagtcagcgggcttgggctacacacgacctagtgagacacgagcttgggcagccaagggagttcttatgcaatccctcccccaaccccaggtagtgcagctcacaactctgggggagacgttttccttttgcttgagagaagagaggaaagactgaaaaaggaatttgtcktggagcttgggttttagctcagccacagtagaatagggcaccaggcagagtcacgaggcccgtatttcaggccctagctcccagatgacatttctaaacacaacctgggtcagaagagaacctactgtcttgaaaggaagaacccagttctggaaagatttatcagctgctgactgaagtgcccactgggccttgaataaacaccagcagtagccaggcaggactcaccatgggcctacagtgagatccagtgtcatgctggcttcagatgtgagtgagcacattctgagctatgatggctatagagagagacctcttctgcttgagggaaggagacaaaagattaaagagactttgtcttgcagcttgggtaccaacacgaccacagtgagatagagcaccaagcagg

SEQ ID NO: 190787 - DNA, 589 bp, Homo sapiens
accagcctggccaacatggtgaaacattatgtctactaaaattacaaaaaaattagcaaaacccagtggcacgtgcatgcagtcccarctgaggctggagaattgcttgaacctgacaggaggaggttgcagtaagccgagatcatgcccttgccctccagcctggatgatagagcaagattctgtctccaaaaaaaaaaaaaaaaagcagtacgagaagctatttaaatctggatgcatgtaaaagaatagccagagggagaaaatgggtttttgtaaggtaattatatggtaactgaaataatatacagttaaggttaaagaagttatacataaaagcacaaaaagataaaaaaattaaaagaaaataaacttataggaccagccctgctgatataaaagcccaatgatagaaattccagaaaataatccacatatttctagattaaaagaagatatcaagcgtacaactggtaggatacaaataatcctacactaatacaagtcaatcatgacatttcaggtcagttaatatcaaagtaagatcctagaaatgtaaagaaaataacacaatgggcttaatcaaaca

SEQ ID NO: 190788 - DNA, 510 bp, Homo sapiens
ggaaggtgagagaggggttaggaataaaatgttacctatttggtacaatgaacactattcaagtaatgggtaaactaaaaccccggaattcaccagtgtacaatgtgcccgtgtaaccaaaaatygcttgtacccttaaagctattgaaataataatcaaacaaacaaactcaggcacacaagtcaaacaattttgattttcaagaaataatgtagatgagctggtaatgtatacctctgaggtagatttgggatataaatagttatgctgccacatccactagtgtatattatttctattttgagcaaagctcagtaccacgaatcaagtggtaaacaggctactacaaacaagatgaaagttcacctactacttaacacatcaaaaaatctacacattcacgttttgcagcatttatagttaaaggtaaatttggaattaagatatttatagacatgcaaagtctcattttttctttttcaaagaactattgagaagacagacataca

SEQ ID NO: 190789 - DNA, 525 bp, Homo sapiens
attgttgtttctcctgatggaagcatccctctctttcgaagtaagacccctaggccagcagtatataaagctgtgggaacagggaataaaaaattygctaatacatcactagggtcaattgtgagtggtttcatttttattgcaccccttgattcctggacccctgaatcctggttatgggagaaagagtactatgtatcgggagccgatttagagcacatgaagccttctaaagaactttgtcccagccctgcagtgctagctattgtcacctagctggcactgtagctgggatttcaaaagctgttctaccttttcatcaaaccaactgcttcaggacgatggggaacatggtaagatcagtgaattctgtgagcacgagttcattgctgcactcctttggccaagtagtgagttccttgattacgagcaacactgtgtagaatatcctgatggtattcactgtgtagaatatcacaaggcattttgtgagtttacaaatgttaattttggcagaaacattgc

SEQ ID NO: 190790 - DNA, 525 bp, Homo sapiens
attgttgtttctcctgatggaagcatccctctctttcgaagtaagacccctaggccagcagtatataaagctgtgggaacagggaataaaaaatttgctaatacatcactagggtcaattgtgagtggtttcatttttattgcaccccttgattcctggacccctgaatcctggttatgggagaaagagtactatgtatcgggagccgatttagagcacatgaagccttctaaagaactttgtcccagccctgcagtgctagctattgtcacctagctggcactgtagctgggatttcaaaagctgttctacmttttcatcaaaccaactgcttcaggacgatggggaacatggtaagatcagtgaattctgtgagcacgagttcattgctgcactcctttggccaagtagtgagttccttgattacgagcaacactgtgtagaatatcctgatggtattcactgtgtagaatatcacaaggcattttgtgagtttacaaatgttaattttggcagaaacattgc

SEQ ID NO: 190791 - DNA, 547 bp, Homo sapiens
agatctatctgcatacttcttcctccaattttttgtcaccaattttcaaatcatgcctttccaagtccctaagcatccaaccaaaccattggccacagcccatcagtagataatgtaatcatacacctagtcatttctcctcccaggtgcacaaccaggtgcccccctamcaagttcttcccattgagaagattttaccttactactgtccagggacatctatgaaaggggctgtagcgctatagctgtccacttttgagtggtgcctgcatatagtttagaaccatctctaaaccaggccccagtcttttcttcctttgtgaactgatcagagggtatgcttcatactgccataggtgtaggctgagagagaaggcagcatagcaggagtagaaaccatgggcatttgggccacttcttcatttaagttactcatacctttaggatctgctcaggctggatcacttgtataccccttccatttgatgatggagtgctgatgtgtgcacccaactttacaacttagtgggtcaggtaacatccagtt

SEQ ID NO: 190792 - DNA, 595 bp, Homo sapiens
agttctctaacgtgatagaatattggtagaagtatagaccataaaggcgattctgataaggtttcagatgcaaaaagggaatgtctcattgaaaaatagagaaatgcccattcttgttatgaagtagcaaagaacttggatgaattgtgcacacgctatacagctttatggaaagtgaaatttcagagcaatgaactgggatatctagtgaaataagtttctaagtaaaatgttgtagaaattgcctagctacctttaaccayatataaaaagtgagataaaataaatgactcaaaggtagaatttataattaagagagaaacagcatagaaagattttgaatattttcaacccggtcatgtaaagaatgaaaaagcatactcaggagcacaaaccaaggatgtggccaagcaaccatttgctaaaaagattagtacagaaagaagggatcataaaaacaatggcagaatgtcactaaaggggtttctgagatttttgaggctgcactttttataatagtcccagaactcgaggaaggcagaatagtttccagagacaggcccagggcactctctaggacaagctgcccataatc

SEQ ID NO: 190793 - DNA, 655 bp, Homo sapiens
gtggtttaactggcctctccaaaagttatgttgaaatttaattgtcgtggtgactgtattaagacttcagattgttaagggtggtgagtagatgatgaggcctccaccctcattaatggattaatgtcattattgtgacggtgggttgttataaaagtgagttctgcgctgtcttactctcttgctttcacattttcttctcttcagccttctgctatataatgatgcaacataaagtctttcacaaaatgcctgaaccatgctcttatagatttcagtctccagaaacatgagctaaataaatttctattgtttataaactactcagtctcagttattctgtaatcacaacacaaaacagactaagacataggctataattttcactacactcwtttaaaaagaatatcatgctaaagagtcatagtttgccaattctgcaagatatgtatgaaaaactccaatagtatgactgatgaagtatcctacactttctgatataggcaagtcaagaaaaattataactaatataataaaactctgaagaaaaatccaagcagtgaactccttttgaggtcattaaaaatcaaataataagacttcttaggcagatataaaaatatgatgtataggtagaacagataaaaacaacaag

SEQ ID NO: 190794 - DNA, 617 bp, Homo sapiens
tattttaacatctacttaatataaatgaacctcagaagataatttgtcattacttgtgttattgtttaaacacaagattttgaattgtaaaatttcaaacttttctgtgagcccccagtactatcttaaacatagacagaaaaatcatgtaaaataaagtgggaaacttttcatactgaatgagtatttttccatttattagaagatctaatgtgttagactattcttttttttaaagaggataatttgacagaataatttacagaaacccyagtctactaaaattaaagagaaggaaaaaaaaaatccccaaacaccttcataaagattgtcaaaggccttcataaaaatattttaaccaaagtgcttttgtctcggttatgaggtctattattttaattaaatttctgcttttaggtgttctgctttctttctgttaaatttatatttcttcttttgtactccactattagaattattcttgctatgtttcttttttctgatgactcgaaatgtataaatatatttttattccattgtttttatatttattaaataaacgtgtaattgtatacatgaaaagggactaagttattgcagagcggtattaatacagt

SEQ ID NO: 190795 - DNA, 538 bp, Homo sapiens
tgtttctcacattgcaaaatacaatcttcccttctaaacagtcccccaaattttaactcatttcagcatttactcaaaatcccacagtccaaagtcttatctgagacatggcaagtcccttctgcctaggagcctgtaacatcaaaaacaagttagttacttccaagacacaatggggatacaggcattgggtaaatacacccatttccaaagggagaaatctgccaaaacaaagaggctacaggccccatgcaagtctgaaacccagcagggcagtcattaaaccttgaagctccaaagtaatctcctttgaatccatgtcttacattcaggcctcagtgatgtaaacagtgggctctcaaggctttgggtatctctatccctgtggctcttcagggtacagccccttcagctattttcatgrgcttgcattcagtgtatgtggcttttccaggtgcacaatgcaagctttcaatggatctaccattccgggatcaggaggatggtggctctcttctcacagctccaatagatgatg

SEQ ID NO: 190796 - DNA, 344 bp, Homo sapiens
aaaaattgctaggactatctttaataaactcatgaaagccttttaaaaatattatattaagcacgtacaataaataaaatatttaayaattgcttgttttataatgttattttagtttaagggtatagttagtattttgagtttattaaacaatctgaggttttaatcaatctacattgtcacatgcatattatcactcataagaaatctatgttaatacacattgtagttaaactctatattaatacacgtggtattttatgccagggtgtataactattaatctttaaatgttagtgttataaataggcttattaacacagtttctcagtataaacatttgc

SEQ ID NO: 190797 - DNA, 383 bp, Homo sapiens
aatccttaaatccattactcaagtatctaatcatatttaaaacattttctacatgattctcagtagattcattactgtcttcagaatggtttgtgtttttcaacaatgtccccccttgttatatcattctacaaacacttattttccagagtatcattaagcattaaatttatacataaatcaaatwcagaaatccatcatcatattgccatctgagggaagatgagctttcttcctaatgaagccttctaattttgatgtattaggaaacctttgcctttaaatctgtatatttttacataagaccttgattttagaaagcacatttaagcattgaatgggtaatgtattaactcagaaaaatctggtaatctcattacagt

SEQ ID NO: 190798 - DNA, 501 bp, Homo sapiens
gactaaaactgagctacttcaaaattcaatggtaaatattacttgaaaggaagaaaattaagcagtgttttctctataaataatgtttaaagaaataaagcctgataatgctgataatgatgatgatactcatattcagacttttaattttgagtaacaatttttgagtaatgaaatatatccatgacctgtgttcaaggtagtgaagtccctgacattttttaagttcaaagtttttatgaatgattgggttgtgaggtgagctgatgcagcctttagcagcctacagtgaatgtaacccctggataagagtgtctgtaagacagagagagtttcttgtcctaataaggtcaagttatgcaatgctgcataactattttaactattttattctcctaggtggcgggggcctrtatagaggaaagtttgatgattgatgtacttgaaatctgaaaatatctatttgagcctgactccgctagtttgcagctaggctttgta

SEQ ID NO: 190799 - DNA, 408 bp, Homo sapiens
gctgggaaattctcctatgcatttggattttaccttacacctatgattaaaatattttstgtgtcatagatatacaaccaactttctttccattttaattttgatccagccagccaggacatggtataatatgcagaagagaaaatagaaaacacacaacatagactctttgaatttaaaataatgaatgctatgataccccttactttcctttcccagttctgccaactgagtagaaagcacagtaatggaattaattcatcaagttaaagacctatcacatcattatctattcatttcattattctgtgcaatccattctcaagtgcagttgaatatatcactatcatatgatatgacttaggtaattttctccatcttcactttcatcatttttgctcaaagcac

SEQ ID NO: 190800 - DNA, 408 bp, Homo sapiens
gctgggaaattctcctatgcatttggattttaccttacacctatgattaaaatattttctgtgtcatagatatacaaccaactttctttccattttaattttgatccagccagccaggacatggtataatatgcagaagagaaaatagaaaacacacaacatagactctttgaatttaaaataatgaatgctatgatacyccttactttcctttcccagttctgccaactgagtagaaagcacagtaatggaattaattcatcaagttaaagacctatcacatcattatctattcatttcattattctgtgcaatccattctcaagtgcagttgaatatatcactatcatatgatatgacttaggtaattttctccatcttcactttcatcatttttgctcaaagcac

SEQ ID NO: 190801 - DNA, 408 bp, Homo sapiens
gctgggaaattctcctatgcatttggattttaccttacacctatgattaaaatattttctgtgtcatagatatacaaccaactttctttccattttaattttgatccagccagccaggacatggtataatatgcagaagagaaaatagaaaacacacaacatagactctttgaatttaaaataatgaatgctatgataccccttactttcctttcccagttctgccaactgagtagaaagcacagtaatggaattaattcatcaagttaaagacctatcacatcattatctattcrtttcattattctgtgcaatccattctcaagtgcagttgaatatatcactatcatatgatatgacttaggtaattttctccatcttcactttcatcatttttgctcaaagcac

SEQ ID NO: 190802 - DNA, 385 bp, Homo sapiens
agaggtttaatttactcacagttccacatggctggggaggcctcaggaaacttacagtcatggcagaagacacctcttcacaggatagcaggagaragaagtaagcgcaagcagggaaaatgctagatgtttataaaatcacagaagttgtgagactcactcattattatgagaacagcatgggtgaaactatccccaggattcaattatctccacctggtcctgcacttgacacatgggtattattaaaattcaaggtgagattgggtggggacacaaagccaaaccatatcaatagctctttgttttttggtgtttatttttattttttaggttagtttctttcaatttcatttttttagtgctctgattttgctatttattt

SEQ ID NO: 190803 - DNA, 635 bp, Homo sapiens
atttgatgtgttgttcacccatctctgaaccgcaaagtggtgaagaaaggctgggttgagtggtctttgcttttcctgtgcctgtgtgggaaggtgtgttagtgtaatattggttgacactgtctcaccaacattgccttagtgttgacattagtctcataggagaggctaagttaagtatgaactgcagggttcaagtccagagagttgaattaaaaaaagccatacttagttcttatagacgactaaggggaacaacttttaaaaagttcataatggtgagtgattaaaattctgtcttgttagctttgcatatacattagaattgattttttttctgtacgtatttacttgaatcaaaaatkgaaaaactggcttcacagaaatgccttcggcttcactaagttctgcttttaactcacagcttttgctcttgggaatagtataattttgtgtctgtacagtaagcatgtttaaaataagttttcaaaaattggttggtatgcaggtctttgaacagaacaagtggtaccagttataatttagtatgcaacgttatatagcttactcagttggatatgttgccttaatatcaaaaataaaatattttatctccaggttaagagaaaataggt

SEQ ID NO: 190804 - DNA, 621 bp, Homo sapiens
tctacaggtttctccacagaagaattatccaatcttctggtgggaaaaagatggggcaaagatacacacttagctactggggctttagagcccagcaatgcaagctaagatctcatcattcacagtgaacagttcaccttttttccccaatactgtatcgcttcccccaacatccaccatgcctggagtttatttgcctggaacctctttgattaaaactctcccacagaatcaactcccagtctcttgtagttgggagaggggtggtcatctagctgcttgggatgagagtgtacataggggcccaattgttccatgtaaagattcagctgacagtcacagctggccccctgctttccmtgatacatggcgtgatacatggtacatgaatcctgagcttccccagcatctgaggcctgactcatttgcttctcattgacattcccatccccagcaggtttaggtttcactttttcctaactgctcactcttctagccagtttctaacttctgaaactctgttcacactcatctgctgttctctcctcccttattctttgtcctcatgggtatatttgatgttcacttgctctaacgttagtgtgaagaagtagagataaa

SEQ ID NO: 190805 - DNA, 561 bp, Homo sapiens
aggtgaattgaataattataggtttctttttgtytttaagcacatgtagatgaggaggtaacaagatctcctaaatcagagggagagcttgtgtagtgactgtattaaaagccttgaattatgggctttcttcccagtagttgagtggggcctttccttccggcagcttcagggcaacaggcatagggatgagatacctccaaagcccaaagcatccatcagtttaagtaggaactgctgcagatttctagtccaagggaggacatgtatctaaacgatgggtagttatgggtactcgtgaaatgacatgggcattttaagtttgaggggaaagctgtgaattctgagtaaggagattgattggactttagatcttcctatgacctgggaggataataagcttaagacaaagacaacaaattctttctgccgggcatcatactgaaaacttggctaatacctcttcccaagggccgtctcatcttcacaggttgggtatttggataagaacctgcttgttcctttactccaggaaaacgtggaggagatgcgcaacagctg

SEQ ID NO: 190806 - DNA, 561 bp, Homo sapiens
aggtgaattgaataattataggtttctttttgtctttaagcacatgtagatgaggaggtaacaagatctcctaaatcagagggagagcttgtgtagtgactgtattaaaagccttgaattatgggctttcttcccagtagttgagtggggcctttccttccggcagcttcagggcaacaggcatagggatgagatacctccaaagcccaaagcatccatcagtttaagtaggaactgctgcagatttctagwccaagggaggacatgtatctaaacgatgggtagttatgggtactcgtgaaatgacatgggcattttaagtttgaggggaaagctgtgaattctgagtaaggagattgattggactttagatcttcctatgacctgggaggataataagcttaagacaaagacaacaaattctttctgccgggcatcatactgaaaacttggctaatacctcttcccaagggccgtctcatcttcacaggttgggtatttggataagaacctgcttgttcctttactccaggaaaacgtggaggagatgcgcaacagctg

SEQ ID NO: 190807 - DNA, 561 bp, Homo sapiens
aggtgaattgaataattataggtttctttttgtctttaagcacatgtagatgaggaggtaacaagatctcctaaatcagagggagagcttgtgtagtgactgtattaaaagccttgaattatgggctttcttcccagtagttgagtggggcctttccttccggcagcttcagggcaacaggcatagggatgagatacctccaaagcccaaagcatccatcagtttaagtaggaactgctgcagatttctagtccaagggaggacatgtatctaaacgatgggtagttatgggtactcgtgaaatgacatgggcattttaagtttgaggggaaagctgtgaattctgagtaaggagaytgattggactttagatcttcctatgacctgggaggataataagcttaagacaaagacaacaaattctttctgccgggcatcatactgaaaacttggctaatacctcttcccaagggccgtctcatcttcacaggttgggtatttggataagaacctgcttgttcctttactccaggaaaacgtggaggagatgcgcaacagctg

SEQ ID NO: 190808 - DNA, 548 bp, Homo sapiens
agaattcaatccatgtggaagtgcagaaattttgactgatgttttctattcctttttaaagtctgtgtcttacctgttagcctttttacatgtacaccatagacaccgtgtttccaagttgcatcacacacactaattttttttttttttttgagatggagtcttgctctgttgcccaggctggagtgcagkggcgtgatcttggctcactgcaacgtctgcctccgggttcaagcagttctctgccttagccttccaagtagctgggattacaggcgcctgccaccaagcctggctaattttttttttttttttttttaagtaaagatgcggtttcaccatcttggccaggctggtcttgaactcctgacctctttttagaagtggcatgtcacttctaccgacatttcattggccaaaggaaatcattggctaagccaaaagttaggggcatcatttaagatagtctccaattttgtgttaatatgattgctatgttttatattccataatataaagcttatgggatatttaaatttggtataaga

SEQ ID NO: 190809 - DNA, 586 bp, Homo sapiens
tagtgcttccctcagaacaatctcccagtctttggctgcatgtgcccccagtccaactctcctccctcttcccacccacagtccagtaagcctttagggctaagggcctccctttaccttctttctaattccaacctaacacaccattcaatttcctttcagttctyaaaggcatttcctcttgagaaaacctgattctaacaaataaaaaaagttggttttcaaaacaactgttctggtaaaggctgcaagagcttactttgtaagaccaaaactgcacattcaaatatttttctttagagatatttctagaatcagatccacatatatacagttacttgatgtatgagaggcacaataagaaaaggatcttttttatgtcatgtggaaataattagatagccatataaaaaaattaaccttaaccctgacctcacattatccttaaatattaattcaggatggacaatagccttgaatgtgaaataagtattctcaaagaaaacatggaagagttatctgtataaccatgggacaggcaacaatttttaaaaattgggacacaaagaacctgccataaaatata

SEQ ID NO: 190810 - DNA, 614 bp, Homo sapiens
caggatgaatgcttggttactttgagaatcagtacattgtaatgggatccagtgtactatgagatcatagtgaaagccaattgctaatgattttagttaaagatgaacctcacagagasatggaatacttaaagatctcacagagacatggaatactcaaagatgttgaaacatgagtggagaaatgtgttttttaatttgggccccaaattaatagtcatttatacctattttcatgaatgtatcttctgctggaagtcacataagtacacttgagacgaatgttcaagtaagaaaccccagcagtaatttccataccacacagcataaataggaagcacatcatgagcatactggagctttgcagtctgcatccccagcttaaccctgtgcaacaggctggccagctaccaaggactaaacttaatttttacccttgagtataaattagtccagcacaggactccagacctgcgggactccagagcttagctcagactcagcttgcctgagccccaccatgcactgcagccaggtctcttaagcccaccagctaattaagctaacttcctgaagggagaatttcaaatgtatgggagttgacatcagttaaa

SEQ ID NO: 190811 - DNA, 614 bp, Homo sapiens
caggatgaatgcttggttactttgagaatcagtacattgtaatgggatccagtgtactatgagatcatagtgaaagccaattgctaatgattttagttaaagatgaacctcacagagagatggaatacttaaagatctcacagagacatggaatactcaaagatgttgaaacatgagtggagaaatgtgttttttaatttgggccccaaattaatagtcatttatacctattttcatgaatgtatcttctgctggaagtcacataagtacacttgagacgaatgttcaagtaagaaaccccagcagtaatttccataccacacagcataaataggaagcacatcatgagcatactggagctttgcagtctgcatccccagcttaaccctgtgcaacaggctggccagctaccaaggactaaacttaatttttacccttgagtataaattagtccagcacaggactccagacctgcggsactccagagcttagctcagactcagcttgcctgagccccaccatgcactgcagccaggtctcttaagcccaccagctaattaagctaacttcctgaagggagaatttcaaatgtatgggagttgacatcagttaaa

SEQ ID NO: 190812 - DNA, 611 bp, Homo sapiens
gccatatcaactcttgaaatctcatatcatttctaattttataaatctattagtaattcctacaggactgtaaggcaagtctaagacayggaagttacattaaagctttatcttttgttggaaaaggctgtcatataaaaacattttgattcagtaaaaaatattcaacctaaaactacttcagaagcattaggccagcccatgctgagtataattagattattcattttgagaggaagctaaaacaccattctgatattgtcatcttttttgcttagtgagaaatttaggagaattatagctggaacagaaaaaaatgatatggatgagaacctcagtaacaaatgaggcaccttaaaaataacctgagacattattaggaaatactaaagggttcgcaacaaagtaggagttaggggtttgggaaaaacagcaagtactctccattgttagaactgcacactggttatcacatgaaaagtgaggatggctcttggttctcataaggaagtaagaatacatgaccacaatgttaaaactgatcagcaagaaatcagagatctcttgtcaacgggagtggagaattaagtggcagcctatagaagccccat

SEQ ID NO: 190813 - DNA, 611 bp, Homo sapiens
gccatatcaactcttgaaatctcatatcatttctaattttataaatctattagtaattcctacaggactgtaaggcaagtctaagacatggaagttacattaaagctttatcttttgttggaaaaggctgtcatataaaaacattttgattcagtaaaaaatattcaacctaaaactacttcagaagcattaggccagcccatgctgagtataattagattattcattttgagaggaagctaaaacaccattctgatattgtcatcttttttgcttagtgagaaatttaggagaattatagctggaacagaaaaaaatgatatggatgagaacctcagtaacaaatgaggcaccttaaaaataacctgagacattattaggaaatactaaagggttcgcaacaaagtaggagttaggggtttgggaaaaacagcaagtactctccattgttasaactgcacactggttatcacatgaaaagtgaggatggctcttggttctcataaggaagtaagaatacatgaccacaatgttaaaactgatcagcaagaaatcagagatctcttgtcaacgggagtggagaattaagtggcagcctatagaagccccat

SEQ ID NO: 190814 - DNA, 569 bp, Homo sapiens
tctctttgctgaatgaatccgattatggctttccaatactggaagcatattctgccagtgttttgtgccatccacaatgttaacgactacagacataacttgcttttaagcttcactcacattagaattaaggacgtgatgaaaaatgttaaacaatcaacaataaattaagcccttattaatgtcttataaaatctctagtctcatcttggcaagccaccaataacaccactaaacrgagttaagaggtgagcagtagcacacagttatatagtatttttgccatgcagatacaaaagaaataacctcaagaatatagagaatagtaaaataattagaagatgagttttaagtatttgagctttgttcttagtatgacttaaccgtttaattatagtaattactgtgttacagaaattttcagacgttctcacagaatttctgaaaatttaaaaattggcttttgggaggtggtaagaacaggctttatctcaccagtgcaccctgacccttcctgtgttcacctctgctgaagcctgtgtccagggctctgccaaagctgctcatac

SEQ ID NO: 190815 - DNA, 556 bp, Homo sapiens
agcaggttaaaatacagctttgctaagtcacattgtaattacatagaatactaaaatttacacataaaaattcttatgtgacttgaagtaatgtcttaycaagaaattgtatttctatttatgtgattaatgagtactgatagttgtctcagttttagttattgttgcctttgaatatctcggctttcactatgttaattgtatgtttcatatttccaagatgttggaactctttatggcttcaaatacatgtttttcagaaagatacaatgctaaaaggttcctaattgtagagagaattcatatttaaattttcttcccctttggagtatgaattttgtttctaagcacaaggtaaatgctaaagccttcttttaaaattgttttaccctataggtgcatgtctatctcaaatagaatctctaacatgatccccatgtgctgcttattgattctcttggcataacctaacagtgatatttctgaaaccaaatcatttggcaggaatttggcaattgtttctactgaggaagaagtgaagagggtatgtactaaa

SEQ ID NO: 190816 - DNA, 556 bp, Homo sapiens
agcaggttaaaatacagctttgctaagtcacattgtaattacatagaatactaaaatttacacataaaaattcttatgtgacttgaagtaatgtcttaccaagaaattgtatttctatttatgtgattaatgagtactgatagttgtctcagttttagttattgttgcctttgaatatctcggctttcactatgttaattgtatgtttcatatttccaagatgttggaactctttatggcttcaaatacatgtttttcagaaagatacaatgctaaaaggttcctaattgtagagagaattcatatttaaattttcttcccctttggagtatgaattttgtttctaagcacaaggtaaatgctaaagccttcttttaaaattgttttaccctataggtgcatgtctawctcaaatagaatctctaacatgatccccatgtgctgcttattgattctcttggcataacctaacagtgatatttctgaaaccaaatcatttggcaggaatttggcaattgtttctactgaggaagaagtgaagagggtatgtactaaa

SEQ ID NO: 190817 - DNA, 494 bp, Homo sapiens
ctagagtgaataaatcaagaaaaaatatgcaagtaaaccaagtacagaatgaaaagggagaaatttctacagaaagcacaagttttttaaaaaaacaaaatgactaaatttgaacttagtgaaatgcataaatttttgaaaatatgccaaaatcagtataatagaaaacttgcatgaaccaataagtatgaaagaatgaaatattaaagtattaagaaatgacagtaaagcacttttctttcagaatccccagtccagagagctacacagttgattgctattgtattttttaaaactcagttaattgatgacttacataagttgttccagmaagtatttgcaaagtacaaaaaatacaaaaagaacaaaagttttctaatctaaacaaaggtatatattaatcatagattttttattctgcaatctttaattgaatttttatattgaaataattttagacacagaaagtttacaaaaacagaactgcttatact

SEQ ID NO: 190818 - DNA, 606 bp, Homo sapiens
agtaaaataatgatcatcactgattactacatgaatgctactgaaaataattttgttatatagaagaaaagaatgctaaaaattatctacttcaagtgtyaaatactctagatacaccactatccagtgggtatataaaatgatacgatcacgtttaaaaaggtttgaagatttctttaaacatacatctacctacccttggcccagtaattctattcctaggtttttatccaagagaaatgaaaacaggtctacaaaagtttgtgcaagaatgaacatagctttactcacaatagcaaaaaactggaagcaacccaaatgttcaataactggagaatggctaaacaaattgtagtagccataaatgaaatgcttttcatcaataaaagaataaaccactgaaatatgcaatgtgactaaatctcagccattattaggctaagtgaaagaatacagaaaagagagataagtacggggatattcattattcattaagctattctgttttctttgtatatttaaaaaaattcccatattgaaaattaaaacatgtatataaaacaacagtgcatgaatatgtgttttacaagagcacatataaagaaa

SEQ ID NO: 190819 - DNA, 606 bp, Homo sapiens
agtaaaataatgatcatcactgattactacatgaatgctactgaaaataattttgttatatagaagaaaagaatgctaaaaattatctacttcaagtgttaaatactctagatacaccactatccagtgggtatataaaatgatacgatcacgtttaaaaaggtttgaagatttctttaaacatacatctacctacccttggcccagtaattctattcctaggtttttatccaagagaaatgaaaacaggtctacaaaagtttgtgcaagaatgaacatagctttactcacaatagcaaaaaactggaagcaacccaaatgttcaataactggagaatggctaaacaaattgtagtagccataaatgaaatgcttttcatcaataaaagaataaaccactgaaatatgcaatgtgrctaaatctcagccattattaggctaagtgaaagaatacagaaaagagagataagtacggggatattcattattcattaagctattctgttttctttgtatatttaaaaaaattcccatattgaaaattaaaacatgtatataaaacaacagtgcatgaatatgtgttttacaagagcacatataaagaaa

SEQ ID NO: 190820 - DNA, 606 bp, Homo sapiens
agtaaaataatgatcatcactgattactacatgaatgctactgaaaataattttgttatatagaagaaaagaatgctaaaaattatctacttcaagtgttaaatactctagatacaccactatccagtgggtatataaaatgatacgatcacgtttaaaaaggtttgaagatttctttaaacatacatctacctacccttggcccagtaattctattcctaggtttttatccaagagaaatgaaaacaggtctacaaaagtttgtgcaagaatgaacatagctttactcacaatagcaaaaaactggaagcaacccaaatgttcaataactggagaatggctaaacaaattgtagtagccataaatgaaatgcttttcatcaataaaagaataaaccactgaaatatgcaatgtgactaaatctcagccattattaggctaagtgmaagaatacagaaaagagagataagtacggggatattcattattcattaagctattctgttttctttgtatatttaaaaaaattcccatattgaaaattaaaacatgtatataaaacaacagtgcatgaatatgtgttttacaagagcacatataaagaaa

SEQ ID NO: 190821 - DNA, 489 bp, Homo sapiens
agttataaagtgaggacaagaatagaggtcagtagggcatctctctgagaactgtgataatatataccagaggtggctacacaactacctgattcggaatcctcatctctttttctttcctctgtacttttccataccaataaatagtctcccacccttggcacaggggagcactgggcttctgagtgcattcagaaaacaagcaacacttacacctgtttagyctcatgtttcctaacagctttagaagtacaatatggccctaggtctttgtttcagtacagtaggtggagggggcttcttgccagccagaaagcgttaaaagttcatggcagctgcctagaaaccactgcaatgtttcccataagagatgaataagctagtttagactcccatgtatttccaggaatgtaggagtgttcgatctattgttctttccattctattgtttcagagctctaattaaataatgccacatataagattccc

SEQ ID NO: 190822 - DNA, 390 bp, Homo sapiens
aatggacacactcagcacaatccccccacctcctgcattaaaagaaaaaaagatttttctgaaaaccaagcttaagcaaacatcaggaacttacttctcccccaaccttccatttaatgccaactgtccttattcacttttatcttgcttaaccagttttgccagtgaacttctaagtgacagcattcaccaacatgagttttctctttcttgcctcttgttgcctttgttagaacagcttaagaattaggcacaataaggayacagaatggagaaatcaaagaaacaatgggtctggaaatttcttgagaagaaaggattgaccacaattatcatgagatatacttgtggtaataatctatcacatgtaggatgcatcctatgggctgc

SEQ ID NO: 190823 - DNA, 390 bp, Homo sapiens
aatggacacactcagcacaatccccccacctcctgcattaaaagaaaaaaagatttttctgaaaaccaagcttaagcaaacatcaggaacttacttctcccccaaccttccatttaatgccaactgtccttattcacttttatcttgcttaaccagttttgccagtgaacttctaagtgacagcattcaccaacatgagttttctctttcttgcctcttgttgcctttgttagaacagcttaagaattaggcacaataaggacacagaatggagaaatcaaagaaacaatgggtctggaaatttcttgagaagaaaggattgaccacaattatcatgagatatacttgtggtaataatmtatcacatgtaggatgcatcctatgggctgc

SEQ ID NO: 190824 - DNA, 379 bp, Homo sapiens
tgatctctggaatcagactgtctaatgtgggatccctgctcctgtgtttcttccaacttctctcagcctgttttctcacctgtaaaacgggggatattaatagtaactgccttgtaggttgttgagaagggttggagatgtcrtatgtaagatgtttagcacagtagctgccatttgacacacattaaatattagtatttagttagtagtagttggtgcatgagacacagttactcaaagaaatgggtactgaggccgggtgttcatgcctgtaatcctagcactttgggagcccaaggtgggtggatcacctgaggtcaggagttcgagacgaacctggccaagatggcaaaaccccgtctctactaaaaatacaaaa

SEQ ID NO: 190825 - DNA, 379 bp, Homo sapiens
tgatctctggaatcagactgtctaatgtgggatccctgctcctgtgtttcttccaacttctctcagcctgttttctcacctgtaaaacgggggatattaatagtaactgccttgtaggttgttgagaagggttggagatgtcgtatgtaaratgtttagcacagtagctgccatttgacacacattaaatattagtatttagttagtagtagttggtgcatgagacacagttactcaaagaaatgggtactgaggccgggtgttcatgcctgtaatcctagcactttgggagcccaaggtgggtggatcacctgaggtcaggagttcgagacgaacctggccaagatggcaaaaccccgtctctactaaaaatacaaaa

SEQ ID NO: 190826 - DNA, 617 bp, Homo sapiens
ccaaaacactaaactccataaaacgcatttgctaaggtaatgaaagagaaggcactatcttagagtatcccttttcctgcaaatatgttttatatataaaacttaaatataaatataagaacaaagctgcaaaatgagaaacatattttagacttttaagaattgttaaaaatgtcaaggcaaatacccaaaaataaacacactttactatggctgcagagttttcagtagaaagaacttttgaagatgaagttttttgtggagtgttacacacaaaagtaggtgtaatatttaaatgtttatatttattataattattatgctggtaatgacttttaaaatgctgttatattgaggagtgttgaattacccatccatcctgaacttttgacaagcttctgactgtaaatttgtgggatcttrgtcatttatatttttgtttccagatatatattattttgaacctatattatatgtaggacattacacaagtctctgaatcaaatatataaaattcacctagtctcatttcctaacaattctcatgtatattcaaatataactttttatctttctgctgttaaataacattattatttatgaaagacataaatttg

SEQ ID NO: 190827 - DNA, 617 bp, Homo sapiens
ccaaaacactaaactccataaaacgcatttgctaaggtaatgaaagagaaggcactatcttagagtatcccttttcctgcaaatatgttttatatataaaacttaaatataaatataagaacaaagctgcaaaatgagaaacatattttagacttttaagaattgttaaaaatgtcaaggcaaatacccaaaaataaacacactttactatggctgcagagttttcagtagaaagaacttttgaagatgaagttttttgtggagtgttacacacaaaagtaggtgtaatatttaaatgtttatatttattataattattatgctggtaatgacttttaaaatgctgttatattgaggagtgttgaattacccatccatcctgaacttttgacaagcttctgactgtaaatttgtgggatcttggtcatttatatttttstttccagatatatattattttgaacctatattatatgtaggacattacacaagtctctgaatcaaatatataaaattcacctagtctcatttcctaacaattctcatgtatattcaaatataactttttatctttctgctgttaaataacattattatttatgaaagacataaatttg

SEQ ID NO: 190828 - DNA, 546 bp, Homo sapiens
cctcaatttgcatttactcaccatttaatttgcaggtaattgaaagtgggtttatgtgagtataaatacagttgccaactgcccaaacattgctctgggctcaatgcctatgagttcgccccrctctgcatggagtagctctggttcaatgaaagatttctgtctaacaccacaggcttgcccttaaattctttcctgggtgaagacaagaaccattgcaagattattgcatcagaatcttgcaacagaatgttgcatcagcatcactttggaccttataatatttttgaagctctactttaacaggtctggggtgcattctgggtgtcaggatttttaagaggtccctggctgattccaatgttagcaagatcatgagccatggccttaaggattccttcatttgctggatagtggcccatgtgcctcttgaatctctgttttgaaacttcctaattgtcagattgtttccttagcctgttgggcatctcaagagaaaaagaaaaggttagcctacatggttttacagaggccttgagtttccat

SEQ ID NO: 190829 - DNA, 609 bp, Homo sapiens
taattatttggtagggagaacaatttcttatatcttgagctactgccaagaatgactagaatttaacaaagttaaacaaccggtaataggggcttaaatgtagcttaaaaaaagaaaaaaaaaaagccattcgtcrgacagtgtcaataggccagtgagtgagggatgaaaagaattaaaggacataacatctcttcaatggctaagtgacagataaacttctctatgtggcttatctcatttacccccacatcaccaccaaggggttctagaatcactcccaaatgacaggcaagaaaacaaaccttgagaggttaagtaattagcccagagtgacatggccaggaagggatagaactgagactcaccctcccagaagctgggttttgaacacctgtgctccccacccgctgaaagatgtgagaagagggctggacaggagcccgtgtccccacaaagctagcatggctcagtcccacctgctagccaggggctgtgtccagagagatgcatgcaaagctggagcccacggcaccagaggacaggatctgcagccagaaaacccgctgagttcacaagacctgtatgcttctcacaacctagaaatat

SEQ ID NO: 190830 - DNA, 635 bp, Homo sapiens
gcagcactaaattgcttaagggtgacatttaggagttaattatttggtagggagaacaatttcttatatcttgagctactgccaagaatgactagaatttaacaaagttaaacaaccggtaataggggcttaaatgtagcttaaaaaaagaaaaaaaaaaagccattcgtcggacagtgtcaataggccagtgagtgagggatgaaaagaaytaaaggacataacatctcttcaatggctaagtgacagataaacttctctatgtggcttatctcatttacccccacatcaccaccaaggggttctagaatcactcccaaatgacaggcaagaaaacaaaccttgagaggttaagtaattagcccagagtgacatggccaggaagggatagaactgagactcaccctcccagaagctgggttttgaacacctgtgctccccacccgctgaaagatgtgagaagagggctggacaggagcccgtgtccccacaaagctagcatggctcagtcccacctgctagccaggggctgtgtccagagagatgcatgcaaagctggagcccacggcaccagaggacaggatctgcagccagaaaacccgctgagttcacaagacctgtatgcttctcacaac

SEQ ID NO: 190831 - DNA, 633 bp, Homo sapiens
gtgaaatatcatatttaactataataataaactttattttttgaaaggtttttaggatcacagcaaaattgagtggaaagtacagggagttcccatttaccttctctccctatacatgcacaactttcccccatccatatttcctgccacaatggtacatgtgctacaatcaatgaacctacattgacacaccttcatacccaaagtcataattatattaaggttcactgtttgtgttgtgcattctacaggtttggacaaatgtataaatgaaatgtgtccacaactgtagtatcacacagaatagttttactgtctaaaaattctctrtatttttcctcctcctacacatctgataatgactgaccctttctctagttccatagttttgtctttccagaatgttttacagttgcaatcatacagtatatatccattttagatcgacttctttcacttactaatgtgtatttatgttttttccaagttttgcatggcttgatagctcactgctttttagtgttgaataatattgtattgtctacatgtaccacagtttatttatccatttacctgcaaaggacatcttgattacttccaagttttggcaatgataaataaagccgctataaa

SEQ ID NO: 190832 - DNA, 609 bp, Homo sapiens
caatatagtttatctttttccagatgtcatataaatggaatcatacagtatatagttttttgagtatggcttctttcaccaagtataatgcatttgagatccaggcatggtgttttatagatcaataattaattccctttcattgctgagtagtattcaattgtatagatgtaccatagttactttatctattccctagttgaggaatatttggtttgtgtacagttggggacaaatgtgactatagctgtcattctaagaatttgtatataggttattatataaatgtaggttttcatttcattttacttgggtaaatacttaagagtaagaaccctttgttttatcttatttgagaattaccttgttttgcattcattctgaaggatatttttgttgtacaggcaggtcttagagatgtttggggtttggttctagcactgcaatagagggagtatcayaataaagtgagccatatgcagtttttgttttcccagtgcatagaaaagtttatttataatatacagtagtctagtgagtatgcaatagcattatgtctaaataaacaatgtgtataccttaatttagaaacccttcactgctaaaaaa

SEQ ID NO: 190833 - DNA, 442 bp, Homo sapiens
actagcaaagatattgaatcagtaaccaaaaacctcccaacaaagaaaagcccaggaccagttggcttcactggaaaattccaccaaacattgaaagaagwactaacaccagttcttttcaaactcttccaaataattaaagaagagggaatactttctgattcattccatgaggccaaagtcagataaaaacacttggagagaagaaaactacagaccaatatgccatatgaacatggatgcaaaaatcaacaaaatactagcaaacacaattcaacagcacactaaaagtattatacaccatgatcaagtgggatttattcctggaatgcaagatggttcaatatatgaaaatcaattaatgtaacacagcatattctcagaatgaaggggaaaaatcacatgatcatcttaacagatgcagaaaatgcatttgacaaaa

SEQ ID NO: 190834 - DNA, 442 bp, Homo sapiens
actagcaaagatattgaatcagtaaccaaaaacctcccaacaaagaaaagcccaggaccagttggcttcactggaaaattccaccaaacattgaaagaagtactaacaccagttcttttcaaactcttccaaataattaaagaagagggaatactttctgattcattccatgaggccaaagtcagataaaaacacttggagagaagaaaactacagaccaatatgccatatgaacatggatgcaaaaatcaacaaaatactagcaaacacaattcaacagcacrctaaaagtattatacaccatgatcaagtgggatttattcctggaatgcaagatggttcaatatatgaaaatcaattaatgtaacacagcatattctcagaatgaaggggaaaaatcacatgatcatcttaacagatgcagaaaatgcatttgacaaaa

SEQ ID NO: 190835 - DNA, 442 bp, Homo sapiens
actagcaaagatattgaatcagtaaccaaaaacctcccaacaaagaaaagcccaggaccagttggcttcactggaaaattccaccaaacattgaaagaagtactaacaccagttcttttcaaactcttccaaataattaaagaagagggaatactttctgattcattccatgaggccaaagtcagataaaaacacttggagagaagaaaactacagaccaatatgccatatgaacatggatgcaaaaatcaacaaaatactagcaaacacaattcaacagcacaytaaaagtattatacaccatgatcaagtgggatttattcctggaatgcaagatggttcaatatatgaaaatcaattaatgtaacacagcatattctcagaatgaaggggaaaaatcacatgatcatcttaacagatgcagaaaatgcatttgacaaaa

SEQ ID NO: 190836 - DNA, 442 bp, Homo sapiens
actagcaaagatattgaatcagtaaccaaaaacctcccaacaaagaaaagcccaggaccagttggcttcactggaaaattccaccaaacattgaaagaagtactaacaccagttcttttcaaactcttccaaataattaaagaagagggaatactttctgattcattccatgaggccaaagtcagataaaaacacttggagagaagaaaactacagaccaatatgccatatgaacatggatgcaaaaatcaacaaaatactagcaaacacaattcaacagcacactaaaagtattatacaccatgatcaagtgggatttattcctggaatgcaagatggttcaatatatgaaaatcaattaatgtaacacagcatattctcagaatgaaggggaaaaatcacatsatcatcttaacagatgcagaaaatgcatttgacaaaa

SEQ ID NO: 190837 - DNA, 610 bp, Homo sapiens
aagtactgccctagctttgttgttactagttcatagtttatctgggaatttatcacttgaaaattttgctgccaaaataattctaacacctggtattataatcaagtacttacttacagtttctctttctttctccctcctcctaccctccctccacctctttatctttttctaacacttccatctcatttgtcccttctcctctactccctctttcttttttagttctctgtctggcctctcttccttcagtcctccctactttctaccttatctctctctctctttcttccttttctcctaagctttcttctctccattttcatcttcttagagctcctgtctaggtaaacagttaatgtacagggaaaactctgtatttagtcagcctgaattacaataatcaatttcttcccttatattgccatcaggaaatgcctcctaaggtatattatactagttatgctttattttcattggcttagaagtgtaagatcttctggggtgatgtcccccagggctattaaagttgcccaagtttgcttcagttgctcctgstttactatagattaagcctggaagaaagaaaaaatgtagctgtgattattgc

SEQ ID NO: 190838 - DNA, 550 bp, Homo sapiens
attgttctcattctattgtatttttttaccttcttttcctcatttttctctctttgcctctgtatgctgcattctggatagtttcttcaaatctattatcagtttcctaattcttttgtaaagctgtgtcaatatttacagtttaactcatctatttagtgtaatatatagttttattttctagatgttctatttctagaagactttttcaaatagatctggtcttttttatggtaccatgttcatttctcatagtttcataattttctcaaacagcctttaaaatcttgctttaatttttayattcaacaattctataatccaaagattctgagatttttcctgatgtttgtttgtgctgactcttgccttatatccttgcatatttcataatttcagaactttggtttggctgggctttacttggcattctatcacatgttaggttgaaaatgtatccttccaaagatttacatttctgtctagttggtatcccagggaattcttaattctcagcattgggggttcatagaccatgtcagtaattttc

SEQ ID NO: 190839 - DNA, 502 bp, Homo sapiens
actgttttgtagagtgcaagagcccaaacagaatacagaagtgtcacttagctaaggagacagagattagagcctgaggaggctgagttggttggaaagtgtggagtatagtactgagaaaaaggaagttggttatagacagagctacagacatctctacaggaaaccccttaagtctttggttaattattgttatgaactgaattgtgtcttcatctccctcacctaaattcataggttgaaaccctagccctcaatgtgcytgtctgtgaagacagggcctttagaaaggtaagttaaggttaaatgagatcataagagtggtggtctaatgcaataggaatggtgtctttataagagaaagggataccagagcgctctctctctctctctctctctctctctccagacatgtatagagagaagagaccatgtgaggacacatgagtaggcagctgtctataaaccagaaatcttatcagaaaccatccttaatagcatc

SEQ ID NO: 190840 - DNA, 556 bp, Homo sapiens
ttcattgcatatgacagacactctgataaaaatgtactgttctaattacttaattgttttggctcatttaacaccttgtttaaatagctttaagacatataagaggcaaataattatatatacttaaggataaaattttcagatatttatccaaacacacatttacccattaaattagaacactaactgcttaatatgtaaaactagtttgaaatcatgactcttgattaaatacatacttcaacatctctcatgagacttcccaacttcaaaaatgactttaaaaaattagcttgggggtgaatcaccaatacattcagaaacacggccaaaacaaggagttttatttcaaagactgaattcagaaaatgaaccaactatttttgtacattatattaayaaattggttctttgttgaaaacctcaaacatgaatgatattagcaatatgcatgtgtgagacccattaaaaatgacaattcaaaaaaattactgcttaacctaaaggaaaaatgttactgttggattcctgcctggggctttaaattgggggtttg

SEQ ID NO: 190841 - DNA, 544 bp, Homo sapiens
gaaggtaagggacatgacagtaagtcagtggataaacacagggactagaacctatcggtgctcttttctctgcattacaggctcacttagaagaagaacagctgaagcacagtgaaggtgtggaatgggaatggggaagggttaggctagaaggcaagtgcctggatttcttcccgaggtgctgccctctgcagccttttctgggtgcaacacctgacctaaggtgcatagatatcctggccccaagcctggcaggcaagctstctgggagtaaacaaggcttttcctcccacccccacaaccctcccatctcccctcggtgtctcgtgatgctggccccaccctggagcgcatgcttcagagctatcagggcactggggctgggtgaccgctacaggaactcatccataaacacacaaacaatgactcaggaagtgcaagcctttgatgtggctcaagggccaccctgtgagcacgtggggctcccttcaaggtcattttacccatgtgtggcttcaccagtgtccagagccctctctcatct

SEQ ID NO: 190842 - DNA, 544 bp, Homo sapiens
gaaggtaagggacatgacagtaagtcagtggataaacacagggactagaacctatcggtgctcttttctctgcattacaggctcacttagaagaagaacagctgaagcacagtgaaggtgtggaatgggaatggggaagggttaggctagaaggcaagtgcctggatttcttcccgaggtgctgccctctgcagccttttctgggtgcaacacctgacctaaggtgcatagatatcctggccccaagcctggcaggcaagctctctgggagtaaacaaggcttttcctcccacccccacaaccctcccatctcccctcgstgtctcgtgatgctggccccaccctggagcgcatgcttcagagctatcagggcactggggctgggtgaccgctacaggaactcatccataaacacacaaacaatgactcaggaagtgcaagcctttgatgtggctcaagggccaccctgtgagcacgtggggctcccttcaaggtcattttacccatgtgtggcttcaccagtgtccagagccctctctcatct

SEQ ID NO: 190843 - DNA, 605 bp, Homo sapiens
aaacaaagcttagcaggagaggagagccagagaagtgacagggaagctacaggttacracagatttgtgaactcagccaagcacagtggtggcagggcctagctgctacaaagaagacatgttttagacaaatactcatgtgtatgggcaaaaaactcaaggactgtatttgtgactaattgtataacaggttattttagtttctgttctgtggaaagtgtaaagcattccaacaaagggttttaatgtagatttttttttttgcacccatgctgttgattgctaaatgtaatagtctgatcgtgatgctgaataaatgtctttttttttaatgtgctgtgtaaagttagtctactctgaagccatcttggtaaatttccccaacagtgtgaagttagaattccttcagggtgatgccaggttctatttggaatttatatacaacctgcttgggtggagaagccattgtctttggaaaccttggtgtagttgaactgatagttactgttgtgacctgaagttcaccattaaaagggattacccaagcaaaatcatggaatggttataaaagtgattgttggcacatcctatgcaatatatctaaa

SEQ ID NO: 190844 - DNA, 605 bp, Homo sapiens
aaacaaagcttagcaggagaggagagccagagaagtgacagggaagctacaggttacgacagatttgtgaactcagccaagcacagtggtggcagggcctagctgctacaaagaagacatgttttagacaaatactcatgtgtatgggcaaaaaactcraggactgtatttgtgactaattgtataacaggttattttagtttctgttctgtggaaagtgtaaagcattccaacaaagggttttaatgtagatttttttttttgcacccatgctgttgattgctaaatgtaatagtctgatcgtgatgctgaataaatgtctttttttttaatgtgctgtgtaaagttagtctactctgaagccatcttggtaaatttccccaacagtgtgaagttagaattccttcagggtgatgccaggttctatttggaatttatatacaacctgcttgggtggagaagccattgtctttggaaaccttggtgtagttgaactgatagttactgttgtgacctgaagttcaccattaaaagggattacccaagcaaaatcatggaatggttataaaagtgattgttggcacatcctatgcaatatatctaaa

SEQ ID NO: 190845 - DNA, 605 bp, Homo sapiens
aaacaaagcttagcaggagaggagagccagagaagtgacagggaagctacaggttacgacagatttgtgaactcagccaagcacagtggtggcagggcctagctgctacaaagaagacatgttttagacaaatactcatgtgtatgggcaaaaaactcaaggactgtatttgtgactaattgtataacaggttattttagtttctgttctgtggaaagtgtaaagcattccaacaaagggttttaatgtagatttttttttttgcacccatgctgttgattgctaaatgtaatagtctgatcgtgaygctgaataaatgtctttttttttaatgtgctgtgtaaagttagtctactctgaagccatcttggtaaatttccccaacagtgtgaagttagaattccttcagggtgatgccaggttctatttggaatttatatacaacctgcttgggtggagaagccattgtctttggaaaccttggtgtagttgaactgatagttactgttgtgacctgaagttcaccattaaaagggattacccaagcaaaatcatggaatggttataaaagtgattgttggcacatcctatgcaatatatctaaa

SEQ ID NO: 190846 - DNA, 605 bp, Homo sapiens
aaacaaagcttagcaggagaggagagccagagaagtgacagggaagctacaggttacgacagatttgtgaactcagccaagcacagtggtggcagggcctagctgctacaaagaagacatgttttagacaaatactcatgtgtatgggcaaaaaactcaaggactgtatttgtgactaattgtataacaggttattttagtttctgttctgtggaaagtgtaaagcattccaacaaagggttttaatgtagatttttttttttgcacccatgctgttgattgctaaatgtaatagtctgatcgtgatgctgaataaatgtctttttttttaatgtgctgtgtaaagttagtctactctgaagccatcttggtaaatttccccaacagtgtgaagttagaattccttcagggtgatgccaggttctatttggaatttatatacaacctgcttgggtggagaagccattgtcttyggaaaccttggtgtagttgaactgatagttactgttgtgacctgaagttcaccattaaaagggattacccaagcaaaatcatggaatggttataaaagtgattgttggcacatcctatgcaatatatctaaa

SEQ ID NO: 190847 - DNA, 545 bp, Homo sapiens
ctccatccaaagatcaccaacagcaaagaccaaagccagataaattcacaaagatgaggacaaaacagcacaaaarggctgaaaattccaaaaaccagaatgcctcttctcctccaagggatcacaactcctcaccagcaagggaacaaaactggatggagaatgagtttggtgaattgatagaagtaggcttcacaaggtgagtaagaacaaacacctccaagctaaaggagcgtgttctaacccaatgtaaggaagctaagaacattgataaaaggttagagaaattgctaactagaataaccagtttagagaagaacataaatgacctgatggagctgaaaaacacagcacgagaacttcgtgaagcatccacaagtatcaatagccaaatcgatcaagtagaagaaaggatatcagaggttgaagatcaacttaatgaaataaagcatgaagacaagattagagaaaaaagaatgaaaaggaatgaacaaagcctccaagaaatatgggactatttgaaaagaccaaatctacatttgatt

SEQ ID NO: 190848 - DNA, 584 bp, Homo sapiens
tgataacacacaaaccttctcaattctaaatttaggatgaatgctgaggaagggaaaccttaacaacatttttatacccttcacttccatgcccagttgtctgtaagtgatgggataaaaaagatgagtcagacaaacgtgtttgaggttattttgtaaagaacattagagtttgctgactacatgttagatttaaattttgagtcatctctcatccaattaaaactattcaaaatgcaagggtaattttctgagcaactagatgtataagtctttctctttaacttgacaacgttaaaattgtcaagtgataaaatgctcacgctgcatattttgctttgtgtatgtggcaagttgtcttctggtacttagagttgcagaggagaagatcaactacsaaacacaactttcatccaaacttttccaaaggcttgtgaaatttttcttcacttttaaaactcaaaacttctgctatgatgtaggtgcttcttgccattgattttttttttcctggaaagcagtaaaccctttaaattcgtatccttacaatttaaaactgaaactcagcaaagtgtataagaaag

SEQ ID NO: 190849 - DNA, 589 bp, Homo sapiens
ttcccattctccaccacaaacctgttgacctccttcatcccccggtaacattacagtgcctatttctaagccagatttttcgagtaggagagtgatacgttaccaagtgggaagggaagaccaaattcaaagcaatttggcattgctataaactcaatcccaaaasactaagttaactctgaatgtttttaaaactgcgccagcctaggtatttgcttactcagcaggtgaagaattaccatttaccgaaacagaattaagcagcaaagttcattcttgaatcataaagatgttacaattagacttatgggtttgttggtattgttaagagtatcaactcggtgttcagaaatacagattataaattgctttaaaatagaaaagaaatggaaagaattcttacaaaattttctgacacaactattatccttttttggaaggctatttgacgtcagaagtattatatttttagaaacttttcaggaaataggctacactggactttatacctcaagtaggtaagtttgtggcttatagatgagggtcttacatgcaccaagaaatgtgttgcagtaagaaagttaataaa

SEQ ID NO: 190850 - DNA, 545 bp, Homo sapiens
taactactggtggtatcaagccataaaggacacagtcaactgtggtatttcagcatcacatggagaaataagactttgggcttcagagaaaagaatattctctgggatatttgtcccaaactcaaacccctcaccctccattactgttacctcagtggagttcagaggagtgagctgttgatcaggctgatggtgtctttgacactttcagaagttcccttgggatgtaattgacacctgctagcatgattggtttctgctgttctattccctatgctcagcttctatatgattttgtatcttcaaaccaaattgtggccaattatagcttgaccctgattataaaaataattgagggyctcagcttttactcctctgtgggaggacataacagtgtgttagtttgcaagggctaccactgcaaagtagcagagactgggtagctaaaacaacagaaatttatgttttcacagtttggaagttaaaagtccaagatcaaggtgtcttcagggtagtttctcctaaggcctcttttcttgagttgt

SEQ ID NO: 190851 - DNA, 604 bp, Homo sapiens
actctgtgaatcctcttagatgcccctggtagtcttcaatgcagaaaaaaaagaaagaaatgtagaaaaggaagagagataaaggaaaagagcgtgtacactaagaccatggcctcagatgaccttcattggcattcatgccaaggctcgctcatccctattccgatattgatgagagtagtaccagaagaagcattttattcagtgaagataacagcaatgatgtaccagacataacatggtatttggagccagacagaccccattgaaatgtcatttccatcacttacgagctatgtcatcttggacaagattgcttaagttttttaatcttcagtttctttgtctataaaacgaggatgcaaatgtctacatcacagggtttctgaaagttaaatgaaataaagtatgtcaaaatgccttttatgttgtggacactcaattcacattaacttattttcacattccccttgctaccatccaaagttcttaattggagtcaatcagctgatgaggaaggattttctcccaaaaagcagaggtttgcaaatgacctgctttgtggaccgaygtcatggcagcttctctttcctggcagctcgtg

SEQ ID NO: 190852 - DNA, 640 bp, Homo sapiens
accctgtgacaaagcaaaccaaagtcatctttgtctcaagtccagtggagactcagtaaattccacaggagtctaatagaaacaaaacttgatgactatgcaattttctttggatgagcttcaaattgaggctatagatcattgtgaatgtgtaggagagttctgtgttgctgaagccagacccaaagcttgagaagaggttaggaggctgctctgggatcctcttgcaaatgtgtcccttattccataaatctgcttgtccttatctccagtgtgggctctttggcaggactcttttcatttctgcaaggtgagcttgatgtctggtgacacatcatttgtggcctttttctctgacagcctcctgataaattcttccccaaatggacagccacttgagcaactgtgtttaatggattatctctttagaacagtataaccttkggattattcagggctgaatgaagtgcaaatgtttgtcttccacttggcaaacccgcagaattaatccctggctcatttatcaggtcaaccggcaaaatggcttcctactgtgtaaagatgcagtggtgtgcatagaaaagctcatacttggactggaacctatgaacctaaattgtcataggctgccttagtatgc

SEQ ID NO: 190853 - DNA, 593 bp, Homo sapiens
ctaatgttctgcctataaacaccagagtcagtattttgcctctgacttcatgatacactatgttatatatttacagactccattcttaagatttgcatttgatcactgattaagttttttcccccaaagtggaacacactttatcaccctggaaagtaatgactagagctaaagtttttataacagcctctatcttttccaattgtttataaaactttaaaattaggaaaagactggaataatttagaaatgcattaaggcagttatttcccgatggttgcattaagttaccacagcttctaacatctgtttctttcaatatgttagcaaactgcaccatctcaggtcgttaggacaggaagtggccagggcatcccatttgcctttaaagtagttccagtgtcctccaggatgtaaggattccaacattaaacaatagctaatggtagctatgctgccaggaagmaagatttcaaaacaacagattaagcaagcagacatactcttttatggttcacagaatgtaaaatataagatggtgtaaatcattgaatgaaagagaatcgttttcatctgattggaaacttagtact

SEQ ID NO: 190854 - DNA, 614 bp, Homo sapiens
aatttcagatcttgttattggtctgttcagggattcaatttctttctggtgcaatcttgaggggttgcatgtgcctaggaatttatccctttcttctaatttgtgtacgtagaggtgttcatagcagtctctaagggttttgtgtatttctgaagggacagggtaatgtcccctttgtcatttctagttctgtttattgtggatcttctctgtcttttttttctatatttttagtctagctagcagtctatctgtcttatttatcattttaaggaatccactcctggaattgttgatttgtatttttttttttttttgtatctcaatttcctttagtgcagttctgattttggttatttttaatcttctgctacatttggggttactttgctcttgtttctctagctcctctaggtgtgatgttaggttgttaatttgaaatctttctaactttttgatgtgaatgttagtgctataaacttscctcttaacactgccttaactgtgtcccagatattctgatatgttgtatctttgttttcattagtttcaaggaatttcttaatttctaccttaatttcattgcttatccaaaagttatttaggagcaagtt

SEQ ID NO: 190855 - DNA, 614 bp, Homo sapiens
aatttcagatcttgttattggtctgttcagggattcaatttctttctggtgcaatcttgaggggttgcatgtgcctaggaatttatccctttcttctaatttgtgtacgtagaggtgttcatagcagtctctaagggttttgtgtatttctgaagggacagggtaatgtcccctttgtcatttctagttctgtttattgtggatcttctctgtcttttttttctatatttttagtctagctagcagtctatctgtcttatttatcattttaaggaatccactcctggaattgttgatttgtatttttttttttttttgtatctcaatttcctttagtgcagttctgattttggttatttttaatcttctgctacatttggggttactttgctcttgtttctctagctcctctaggtgtgatgttaggttgttaatttgaaatctttctaactttttgatgtgaatgttagtgctataaacttccctcttaacactgccttarctgtgtcccagatattctgatatgttgtatctttgttttcattagtttcaaggaatttcttaatttctaccttaatttcattgcttatccaaaagttatttaggagcaagtt

SEQ ID NO: 190856 - DNA, 603 bp, Homo sapiens
gaaactaagatagctatccaccaactcctatcccttattggataagagtcatccatgaagaattaactaccttgtcttttggcttgctccccctgtcagagaccaccctcaggcaaagagatgcacagagccgtcagagtgtgcaggttttgctggcagatgactctggaatggctttaggcatatgtatggatcaccaggcatcggctacagttgcatacaaaatagaagggagggagaaatcatgacacaaagaagattagaaaataaagcctattggacaaagaagaagtgaggagagaaagaaagaaagtaagcaaccatctcagaaaataatcctaggcaaagtataacacactgcctagtcaaaacaacaaggactatctcaagaccaaaaaaagaaaaatgattggcaaatatctgcattacacatttttgctgctgggaaacccaatcttgcacccrcacaccccagcctgttcctctctcaaatggaaagttgacctcacttagacctagcccctggccatggtttactactttttttttttaacagtattacaaattggatagggatcccagggcagaccttattgcatggaa

SEQ ID NO: 190857 - DNA, 566 bp, Homo sapiens
gttatgatttaataaacttcactttttcraatggaacatgagaaatctaagcaattgccccaaactgcataactgttaaccttgatttattggtaacaaaagcaattacatattcttggtaatataagcatgatctagacacagtattaatatttattaaaacatttttctctgtacagaaaaaagaagtgaactatttttttccagcaaaccaaaattccacagcttttttgagcaaataatattgttacaaacaactatgggtatatcattcagactttttatccttttcaaactccatcatctttgattaaattgttgtgaactgatctcctaggaatagacacagccctagccggttgtcttagttcatctccgtttactatgtttaggtagtagaatttgtgtttcaatatgctggaaagttcctgtccttggaactaatatgataaaatgtttcaatatttcattttatttatatatctatctcatttacattaattttcctctatcgtgtcacactcctccaaccatttcaccaagtcctacctgggaagagagccacc

SEQ ID NO: 190858 - DNA, 587 bp, Homo sapiens
taacaatacttagatgctgatgtgaagtcaataaatcttaggtcacatgataaaggagaaaggaaawaaaatgaagatattttcttagcataagtgtatacatgcacaaacatatttttaacaaaagaagaaggaagtactcatgacagttacagtccttatttctgcagctggtcaagtgttcatagctggtattgatgattatcttcttctactacccattctgtgttcactttgccttcagcaagcaccccagcaggtcatggttttttcctggtggagtgacccaaaccttattcctaaaggctctgggtcatttgtagtcctgcctgggttgggctgttgtagtttcccattgaccttaatcacagggcatggtaatactaaaagatgccctaatgaatctcctgtattccatgcataatcttccttacctccaatgtggagtaatagactgatttcatctcaatagtccaggtcaagcaccccagcaaacactgtaactcccttagcctgttgacttaaagaaagagaagcccaaagtgtacaagtagcaatcttaacttccagtttaatggaattgtgtc

SEQ ID NO: 190859 - DNA, 560 bp, Homo sapiens
tgcatgactgctaatcagatagtttttttttgtttgtttgttttttgtttttttttttttttttttttcagagattgccagtggggctttggaagaataagctacacaagtatgtgttacatgagggtgaggccaggctggtagatttccttcaaaatctgagcgcacaccaacgtgttgcacatttctcagcttagcaaagaagcgtgccaaagttaatagaatggaccctttgttggctctcaaaggctacaatggttggcactttaaacataccacgaagccattgcatttgagacggcacccaggagaagcagtcttcgaccgggaacatgcctcttccataattactgccctaraaattcaagtcatcccctatagagaataattttaaaattccaacattattcctgacttcaaggaaacagggaggttgaaagtgctcgaggccaacagtcatcaatgtttagtacaacttaataaaatcatgacctgctttgatatagcacttggcatatcctttcattaaatctcacactcagggttcttcattcttccta

SEQ ID NO: 190860 - DNA, 668 bp, Homo sapiens
aatatgctggaaagttcctgtccttggaactaatatgataaaatgtttcaatatttcattttatttatatatctatctcatttacattaattttcctctatcgtgtcacactcctccaaccatttcaccaagtcctacctgggaagagagccacccaatacctttcacagtttatggtgttgtaggtgtgcattattttttctgtcttatatttttacacttacaattactgaaactaacattttaacgwttgctactcatcagatccatgtgactaaaagcaagctcatacatctggtagtttgaggggcactagtttcatcagtgcttacgatgcataaatatgcctggattcagcaaagacattcccttctcaattacaattaatactgcacaagccctgttgccaatttttctcaactcatttttcccttcaaatttatttttaatcttgtttctttcctacaaattatgaggcaaagtggcttgctgtggcaatattcagtaccaataaatccagggttcccataaaactgtacaatttcttgctgatggcacttgaagaagaaagttattaaatcattactcatgtaatacaaattttcaggatgctgaaatacttctcactatggactttgcttactacatagtgtagaaatttagatatt

SEQ ID NO: 190861 - DNA, 458 bp, Homo sapiens
tatagttaacttttttgttgttataaaatgaaggacaaagattagatggtagttagattaggaaagttgggggtcaagagagaattaatgtggtgggagaaatagcagcatgcttggtaatgatctagtagaggggaaagttgatgatgtggggagagagaagaaccactgctgatggatgtccttgagtaggtgacagggcatagtatctggtggatcagtggatctggtggattagctgggaatatagaccatttttgcaggagaaaagctcatgactgaggatagatacatgtgtaaatgcatgtgtagacgtactggtagaagcttgagsaaatttccttctgattgcttcaaatttctctgtaaagtcagacacaagcccatgaactaagaataaggatgggagagaagctgtcaatttgagaggagaggaagaaggcataatataatggttc

SEQ ID NO: 190862 - DNA, 553 bp, Homo sapiens
cgtggctctcaaccagggacagatttgccctggtggctattttgcaatgaccggagacattttgtgtatcatagctgtggcggcagggcagggaaggggtactgctggcatgtagtgggtagaggcttagggatgttgctaaacttcctgaagttcttttcctccacaacaaagaattatccagccccaaatgtccgtggtgctgaggttgggaaaccctcctctagagcctattgactgttccttgcccagtaggataaattattgccaggtttttatgtggcctactgcgttctataatattgattgacatcaggatagaaataatagacctggacgggagttgcgaatgcagacatccsctcttccctcttcttgcccttctcttcccatcccttctgagtgactgagagggaaaagccaggttgatgcatatgttcactgcctaaggagtatccctgcttccctgaagtttcttccaaatgtcactgctctgccctatgcttttctgatcagatcatcttcctgagcgtggctagaatcagccagagta

SEQ ID NO: 190863 - DNA, 554 bp, Homo sapiens
tgggattgcagaatttagagaaagcaaatcaatattaaaagtatgttacaaataaaaagttttttttttctaataaacaatgtaggattgtccttcccagctggcaccttccctcttgagggaaacaaacagatgtgagtagccgtagttgggggatggttctctccgatggactgttagtttttttgccttaactccagaggaagaaaatagattaggacgaagtggaataaatatcttgcttttgaaaaacactgtaatgtgttattattacmaaagcaattcatgtctctatacaaaatacaggtaaccctggagatgaacattaatcatattctgttattattcatatcataatatatgcctttcagatgcattttgaactcaacataactgataatttagaaatgccattttataaatcgaatttttaacaatatattgtgatctgctttcttggtcataaaaatttttataggatttttttatggcttcagagtattcttattcatggatacactataatttatttaaataatcctctattgttagac

SEQ ID NO: 190864 - DNA, 560 bp, Homo sapiens
cctgtttgcttaacagagtcatgagcgtattgcctgccaatcttttctctcacttgggagaaactcaacctgaatcaaatatttgctgttaatactaattgcctcccatatttcatatcctacctgttgtaaatcttaattttaaaataagagggtttaagagtcactaccccataaatatagtgatacatattagttattcacccagatatgatgcttcataggcctgtggaaattctgactyctcttactaacggccaggtgcccagggatctgtagtgcacagttgcaaaccgtgtgttggcctgtcctccctctttcatgcattcagatatcacccttaggtataataaactcagggccttctgtaattccacaaatttagtaacctaacaaatagatttgagttcacctgttaatagaagcagcaacctgaagcttctggattctaggtgaacatgattagagactgagcacaggtctcctcccaggaagctgtctcaacccatcctctctctccacagcattgtcctagtaagagcttctccaaactgcaaaca

SEQ ID NO: 190865 - DNA, 549 bp, Homo sapiens
gggcttttccaaatgagctgtggagtagcaatagccttgggtttataatagaatgtaagatattttctccttcattctccagagggagtgttaaaaacttatggagtaactacctccaagtccacttaggtactgtggaatcatgaaaacaaccagattcaatgatttattgagaaaagaaaaatgagtttcacagttcgggrcactgagatcacctttcctttcagtttttcttctcagtttcattacttttatcctgcccaactgaattgtgaaatggttgccttatttaaggacagtgtggaaagaaatgtttgagtagtctctttcttatctttttccatagaaagctatatttgcttcaatgctgaaatttaagtaactcttttttgtaactttatcttcatccgatccctttagcttctccgatccctggacttaccacagccatggcctcatacctgttctccttacatttcttcttgtatactctagtctactctgcacacactagaagaaatgcaaatatggtgccattcattggctttt

SEQ ID NO: 190866 - DNA, 502 bp, Homo sapiens
tacaatatagtatatgcatatgtatcaatcattattatttggagcatgtactcaggtgcaaagggcttctatatatactatcttaattaatataaaattagttaaaagtatatgccccaagtatatgctcaaaacaacagtaataataatagagtagtagttatagtaatagtggcagaatttatttaactgtcgttacccttccagcttgattttacccccacatgatcttgttagattggcaggaagttgacccatgttagcaagctcctcccctccccaaagtctcttkgaagatttttcagagagaaatggcctctggacacccaaaagttaaattattattgtcacatgagtgtcataaaaacaatccaaagtaagtgaattttaatatcagggatttacaaaaatgattacttataaaagtagtagaaaataaagacatttgagagatgatacatttttcacccaactgaccacaacaggtgtcagccaagacctg

SEQ ID NO: 190867 - DNA, 589 bp, Homo sapiens
attcagaccttctttatttcagagagtctacatttatatcattacctctgcagcttcttcatctcattagttttgaaaattgatatttttagtatgtaagtagtttctaagcaaatttatgatgatgaaagttaattttttgacatctttttaaattgaattaattttcaaaatttttttttcatgagttattggggtacaggtggtatttggttacatgagtaagttctttagtggtgatttgtgagatattggtgmacccatcacctaagcagtatgcgatgcaccatatttgtaatcttttattcctcgcccccctcacactcttccccccaagtccccaaagtccattgtatcattcttatgcctttgcgtcctcatagcttagctcccacatatcagtgagaacatatgattggctttccattcctgagttacttcacttaggataatagtcttcaatctcatccagatcgctccaaatgctgttaattcattcctttttatggctgagtagtattccatcatatatatatatatatcggtgtgtatatatatatatatatatatatatatatatatgtcgatg

SEQ ID NO: 190868 - DNA, 589 bp, Homo sapiens
attcagaccttctttatttcagagagtctacatttatatcattacctctgcagcttcttcatctcattagttttgaaaattgatatttttagtatgtaagtagtttctaagcaaatttatgatgatgaaagttaattttttgacatctttttaaattgaattaattttcaaaatttttttttcatgagttattggggtacaggtggtatttggttacatgagtaagttctttagtggtgatttgtgagatattggtgcacccatcacctaagcagtatgcgatgcaccatatttgtaatcttttattcctcgcccccctcacactcttccccccaagtccccaaagtccattgtatcattcttatgcctttgcgtcctcatagcttagctcccacatatcagtgagaacatatgattggctttccattcctgagttacttcacttaggataatagtcttcaatctcatccagatcgctccaaatgctgttaattcattcctttttatggctgagtagtattccatcatatatatatatatatcggtgtgtrtatatatatatatatatatatatatatatatgtcgatg

SEQ ID NO: 190869 - DNA, 569 bp, Homo sapiens
ttaatacacctattttctgacattcttcttgaataaacatttatagaaccaacatattttattatactcattatatgaaacagtcaggatacatgcagtcaggattatattaaaaagtgtctaatatctatctacacacacatttatgtgtacagaagcgttgtgaattccaagagycataaagtttttttgtttgtttttttttcctttggttaatcacaataaaataatgtaagtagaaatatgttacatagtaatatgctaagtgtacattgacacttaaggaagttaaactcaagcacctgagcatttaacttaaataatgacatctccttggcccactctgggagacagttgatctttccccgtgaatacatcctgatggcctcatgacctgtaatagtgtcctgtgaataaccagcttgtcctgtgcactgcgggactcaggtcatctaagccaggctgccctcatagatgcagttgatggcttaaatactgggcttcaaatggtgctttggcaggatctcgatgaaataaagagaggagtttattaaaattgaacaaaaaaa

SEQ ID NO: 190870 - DNA, 569 bp, Homo sapiens
ttaatacacctattttctgacattcttcttgaataaacatttatagaaccaacatattttattatactcattatatgaaacagtcaggatacatgcagtcaggattatattaaaaagtgtctaatatctatctacacacacatttatgtgtacagaagcgttgtgaattccaagagccataaagtttttttgtttgtttttttttcctttggttaatcacaataaaataatgtaagtagaaatatgttacatagtaatatgctaagtgtacattgacacttaaggaagttaaactcaagcacctgagcatttaacttaaataatgayatctccttggcccactctgggagacagttgatctttccccgtgaatacatcctgatggcctcatgacctgtaatagtgtcctgtgaataaccagcttgtcctgtgcactgcgggactcaggtcatctaagccaggctgccctcatagatgcagttgatggcttaaatactgggcttcaaatggtgctttggcaggatctcgatgaaataaagagaggagtttattaaaattgaacaaaaaaa

SEQ ID NO: 190871 - DNA, 569 bp, Homo sapiens
ttaatacacctattttctgacattcttcttgaataaacatttatagaaccaacatattttattatactcattatatgaaacagtcaggatacatgcagtcaggattatattaaaaagtgtctaatatctatctacacacacatttatgtgtacagaagcgttgtgaattccaagagccataaagtttttttgtttgtttttttttcctttggttaatcacaataaaataatgtaagtagaaatatgttacatagtaatatgctaagtgtacattgacacttaaggaagttaaactcaagcacctgagcatttaacttaaataatgacrtctccttggcccactctgggagacagttgatctttccccgtgaatacatcctgatggcctcatgacctgtaatagtgtcctgtgaataaccagcttgtcctgtgcactgcgggactcaggtcatctaagccaggctgccctcatagatgcagttgatggcttaaatactgggcttcaaatggtgctttggcaggatctcgatgaaataaagagaggagtttattaaaattgaacaaaaaaa

SEQ ID NO: 190872 - DNA, 569 bp, Homo sapiens
ttaatacacctattttctgacattcttcttgaataaacatttatagaaccaacatattttattatactcattatatgaaacagtcaggatacatgcagtcaggattatattaaaaagtgtctaatatctatctacacacacatttatgtgtacagaagcgttgtgaattccaagagccataaagtttttttgtttgtttttttttcctttggttaatcacaataaaataatgtaagtagaaatatgttacatagtaatatgctaagtgtacattgacacttaaggaagttaaactcaagcacctgagcatttaacttaaataatgacatctccttggcccactctgggagacagttgatctttccccrtgaatacatcctgatggcctcatgacctgtaatagtgtcctgtgaataaccagcttgtcctgtgcactgcgggactcaggtcatctaagccaggctgccctcatagatgcagttgatggcttaaatactgggcttcaaatggtgctttggcaggatctcgatgaaataaagagaggagtttattaaaattgaacaaaaaaa

SEQ ID NO: 190873 - DNA, 592 bp, Homo sapiens
agctgaggcaggtggatcacctgaggtcaggagtttgagactagcttggccaacatagtgaaatcccatctctactaaaaatacaaaaattagcagggtgtggtggtgtgcacctgtaatcccaactactgggaggctgaggcaggagaatcgcttgaacccgggaggcaaaggctgcagttagccaacattgcactccagcctgggtaacagagcaagacactgtctcaaaataaataaataaataaataaataaataaataaataaataaatwaaataaaatcatgatgaaaatgtacactatgcaattactgtgaagattctcaaggacagttgtatagagttttgcttttttttgtcttatattttgtctcattttgtggttatatcttgttcataaaattcacttttaactggtttgttctttgtcatgaaataaaacatcttttggataagagaaggagaatttattttatctttacatacctccactttcttctgtatttatacaacatctttaacatgatttaaaatcatgcattagtggattcctacagttatagaaatgaaatgagcttttgagttttgaag

SEQ ID NO: 190874 - DNA, 552 bp, Homo sapiens
agagcagtaattgtgagatttttcattggaattcaggactgccctgtgacactggaaagcaacatgaggcagaaatcagttggtgcccataaaggaagcatctagaccagccctaattagaggtgaatctctcattccagcagtcagagcytgagttctggcaagtcccagcatggtgggctaaatggctttgggttctaaataatcttgaaacagtctaggccacaaggactgcaattccttggcaagtcctggcgctccacttgactcagggctagtggacttgcagtgcctagtgtctatatatgactagtgagacaccagctggcatggccaagggagtgtttgtgtcacccctctgccaaccccaggaagcacagcttgtagctccaaaagagactccttcactctacttgaggagaggagaagggagagttaaggggactttgtcttgcaacatagataccagctcagccacattggaataggacaccaggcttagtgctaaggctaccatttcaggacttagatttcacacatttataaacacaa

SEQ ID NO: 190875 - DNA, 409 bp, Homo sapiens
ttgcatattttaagatatattcaatttattccattatttataggaaaatgttacatgaacatttcctttgcttcatgctattcatattgaaaaactgagaaattaaagaataacagtgccacatacgaagtgtgatcatctgattgcccatgataaaaagtgatatactgtgtaaaacatctctgtcagcatgagactgtctytttccaattttggctgtattaagagttgtttcttttgaaatggaaatgaactcattatttatcaagtcttgcagagctctacttaattccaaatattacatcaatgataatttcctgcacattttaaatcatgctaatgaaaccattttctttaatatcttaacttgtataatgctttttccttttatgcttttatgaataattta

SEQ ID NO: 190876 - DNA, 598 bp, Homo sapiens
gaaaggatagttctttaaaatggtttggtatgactggatatctgcatacaaaaaagtaaaactggatttttatttcacgctatatatggaaattaattttaaaaagaccagtgccctaaatatgtgctagaaccagaaagtcttagaagaatacataaagaacaatccttatgatcttggatataacaatagatgctcagatatgatacataaagcaagattaacaacgaaaacagataaactgaatttcatcttatagtattttaagattatgacgtcttcatttaattccaataaataagagtgggattactaggttatatggtaaacatatgatgaaacacatttttgtattgtaagtatatgactgtgtgttaagtatataattatatgtaaacccatttgttttcttaagtggttgcacaattttgtgtgtccaccagtattatataaaaatcccagatgctctgaatccagrccagcactgtgtatttttacttcttagctgtcgtttttgttgaatccccaactgagaagtgtgtgaagtttcactgtacttgtaaatgcacaaaacacaatcacacataactcaaagttt

SEQ ID NO: 190877 - DNA, 558 bp, Homo sapiens
gagagagagagagaagatatttactgcaagaaattggcttacctgattgatgattgtgggggatggccaggcaaatctgaaccacatagagaagaccaccaatacaggcaggttagaaacttttaggctggtggaatttctcctcttctttagaaaactctactgatcctgaggaatttaaacgattgaaactggtccatctattcagatcatccagtataatctcctgtcctttacagtcaaatggtgtagatgttaatcatatctaaaaaaatgcctttacagaacacctacattagtgcttgattgaataattgggtactattgcctagtcaagttgacgcataaaattgaacatcagagcatatgtgcattacacactaattaatttcacctatatttagagagcacctataacttgtcaggggtcctcaagtttsctataaataaaaaactgttcttaaaaataaagtatgctataaaaaggagtagcctatggatattcagagaaaggataaaaaagaaacaatttaatagacaatagtaaatgatgatttc

SEQ ID NO: 190878 - DNA, 411 bp, Homo sapiens
gaattccattctgtacacttcaagcaaattagttttagagcatagctctgattatcatattaatcccttatccctcccttaaaagtcttattttttactttgtccactggaatacatcatcgttggcctatcattccaaactccctacagtgtggcttcagctatatctctctctgttttttacaggaatcctaaactctaacccagggaccctcaacatctgtgctgggtggactgtggccacattttcagctggccagtgtaagggttttagaggcccttacatgagaagaaatacaatttttaagtctctgagwtgatgtgcttcttacatttttggaattaaaatgcctctttacttataaaatgctggtagtaatagatggtcattatctcactgtcatttgtgaa

SEQ ID NO: 190879 - DNA, 518 bp, Homo sapiens
gaattccttggaaatgggtacgctcagtttctttctttttttttttttttttttttttgagacggagtctcactctgctacccatgctggagtgcagggccatgatctcggctcactgtagcctccgcctcccaggttgcagcgattctcctgcctcagcctcccgggtagctgggattacaggcaggtgccaccgtgcctggctaatttttgtattttyagtagagacggggtttcaccatgttggccaggctggtcttgaactcttgtcctcaggtgatctgcccaccacggcttctcacttgatcttagccaaaaggccgagaagccatccaccacggcttctcaaagtgctaggattacaggcgtgagccaccatgcccaaccgtttctaacacttcacaaagcttttccatctgacagtggatttgaccagagtgggttctcttgcttctaatttcagcagcagttcatttctcttttttaatgtaacccttgagctgtgggggttgaaacct

SEQ ID NO: 190880 - DNA, 603 bp, Homo sapiens
aattccttaagaaaggtgcaaagggaattgctgagtggtagccaaaaaaccaccttgtcagtttttttcaaagagaattttattccaattgagaccccacttacagctagaagggccagctctggcaggtgtccctccccggcccttccctcgctgatggcttcatagcctgcctccccatgtggcttccttcttgtcctgtgtgctcctggctcccctgtgccccagcaggtcaacaggctgtctcttacatttttgtctgtttcagctaacaggtctcggacaggcaggcaggagtggctcggcagggtctttctcttcccaggaagaccgctgcgtttattgtgaggctatctctgtcctccttggaggctcctgagtgtacaaatcagactctaggtccagggacagtgtgcttgcgccctagggtgtggctgacacrgaaactgctcagatttgggctgaagaagaaagcacttttagaatcacaggtgggaattgcttacatctctgtccttctcaatcccttacttattccaaaggaacagataatgctgaactcatcttttctaagaaggtggccctggtgaactagctccctga

SEQ ID NO: 190881 - DNA, 429 bp, Homo sapiens
aggcaatctttcatatagtttgtctctctcagctgggttattgatggacactgcatggcagtgagttcgagactgtattccctgccaaataactgaagtgcagccattgggttgccaattaaagacagacccatatgccttacaaacacagaaacagttgaaatccatcaacactgkagtagggttgtcattctcttatgaaaattgatgagcctaactaggacctacacctgatgagagggccacctccttggctctgagctgagctggaagagtttgcggggtgtttgattggcctgccaagcccccaagccatgagtgtctgtcctacagggtggagtgattgctctgggaatggagaaccttgaatcttgccatttctacagtgagaggttttgtctataggatctccaagttccccaccagcgt

SEQ ID NO: 190882 - DNA, 548 bp, Homo sapiens
gaattctaagagcagagagaacccagatataacagaacatttggcaaagaaacaatccaaatgcagagttggttggactgrgctggaacagggtggaggatgcttatctgggggtcaatgttagcacaaaaatgccaagccttccataacactctttttctgcgaatcagacaagccctgcctgaatagtgatgatctggaggcactgaactgaacaggagaaagggcagcacctctgcccatgagggcaggtcccattcttcacaagcattataatgagttgttcatgtcagtccccattcatatctatcacccacagatatcagcagaacaaccagcaccagaggcatttgattcctactacattacagcttggaataaagcagctaggttttcttgcctggtgtcactatccgagtcacatcctgtctactaactcctaggctagcatagaagttaagggatagaagatactatctaacacatctagtcccacctgcttttttcagacaaaacaaagtttctagaaaggttaagtgactgttcaa

SEQ ID NO: 190883 - DNA, 548 bp, Homo sapiens
gaattctaagagcagagagaacccagatataacagaacatttggcaaagaaacaatccaaatgcagagttggttggactgggctggaacagggtggaggatgcttatctgggggtcaatgttagcacaaaaatgccaagccttccataacactctttttctgcgaatcagacaagccctgcctgaatagtgatgatctggaggcactgaactgaacaggagaaagggcagcacctctgcccatgagggcaggtcccattcttcacaagcattataatgagttgttcatgtcagtccccattcatatctatcacccacagatatcagcagaacaaccrgcaccagaggcatttgattcctactacattacagcttggaataaagcagctaggttttcttgcctggtgtcactatccgagtcacatcctgtctactaactcctaggctagcatagaagttaagggatagaagatactatctaacacatctagtcccacctgcttttttcagacaaaacaaagtttctagaaaggttaagtgactgttcaa

SEQ ID NO: 190884 - DNA, 620 bp, Homo sapiens
ttaggtttgttttccacaggcttacgtatcctgaaactactttgcatgtattctatgaatcagcctatgatattaataataataataggttggtttttgttagggaagggcattgtgaataagaaaaggggaaggctagaaaaaaccttgtctggagttatcagtactagctcaaggtttgaaaatgcatctagatagagaaatagctataggaatatgtgtgtgtgtatatattcatacatgtatttcataggcctgtcttctgaggactaggagcaattatacctacatatcagtgaatgaacctaacacttattctctagaaaaaaggaatgctttcaataaaatatcatttgtcagtaaaagaagccgggactccttgaagaaaaggcacactccagggctaggacagggaaagtataagataagcctccaccatcttggggtgccagagatctaaaagcactcaatgaatgatagggccatatcaaaaggacactggagctaattgaatgagctcctggtgatcagaaaaattggagcaacaaaatgaataatggtgatgaattattactcrtagaataaaaagaatctgtgagtccatgcttatataaataaat

SEQ ID NO: 190885 - DNA, 539 bp, Homo sapiens
aataatccaaaaaattagataaaatgaaataataaaatctattcaaatattccaaaaggtggcaaatatagggggaaaaggtgggagaagrgggatgcatagggaacaaatagagaacaaataatataatagacccaaacctaaccatcttaataatcacattaaatataagtggtcaaagtgccctaactagaaggcagagattatgacattggataaaaagtaagacccaactgtatgctgactacaaggaatatacttcaaatatgaggacacaaatagcttaagagtaaaatgatggaaaaagattaccacactcacactaatcaaaagaaggtcagagggacttgaccttcttttgattagtgtgagtgtgataatcatctatcatcatggcagatgggaagtaggactagattgcagctctgactcagatggacagagcagcatgtggaggttcacattgtgaattttagctcctgaacaactgcaagaacaaaccaggaatcccaagaggacccaaagaccctctgaaggaa

SEQ ID NO: 190886 - DNA, 630 bp, Homo sapiens
cattatttgacgtagttgaagaccatagaagattaaacaataatagaagagatattttcagatgaacaagcaatatttatcaaaatagacaatactgtgggccattaaaaagcctcaagaaattaaaaaatattcagctaacacaaagtatgttctttcattacaatgaaatgaaattaaaagccagtaacaaaaagatttatggaaaatcactcaaataattggaaactaaataatatgcttctaaataacacaagtcaaagaagaaatcaaaagggaaattaaatgtattttgagattaatgaaaatgaaaagactatatataatttgtgagatgccataattttatagcattaatgtcaacattagaagaggggaaaagcttcaaatcaatgacctcagcttccatcttagataactagagaaagaagarcaaattaaatctgaaggaagcagaagaaagtaaatttcagataagaaattaatgaaatagaaaataggaaaaaaatcaataaaatgaaaagctggttctttgagatgaagtgataaatctcaagcttgacagattaggaaaagaaaaagaaaagacacaaacaagtagtatcaataattagatagaagacattacta

SEQ ID NO: 190887 - DNA, 594 bp, Homo sapiens
ataatttgtgagatgccataattttatagcattaatgtcaacattagaagaggggaaaagcttcaaatcaatgacctcagcttccatcttagataactagagaaagaagagcaaattaaatctgaaggaagcagaagaaagtaaatttcagataagaaattaatgaaatagaaaataggaaaaaaatcaataaaatgaaaagctggttctttgagatgaagtgataaatctcaagcttgacagattaggaaaagaaaaagaaaagayacaaacaagtagtatcaataattagatagaagacattactacatactctagtaatattaaaaacctaataagggaatattataaataaatttatctcaatacatttgacaacttagattaaatttgtagttaaaaccttcccataaagaaaaccccaagctcacatggcttcactggttaagtaatacaaatactatacaaactgttccagaaaattgaaaaggatggactacttcccaagtcattctatgaggttattactaaattgatgttaaaatcaggtaaaaacattacaaaaagtgaactatcaattactatcctcataaa

SEQ ID NO: 190888 - DNA, 526 bp, Homo sapiens
tggtgttactggctctcctgcagggaagccctgcccagtgaggaaggatgggtcagggtaagacctgaagaggtgctctggctgtagactgccacagccggtgtgttgggctgtggggacaagtcttgggaccaaatctagcctccctggctctagcagtggagaagtgcagactggatctatggagatggctgycacccttcccccacctagagatcttagtgagttacgcagttgcgagtcccagtgctggctgctgcccttcctccaaggagctaaaactgcttagacagcaggcagctgcagctgtggtgctggtcacccctctccccaggagctgggtaggcttaagtagattccagctgagaggctgagggaatctgcatgttctagggttgggatgctaggccctggtggcgtgggttcgtgagtgggatcttccaatctgtgggttgcacagttccatggaagaagcacagtttccctggctgtgtagcgtgctcactcaccacctcccttggctggg

SEQ ID NO: 190889 - DNA, 578 bp, Homo sapiens
tgatgagggattcacacccttatagcttttttttgatgggagcctctgaatgccactgcttccagttggccatcttggccctgcccccgtggtggtttcttataatcctttttatttctgtgttgttagttgtaatgtctccctttttatctctgattttatttatttgagtcttctcttttgtttcttagtctggctaagggtttgtcaattttgttaatttttttcaaaaaaacaactatgttttgttgatcttttatattatctttttagcatctgttttatttatttgtgctctgatctttattatttctttccttatagtaattttgggtttagtttgtttatctagttctttgagatgaattgttaggttgtttatgtgaaatctttcytcgtttttgatgtagggcattttttgcagtaaactcctctctaaggacggctttgccgaatcctataagttctggtatgctgtgtttccattttcaatgatctcaaaaaatttttaaatttattcagtgacccattgattgtttaggagtatgttagttaatctccatgtatttgtataattt

SEQ ID NO: 190890 - DNA, 578 bp, Homo sapiens
tgatgagggattcacacccttatagcttttttttgatgggagcctctgaatgccactgcttccagttggccatcttggccctgcccccgtggtggtttcttataatcctttttatttctgtgttgttagttgtaatgtctccctttttatctctgattttatttatttgagtcttctcttttgtttcttagtctggctaagggtttgtcaattttgttaatttttttcaaaaaaacaactatgttttgttgatcttttatattatctttttagcatctgttttatttatttgtgctctgatctttattatttctttccttatagtaattttgggtttagtttgtttatctagttctttgagatgaattgttaggttgtttatgtgaaatctttcttcgtttttgatgtagggcattttttgcagtaaactcctctctaaggacggctttgcygaatcctataagttctggtatgctgtgtttccattttcaatgatctcaaaaaatttttaaatttattcagtgacccattgattgtttaggagtatgttagttaatctccatgtatttgtataattt

SEQ ID NO: 190891 - DNA, 576 bp, Homo sapiens
ctctttgaggtggatgaccctgtcttttcatctcctgctctcactgccttgcacacagggcctgcgtcttggaagccctcggttgatattagtccactagtgactttcctgcaacactcatccttgggagagaccttgagatgtgtttagctgacattaggaagccacagctttgggagtggctagcttctgtttctgtcctggcaaactatttctaggataaagatttagagagtcgtggaagttgcttcacaaaatgaatggaagttttgttggtttggtcacttctgatgtctttctagtcccatttggttgctgtccattgtcctcaggctgtcttctctctcttgaaaacctgctgttagcaaaggacttgataagttcattcacactgaagtgcaactgactgataacaggttagatgaagagtttgcatggtaacctattcaaaacctgaagctgagcaatgaagctgtaatgctgatatttcatgatatagatggcaagtgtgagagttaagtgttyggccgagcaaaagtcttacattctagaaatctgaacatggagatagcatga

SEQ ID NO: 190892 - DNA, 397 bp, Homo sapiens
gcccagcgtaggactccacagacacatttgtttggcgaacactccatactgcacagtcctgtaagacaatgcttgatgtgcatgcagatcacctggggatgatgctagctcagtaggtccatgtggggcctgagcatccgcattcctaaccagcgctccagtgacgcgatgctgctggtccataagccctattttgagcaacgaggcttctgagattctttctgcctcttggtgtattgaaggcactaagacatcttttcatgaacccaattktatttgtctaacatggtcatttacaaagtgactacagcacaactatgggagcttttgggagcatttcaggaaactttgcactattagcctcatggtattttgctgcattatcaagcaagaattc

SEQ ID NO: 190893 - DNA, 397 bp, Homo sapiens
gcccagcgtaggactccacagacacatttgtttggcgaacactccatactgcacagtcctgtaagacaatgcttgatgtgcatgcagatcacctggggatgatgctagctcagtaggtccatgtggggcctgagcatccgcattcctaaccagcgctccagtgacgcgatgctgctggtccataagccctattttgagcaacgaggcttctgagattctttctgcctcttggtgtattgaaggcactaagacatcttttcatgaacccaattttatttgtctaacatggtcatttacaaagtgactacagcacaactatgggagcttttgggagcatttcaggaaactttgcactattagcctcatggtatttygctgcattatcaagcaagaattc

SEQ ID NO: 190894 - DNA, 400 bp, Homo sapiens
gaattctagtcccagttttgccaccagctagctgtgttgcctcaggcacattatttaaactctttataccttctttctctcaagtgaaaaattaaataaagtggaatctttctaaggttctattttacttttaaaactgtatgattttatttttatatttgaatcttatattgtgaagcatagtaaagtatttcaaagtaattcatcaaagtaggaaaagctaggaaaaattcctaaagcaatgaccccctcgagtgatggcagcagtgtgcagacagcttggagtcttctgcatctcctctgatgagtaaaaccaagagctctcaccacacaaaggaagagctctacacacaccytttgctttacaatttcttcacttactctggctaattgatatcta

SEQ ID NO: 190895 - DNA, 497 bp, Homo sapiens
ccactgcactccagcccaggcaacaacgagactctgtctcaaaaaaaaagagaaatgtatgttgtgttcatgtaagatggtcctataggcactacatctcttttctcataatgcgaatgaaaacgagttattttcttatrttcgagttgcattatatctcatatattgagtttacaaaagcaaaaattcctgaatccctcaaaattgagaatgactatacttacactagccagatacaaaatctctactaagtaaacagacccacatgttttatttgcagacttatgtttttatatcttctgttggggaatatgtttcttctttaaacaaacaagggcttctttccccattgattgtgtacttctgatgatgttttaaaaaagactttcacaagggagggatgggtccttaatcaagactttaaaatgagggcaataaatatattttattggttataatacctttttctttattagaaggataacagactgctggtt

SEQ ID NO: 190896 - DNA, 544 bp, Homo sapiens
aatggggactgagtataccattttctctactttcctatgcatttttacaatgcccataagaaaaagttaaaaaaaaaaaagatgccaccaaaagtactatgataggaaaataacacttctgaaaactcatggaatttgtagatgtttctcacttgtgtattaaatgtcaatataaataaatattatgtgataacttttgcaagattatagggcccttagtgggtataaatgaagacttactgtcagtgctggggtcagatatcttctaagtggactaarggaagtttcttatgtaatgaagcctgtgcagttgtctcattacgtattattcacacagacacttgcatgcaatattagatacagtcatgcacatcacaacgttcctatcaacaatggactgcatatccaacagaggtccttgaaagattataatacatattcttactgtagcttttcgatttttagacatgcaaatatgtgccattgtgttccaattgcctacagaattcagtaatgtaacatgctgtataggtttgcagtctag

SEQ ID NO: 190897 - DNA, 553 bp, Homo sapiens
cttataccttaggcttgatacttgggacccctccttgatggttaatagttacactgattacagctggttacacactggttatgcactgattacagctgctctggccaatactttgctgagtagagcttagccttaggaccaaacttcatgatgatggttggggccagtctgtggcttggytagctttggccccatggccagggtccacatggagccctttctttgagtctaactgatcgttgttgttttcttttttttatttgctgtgtatccctcttgatctaaccttttcttctttaagtgctcatatcacatctctagattaattacagcaaggacgtagcatttatacctcctctcttctatctaatgtgtgcctcactgagagccacctctatagtcactcctagattctcatctcaaataccaaaccaaattcatttaggtcattcagttcattgatccagtgtttgctgagttttaccacatgccatgcaaactgcaacaaaggcaggctccatccctgctgtcatgcaccttatagcccagtggt

SEQ ID NO: 190898 - DNA, 648 bp, Homo sapiens
gctgcgaaagacttccttactatctgctttcctgcccccagtaaaaaggaagaaaaaatggagaaattatttctatatcaaataaaatgcaaaacaggagaggaagttccttacataattacattaaaaactgatagtgaattttttgaggaatastgaaaatccttcaagcctaggaatgtttgtaaagttctgaagctttgcttgttcctgaatattaaaacagagccaaaggttttcctttttattattttgaataaaaaactccaagaacccttcatgtaaatctcgacactaagcccatctttccttgtcttgccccttgaatcatttatttaagcgggcaataataaaaggtgtcagcaattcagttgtgagctctggaagatttctgtgcgcattgacctttaagcatttgcatcttgacaggtgagctgttcttactgtttcctgtgagatatggtgcggccaaggggtcaggcatgctaatgacaaaattaccatttaccttttacctggcaggcccggtgcctgacattataaatgtaggtaacctttcacctgaagctctcttttgctctagtagagattatgtcggaatgaacttatggtggcagaagagttatgggcgaagaaggactgaattta

SEQ ID NO: 190899 - DNA, 585 bp, Homo sapiens
gttttcctttttattattttgaataaaaaactccaagaacccttcatgtaaatctcgacactaagcccatctttccttgtcttgccccttgaatcatttatttaagcgggcaataataaaaggtgtcagcaattcagttgtgagctctggaagatttctgtgcgcattgacctttaagcatttgcatcttgacaggtgagctgttcttactgtttcctgtgagatatggtgcggccaaggggtcaggcatgctaatgacaaaattaccatttaccttttacctggcaggcccggtgcctgacattataaatgtaggtaacctttcacctgaagctctcttttgctctagtagagattatgtcggaatgaacttatggtggcagaagagttatgggcgaagaaggactgaatttagtgcatttttttccctttgggtttctttttggggatgccttttctctcgcagtcattctgcataaaacattactgttcttggtgtggggctggaggkgggtgattggagcagggttaggggagaagaatgctgtttttgtcatcttgtgttcttgacatttttgaagcatg

SEQ ID NO: 190900 - DNA, 589 bp, Homo sapiens
ttttttccattgttggaaaactggtaaactgttagtgtcccattgaaacccaattttactgtgagtaaaattaacctctgaatcccataaggccctaaagaaattatctatccccaaatcagtgacttgtcctcattaatgcctttggactcattgttaggtgcaatcacaaaagatataaaaggcatctgcatattatggagtttmtctctaaaataggcaagatgagttctttcctggatgtataattgagaacttaaaatacctttggaatgccagtttccaaacaactactcccagtgaaggagttgtgaagtattgctgcttattctctgttccttgaactatgatggagtgctgtggatgactctctcgggaggaagggtactgaggagacaagggcatttcttaaccacagaactacagaaataataccctttccactctccgcactgttgagtgggatcttcaaggctgggacacatacacttttatgggaaagttctttctggatttacacaagtgtgacagtatcatgctccatcattaaaaaagtatcagcctcattctttccttattttgtgttttt

SEQ ID NO: 190901 - DNA, 492 bp, Homo sapiens
gcctcaaatgcattccagaaatctatgaggcagccacttccatcacaggctcagaggcctagaaggagaaaatggcttaaytggccaggcccagggccctgctaccctgtatcaccccaggaggcttctccagcttcagccttggctcaaaggggcccacatacaggtcaggctgcagctctgaagagtgcaagctactgtaagccttggtggtgatttcttgtggtgttaagtctgtgggcacaaggaatgcaagaactaagctaagggggcttggcaccttcccctgagatttcagagaatacatcagaaagcctgggttttcaggcagaagagtaatgcaggggtggatagcccccagagaaactacccagagcagtgcagaggggaaatatgggattaaaggctccacacagagtctccactggggtactgcctagtgcagctgtgggaaggaggctgccaccttctagaccacaaatggtagagcta

SEQ ID NO: 190902 - DNA, 612 bp, Homo sapiens
actcataggtaaaaggaactcatctccacatgagatcttggactttggacttggtacttggcacatttgrttgagttgatgctggaacaacttaagactttggggaaatattgagaagggatgattgtattttgcaatgtgtaaaggacatgagataggagggggcagggatgcaatgacctagtttggatattgtcccctctaaatcatatgttggaggtaggacttggtggaaggtgatttgatcatgcaggcagatccctcatgaatggcttcacgctataccattggtgatgagtgagttcacatgagaagtaactgtttgaaagagcctggcttgctcttctcattctctggctctcttgctcctgctctcaccatgtaatgtgcctgctcctgctttaccttccaccataattgtaaggttcctgaggccctcaccagaagcagatgatggagccatgctaagacagactagaaaatcatgggccaagtaaacctcttttctttataaatcatctagtctctggaatttctttatagcagtcccaacatggctttaatacatctttctaaaattttaaactgctaactgagttatttaaggcatac

SEQ ID NO: 190903 - DNA, 497 bp, Homo sapiens
tttgttactagaatataacctaatttacattaacaaatatattcactgtcaaattcaggccttattttatacctctactataaggcaatattcagaaccaacaaatcacaacaacaacaacacacaaacacacacacarcacataaagcaatttataaattagatatttgcaagcctaattaaaaaacaatttaataaatccaggacaatctcatacctaaacttgttttatgatgaaattctgggacagacttgtatgatgtgagcattgctatcctgatatttatttcaatatttgtaacaatttaaaagcaattttgatattccatacagttcctatatttctaatgccaaacattttagataaatatattatggggaattctccctattcataacaaccattttttaccaaaaatactacagcacttctcaaaatgcctctaatgctaggtaaatattaagtgaaacccagctttaatccatactattattta

SEQ ID NO: 190904 - DNA, 497 bp, Homo sapiens
tttgttactagaatataacctaatttacattaacaaatatattcactgtcaaattcaggccttattttatacctctactataaggcaatattcagaaccaacaaatcacaacaacaacaacacacaaacacacacacaacacataaagcaatttataaattagatatttgcaagcctaattaaaaaacaatttaataaatccaggacaatctcatacctaaacttgttttatgatgaaattctgggacagacttgtatgatgtgagcattgctatcctgakatttatttcaatatttgtaacaatttaaaagcaattttgatattccatacagttcctatatttctaatgccaaacattttagataaatatattatggggaattctccctattcataacaaccattttttaccaaaaatactacagcacttctcaaaatgcctctaatgctaggtaaatattaagtgaaacccagctttaatccatactattattta

SEQ ID NO: 190905 - DNA, 522 bp, Homo sapiens
ggcgaccactgtggtggtggagaccaagagaaagtactgycacgtggtcacaacgtcaagctcccaaagacgtgactgaccagtttgctgggccatcttaatcaacaagcttacatgtgtcctaggcccacattctatcctaaggtaccactctttatgacagaacaataaaggaagacacacaaagcacaccagattcactacagcttaagactagcatcacaaatgcttttttccactaatcaaaattctacagaggagaaaaacagtgttttttaccatttatttaaccagtttgcacagagagaggccagaagtctgactggcaaaaaattcttacccttttgttagcatgccaggctctgggttccctttcccttattgggcctagtgacctgactttttgcactatagccttgggggacaagctgcaacacaaaggaaaattatctttttccattctggccagagcaaaacacatgtgacaaaacgtagacattagccactctgcttagcacccaa

SEQ ID NO: 190906 - DNA, 557 bp, Homo sapiens
ctaaactgtcaggaatgttgattgtcaatggctcacagcttagacactctcaaaaaatcaccctctttgaaagtaaactacctctcccaagattgtacttctgtcctggaggtagcttacttccagtgattattgcatagcttacaaatactccaccctttgcttcacctggaaactctgaaagatcatttcagctccagaattccctgtatacaaaacagggagttgtagtggttgcattgctattgaacttctgccactgccaaccctgcttccttcactattacaggtgttaatcacaagaacacttttcaataaacctgcatgcaaatcttaaatatatattttatatatggatgtagagctctggttctgagacaagatggcctagactttccatttccttttctttcctgctcaataaaaccaaatgccctagaaataattcaaaatgaaagaagaattctgaagggtggaaagaaaggtgaaaygcctaaggacatcaggacttgaagaacataatcatggtgaattttgtgcttttttctttttttatc

SEQ ID NO: 190907 - DNA, 603 bp, Homo sapiens
gggcatgatggctcacacctgttatcccagcactctgggaggccaaggtgagaagatcttttgakgtcaggagtttgagactagactgaaaaatataacaaaaccctgtctctaaaaataaaaatgtcaaaagttagccaggtgtggtggcacaaacccgtagtccgaattattcaggtgcctgaggcaggagaattgctttggtttagaagttggaggttgcagtgagctatgattgggccacttcaatccagcctggacgacagagcaagaccatgactttaaaaaacaagagagggaaaaataaaaataaaaatacatctcattctttcctgaggatctcttaccaaggttgtatgtctctgcaaaatccacacagagttttatgtttttgtagtcatatcaatcttctattttattagttttatttttagtgttttgcataaaaataaccactcccaaaaagataatatgcatttgtatttgatgcaggtcatatataaaacatatcattatgttaaataattatacttcattctaaaatagttctggacactctgttttgtttaatctttctatatatccttgatcatcttgtttaat

SEQ ID NO: 190908 - DNA, 603 bp, Homo sapiens
gggcatgatggctcacacctgttatcccagcactctgggaggccaaggtgagaagatcttttgatgtcaggagtttgagactagactgaaaaatataacaaaaccctgtctctaaaaataaaaatgtcaaaagttagccaggtgtggtggcacaaacccgtagtccgaattattcaggtgcctgaggcaggagaattgctttggtttagaagttkgaggttgcagtgagctatgattgggccacttcaatccagcctggacgacagagcaagaccatgactttaaaaaacaagagagggaaaaataaaaataaaaatacatctcattctttcctgaggatctcttaccaaggttgtatgtctctgcaaaatccacacagagttttatgtttttgtagtcatatcaatcttctattttattagttttatttttagtgttttgcataaaaataaccactcccaaaaagataatatgcatttgtatttgatgcaggtcatatataaaacatatcattatgttaaataattatacttcattctaaaatagttctggacactctgttttgtttaatctttctatatatccttgatcatcttgtttaat

SEQ ID NO: 190909 - DNA, 570 bp, Homo sapiens
gaccttcaccatactgacactttatgactgggctcctctctacctgtaatacaagagaccctaatagctaggcaggaataatatcacccctattcagcctgaagaagttacagaagatggatctttgctcctcaacaactctcaggattaagggatctcttataaaagagatggggaaaatgtcagaggtgtttgaaccagagcaactccatcttaaataggggctggataaaataaggctgaggcatactgggctgtattcccagatggttaggccttctaagtcacagaatgagataggaggttggcacaagatacaggtcataaaaaccttgctgataaaactggtttcagtaaagaagctggctaaaacccagcaaaaccaagatggtaatgagaatgacctctggttgtcctcactgctacactctcatcagtgccataayaatttataaatgccatggcaatgtcaggaagttaccctatatggtctaaaaaggggaggaacctcagctctgggaattgcccaccgctttcctggaaaactaatgaatactaaaaatgggcaac

SEQ ID NO: 190910 - DNA, 571 bp, Homo sapiens
aaacaatacctaacttgtgcccggaacaacccacgacagaggcccaccaggcccccgggattcaggaaataggggccgcaccctgtaaaaacctgcttatggatttcactgagttgccccaagtgggggactatcaatacctgctggtgctcattttcaccttctcgggatgggtcaaggctctccccacccgaacagagaaagcacgagaggtgactaaagtgctgttaagagacattatcctcagatttggattgcccctgactttggggtcagacaaaggactgagatttgtagccgagatagttcaggaacgaatgcggctgttaaaaataaagtggaaattacacactgcctatcgatcgcagagctcaggaaaagtggagagcatgaaccagacactcaaatagctactaaagaaattttgccaagaaacccatctgagatgggattaggtcctgcccatggtcctcctccaggtcagatgcacccccaccaaacaaactgggtattcaccctatgagatcttgttyggctggccaccccccatcataggtcagattaagggtga

SEQ ID NO: 190911 - DNA, 471 bp, Homo sapiens
ttggcttttactaccaaccagagcaatttaaaccactattgaaatttcagctgtcacaattctttgatgtgaaaccacatttctaattctgacccctttgctgagatcccatcatgcattttcaattgcatgtggatactttcatattcttgtctaaattccaacatgcccaaatccaaatatatactatttctcccccagattcacaatttttacatgtgtgtgtctatagaactgaaattctttggagaagatgtgtttgatggttttcacactgctgataaatacatacccaagactgggtaatttataaagaaaaagaggtttaatggactcagagttccatgtggcttgggaggcctcacartcatggtagaaggtgaaaggcacatcttaaatggtggcagacatgagagaatgagaaccaagtgaaagggggaaccatttataaaaacatcagctctcatgaga

SEQ ID NO: 190912 - DNA, 606 bp, Homo sapiens
ggcagctccactcctgtggctttgtagggcacagaccccctcctggcttctttcaaaggttggggttgagtgtctgtggctttttcaggtgyacagtgcaagctgtcagtggatctactattctgggatttggggatggtggccctcttcttatagttccatgaggcagtgtcccattggggactctgtgtcagggcttcaactccacattttccttacatactgccctagcagaggctttccatgagggccctgcacctgcaacaaacttctgtctggacatctaggcattttcataaattctctgaaatctaggtggagattcccaaacctcaattcttgactcctgtgtacccacagggttaacaccatgtggcagctaccaagggatacagcttgcactctctgaagtcatggcccaagctgtatcatagccccttttagccatggctagagtggctggtactcaaggcaccaagttcctaggctgcacgaagcagggggaccttggatctggcccacaaagccatttttcccctaagcctctgggcctgtgacaggtggagcttccacaatgttctctgacatgccctggagatattttcc

SEQ ID NO: 190913 - DNA, 606 bp, Homo sapiens
ggcagctccactcctgtggctttgtagggcacagaccccctcctggcttctttcaaaggttggggttgagtgtctgtggctttttcaggtgcacagtgcaagctgtcagtggatctactattctgggatttggggatggtggccctcttcttatagttccaygaggcagtgtcccattggggactctgtgtcagggcttcaactccacattttccttacatactgccctagcagaggctttccatgagggccctgcacctgcaacaaacttctgtctggacatctaggcattttcataaattctctgaaatctaggtggagattcccaaacctcaattcttgactcctgtgtacccacagggttaacaccatgtggcagctaccaagggatacagcttgcactctctgaagtcatggcccaagctgtatcatagccccttttagccatggctagagtggctggtactcaaggcaccaagttcctaggctgcacgaagcagggggaccttggatctggcccacaaagccatttttcccctaagcctctgggcctgtgacaggtggagcttccacaatgttctctgacatgccctggagatattttcc

SEQ ID NO: 190914 - DNA, 528 bp, Homo sapiens
attccaaatggaagaaagtgaccaaaacaaagggtctacaggccccatgcgagtccaaaatccgatagggcagacattaaactgtaaaggtccaaaatgatccctttgactccatgtctcacatccagagcacactgatgcaagrggtaggctcccacagccttgggcagttacacccctgtaactttgcaggctacagccctcctcccagctgctttcatgtgctggcattgagtttctgcagcttttccaggcacatagtgcaaactattggtggatccatcattctggggtctggaggacagtagccctcttctcatagctccactaggcagtgccccagtggggactctgtgtggggccttcaaccccacagttttcatctgcactgccctagcagatgttctccatgagggacccgtttctgcaccaaacttctgcctggacatccaggtgtttccacacatcctctgaaatctaggtggaggttcccaaagctcaaatttttatttttatgcaccggaacgc

SEQ ID NO: 190915 - DNA, 528 bp, Homo sapiens
attccaaatggaagaaagtgaccaaaacaaagggtctacaggccccatgcgagtccaaaatccgatagggcagacattaaactgtaaaggtccaaaatgatccctttgactccatgtctcacatccagagcacactgatgcaagaggtaggctcccacagccttgggcagttacacccctgtaactttgcaggctacagccctcctcccagctgctttcatgtgctggcattgagtttctgcagcttktccaggcacatagtgcaaactattggtggatccatcattctggggtctggaggacagtagccctcttctcatagctccactaggcagtgccccagtggggactctgtgtggggccttcaaccccacagttttcatctgcactgccctagcagatgttctccatgagggacccgtttctgcaccaaacttctgcctggacatccaggtgtttccacacatcctctgaaatctaggtggaggttcccaaagctcaaatttttatttttatgcaccggaacgc

SEQ ID NO: 190916 - DNA, 528 bp, Homo sapiens
attccaaatggaagaaagtgaccaaaacaaagggtctacaggccccatgcgagtccaaaatccgatagggcagacattaaactgtaaaggtccaaaatgatccctttgactccatgtctcacatccagagcacactgatgcaagaggtaggctcccacagccttgggcagttacacccctgtaactttgcaggctacagccctcctcccagctgctttcatgtgctggcattgagtttctgcagcttttccaggcacatagtgcaaactattggtggatcyatcattctggggtctggaggacagtagccctcttctcatagctccactaggcagtgccccagtggggactctgtgtggggccttcaaccccacagttttcatctgcactgccctagcagatgttctccatgagggacccgtttctgcaccaaacttctgcctggacatccaggtgtttccacacatcctctgaaatctaggtggaggttcccaaagctcaaatttttatttttatgcaccggaacgc

SEQ ID NO: 190917 - DNA, 378 bp, Homo sapiens
tgtggatatttgtcttttttttttttttttttggtctgcccaaagtccattgtcatttttaatagaatgctgattcctyttggatatcatcagagtgagggtaattccaagtccccacctttcattccagaagctgacaggcacagattcttttgttcccaaccccaggacatagctggggtggtggcggggcagctctaccaatctcccaggaatatgaattaacagtgagggctgcaacaatgagaggaatgtttagaggtcgttcatcagagtgccagtgccccagccaggttgaaggacaattgtttggagtaataaaattttaggttaaaatgcattccagataaaaatgtaacatgttacgtaactgaattc

SEQ ID NO: 190918 - DNA, 378 bp, Homo sapiens
tgtggatatttgtcttttttttttttttttttggtctgcccaaagtccattgtcatttttaatagaatgctgattcctcttggatatcatcagagtgagggtaattccaagtccccacctttcattccagaagctgacaggcacagattcttttgttcccaaccccaggacatagctggggtggtggyggggcagctctaccaatctcccaggaatatgaattaacagtgagggctgcaacaatgagaggaatgtttagaggtcgttcatcagagtgccagtgccccagccaggttgaaggacaattgtttggagtaataaaattttaggttaaaatgcattccagataaaaatgtaacatgttacgtaactgaattc

SEQ ID NO: 190919 - DNA, 378 bp, Homo sapiens
tgtggatatttgtcttttttttttttttttttggtctgcccaaagtccattgtcatttttaatagaatgctgattcctcttggatatcatcagagtgagggtaattccaagtccccacctttcattccagaagctgacaggcacagattcttttgttcccaaccccaggacatagctggggtggtggcggggcagctctaccaatctcccaggaatatgaattaacartgagggctgcaacaatgagaggaatgtttagaggtcgttcatcagagtgccagtgccccagccaggttgaaggacaattgtttggagtaataaaattttaggttaaaatgcattccagataaaaatgtaacatgttacgtaactgaattc

SEQ ID NO: 190920 - DNA, 353 bp, Homo sapiens
acagtctccatttccctgtgtccagccctctttctccgatccatccagtcgggtttctatctcatcactctgccgattagttctcattacaatagctttggccttcatggagctaatagatattttccagtcctcatcttattagatctttcttcagcgttgactctacctttggctgttgtatcacactgtgggttttcccaaacttctgtagccactgcctctctctccctagtaaagaaagcstcaccctcctttagcagcctttaaatgttggcctcccctgaggctcagtcctgtcctgagcttcccactctggcaagctcatccacaatcatgacttgagttagcat

SEQ ID NO: 190921 - DNA, 353 bp, Homo sapiens
acagtctccatttccctgtgtccagccctctttctccgatccatccagtcgggtttctatctcatcactctgccgattagttctcattacaatagctttggccttcatggagctaatagatattttccagtcctcatcttattagatctttcttcagcgttgactctacctttggctgttgtatcacactgtgggttttcccaaacttctgtagccactgcctctctctccctagtaaagaaagcctcaccctcctttagcagcctttaaatgttggcctcccctgaggctcagtcctgtcctgagcttcycactctggcaagctcatccacaatcatgacttgagttagcat

SEQ ID NO: 190922 - DNA, 594 bp, Homo sapiens
gagatactgtttagtataattccawttcctttatggccttatttatgcctttcagcaatatagaccaggacagaatcatcactgaaaggtgagtttatgttcttgtgtatatccctagttccccctgtttgaaaacttaagcagaaaatttataggagttaactcaaagtgctctatagggagtcttaacattcttcatagtgcaatagaaacatattgaggctgtgttccttctgtttgaaggcaatcttgggattttatcattttgtaaattaaaggaaggaattgatactgtaaatttatcctggaattcaataaaggtaagaatgattgctgcaaaggaggcatccatataagaaataattttatattgatctgaaatgtaagctgtaaattttttcccatgagctaaaaatatattacctaggttggtactagctttattaacatttatttgacaatataatcctaattggatatggatccatttattttgcatgttttgagcatggcatttaagaacagagtatacacttaaaatcctttgaattaagtgatttaaagaattgggagatttaggttttactttagcat

SEQ ID NO: 190923 - DNA, 594 bp, Homo sapiens
gagatactgtttagtataattccaattcctttatggccttatttatgcctttcagcaatatagaccaggacagaatcatcactgaaaggtgagtttatgttcttgtgtatatccctagttccccctgtttgaaaacttaagcagaaaatttataggagttaactcaaagtgctctatagggagtcttaacattcttcatagtgyaatagaaacatattgaggctgtgttccttctgtttgaaggcaatcttgggattttatcattttgtaaattaaaggaaggaattgatactgtaaatttatcctggaattcaataaaggtaagaatgattgctgcaaaggaggcatccatataagaaataattttatattgatctgaaatgtaagctgtaaattttttcccatgagctaaaaatatattacctaggttggtactagctttattaacatttatttgacaatataatcctaattggatatggatccatttattttgcatgttttgagcatggcatttaagaacagagtatacacttaaaatcctttgaattaagtgatttaaagaattgggagatttaggttttactttagcat

SEQ ID NO: 190924 - DNA, 617 bp, Homo sapiens
cattattttgaagatggcctatagataaattctttcttttaggtagaattaaccaaatagagtaaaataagcaactcctagaaggcttacaaaactcatgggctccccagagtttggtrtttctttttgaactgtgtgagtgtgatataccaaatgaaattcaaaggccaaagactcatctcaatggaatttgtggttttagactcatgaaacttacttaaatgaaacttgcattttctacagctgtgcctaaaacttcccttggcaagaatctttacatcactgctgacagcttagtgaacaaattgcttagtttatagatatggccacttctgtcagcagaggaaagaattaagataaaactattagactacagttatatgataataaatcaaaatagtcaattttaaaacataggtggaacatgagtaagtatactgatgcttggtttaatgaatatttagtgggaggaaaaacaagaaaatacattatttataaaatgattccttaatcatggcactactggaatagtacaatctaattctgtcatgtttcatgtttgtaggaaaatttgacaaagggcctatacatggagacaggtaatatgtaagtaataa

SEQ ID NO: 190925 - DNA, 557 bp, Homo sapiens
tattgtcctcaatagttttttttcccccaattactattgtaagcatttttttttaagaatgtcatcaccttagggttrtttcctaaataaatattggattggcatctgctctatcccttactgagtactggattctgttattgtagtcagcaagtgttaaacaattagaagaatgaaatgattgtgagtatgtaaaactctttgttttggcacaaatcattgtttttatttaatttgggaaaacatctttacaagttgataaatactagaactgtcaatgagaaaaatgctactgaaatacctatttttctctttgatggcagactttcctaaatatttgcattttaacatattttatctcatactttagctgacattacttagttgtatatggatctgttcttaataaaataaagagaaaaacataaagagagtaaaaggatcattaaatttgttattacaattgtgtagaagtttccctgtcataaaatttctaagcatagcagttgtcactgattgtcttctatagaagcaaataatttatttcaattttctaa

SEQ ID NO: 190926 - DNA, 567 bp, Homo sapiens
cccacaaatagatgaatagaaatataacagaatgcagaacccagaaataaagacatgtaactacaaccaactgatctttggcaaagttgacaaaaacaaacgatggagaaagaacaccctattcaataaatgtttytggaaaattggttagtcatatgcaaaagaatgaagttggacctttatatctcaccatatacaaaaattaactcaagatggattaaatactccaatgcaagacctgtaaactataacaatcttgaaagaaaatctatgaaaaactcctctggacagtcaaaaatttatgactaagacctcaaaaataagtgcaccaaatataaaaatagacaaatgggacttaattaaaccaaagatcttctgcacagcaaaagaaacaataaaaaagcctgagcacagtggctgatgcctgtaattccaggaatttgcaagggcaaggtgaaaagattgcttgttggcagtggcaactccagaatttatatgaaagaatttaaggagcaacgatttaacttaaatataaggccagagggattgcttaaaaatgacaaaaaa

SEQ ID NO: 190927 - DNA, 465 bp, Homo sapiens
ttgaggaagaaacctccctatgcctctctcctagcttctggtggttcccggcaatycttggtgttctttggcttgtagatacatccatacaatctctgcctatatcttggcttcttctatgtttttgcttgtactcttctcttcttataaggatgccacttataagattactggctacccaaatctcttctgacttcactggaacttgattacatctacaaagatcctatttccaaataaggtaaaattcgtaggtatagggaggctgcaacttgaccatatctttttgaaggatacaacttaactcactataactttttactaacattcaacaaatttgaagctcttctataatatactattctttcttggcttctggaacactaaactaacctggtttcctttctcactctttgcccctcatttagggattcattcttctatatccaacctctatattttgga

SEQ ID NO: 190928 - DNA, 527 bp, Homo sapiens
atgaattctctcacagttcaagagggtaaaagtctgaaatcaaagtgtcagcaaggtttggtcattatggaggcattgaggaagaaacctccctatgcctctctcctagcttctggtggttcccggcaatccttggtgttctttggcttgtagatacatccatacaatctctgcctatatcttggcttcttctatgtttttgcttgtactcttctcttcttataaggatgccacttataagattactggctacccaaatctcttctgacttcactggaacttgattacatctacaaagatcctatttccaaataaggtaaaattcrtaggtatagggaggctgcaacttgaccatatctttttgaaggatacaacttaactcactataactttttactaacattcaacaaatttgaagctcttctataatatactattctttcttggcttctggaacactaaactaacctggtttcctttctcactctttgcccctcatttagggattcattcttctatatccaacc

SEQ ID NO: 190929 - DNA, 577 bp, Homo sapiens
tacaggttttttcagacaaacaaatgctgagagagtacaccactaccaagccagtgctacaataactgctaaaaggagctgtaratcttgaaataaatcctcaaaataccccaaaacagaaagctcttactaaacatgcttagtatcaaggattttctgatacatagtacctgaaaaagtacagcatcaagcttcacactgaaataagatgtctagaaaagcgacagtgactttttaaagtaaactttaagtacataatatctgaatatatttttcttaaaaaacaaaatatttcatatagaactaaaattcctttgcaaactcaaattttactctccttcattcaactcaaccccattccattaaagagaaaaacaattgcatcagaataggatttttctttccaaatattttatgtgtgttgataggtatatatatgtagccactggggaaaaatactattggcatgtggggggatctgaatgtgatctcaaatatgggcaatcttaataatgtattgaagaccaacattgtgcttatgacctgatggtaagcaaaagacacagcatcttggcac

SEQ ID NO: 190930 - DNA, 632 bp, Homo sapiens
tcttcatttctccttcatgattgaaggatatttttgctggatatcctattctagaataaaagcattttttgtttgttttgttcgtttgtttgtttttccttcagcattttaaatatgtcacgccactctctcctggctggtaaggtttccattgagaagtttgctgcctgataattatttgagttcctttgtattttgtttcttttctcttgctgcttttaggatcctttctttatccatgacctcttggagtctgattaccaaatttcttgaggtagtcttatttgggttaaatttctttggtgttctataacyctcttgtactgaatattaacatctttctctagatttggaaagttctctttttttatccctttgagttaagtttctaccccaatgtctctctctgattcctctttaagatcaataactcctagatttgtccttttgagtctatttcccagatctttgaagagtgcctcattcttttttactcttttttttttggtctcctctgactatgtattttcaaataacccgttttcaagctcacttattctttatactgcttgatgaattctgatgttgggagatacacattcttcaatatgctgatcaaatttttcaactcc

SEQ ID NO: 190931 - DNA, 650 bp, Homo sapiens
tatacagagatctcttaccctagaggttgctaaactccagctcacagagcaaatttagcctgcttgcctgatttgttggcctgtgagctaggaaatatattttacattttgaaattgtttttaaaaaagcaaaagartaatgatacttcatgatgtattaaaattacatgaaatttaaattttattgtctgtacataagattatattagaacacagcacactcatttatttatgtattatttaggactgcatttttgctagtggaggaactgagtaggagtgacagggactgagtgacccacaaggcttaaaatatttactctctgctcttttactggtcttgttctaaaccagttcttactcttgccactgactttacagtggttgtttgggtaacttctgcaaatgggtgtgtacacatgtgtagggtgagaggcattcttccttactttgtagctgaaaataggtcatcctactatgagctgtgaagtctgaatatgtttccccttgttccactaaactcaatacaggtacacccaaaggagtttcagaaaatagtcactaggacccatgggagaagggcagccttccacttttgctgatttgattaaaccacctaagaagggattgcacagaccaaaaataagctc

SEQ ID NO: 190932 - DNA, 524 bp, Homo sapiens
gaattcaacacagctgtgggatatttgacaagctatttcatctctccatgacttcagtttcctcatctgttaatgggggaaattatagcattgatatatatatttaacacagtaagtgttacctaaacgtttgmtaaagaaagatagtcaacaaacaacaccaagtctctcctataggcgagatcccatatattattagcctcatagatttataaaacctgttcacagtgcatttattttcaaatgctgttgcttacggtttcactatctctgtatataggggccattaaaattagtattccatttgcactacaacaaatatataaactatcacccaaatcacagttttcctatttgataaattttcagtgcatcatgaaaatattttggatatcatcatatgtagtagaaatttaaatatccctgatttggggccatagattaaaagcctacagttggttgtcttggttgtcatcctttccagagtaagtgttataaatcttcacactttttccataaaaatc

SEQ ID NO: 190933 - DNA, 612 bp, Homo sapiens
atgtgaatgatatgatttcagtttaaaatacatgaaatgaaaaaaaaattaaattcgaaacctctgaacattttcagactattactactgggagtcacaaaattagtcctttttaagaatttaacaactttttaacagtctttaatctttatcctaaagggaaayagtaatagcctaatcactcaagtgtgggaaaaataaaagaatcactctcattctcgcttgcttaaccctgaccacaactctcaagcttgaacatgccatgtatcctcttctgcactcgttattttgggatttggaggagtgtgtgggaggggaggatggaaggaggagcggggacgtaagggggagaaagtggagcggggaaaaagatgagaagatggcctaaggcaagaataagagaggaagaaacttatgagaaatcaaggaaacagtggcacttccgtgagaggggaagatcatatttaacaagtggaaccttgaatggagggaaagaatacattcaggaagaagaggccatagaaagcatgtagagcaggggtgcccaagggagagaacacagtcatggcttcttagtttctgtgtttggtctggttgggccagtaaagcccc

SEQ ID NO: 190934 - DNA, 610 bp, Homo sapiens
agtcatgccaacctctgtatgtgtatgacttcccaacacagctgcttttaagtaacttactttgtggctcaattttgaattcccaaaagaagaaatttggatggctcatcttaagwtagtgcccacatttggtccaatcagctgtgaccaaatagagactacatgttttcacatgggacctaggctttcccattctgtgtcctgcgggtgcctcgggtactattaaaaggacgtgtcgtcagggaagaaatgatgcatgtatacgctgcacataacatcaactcacaaataccctgtgaagattttgtttcctctttacgagggagacagagaactgctagatatatggaagatagatctagtttatatcaattcaagagtaggtagaattaaactttccttatcttcactggaattaaattcttcaactagttgtctccttaaagttgctcatttcctcccatcttcctcgtgtgcaagtgtaatgtgtaaatgtgaacacgccattgttaaacctcttcagaatctaatattccattttgataacactagttatgaaactagttttaacctagaaactagtgtttaacctagagataacaataagctt

SEQ ID NO: 190935 - DNA, 612 bp, Homo sapiens
atgtgaatgatatgatttcagtttaaaatacatgaaatgaaaaaaaaattaaattcgaaacctctgaacattttcagactattactactgggagtcacaaaattagtcctttttaagaatttaacaactttttaacagtctttaatctttatcctaaagggaaacagtaatagcctaatcactcaagtgtgggaaaaataaaagaatcactctcattctcgcttgcttaaccctgaccacaactctcaagcttgaacatgccatgtatcctcttctgcactcgttattttgggatttggaggagtgtgtgggaggggaggatggaaggaggagyggggacgtaagggggagaaagtggagcggggaaaaagatgagaagatggcctaaggcaagaataagagaggaagaaacttatgagaaatcaaggaaacagtggcacttccgtgagaggggaagatcatatttaacaagtggaaccttgaatggagggaaagaatacattcaggaagaagaggccatagaaagcatgtagagcaggggtgcccaagggagagaacacagtcatggcttcttagtttctgtgtttggtctggttgggccagtaaagcccc

SEQ ID NO: 190936 - DNA, 640 bp, Homo sapiens
gccagcataaacaagctccctatatgagagaccctcctggtcacaggtgggacaactgggcattaggctgtcctccagccaaaagaagcgttccataaaaggcatacagcaaacatccacgttcagctccccttcatttcctgtttaggacagggtggctagccactctggtgctgaaaccccaagttagctgggccctctcaaaacaacacttgcctctatttacccatgttcatgcacatgtgtgcatgtacacacatayaccctgatgggagcactgcatatctccaggcttttctctttggcacagatgcatcattcgactccgaaacccgaaacaaatcccaagattattaaaagtgaatatgtcaaggaagacactgattttattcagcaagtgatttttccacctctttagttactgactcattatactctcctcgcatatcactaatagttatggaacctttaataactgcctgacaaagttctaactaattcacatatgtgatatctcctacattttacttgaagttactgaccaaatagatgctgactgataacatagtttttcaggaaggaagttaacttagggaaaatggagaaattcatccttctttaaaattcacagactagtgat

SEQ ID NO: 190937 - DNA, 427 bp, Homo sapiens
ggactgtaggttcaagaagaccacataatttactgtgttttcaaaattcaagatgttatttgtccagagggagatatacacacacacacgtgcaaatatagactgtggttrtattttccattaaatgatagtgttctaagatcaaatatttcacaatcttaccagataactttgctagatagtgtttggtcataaatttcaggacaaatggagaggtaaaaaaaggtattcttaagcttgtagaattcttgagaatggggctgctttggatggtgagggggtgaacagtccttctagatgttttccaaagctgaagtgccccctgcttctccaaagatagagcagctgcttctcaacgggtgtgtcaaccaataactgcttgagtagatgagtgagagtaagactgtgggtgtgtgcgcgcacacac

SEQ ID NO: 190938 - DNA, 427 bp, Homo sapiens
ggactgtaggttcaagaagaccacataatttactgtgttttcaaaattcaagatgttatttgtccagagggagatatacacacacacacgtgcaaatatagactgtggttatattttccattaaatgatagtgtyctaagatcaaatatttcacaatcttaccagataactttgctagatagtgtttggtcataaatttcaggacaaatggagaggtaaaaaaaggtattcttaagcttgtagaattcttgagaatggggctgctttggatggtgagggggtgaacagtccttctagatgttttccaaagctgaagtgccccctgcttctccaaagatagagcagctgcttctcaacgggtgtgtcaaccaataactgcttgagtagatgagtgagagtaagactgtgggtgtgtgcgcgcacacac

SEQ ID NO: 190939 - DNA, 427 bp, Homo sapiens
ggactgtaggttcaagaagaccacataatttactgtgttttcaaaattcaagatgttatttgtccagagggagatatacacacacacacgtgcaaatatagactgtggttatattttccattaaatgatagtgttctaagatcaaatatttcacaatcttaccagataactttgctagatagtgtttggtcataaatttcaggacaaatggagaggtaaaaaaaggtattcttaagcttgtagaattcttgagaatggggctgytttggatggtgagggggtgaacagtccttctagatgttttccaaagctgaagtgccccctgcttctccaaagatagagcagctgcttctcaacgggtgtgtcaaccaataactgcttgagtagatgagtgagagtaagactgtgggtgtgtgcgcgcacacac

SEQ ID NO: 190940 - DNA, 427 bp, Homo sapiens
ggactgtaggttcaagaagaccacataatttactgtgttttcaaaattcaagatgttatttgtccagagggagatatacacacacacacgtgcaaatatagactgtggttatattttccattaaatgatagtgttctaagatcaaatatttcacaatcttaccagataactttgctagatagtgtttggtcataaatttcaggacaaatggagaggtaaaaaaaggtattcttaagcttgtagaattcttgagaatggggctgctttggatggtgagggggtgaacagtccttctagatgttttccaaagctgaagtgccccctgcttctccaaagatagagcagctgcttctcaaygggtgtgtcaaccaataactgcttgagtagatgagtgagagtaagactgtgggtgtgtgcgcgcacacac

SEQ ID NO: 190941 - DNA, 520 bp, Homo sapiens
ctgtcaaaaggatgctgctgctcaacttagaaaaaggtgaaatcaagggatggtcaaaatcatgaacactagaaactattcctagaaaaatgcacataaatactcatatagtcaygcatttcaaaatagcaaaacgatgatgacggtgatgatgatggtgatgatgatgatgatgatgatgatgatagtaatcgctgccacttattgagaggcccataagccaagtactttgcagacatgatgacactaccttgggacacaaatcttagcattctcgtttttaagatgaagacaatgaggtttgggcaactgtgtcacgtattgggcccagagtcacaagttagtagcagaaccagtttttaaatcttgtctgtctgccactaaagtctggcgtgctcaaacatccccccttggaagcttctctcacactgtgtgtatgtgactgtatcaggacaacagttcaaaaccagccctggtatggactaggaggtaaggatgactgaatgctaatagaaataaa

SEQ ID NO: 190942 - DNA, 520 bp, Homo sapiens
ctgtcaaaaggatgctgctgctcaacttagaaaaaggtgaaatcaagggatggtcaaaatcatgaacactagaaactattcctagaaaaatgcacataaatactcatatagtcacgcatttcaaaatagcaaaacgatgatgayggtgatgatgatggtgatgatgatgatgatgatgatgatgatagtaatcgctgccacttattgagaggcccataagccaagtactttgcagacatgatgacactaccttgggacacaaatcttagcattctcgtttttaagatgaagacaatgaggtttgggcaactgtgtcacgtattgggcccagagtcacaagttagtagcagaaccagtttttaaatcttgtctgtctgccactaaagtctggcgtgctcaaacatccccccttggaagcttctctcacactgtgtgtatgtgactgtatcaggacaacagttcaaaaccagccctggtatggactaggaggtaaggatgactgaatgctaatagaaataaa

SEQ ID NO: 190943 - DNA, 561 bp, Homo sapiens
agactaatgttcctggattctcttgctagttgcttctcaggtgaccactaaagtgaccactaagtctaggaaaaacgcctttgatgtctggctcagataactgctctaytatgaccttcactgtcatctcttgctgccaagttctgttatctcaaggtgatattcaccttgaaaaccctgcaatggctgatgctgttgcacccagcactgcagctcattgacttagcagcgtgttccctagtgcaagatcaatgaagcacattctctataaaaacagaaacaaacaaacaaaaaaggcattgtatttgttcatcaaaatggaagataggcaaaaagtaaaggaagattttttgttggaaaaggtagaactaggctcagcatttgaccaaaatgtgggaaatgaaggaggcacacaatggacatgggttatttgagaagtaggagatagcttcaaagagagaaaaaggtgcctttactcctctattattttatcaagcatgagtatattcacattaagcctggacaggcctatattaaaggtaagacttaagtcttatgtgt

SEQ ID NO: 190944 - DNA, 561 bp, Homo sapiens
agactaatgttcctggattctcttgctagttgcttctcaggtgaccactaaagtgaccactaagtctaggaaaaacgcctttgatgtctggctcagataactgctctactatgaccttcactgtcatctcttgctgccaagttctgttatctcaaggtgatattcaccttgaaaaccctgcaatggctgatgctgttgcacccagcactgcagctcattgacttagcagcgtgttccctagtgcaagaycaatgaagcacattctctataaaaacagaaacaaacaaacaaaaaaggcattgtatttgttcatcaaaatggaagataggcaaaaagtaaaggaagattttttgttggaaaaggtagaactaggctcagcatttgaccaaaatgtgggaaatgaaggaggcacacaatggacatgggttatttgagaagtaggagatagcttcaaagagagaaaaaggtgcctttactcctctattattttatcaagcatgagtatattcacattaagcctggacaggcctatattaaaggtaagacttaagtcttatgtgt

SEQ ID NO: 190945 - DNA, 561 bp, Homo sapiens
agactaatgttcctggattctcttgctagttgcttctcaggtgaccactaaagtgaccactaagtctaggaaaaacgcctttgatgtctggctcagataactgctctactatgaccttcactgtcatctcttgctgccaagttctgttatctcaaggtgatattcaccttgaaaaccctgcaatggctgatgctgttgcacccagcactgcagctcattgacttagcagcgtgttccctagtgcaagatcaatgaagcacattctctataaaaacagaaacaaacaaacaaaaaaggcattgtatttgttcatcaaaatggaagataggcaaaaagtaaaggaagattttttgttggaaaaggtagaactaggctcrgcatttgaccaaaatgtgggaaatgaaggaggcacacaatggacatgggttatttgagaagtaggagatagcttcaaagagagaaaaaggtgcctttactcctctattattttatcaagcatgagtatattcacattaagcctggacaggcctatattaaaggtaagacttaagtcttatgtgt

SEQ ID NO: 190946 - DNA, 516 bp, Homo sapiens
tattattttttttaaccaattctatttctagaccagtgctattatttacttaattacacttaaatttaaatcgatacattcttagctttgctccaagtattactaatcataaaataatgtgtttgatgtactagttatgtactactttatcctaatacataataaaataatacattcaaataaaacattcagcaagcygccaaaaaattggtaaagcaaggaagggacaggaagaatttactgacttttaggagcctcattcagtgtggagaatagaacatagttaacattggagtcaggaaaaactgttaggatgtcatttgcagtcattccagagaaatgataaaggcctaagttagagtagtagagggagggagggaaaaggagaactatttccagaaatgttaagactgcacatgtagaagtgcagactgatttgattttgaaggttggaggaggagaaggaaatcaaggttagctctaggtttctttgcggggcaaataaaaaaatagtca

SEQ ID NO: 190947 - DNA, 516 bp, Homo sapiens
tattattttttttaaccaattctatttctagaccagtgctattatttacttaattacacttaaatttaaatcgatacattcttagctttgctccaagtattactaatcataaaataatgtgtttgatgtactagttatgtactactttatcctaatacataataaaataatacattcaaataaaacattcagcaagccgccaaaaaawtggtaaagcaaggaagggacaggaagaatttactgacttttaggagcctcattcagtgtggagaatagaacatagttaacattggagtcaggaaaaactgttaggatgtcatttgcagtcattccagagaaatgataaaggcctaagttagagtagtagagggagggagggaaaaggagaactatttccagaaatgttaagactgcacatgtagaagtgcagactgatttgattttgaaggttggaggaggagaaggaaatcaaggttagctctaggtttctttgcggggcaaataaaaaaatagtca

SEQ ID NO: 190948 - DNA, 516 bp, Homo sapiens
tattattttttttaaccaattctatttctagaccagtgctattatttacttaattacacttaaatttaaatcgatacattcttagctttgctccaagtattactaatcataaaataatgtgtttgatgtactagttatgtactactttatcctaatacataataaaataatacattcaaataaaacattcagcaagccgccaaaaaattggtaaagcaaggaagggacaggaagaatttactgacttttaggagcctcattcagtgtggagaatagaacatagttaacrttggagtcaggaaaaactgttaggatgtcatttgcagtcattccagagaaatgataaaggcctaagttagagtagtagagggagggagggaaaaggagaactatttccagaaatgttaagactgcacatgtagaagtgcagactgatttgattttgaaggttggaggaggagaaggaaatcaaggttagctctaggtttctttgcggggcaaataaaaaaatagtca

SEQ ID NO: 190949 - DNA, 516 bp, Homo sapiens
tattattttttttaaccaattctatttctagaccagtgctattatttacttaattacacttaaatttaaatcgatacattcttagctttgctccaagtattactaatcataaaataatgtgtttgatgtactagttatgtactactttatcctaatacataataaaataatacattcaaataaaacattcagcaagccgccaaaaaattggtaaagcaaggaagggacaggaagaatttactgacttttaggagcctcattcagtgtggagaatagaacatagttaacattggagtcaggaaaaactgttaggatgtcatttgcagtcattccagagaaatgataaaggcctaagttagagtagtagagggagggagggaaaaggagaactatttccagaaatgttaagactgcacatgtagaagtgcagactgatttgattttgaaggttggaggaggagaaggaaatcaaggttagctctaggtttctttgsggggcaaataaaaaaatagtca

SEQ ID NO: 190950 - DNA, 277 bp, Homo sapiens
gaattccagggaaaagcttggaaataatgatcctatttacctgctcactctcctcctctytctttacccagacatgttgattgctccttctgggacgcatggctgtttcttatgctagaaaaggtctctaaaaaccagctttgaaatgacttatttctgtgacctatagttttatttcttttaaaaaccaacagctggctactctccagaggcctgatctaattagcatagaagcagaactcatttacatgccatcacagccctgagtatactcata

SEQ ID NO: 190951 - DNA, 277 bp, Homo sapiens
gaattccagggaaaagcttggaaataatgatcctatttacctgctcactctcctcctctttctttacccagacatgttgattgctccttctgggacrcatggctgtttcttatgctagaaaaggtctctaaaaaccagctttgaaatgacttatttctgtgacctatagttttatttcttttaaaaaccaacagctggctactctccagaggcctgatctaattagcatagaagcagaactcatttacatgccatcacagccctgagtatactcata

SEQ ID NO: 190952 - DNA, 277 bp, Homo sapiens
gaattccagggaaaagcttggaaataatgatcctatttacctgctcactctcctcctctttctttacccagacatgttgattgctccttctgggacgcatggctgtttcttatgctagaaaaggtctctaaaaaccagctttgaaatgacttatttctgtgacctatagttttatttcttttaaaaaccaacagctggctactctccagaggcctgatctaattagcatagragcagaactcatttacatgccatcacagccctgagtatactcata

SEQ ID NO: 190953 - DNA, 565 bp, Homo sapiens
tcactcttttttatggctttgtagtattgcatggtgtatacataccacattttctttatccagtgtaccactgatagatacttaggttgattccatgactttgctattgtgaatagtgstgagataaacatacaagtgcaagtgtccgtttgataaaataactttttccctttgggtagatacccagtgatggaattgctgggtcaaatagtaattctatttttagtttgctgagaaatttcccatgctgttttgctgtaggggttgaactactctacattcccaccaacagcgtgtaagcatttccttttctctacatccatgccaacttctgctattttttgactttttaataatagccattctgactggtgtgaaatggtatcgcattgtggttttagtttgcgtttctctgataattagaaatgtatatttttataaaatatgatactttcatacttgattttggcattatgtagagaacaattcaaaacgaaagggtttgaactaatgtagacaaaacacagctctgccagttatgagctgtgtgaccttcaacagatta

SEQ ID NO: 190954 - DNA, 391 bp, Homo sapiens
gaattctaaaatgcctcactattgaatggataggttatgtcgcaacagttttacctgtgtgggaatcagtgctttccattgataacagccacgtattttaagagatcatcatctctgtaaaatttcagatagaacatggtagctgttctaactggtatctgcagatgattatgtcctagaaacaactatttcatgttaagtagaagcatcatagatttcttytagtgacttacagctgtgtacctattacccctcctgattttatattttatcagtttggaggaaaaacttctatttttcttcatagctgaatagaaacgggtagtttcggaaagcacacgggagtgactgtccttcgtgaagtctggcctctgctctcccggcagcagaa

SEQ ID NO: 190955 - DNA, 575 bp, Homo sapiens
gggtggttagaacttcaacatctgaatttgggggggatgcaattcatctyacaacacccaagatggttcttacatccgttctcagcctcagatgtcctcagtcctggtgctgcctatgtggcgtgcctgagggcagagctcactgccagcctggtgctccacagctgaatttctgactgtccagcaaagtatcctttgtccaatttgtacccacaggtaggctttagctttcaggccaatgttagattcttctcctggctttagaacaacttggtggtctcctccagtttctagggacatctctatgcctctcaactcctgattccatttggacccatctctgtatgacctctcacaatgcgagcttgggtatctttcccttcttattgtgactcaccactaatagcagtacaaaatcctgtttcataaagtgggttcctcagaacattagttatgttggatataaatagatttcgtgtaggataccaagaatgtttgagaaatgttgcatgacagaaaacaaagtttctttcatgcaaaacttcctatatgtccacaggtgggaaagtgggaag

SEQ ID NO: 190956 - DNA, 575 bp, Homo sapiens
gggtggttagaacttcaacatctgaatttgggggggatgcaattcatcttacaacacccaagatggttcttacatccrttctcagcctcagatgtcctcagtcctggtgctgcctatgtggcgtgcctgagggcagagctcactgccagcctggtgctccacagctgaatttctgactgtccagcaaagtatcctttgtccaatttgtacccacaggtaggctttagctttcaggccaatgttagattcttctcctggctttagaacaacttggtggtctcctccagtttctagggacatctctatgcctctcaactcctgattccatttggacccatctctgtatgacctctcacaatgcgagcttgggtatctttcccttcttattgtgactcaccactaatagcagtacaaaatcctgtttcataaagtgggttcctcagaacattagttatgttggatataaatagatttcgtgtaggataccaagaatgtttgagaaatgttgcatgacagaaaacaaagtttctttcatgcaaaacttcctatatgtccacaggtgggaaagtgggaag

SEQ ID NO: 190957 - DNA, 575 bp, Homo sapiens
gggtggttagaacttcaacatctgaatttgggggggatgcaattcatcttacaacacccaagatggttcttacatccgttctcagcctcagatgtcctcagtcctggtgctgcctatgyggcgtgcctgagggcagagctcactgccagcctggtgctccacagctgaatttctgactgtccagcaaagtatcctttgtccaatttgtacccacaggtaggctttagctttcaggccaatgttagattcttctcctggctttagaacaacttggtggtctcctccagtttctagggacatctctatgcctctcaactcctgattccatttggacccatctctgtatgacctctcacaatgcgagcttgggtatctttcccttcttattgtgactcaccactaatagcagtacaaaatcctgtttcataaagtgggttcctcagaacattagttatgttggatataaatagatttcgtgtaggataccaagaatgtttgagaaatgttgcatgacagaaaacaaagtttctttcatgcaaaacttcctatatgtccacaggtgggaaagtgggaag

SEQ ID NO: 190958 - DNA, 575 bp, Homo sapiens
gggtggttagaacttcaacatctgaatttgggggggatgcaattcatcttacaacacccaagatggttcttacatccgttctcagcctcagatgtcctcagtcctggtgctgcctatgtggcgtgcctgagggcagagctcactgccagcctggtgctccacagctgaatttctgactgtccagcaaagtatcctttgtccaatttgtacccacaggtaggctttagctttcaggccaatgttagattcttctcctggctttagaacaacttggtggtctcctccagtttctagggacatctctatgcctytcaactcctgattccatttggacccatctctgtatgacctctcacaatgcgagcttgggtatctttcccttcttattgtgactcaccactaatagcagtacaaaatcctgtttcataaagtgggttcctcagaacattagttatgttggatataaatagatttcgtgtaggataccaagaatgtttgagaaatgttgcatgacagaaaacaaagtttctttcatgcaaaacttcctatatgtccacaggtgggaaagtgggaag

SEQ ID NO: 190959 - DNA, 548 bp, Homo sapiens
tcaacatctagagcaagcccaggagacttgggattaaggaataggagtgtaagagttaaaacgtcataaatgtgaaagtcaggtacagctccrgaaactagcagaagggaagcacagggaaaaatatttcctcatctcagataaaagggagacaagagagactgtcaaattggtgcaaccagaaaaatatgctcacacaactcataaaaagttttaaaggcaaaagaagtaaaaatcagaccataactaagaaaaattgagagggagtggaaagagagaagaggcaaggaataatagaaagtatctaaatcaagaaacgagggatagaagatcctccagaggaacagaagaagaaacagaaacaagagctggctttgagcaggcatcccagatgttggtttgacatggggcagacttttgttttcatttctttgtttagtttttgtgtgcaaatgtacatttgactccaatgatagtacagattttgaaaggtagagataaacactggcaggaccctggcccatggaattaggaaacttccaagcctc

SEQ ID NO: 190960 - DNA, 548 bp, Homo sapiens
tcaacatctagagcaagcccaggagacttgggattaaggaataggagtgtaagagttaaaacgtcataaatgtgaaagtcaggtacagctccggaaactagcagaagggaagcacagggaaaaatatttcctcatctcagataaaagggagacaagagagactgtcaaattggtgcaaccagaaaaatatgctcacacaactcataaaaagttttaaaggcaaaagaagtaaaaatcagaccataactaagaaaaattgagagggagtggaaagagagaagaggcaaggaataatagaaagtatctaaatcaagaaaygagggatagaagatcctccagaggaacagaagaagaaacagaaacaagagctggctttgagcaggcatcccagatgttggtttgacatggggcagacttttgttttcatttctttgtttagtttttgtgtgcaaatgtacatttgactccaatgatagtacagattttgaaaggtagagataaacactggcaggaccctggcccatggaattaggaaacttccaagcctc

SEQ ID NO: 190961 - DNA, 626 bp, Homo sapiens
cgttctctcacttaaatctcacatgtgggagcaagttggtggaagagcgaagggccagaggccagggtccaaatcctggctctcttagctgagtctccttggacaaatcccttgatgtccctcaaatgatgcctccatttcttcactttataagaagkggattcataatagtacctaccttgtagagtattatgataattaaaggagactatccatatgaaatacttagaacagagcctagtaatataaatataccatttaaaaataagtatactggctgagtgtggtgggtcacacctgtaattccagcactttgggaggcccaggcgggtggatcacctgatgtcaggagttcgagaccagactgaccaacacggagaaaccccgtctctactaaaaatacaaaattagctgggtgtggtggtgcatgcctgtaaccccagctacttgggaggctgaggcaggagaatcacttgaacccaggaggcggaggttgcagtgagccgagattgtgccattgcactccagcctgggcaacaagagtgaaactccatctcaaaaaaaaaaaaaaaaaagtataccatttgacaatcctaggcatatacccaagagaaatgaaaacacgt

SEQ ID NO: 190962 - DNA, 570 bp, Homo sapiens
ccacatcccaggtgtctgcaaactcatcaacaacccacagtgccttccaaatctggccgctttccaccctccacctggagtaccacagtagcctccaatctggaagcttccactcccctccactcagcctgatctccacactgcagccagactgatctatttaaaaccctcctgtggcatcttgtcacatttagaataagatccctgcctggcctggcccctggctggctcccacaggcatctcctgtccctgctctcagtcactcagttcctgccatgctggcctcttgctaccagccacaaacccaccaaacagacccccagcccacagcctcggcacttactctccctcagcctagaatgctsttcctggagaaatctccctgaccttcccgggccaccatcagcccctctagtcttcttttcccaccatggtctgtggtgcctacaacttgttcacaattccctgcactcccttggcatttttgtggtattcacctggcaaagcgccagccctggagaaatcccactgacagctttctccttctccatggctacccctgactgctg

SEQ ID NO: 190963 - DNA, 633 bp, Homo sapiens
tgaatgacaagaaatactgttgttgattctgtaatttagaacatgtggctttccttgaccttcacttgacttttctttgtgggattgtggaaattgttcaaaaacttatcacctcaacagacctttaggcttaaacatagcrgctcatttacaatgtagtccatcattaaaatggcacagcagagttaacaaggctcgtgaaccctactcatcattatttcatttgtttttgaataagacttgttcatttcccgttttcttgtagtctgtccaacattttgttacagctaatgtatttcctaattaaatcatagcttataattcaaaattcaaattcttctggcttttagtgttttcgtatgaaagattactttctacctattctgttaatgtatattacactttattggtaatagagtgttataccttgaactgggagaggctcaagagtcagtgtaggtgaaaagaaccaaggctttttaggggaaatagcaagaggtcctgaaggaggttaaaaagggtaagggagagaggattttgtagagctgaagctggttgtgtggtatttggggctttaagaggaattggaaaactttctgtctgtgttgtccactatagtagccaattggtatt

SEQ ID NO: 190964 - DNA, 633 bp, Homo sapiens
tgaatgacaagaaatactgttgttgattctgtaatttagaacatgtggctttccttgaccttcacttgacttttctttgtgggattgtggaaattgttcaaaaacttatcacctcaacagacctttaggcttaaacatagcggctcatttacaatgtagtccatcattaaaatggcacagcagagttaacaaggctcgtgaaccctactcatcattatttcatttgtttttgaataagacttgttcatttcccgttttcttgtagtctgtccaacattttgttacagctaatgtatttcctaattaaatcatagcttataattcaaaattcaaattcttctggcttttagtgttttcgtatgaaagattactttctacctattctgttaatgtatattacactttattggtaatagagtgttataccttgaactgggagaggctcaagagtcagtgtaggtgaaaagaaccaaggctttttaggggaaatagcaagaggtcctgaaggaggttaaaaagggtaarggagagaggattttgtagagctgaagctggttgtgtggtatttggggctttaagaggaattggaaaactttctgtctgtgttgtccactatagtagccaattggtatt

SEQ ID NO: 190965 - DNA, 536 bp, Homo sapiens
caactgagaggaaagggtgggtgttaattcccgaggttcttgtatctttgattccggtactgttctcttcatgggtgtttgctgatgctttattaatttgaaatgcaagaccttagggaaaatcatacttatttcatttaaaaaatggtgtgtactgaactatctggtgaactgttttgaattacacacactgtattgtgaactacatttggttggatagtagggagcttatataataacttgaaattgagccaggtgctcctttgtgatgccatcttaattttattatttctccacaccttttagttctttagttygttacttttaatggcaaaatctgtgaatttcttttacatcaacctatttcctgctgtgagcaattggctgtgataatttaaggagccactagaggtcattcaagcactagaaaaaaagttatgcaagttttaagaatttgtttcaacttccggaagcaggatctgtagaggctgagcaggtacatggtaccacgtttcatctttttcctggttttttag

SEQ ID NO: 190966 - DNA, 536 bp, Homo sapiens
caactgagaggaaagggtgggtgttaattcccgaggttcttgtatctttgattccggtactgttctcttcatgggtgtttgctgatgctttattaatttgaaatgcaagaccttagggaaaatcatacttatttcatttaaaaaatggtgtgtactgaactatctggtgaactgttttgaattacacacactgtattgtgaactacatttggttggatagtagggagcttatataataacttgaaattgagccaggtgctcctttgtgatgccatcttaattttattatttctccacaccttttagttctttagttcgttacttttaatggcaaaatctgtgaatttcttttacatcaacctatttcctgctgtgagcaattggctgtgataatttaaggagccactagaggtcattcaagcactagaaaaaaagttrtgcaagttttaagaatttgtttcaacttccggaagcaggatctgtagaggctgagcaggtacatggtaccacgtttcatctttttcctggttttttag

SEQ ID NO: 190967 - DNA, 501 bp, Homo sapiens
aattctaggagctttctggaagaatctttagggtcaaaactttttctrtttcctctctctgttttctttcaaggactccagttaaacatatatcagcttgcatgaagtcccacaactctctgaagctctgtttccttttttaaattatctttctttttgtgtttcatttttgataattttattgccatgtcttcaagtttactaatcttttcttctgccttgtctattctgccattaatcctattcaatgtacctttcatttcacatattgtcatttctatctctagaactttaacttgaatcttattttgtatcttacttaactttttgaacatatgaaatgcagttataattcatttgatgtcgattctaacataagggtcagtgctcagtgaatttaggtgaaatgatttttcccttaatatttgtcatattttcctgcttcttgaatgcctgatgattttttttattgcatgtcatacactgttaattttacatttt

SEQ ID NO: 190968 - DNA, 501 bp, Homo sapiens
aattctaggagctttctggaagaatctttagggtcaaaactttttctgtttcctctctctgttttctttcaaggactccagttaaacatatatcagcttgcatgaagtcmcacaactctctgaagctctgtttccttttttaaattatctttctttttgtgtttcatttttgataattttattgccatgtcttcaagtttactaatcttttcttctgccttgtctattctgccattaatcctattcaatgtacctttcatttcacatattgtcatttctatctctagaactttaacttgaatcttattttgtatcttacttaactttttgaacatatgaaatgcagttataattcatttgatgtcgattctaacataagggtcagtgctcagtgaatttaggtgaaatgatttttcccttaatatttgtcatattttcctgcttcttgaatgcctgatgattttttttattgcatgtcatacactgttaattttacatttt

SEQ ID NO: 190969 - DNA, 514 bp, Homo sapiens
gaattcttttatcaattctaggagctttctggaagaatctttagggtcaaaactttttctgtttcctctctctgttttctttcaaggactccagttaaacatatatcagcttgcatgaagtcccacaactctctgaagctctgtttccttttttaaattatctttctttttgtgtttcatttttgataattttattgccatgtcttcaagtttactaatcttttcttctgccttgtctattctgccattaatcctattcaatgtacctttcatttcacatattgtcatttctatctctagaactttaacttgaatcttattttgtatcttacttaactttttgaacatatgaaatgcagttataattcatttgatgtcgattctaacataagggtcagtgctcagtgaatttaggtgaaatgatttttcccttaatatttgtcatattttcctgcttcttgaatgcctgatgattttttttattgsatgtcatacactgttaattttacatttt

SEQ ID NO: 190970 - DNA, 522 bp, Homo sapiens
gaattcagagtttagggaactcgaatctgttcacagcaggcactaaacctgcccaatcttgcaccaaaaagaaacatattcataatattggacagtaaagaaacctgctgtatataaagatagatgatagatagaagatagatagatagatagatagatagatagacgagatagatgcacatctgtgtgtatctatctctaatatacgtatctgtgtgtatctatatctatggatatagatatctgtgtgtgtatatgtrtatgtctgcatatatatatttatatatataaaatactcataggagtattataaactcatatacattccttagatattctctagaaaacacaagaacttgaaggatggcaaactataaagatgatggtgatctctggagaatgtggagaggtccaaaattgggagcaagtgggattttagctttatctctaaaatcccaaattgtaatttaaatagactatatattcatatgtgtggtaggctgaaagtgccccaagcccaaa

SEQ ID NO: 190971 - DNA, 580 bp, Homo sapiens
gtatgtgtatatacacacaaacatacacaatagaattctattcagcctgaagaaagaaggaaatcttgtcatttttttacaatatggatgaacctaggggacgttatgttaggtgaaataaaccaggcatggaaatgtcaatacctcatgatctcacttatgtgtggaatctaaaaaagttgaactcatagaggtagaaaayagaatagtggttatgggaaaatgttggttaaaggatacagaatttccggtagattggagtaataagttcaagtgatgtaccataatctattgtacaatgtggtgaccatagttaataagaacatgttgcattcttgaaaacggttaacagagtagattttaagcattctcgccatagaaaaatgataagtatgtgaggtaatgcatatgctaattagctctatttagtcattccacaacgtatacatactgtatttcaaaacaacatattatacatgataaatatatacaatttttattgacaacttaaaaacataaaaatttaagaagtattgaagaataaactataaatttaacttccctcatatatgtcattata

SEQ ID NO: 190972 - DNA, 576 bp, Homo sapiens
tacactgtaaggacgtggcagagttcctgcaagtaaaattcacaaaatcatggaggcctccttatgactgggtcttctggagttcttaactcagacttgttcacactcagcctccagtaattcatgaaatacaattcaagttttcataccctggcactggttccctcagagatttctgcctcatgggtttcttctactccagtaaattgtgatgataggtgtttacctgtctgtctctccaatttggaaagtggcatttttctgtggcctcacttccctgatagatctaagaaatggttgttgatttttccgtttgtttagcttttacttgtcagaatgaagctggaatagagaccagaagtttcctattttacctgtatctttaaaggatattttcrctggctgtaaaagtctaggttggctgttcttttctttcagtactttaaagatgttatcgcactgtcttctgatctcccaggttttaaatgagcaacatgccattgttcaaatccttgctcctttgtatgtatgaaatgtaacctttaaagaaaaaaaaagtacttataagattaaaag

SEQ ID NO: 190973 - DNA, 568 bp, Homo sapiens
ggggcaaagcataagggaaaaaaaaatgcraaagatcccttgtacatttacttttgactctttgtctcctacttttgtttatttttttacagtcctcaggtagtttctttttgtttttgtcaagatccttttgttgtaattagttggaaatctggtttctagtgggctcttgccattatgctggacacagaaaattcttccttaatgtttaagtcactgtttctcaaactatggatcatgatcatttgtgggtcatgaaattagttctgtgaattgttgattcacattttaagaattcagtacattagagactagtctagattatatcttattgcatcatgttgtaagaaatgtaaattattttataaaatataaaacacttgtttacttgttttttgtttaacaactatttgttgaatacctactctgttaaagactgttaggttgtgggaaatatagcagtgaaaataatatacgaacatgcacactttttaaaaaatgagttggaagataaaaaatgtacaacatatagtgtgttggaaaaataagagaaaaaaagtaccccaaa

SEQ ID NO: 190974 - DNA, 551 bp, Homo sapiens
tgagctgatgctgatgccaggggtacctgcatcatcatggtctttgaacctagaaaatgttcaccacagcagccccatccctaatcagtctcagcttccttacagttagatcttctccccatttcctggcccatattccccaagaccactacaaaaaaatgatacactatttcagctagcttatatcttcctcatgcctgcccataaragcatctaaattaattactaagtcatctactttatctcacttaggtgagacggagttcagtaatgttaggagtcaaagtctctctttgacagggttgggctgatcagcacaaagttatgttattctcaacattacacttaagtgtgacttctgctgctcttttctctaaatatgaaaaatggtaattgcccattctctgttattctttccttctggcaggtctcagaggttaggacaaggaaagccacccaggcaacagttttcctggatagtccagtcccaggcccatagccctgggcattaggagagggaacactccgttttgctgcccctagcaatgagg

SEQ ID NO: 190975 - DNA, 513 bp, Homo sapiens
ctggtgaatgtttaaaaactgtctttctgagaaaaaaaagtcctgatttgtagcatttgttgatttttgtgatgtaaatctcttatcagggctgattgtcagctcctaacatgatatcacttaatgtacatacagataataacagatataataaattagcccaagaacatagataattgtaaattatattcaagtaattaggataaaatgagcttttagtatcaattacttttgttttcaatgtaatttatttcattgtaagttttataatttaakttttaaataatggctatgtttaacaactggcttacaaaaatcctgaaaataaagcaatctcttcctcagttatttcttggcctcaggtttcaaataaaacccctgtcctgtaagccttgtacatttcaggtaaaggtttccaagggaagaaagcaatctccttgaacaaattctccactactgcctcaggaccttcctatgctcagccaatcctcccatttttgctattaggtgagt

SEQ ID NO: 190976 - DNA, 412 bp, Homo sapiens
tccctgtacaagacagcattcaataattatttgtataattatttgtgtatgtgtcaaatcaaggaattcacacctgaatgaatgaatgaatgaattgaatgtgcagccctaacatggagggatttaactgtcaactgttatcttgkgtacagttgggaatccttgaaggatctcatgaagattaaataacataaaataatgttttaagaaggaatttaaggaataagtaaatttacaaataagatttttttaaacctgcagatttcgccagttctcataaacgaaagcggccaaaacacatttggaaacatgttttaagctgtctgctcttcagaccatgcatgcataggctccccagccctcccccaatttctgtagcccaccctgcctcccagtggcccattaccaggca

SEQ ID NO: 190977 - DNA, 412 bp, Homo sapiens
tccctgtacaagacagcattcaataattatttgtataattatttgtgtatgtgtcaaatcaaggaattcacacctgaatgaatgaatgaatgaattgaatgtgcagccctaacatggagggatttaactgtcaactgttatcttgggtacagttgggaatccttgaaggatctcatgaagattaaataacataaaataatgttttaagaaggaatttaaggaataagtaaatttacaaataagatttttttaaacctgcagatttcgccagttctcataaacgaaagcggccaaaacacatttggaaacatgttttaagctgtctgctcttcagaccatgcatgcataggctmcccagccctcccccaatttctgtagcccaccctgcctcccagtggcccattaccaggca

SEQ ID NO: 190978 - DNA, 571 bp, Homo sapiens
ctgttgtattctcatcacagaattaaatcacattgtaagtgatgtaaatgatgtgtaaaccaaaagtttggagatggacaaatatacataatgtgcttggcaaccaataatttcagcagggcaagagaggtgaaatagattagtgaaaaaagaagagttgattcactacctgatacatgtcaggtacacattgttcccaaggaaacctatgggagtttctaatgtgcatatgaaggtaatgtataaaaaaggcaccagagaagtgaacagcrtgcacatttacctggttatgtatatttgcacctcataaattcagcaccacagttgaccagcttgagttcttggaaaaaagcaaattgacatcataaatttgcatttagctttcatacagcataagagagaaaagagagctatttgtccatcagcattgaattattgaacagacaattatatttttaaatggtcaaatgatgcatactttttagttttcttatttatctattatgcaaacatattaaattaataggaaaattctctatgaggagggagggggaaagaaaaattggccttt

SEQ ID NO: 190979 - DNA, 580 bp, Homo sapiens
gaacagcatgcacatttacctggttatgtatatttgcacctcataaattcagcaccacagttgaccagcttgagttcttggaaaaaagcaaattgacatcataaatttgcatttagctttcatacagcataagagagaaaagagagctatttgtccatcagcattgaattattgaacagacaattatatttttaaatggtcaaatgatgcatactttttagttttcttatttatctattatgcaaacatattaaattaataggaaaattctctatgaggagggagggggaaagaaaaattggcctttggggcccaagcaggtatcccccttgctgtggtaccctagcccaaaccagtgcttgggacccaagaggaagagtttcctccagtggaaaagtatgagcccaggaagtcrtgaggccagtataaggttttgtaggtggtagtggttgcggcacagttgcaaggcgagtggtctaagtgaatggtggggagcacattgtgtcaggcattgttggtcagagcatcaaaagggctaagaaggatgatgtacagaggagggggaagcagcctgaactct

SEQ ID NO: 190980 - DNA, 580 bp, Homo sapiens
gaacagcatgcacatttacctggttatgtatatttgcacctcataaattcagcaccacagttgaccagcttgagttcttggaaaaaagcaaattgacatcataaatttgcatttagctttcatacagcataagagagaaaagagagctatttgtccatcagcattgaattattgaacagacaattatatttttaaatggtcaaatgatgcatactttttagttttcttatttatctattatgcaaacatattaaattaataggaaaattctctatgaggagggagggggaaagaaaaattggcctttggggcccaagcaggtatcccccttgctgtggtaccctagcccaaaccagtgcttgggacccaagaggaagagtttcctccagtggaaaagtatgagcccaggaagtcgtgaggccagtataaggttttgtaggtggtagtggttgcggcacagttgcaaggcgagtggtctaagtgaatggtggggagcacattgtgtcaggcattgttggtcagagcatcaaaagggctaagaaggatgakgtacagaggagggggaagcagcctgaactct

SEQ ID NO: 190981 - DNA, 498 bp, Homo sapiens
ggattacaggtgtgagccaccgagccaggcatttttttttttttttttttttggcctggagtagagtgtgattagctgaaaaggaaaatatgtgtttgatctttttgtttttgtttgtatccagctgtattttaaggtagacgtaattgttcaaatatttttaattggcagcttttatatgaaagtagagacccataataaagycaacctcaaatgtatgaatgttatttaaaatcacgacaatagaagaaaccacataacaaaaaaatgtgagaaaagatggaaaatgaccaaaaaatgacttggatgattacaacacttagtggtctggaagaagaaggtgagaaagtgagaaagcaaggctactataaatgggtggctaatgagaaatgaaagctagcagaaataagccaaaagtgtagagattttcaagatggagagcatgttcaacaatgtcggatattgccaagagactgaataaaataaggtctagaattt

SEQ ID NO: 190982 - DNA, 566 bp, Homo sapiens
tcaatatcaatgcacagctttgctgagaggcaagaagtaaggccctcttacattggaatctccccaaaacttatataggtgtgagtatttttcttcatttctaccctgaccccaagcccatggtgggatcaacagtgggtgggaggggatggtgatggcggaggtggaagtaatcttgggaagggtttgggacaggactgccctcratttctccagtgttaaaagttcctatctactgtggtcttttcctgcaacatatactccacagtttttgcactataattttagtatggttttacaactcaagtctgccagagtaggatcatgatacatacaaggaagttttaaaaatatagaaaacattgctcacttgctctcaacaaagcctggctctcaatgctgttgtttttttaatgttgttgaaaagactagcttttaagctcaaactgaacattgacttcttcattctaagacaattcccaacctatcctaggggtaatgaatactgttgcttcactggagctgtagaacaccataattcaggaaaatttttaaataccgatggt

SEQ ID NO: 190983 - DNA, 566 bp, Homo sapiens
tcaatatcaatgcacagctttgctgagaggcaagaagtaaggccctcttacattggaatctccccaaaacttatataggtgtgagtatttttcttcatttctaccctgaccccaagcccatggtgggatcaacagtgggtgggaggggatggtgatggcggaggtggaagtaatcttgggaagggtttgggacaggactgccctcaatttctccartgttaaaagttcctatctactgtggtcttttcctgcaacatatactccacagtttttgcactataattttagtatggttttacaactcaagtctgccagagtaggatcatgatacatacaaggaagttttaaaaatatagaaaacattgctcacttgctctcaacaaagcctggctctcaatgctgttgtttttttaatgttgttgaaaagactagcttttaagctcaaactgaacattgacttcttcattctaagacaattcccaacctatcctaggggtaatgaatactgttgcttcactggagctgtagaacaccataattcaggaaaatttttaaataccgatggt

SEQ ID NO: 190984 - DNA, 566 bp, Homo sapiens
tcaatatcaatgcacagctttgctgagaggcaagaagtaaggccctcttacattggaatctccccaaaacttatataggtgtgagtatttttcttcatttctaccctgaccccaagcccatggtgggatcaacagtgggtgggaggggatggtgatggcggaggtggaagtaatcttgggaagggtttgggacaggactgccctcaatttctccagtgttraaagttcctatctactgtggtcttttcctgcaacatatactccacagtttttgcactataattttagtatggttttacaactcaagtctgccagagtaggatcatgatacatacaaggaagttttaaaaatatagaaaacattgctcacttgctctcaacaaagcctggctctcaatgctgttgtttttttaatgttgttgaaaagactagcttttaagctcaaactgaacattgacttcttcattctaagacaattcccaacctatcctaggggtaatgaatactgttgcttcactggagctgtagaacaccataattcaggaaaatttttaaataccgatggt

SEQ ID NO: 190985 - DNA, 380 bp, Homo sapiens
tgcatgcctgtaatcccagctactctggtggctgaggcatgagaatcgcttgaacccaggaggcggaggttgcagtgagctgagatcttgccgcttcactccagcctgggtgacagagtgagactctgtatcaaaaaaaaaaaaaaaaaagaaaaaaaaaagtaaaaaaagaaaatgtccatgaggtagaagaatactaagaggcttttaatgtctagatggwcataaaccccttacagaaacatacctatccccacttacgctcttagcatttgttatcacatgtttctcacttcttcctcatgcccataattctagcctgaactactttggtcttcaaattctttgcagatgtttacagttgagaaaaacaaagacat

SEQ ID NO: 190986 - DNA, 494 bp, Homo sapiens
gacttagaaaaaaaactatcctctttactatataaagaaacaaacttgaaaaagccataaggattacagaaaaggtgtatgcatatatatacatatatattttttaaaccaaggccagaaatactattactagtatgatattgaaggaggtagttgcaagtgaaataaaatgaagtggtatttagtacacatctggaacttgttcgcytgagaggttgtactgtctgaaagtataaataggatcaacaaaagctcaggtaaatccatggatgacagatatgcagctgggtataaagggcaagttcaggacatgctcttggctttagtgtaaggaaagggtcactatcaaagtttccacccagcacttttgttgtcaccggaggaggcaaagcattaagtggattaagcacaaacttgcccttatgtggcatttcataagcttctatgttccccctcaatatggactagaaacaatgtgggcttaaaattgaaaa

SEQ ID NO: 190987 - DNA, 494 bp, Homo sapiens
gacttagaaaaaaaactatcctctttactatataaagaaacaaacttgaaaaagccataaggattacagaaaaggtgtatgcatatatatacatatatattttttaaaccaaggccagaaatactattactagtatgatattgaaggaggtagttgcaagtgaaataaaatgaagtggtatttagtacacatctggaacttgttcgcctgagaggttgtactgtctgaaagtataaataggatcaacaaaagctcaggtaaatccatggatgacagatatgcagctgggtataaagggcaagttcaggacatgctcttggctttagtgtaaggaaagggtcactatcaaagtttccacccagcacttttgttgtcaccggaggaggcaaagcattaagtggattaagcacaaacttgccyttatgtggcatttcataagcttctatgttccccctcaatatggactagaaacaatgtgggcttaaaattgaaaa

SEQ ID NO: 190988 - DNA, 402 bp, Homo sapiens
atcatttatctttagaaggctaattgcatattttcaatttattgtttataattttttttatctattattataggttacttgtataatcacaaaagacaactgaataattctttttgtcttcatcaacttttattttaagttctgggatacatgtacaggatgtgcaggtttgttacataggtaaacgagtggcatggtggtttgctgcacagatcgacccatcaccgaggtattaagctcagcatccattagttattcctcctgatgctctccttccccttggcccaccaatacaccctagtgtatgttgttacccctcatgtgaccrtgtgttctcatcattcagctcccccatataagtaagaatatgcagtgttaggttttctgttcctgtgttagttt

SEQ ID NO: 190989 - DNA, 435 bp, Homo sapiens
tgttggaagtgggatattaaaattatttactattattgtgctgcatttatgtctcttttcagaactcttaatctttgatttatatatttaggtgcttcagtgttgggtgcatatatatttacaattgttatattatyttgatgcactgatctttttattataatatactgaccttctttatctctttttacagttttttttaacctaaagtttatttggtgtgaaataagtatagccacccctgctctgttttatttgcctggaatatcattttccatcacttcattttcaacctgtaagtttcctttaaggtaaggtgagtcttctgtaggcccatatagttggatcttgtttggtatgtatcatggtactgtatgccttttgactacagaatctaatccattaaactttaaagtaattattgatagatgagag

SEQ ID NO: 190990 - DNA, 340 bp, Homo sapiens
catttaatactatgaatttccttccaagtactgatttagctatagccacacattctgatatgtagttttaatttaaatttatgtcaaaatattttctccttttctttgtgacttccactttgttatgatttattttattattattattatattttgaggcagagtctctctctgtcgcccaggctggagtgcagtggagtgatctcagctcactgcaaactccttctcctgggttcaagctattcctctgcctcagcccctgagtagstgggattacaggtgcttgccaccacacctggctgatttttgtatttttagtagagacatggttttgccatgt

SEQ ID NO: 190991 - DNA, 555 bp, Homo sapiens
aaggctaaatatgaaggaatgacgttcgtggacacctgcctggcacaagcattactatgaaatacttgcccattacccagtgagtactgggagttttctcagcttcgggacatctaagcctttgtctcaggcaaacaaagttacattctgatgagcacagtatgctctgctgcagctttgggaagtgaaaatcttaaatcagagagcaatagcatgattttatctttggtgtagatttggctctacaccaaatctttaaaatgcttatgttgtagcttgaaatctcttatgatgagtaatttatttgtcttagaacatttgccattgtaggtgtcttgtaagatgtatacatgtacaaaattattaataaaagtgaccaatatcaatatttctgagtaattttaaatsatcaaaaacttattttagcatataaacaacatgtgtttaaaatagaattgactattatcgagcatgacatttagggtagacaatattaaacttcaaatcagggtattagaaataactctttgaaccattatgtcatagaacaaattc

SEQ ID NO: 190992 - DNA, 522 bp, Homo sapiens
gaagaacgacgtaacacaatatttttacataaccccagtttcttacagcctgtattttttttaaaataccctagagattactctatgaactccattgcactcctcattttatctaggtcaagtttcatttattagttgatttcccatttgagggagaacagaggcagaaaaatagcatgaataaagctgaccagccttcccactagttaagacaatgtcagaactaaaaggaagagtggaaatcacttaaactgctcctctaccacctacttgtttcaaagacargaaagtgggggcaccaattttgtactgatttgtagaaatgaggccccaagactatctattggttgaagttttcaaatacaatgcagctaaactgttccctagggataactcatttgcttattgaggctaagagcagtactgcagttacttattaagaagaagaaatatttgtccatcacaactatataaatataaatattatttactgataggtcagcgaatacatgtaatgcaaat

SEQ ID NO: 190993 - DNA, 444 bp, Homo sapiens
ccccatgctcccaccagtaggtgtacaggctgtggctcttacccatgatgctgtgagggtcagctgggcagacaactctgtccctaagaaccaaaagacgtctgaggtgcgactttacaccgtccggtggagaaccagcttttctgcaagtgcaaaatacaaggtgaagttctaattgatagcatgaaatttaaaatgaactgacatttgtttaacrcattgttttaaacctctcctggactgtcatgagtcgttttgctgctgtgtatctatgtagaaaaacaaagcattttaataactcaatatctaagattaacatgagaataattgtattttaggaaacaattctaaggcaaggtaggaaaacatcaagtgctgtaaaacgttatttgcttttcaccagatgctgagtttgtataaatgatttgattctgtgcaagagaa

SEQ ID NO: 190994 - DNA, 450 bp, Homo sapiens
ccagtaggtgtacaggctgtggctcttacccatgatgctgtgagggtcagctgggcagacaactctgtccctaagaaccaaaagacgtctgaggtgcgactttacaccgtccggtggagaaccagcttttctgcaagtgcaaaatacaaggtgaagttctaattgatagcatgaaatttaaaatgaactgacatttgtttaacacattgttttaaacctctcctggactgtcatgagtcgttttgctgctgtgtatctatgtagaaaaacaaarcattttaataactcaatatctaagattaacatgagaataattgtattttaggaaacaattctaaggcaaggtaggaaaacatcaagtgctgtaaaacgttatttgcttttcaccagatgctgagtttgtataaatgatttgattctgtgcaagagaatgccattgtccctttaaaa

SEQ ID NO: 190995 - DNA, 444 bp, Homo sapiens
ccccatgctcccaccagtaggtgtacaggctgtggctcttacccatgatgctgtgagggtcagctgggcagacaactctgtccctaagaaccaaaagacgtctgaggtgcgactttacaccgtccggtggagaaccagcttttctgcaagtgcaaaatacaaggtgaagttctaattgatagcatgaaatttaaaatgaactgacatttgtttaacacattgttttaaacctctcctggactgtcatgagtcgttttgctgctgtgtatctatgtagaaaaacaaagcattttaataactcaatatctaagattaacatgagaataattgtattttaggaaacaattctaaggcaaggtaggaaaacatcaagygctgtaaaacgttatttgcttttcaccagatgctgagtttgtataaatgatttgattctgtgcaagagaa

SEQ ID NO: 190996 - DNA, 508 bp, Homo sapiens
gcattgtgagctacccagaaggaaaacttgtcttccaaaacgtagaaagtgagagagcagattggaagaagcctggaagatccttggctagcttaaccagtttgctgccacctttaaatatttaaaattgttttgagtacaacatgtgggagaagtagtcttaggagcaggacttcgtgccatcttacttcatgctggattgatactaagacactcatagttattttttacgtcttctattttaatttctcatgtgtgccttcctgttggtttagaagatgcctaatatgtcacctagctaagatatttkgaccccagttttatctcattttaaaaactttttggcttttaaggaagtatagacttaggtgacatttttatttataaatgcctgcagttgtaacagaattcttctgaagacatgtaatcatccagcgtggcaacatagacccatctctacaaaaatcaaaattaaaattaaaaattagagtagtggtgtgcaacagtg

SEQ ID NO: 190997 - DNA, 620 bp, Homo sapiens
aatttgtatgttttcctatacctaaatttgattatttttctttaataacctatattaattttctatacatcttgagcaaaatatttagaccttctgtacctcagtgcctccatctgtataaagaatgtaatacttattgtgtgcagttactgacagaattagataaaatacatgtaaaacaaccatctcagcacctgatacagaggargtgcttataataaaattacatgactaacgcaataataaaatgttgcctaaatttataatatctacaatagcatttgggacttatggtgtgaaattccagactgtaaaggatttttttttgagacagagtcttgctctatcacccatgctggagtgcactggcatgatctcggctcacgacaacctctgccttctgggttcaagcgattctcttgcctcagcctcccaagtatctgggattacaggcatgtgccaccacactaatttttgtatttttagtagagacgggttttgccatgttgaccaggctggtcttgaacaccttacttcaggtgatctgccagcctcagtctcccaaagtgctgggattgcaggtgtgagccaccacatttttaggaataatactgacgtga

SEQ ID NO: 190998 - DNA, 620 bp, Homo sapiens
aatttgtatgttttcctatacctaaatttgattatttttctttaataacctatattaattttctatacatcttgagcaaaatatttagaccttctgtacctcagtgcctccatctgtataaagaatgtaatacttattgtgtgcagttactgacagaattagataaaatacatgtaaaacaaccatctcagcacctgatacagaggaagtgcttataataaaattacatgactaacgcaataataaaatgttgcctaaatttataatatctacaatagcatttgggacttatggtgtgaamttccagactgtaaaggatttttttttgagacagagtcttgctctatcacccatgctggagtgcactggcatgatctcggctcacgacaacctctgccttctgggttcaagcgattctcttgcctcagcctcccaagtatctgggattacaggcatgtgccaccacactaatttttgtatttttagtagagacgggttttgccatgttgaccaggctggtcttgaacaccttacttcaggtgatctgccagcctcagtctcccaaagtgctgggattgcaggtgtgagccaccacatttttaggaataatactgacgtga

SEQ ID NO: 190999 - DNA, 551 bp, Homo sapiens
cagtatcttgaattttatatatttstcacttacctttctctgtaaatatttgagggaaaaaaaggaaatcattctttaaaggaaaaagaagtctcaaaaaggtagcctgaaacatctagcaaaaacactgaagcaaaggaagttatacactttgccatggtaatggctactggtttctgggctttctagaacattcactatgagagccaatgctctccttccctttcccaccatctgcattagtcacttggctgtagaacacaaacagtgacttggagaagctgttgagaagtgaaataaagctacatgagaaagggcagatttttaaaactggagttctattgactctaggtgctgtcctaccaggagacctgcttctacacaaatggacattgagagggactcgtctgtgagacgatcatccctttgactcatgcatataaggtgcgagaaaccagcatcctaagattggtcccagctcaatagtcttctgagactgggcatttattccatcacccttcagcccttgtggatgcccacaaccaaccaag

SEQ ID NO: 191000 - DNA, 551 bp, Homo sapiens
cagtatcttgaattttatatatttctcacttacctttctctgtaaatatttgagggaaaaaaaggaaatcattctttaaaggaaaaagaagtctcaaaaaggtagcctgaaacatctagcaaaaacactgaagcaaaggaagttatacactttgccatggtaatggctactggtttctgggctttctagaacattcactatgagagccaatgctctccttccctttcccaccatctgcattagtcacttggctgtagaacacaaacagtgacttggagaagctgttgagaagtgaaataaagctacatgagaaagggcagatttttaaaactggagttctattgactctaggtgctgtcctaccaggagrcctgcttctacacaaatggacattgagagggactcgtctgtgagacgatcatccctttgactcatgcatataaggtgcgagaaaccagcatcctaagattggtcccagctcaatagtcttctgagactgggcatttattccatcacccttcagcccttgtggatgcccacaaccaaccaag

SEQ ID NO: 191001 - DNA, 411 bp, Homo sapiens
atcacattatgagtagacgaagggattttttgatgatagtatttggttgatgattcccataagcacttagataatatgaagacccagagaaagtgaactatcttacaattattttctagtgttcttacttatccctggacaccagtgattgttytgcaccaattcattgaacagtaggctttttttttttttttttttcagatccctttgtataacaacatagttttcagacagaatcccatcaaactagtctggggatcacataaggtgactgtatgtggatgacagttgatttccatagtaatcaaggccaaagtaacagaatattcagtttttttgtacttcaagtgccctgatgtgatttttaaaacagggaattgacagtaaatttagaattaactttcaattatc

SEQ ID NO: 191002 - DNA, 512 bp, Homo sapiens
gtttggggtaagagtgggccactctttgcctatttaattcacacctttttcaggagccagtaggggccaggaacaagtcctggtgctcggcagctccatacagggttcccagcttcctaccccttcatcctagggtctgcatccactctcaaagccttccttctgaagatctgttcagatcgtgccagtcttcttcgtggtctggtctgtcagctggagacacttcctggctgcatctagttagccatcttggctcaacttgccyataattttaaaataattaaatgtatgtcttagatttaagtaagtggaatttttttctttttctcactcttgcctctggaatcagaaagtgcaaacccttctttaatggtgttaattttaaatgtaatgatactttaaccttgaagaagaaaggggccttaaaaagggagaaaacaatctcatggtcttttgcttattaacatacagtgcagcgagatacatatgttttatatatatatatatatata

SEQ ID NO: 191003 - DNA, 512 bp, Homo sapiens
gtttggggtaagagtgggccactctttgcctatttaattcacacctttttcaggagccagtaggggccaggaacaagtcctggtgctcggcagctccatacagggttcccagcttcctaccccttcatcctagggtctgcatccactctcaaagccttccttctgaagatctgttcagatcgtgccagtcttcttcgtggtctggtctgtcagctggagacacttcctggctgcatctagttagccatcttggctcaacttgcccataattttaaaataattaaatgtatgtcttagatttaagtaagtggaatttttttctttttctcactcttgcctctggaatcagaaagtgcaaacccttctttaatggtgttaattttaaatgtaatgatactttaaccttgaagaagaaaggggccttaaaaagggagaaaacaatctcatggtcttttgcttattaacatacagtgcagcgagatacatatgttwtatatatatatatatatata

SEQ ID NO: 191004 - DNA, 509 bp, Homo sapiens
ggcctctaactcctgggctcaagagattgtccacctcagcctcctgagtagcgagaactacagctataggcattcaycaccacacccagttttgtttctttttaaatacctcacacctctctacacttgtaccatttgggtattttttcagagagtggcagaattcttaatatagatccctagtcatattatgttttaatcctatctgttacaatgctttgggctgcaaataacagaatctctgtctaacagtttaaacaataaagacactctcatatacctaatatctaaaggtagtcagttccaaggttgattcagcaatctatgtatgtcattaaggacctgggctgttcttatctttctgctctgccagacgtcagaatcagaagatagtagccacagctctaataattcagtccatcagcctccacggcagcaagaaaaaagaagagactaaaaggacttttttttttagctcttttttttgtttgtttgtttttttcagaaag

SEQ ID NO: 191005 - DNA, 427 bp, Homo sapiens
caggtgaataagctggggcacagagaaatgcccccaaatcaccctggtattaagtggctcagcagagatttaagcccactcagaacccaagctcttgtccactgtggcttcttagtaaagtataaaaaaggtatgacatttattggtctcatttaacacaaaatccmgaagtaggtgatgccaggacctgtctcagcaacagcctagctatctcagggtccttgtttgatttctgtgagagtctcttgtccacatcgtcacaaaacggctgccatgctcagcctctcacatgacaactcccagagagggaggaagaaggaacatctcccatatttcagaagctccccactgattttcccagccatctcattggtcagtactggatcacatgaccaccactagcccagttactggcaaggggaacctg

SEQ ID NO: 191006 - DNA, 427 bp, Homo sapiens
caggtgaataagctggggcacagagaaatgcccccaaatcaccctggtattaagtggctcagcagagatttaagcccactcagaacccaagctcttgtccactgtggcttcttagtaaagtataaaaaaggtatgacatttattggtctcatttaacacaaaatccagaagtaggtgawgccaggacctgtctcagcaacagcctagctatctcagggtccttgtttgatttctgtgagagtctcttgtccacatcgtcacaaaacggctgccatgctcagcctctcacatgacaactcccagagagggaggaagaaggaacatctcccatatttcagaagctccccactgattttcccagccatctcattggtcagtactggatcacatgaccaccactagcccagttactggcaaggggaacctg

SEQ ID NO: 191007 - DNA, 469 bp, Homo sapiens
gaattcttaattggccctctaagccaaagaaaatcagttagaacttcaatgaggctacggccttggagtggcctaggagtaccaccagtaggatgctatgtaactacaatgattccaacttacatcttattctaattagtgatttattcccttgacaatataactttctgtaaccaagtatggcataaattagctgtcaatgatttgtgcttttcttctgtagtgccagtcrtggtgggaaggtaacttgcagccagctaatatgcttcccagccctctggtagctaatggagtcctatgactaattctggccaaaggagtgtgaatgaagatgatgggtgtcactccaggacatggtgtcaggattttccagcatttcttcttgggctggtcagattctctgtagccaagtgaaggaaaagcaatgaagggctcagtatttagtattcaacgctcataaaatcacttc

SEQ ID NO: 191008 - DNA, 605 bp, Homo sapiens
agcaaccaaagcattatggaaatttagtatcaaaagcatatccttgacatttaagtgtcctgtcagatttcagttgacattgtcactatggtggcaatatcagaagaaagactaagaataatatgtttatgaaatgtggtttatctctgtttttttaaaatattctgtcagcatcaagttcatggtaatttgttaccaatctgaaaagtcttgattctatgagtaatttttaaatagtttagcagtaatagtatcaatctaatttagactggccaatggtctccctttaaactctatagtccttggcacctttcagtatatcttgaagcctgaaaatgggctcctcattcagtttcattctaacaattacacccaagtagcaatgtgtatttgcaaaattgcttcataggaaaccaggctgagagattcttccatacctttggctgaaactgtcagtcagtgtaaactcaaagctctcatattcagaaagaccccagtgagttattatcagattggcatgaaattgtgattattaatttttcacttatgaaaattttctgattctgtaatggcttgtaatrtgtcaactcagctacactagcaaa

SEQ ID NO: 191009 - DNA, 502 bp, Homo sapiens
atgtttgcattttgcacttcccaccactaaaaatgaagcacaaatacctattaggcctctttacatttcaggggtagcgtattctatctatgggaataccactatgatttatatacaaagtaacttaaaatgcttccaacttctagtaggacctagggggaacatgctctcagactgacaagcatgaagctctgtcactttsgccttatgacctagtagggaagtattagaggtatttgtgttgggaaaagaagttgtgtggagtgtaaggcaagccctaaaaaaagaatcacagcatagacaaagttctggagaaaggccatgtcatctgtagcagagaattatatacctcttgaaaaacagtccattgctcaatccccagccctgaaagttatagggtagtggatcacaggaaaccactttaccaagaggtgagaattcccatcattttccaatcatgatgtgatatatcagttagagtttcaccaaagaaacataacca

SEQ ID NO: 191010 - DNA, 502 bp, Homo sapiens
atgtttgcattttgcacttcccaccactaaaaatgaagcacaaatacctattaggcctctttacatttcaggggtagcgtattctatctatgggaataccactatgatttatatacaaagtaacttaaaatgcttccaacttctagtaggacctagggggaacatgctctcagactgacaagcatgaagctctgtcactttcgccwtatgacctagtagggaagtattagaggtatttgtgttgggaaaagaagttgtgtggagtgtaaggcaagccctaaaaaaagaatcacagcatagacaaagttctggagaaaggccatgtcatctgtagcagagaattatatacctcttgaaaaacagtccattgctcaatccccagccctgaaagttatagggtagtggatcacaggaaaccactttaccaagaggtgagaattcccatcattttccaatcatgatgtgatatatcagttagagtttcaccaaagaaacataacca

SEQ ID NO: 191011 - DNA, 479 bp, Homo sapiens
tagaataggagaaaatctgagtatacccacagaattgtaataagtctattcctttttctgtcctctcagttttggcaagagaacagacctgactatgtcaacatccagctgtacctcagtcaaacagatgggatacaggtatgtggttgatgttatcgtaaattaaacaagcctcttgataatagatttactgtaggagctgtggtggaagaaaattcctgcaggtggttcgaacagaagtttcctagaggaaagyctcctttggaatatgtccaggaaagtcatagcttgtccttgaagtcaaccacattatgccttccatttgtccttctcacagggagcttttgagtctgcccctcccctcttcactatcgcctcaagttcttctaaaattcagactacacatgaacagccttatgatttctttttattgagggaatgttttatgtggagagagaagatgagttcgtatacagtta

SEQ ID NO: 191012 - DNA, 477 bp, Homo sapiens
aacaattgattcatttaaaaatcaaatttttctacctttttaccagaatagattttgtttgtttgtttaaaaacaaacaaatggaattcaaggarataatgaattttaaaagaaagaagaaaggaaatgatattttgaaataattgtacgtgataggttgccatttgatacttacattctttatatcacagcaatttggtgggaagccgcagcaccagcagaaatgatgttagagaactggtttacttaactaaatatcgaataatgtagtgctttctttttggcagaagataattggagaaaaatatcatgcactgaattcaagactgtttataggacgtcctcggtggaaacttttgtttgatgaaatagcaaaatataacagagggtaagtactatacctcaaaaatttgatatgtggctaataaaataattaaaatattttcaaataattacatgaagtttgaaaatgaattg

SEQ ID NO: 191013 - DNA, 349 bp, Homo sapiens
ttattgcccaggatatgttcaatcttggtgaatgttccatatgcacttaaaaagaatttgtattccattattgttagatagaacattctacaaatgccaattagttccaataggttgatagtgatgttcaagttttcaatakgcttactgaatttctgtctgcttgtattaattactcagagtattgaaataattaactataattatgaatttatctgtctttacagttccatcagtgtttgctttatgttgaagctttttattttcagtgtttaaatcatttacatttaatttaatgaaaatacagttggctttaaatctagcagttcaccattgctttgtacttatc

SEQ ID NO: 191014 - DNA, 349 bp, Homo sapiens
ttattgcccaggatatgttcaatcttggtgaatgttccatatgcacttaaaaagaatttgtattccattattgttagatagaacattctacaaatgccaattagttccaataggttgatagtgatgttcaagttttcaatatgcttactgaatttctgkctgcttgtattaattactcagagtattgaaataattaactataattatgaatttatctgtctttacagttccatcagtgtttgctttatgttgaagctttttattttcagtgtttaaatcatttacatttaatttaatgaaaatacagttggctttaaatctagcagttcaccattgctttgtacttatc

SEQ ID NO: 191015 - DNA, 349 bp, Homo sapiens
ttattgcccaggatatgttcaatcttggtgaatgttccatatgcacttaaaaagaatttgtattccattattgttagatagaacattctacaaatgccaattagttccaataggttgatagtgatgttcaagttttcaatatgcttactgaatttctgtctgcttgtattaattactcagagtattgaaataattaactataattatgaatttatctgtctttacagttccatcagtgtttgctttatgttgaagctttttaktttcagtgtttaaatcatttacatttaatttaatgaaaatacagttggctttaaatctagcagttcaccattgctttgtacttatc

SEQ ID NO: 191016 - DNA, 349 bp, Homo sapiens
ttattgcccaggatatgttcaatcttggtgaatgttccatatgcacttaaaaagaatttgtattccattattgttagatagaacattctacaaatgccaattagttccaataggttgatagtgatgttcaagttttcaatatgcttactgaatttctgtctgcttgtattaattactcagagtattgaaataattaactataattatgaatttatctgtctttacagttccatcagtgtttgctttatgttgaagctttttattttcrgtgtttaaatcatttacatttaatttaatgaaaatacagttggctttaaatctagcagttcaccattgctttgtacttatc

SEQ ID NO: 191017 - DNA, 513 bp, Homo sapiens
cagttatcagctagaggttggtgagctgacttctcaatttgtgtttccaaagttaatcttactctgaaatccagacccagatatctagcgaatgacctgacatccccactgaaatgtctcaaaaacatcttacagcacatctcatctagaatcatgacatcagcatcctcccctaatattccacttcttcaggggtttctgcatctggtaatacaaacactttgctcagtagcataagccagaaaagtaggcattttctgtggtacctggcccctcagttgtactgcttggatttccagacatcatctattttcctggacatcattttctcactgatttctttatccccctgatgcgtgcatatccaccaactcctactcttcctcagtcccttctctgcaacraaatctgtgtggtcttttacaaatgataatctgttcgtgttatcattcaccttcccagatacaaacagtgactttctgttaggaaaaaaacacaaatctccctaacatg

SEQ ID NO: 191018 - DNA, 556 bp, Homo sapiens
gtctgtctgtagttctttcaaaaactgcttttgatttttttaaaataaagtgttaaacaaataagaagcaaaataatgagtatcacagaaatagacttttatcactctgctccccctggaaataaaaggatccattaaatattcttcctttgtgtaatactgcattgtctaccttcagaccttacagtatttaaaagtaccagatgttgaggcatgcagatggcatatgaccctgctaagctttctcttatcctgtaatccttaggcaagaagaaagtaaaaggagggaggggagaaaagggagtactgtatattctcgggaragaataaggcagtatgacggcagtggaaagaaccctggactgtgagtgtttttgttttgtttttgtcttttctttaagtatctttgcctctttctagccatgtgaccttgagacaatcagccagctggttggtttttagtttccttgtctacagcataccaaattgagggagttgtttcctaatttctcagttcattattgctgtaaagtggtataattattttgaaagaaat

SEQ ID NO: 191019 - DNA, 556 bp, Homo sapiens
gtctgtctgtagttctttcaaaaactgcttttgatttttttaaaataaagtgttaaacaaataagaagcaaaataatgagtatcacagaaatagacttttatcactctgctccccctggaaataaaaggatccattaaatattcttcctttgtgtaatactgcattgtctaccttcagaccttacagtatttaaaagtaccagatgttgaggcatgcagatggcatatgaccctgctaagctttctcttatcctgtaatccttaggcaagaagaaagtaaaaggagggaggggagaaaagggagtactgtatattctcgggagagaataaggcagtatgayggcagtggaaagaaccctggactgtgagtgtttttgttttgtttttgtcttttctttaagtatctttgcctctttctagccatgtgaccttgagacaatcagccagctggttggtttttagtttccttgtctacagcataccaaattgagggagttgtttcctaatttctcagttcattattgctgtaaagtggtataattattttgaaagaaat

SEQ ID NO: 191020 - DNA, 556 bp, Homo sapiens
gtctgtctgtagttctttcaaaaactgcttttgatttttttaaaataaagtgttaaacaaataagaagcaaaataatgagtatcacagaaatagacttttatcactctgctccccctggaaataaaaggatccattaaatattcttcctttgtgtaatactgcattgtctaccttcagaccttacagtatttaaaagtaccagatgttgaggcatgcagatggcatatgaccctgctaagctttctcttatcctgtaatccttaggcaagaagaaagtaaaaggagggaggggagaaaagggagtactgtatattctcgggagagaataaggcagtatgacggcagtggaaagaaccctggactgtgagtgtttttgttttgtttttgtcttttctttaagtatctttgcytctttctagccatgtgaccttgagacaatcagccagctggttggtttttagtttccttgtctacagcataccaaattgagggagttgtttcctaatttctcagttcattattgctgtaaagtggtataattattttgaaagaaat

SEQ ID NO: 191021 - DNA, 556 bp, Homo sapiens
gtctgtctgtagttctttcaaaaactgcttttgatttttttaaaataaagtgttaaacaaataagaagcaaaataatgagtatcacagaaatagacttttatcactctgctccccctggaaataaaaggatccattaaatattcttcctttgtgtaatactgcattgtctaccttcagaccttacagtatttaaaagtaccagatgttgaggcatgcagatggcatatgaccctgctaagctttctcttatcctgtaatccttaggcaagaagaaagtaaaaggagggaggggagaaaagggagtactgtatattctcgggagagaataaggcagtatgacggcagtggaaagaaccctggactgtgagtgtttttgttttgtttttgtcttttctttaagtatctttgcctctttctagccatgtgaccttgagacaatcagccagctggttggtttttagtttccttgtctacarcataccaaattgagggagttgtttcctaatttctcagttcattattgctgtaaagtggtataattattttgaaagaaat

SEQ ID NO: 191022 - DNA, 531 bp, Homo sapiens
ttttcttttcttttcttttttttttttttttttgagattaagttatactcttcttgcccaggctggagtgtaatggcatgatctcagctcactgcaacctctgcctcctgggttcaagtgattctcctgcctcagcctcctgagtagctgggattacaggcacccaccactatgcccgactaattttttgtatttttagtagagacagggtttcaccatgttggtcaggctggtctcaaactcctgaactcaggtgatccacatgcctcagcctcccaaagtgctgggattatgggtgtgagccaccatgccctgcctatgaacctttttgacaaccacgatagctattcaagatgtttgcttggtattctttgtatttctgataatctgattaaargatgttccaaatataggaacattagttataggtttccttatagctttataagtgatgtcttttttgctgcttttgctgtatgtgtgtgtgtgtgtatgcacacacacgtgtgcatctgtgtatgtgtttttagt

SEQ ID NO: 191023 - DNA, 595 bp, Homo sapiens
ttttatgtttgagggatttttgttgtttatttgggkttttttttttttatttttaggcagaaattgtcagtcgacaaagtagcctaaagtccttcctttcttaaaaatcttatattaaatgtatccattcataatggttattggagcataattttgttagcatgattattttatggggactccttgccaaagaacttttatccttacagactttaaattaattaatttgtaaggccttgactgaatcattcagaattccaagagataaacatcaaattggttttttttcaaaccatgttccttttaacatgagattgcattagataataattacaaattattgtaagtgggcttgagttcttgatttcgctctcagcttgaacattactggtacatggaaatgctgctgatttttgtgcattgactttgtatactgaaactactgaagtcatttatcagttctcttggcagagtgggtttttctaggtatagaagcaaatcatcagcaaagagagatagtatgactttgtttcttatttggatgcctttcctttctttctcctacttgattgctctggctaggacttccagtgct

SEQ ID NO: 191024 - DNA, 573 bp, Homo sapiens
tgagtttcaggctgtgtatccaacttctcaagagacattcaccttgccgtcccatataacttcatttcactgtataacaaaaccataagctttcctccatgtctttctttgctcctcttgttattatatgagtgaattatactaccattcatcattttcacaggccagaaagcgtaaagccattcctaatctccttcatctgatatataaataattttccaagttctgtaaattttgccttcaaaataatatcaaattaatcatgctttctgtctcccttcctgccaccaccactgcaacttaaactacmtttacctcttcctcagactcttataatagcattttcactggctttctgcatgtgctttccaactactaaaatttttctgcatactgaagctgcaataatcttttgaaaattcaaatttgattataacctgcttaaaatttatcagtggcttgcattattctaacaatatggcccaaattcataaccatgtcctccttttcaactagttaattctacctgtcatattgatgtcatctgaagtatcacttcattgacccctggag

SEQ ID NO: 191025 - DNA, 359 bp, Homo sapiens
tactatcgtcatcatagagcaataaacattataatagctattattattaactacacttaagttcaagatttctacaaattttcttggtaaccctagcaagaaacttccaaaaatgattccaaaactgctggatgtttaccctgtgttacactgtactaggctcattaatgtatcattctaaataattctttaatgtgttctggtcccagtatttcaggtgaataaactgagattcagggatgtagagygaatttcccaggtcaccttacagtcagttgatagagtcatgtctcaaaacctttttttttcttcttctgattctactgctcttcacatggttgccatgtacaaaatggcct

SEQ ID NO: 191026 - DNA, 419 bp, Homo sapiens
cctaatcctgcttgaagcagccctgagaaacatcgccgattatctctccataccacccccaaaaattttcgccaccccaacactttaccactattttgttttatttttcttattaatataagaagacaggaatgtcaggcctctcagcccaagactgcatgtatacatccagatggcctgaagtaactgaagagtcacagactaagtgaaaatggccggttcctgctttaactgatgatattaccttgtgaaattccttctcytggctcagaagctcccccactgagcaccttgtgacccccacccctgcccgccagagaacaaccacctttgactgtaattttccattacctacacaaatcctataaaatggccccacccctgtctcccttcactgactctcttttcagactcagcct

SEQ ID NO: 191027 - DNA, 476 bp, Homo sapiens
ttctttcatacacctttctatgcctacagatatgtaatgtatatacacaatatatttaataaaagaataaaggrgagttaacaatctccgataaatctggggataattttagaaataaggtaacagtctaatgtttattaaataagaaaaccctagatttttaatgtacataatgtatatgcataatatacatacatataatatgtatatatatatatgttaaatatgtatagcacatatgtttaaagatgcaatatgctaggcatgttgtttaccacttacttttatataatataataagaacataaaataatatttataatttggaaaccatgacagttttgaatatgtgttgcatggttagccctgatcccaggacacatgcaaactttgggaagtgcagaagcctatgtggcttactgttctcctaaaattacacactttatctttcacatccctttgaggcctccaactaa

SEQ ID NO: 191028 - DNA, 476 bp, Homo sapiens
tgggagtaaaagctttggtagggtgggtacccagatacttaggatttcctgaggcacactggatctgtagtttaggaaagcactctacttctaaatgcacctagcaagtagactttactctcttgataactgtctrttacttaatgttactgtctgttacttaataactgtcatgttactacatgccatttgctaaaatatagacctcctttttgaaggttgaaaatgaggtcaaatatctgttaaaaccagatgactccccagtcaagtgtttcaacaacaatcacaacaaaagttgtttatatacttctggtcactaagttaatcaatgaatatttattgagcacttattataagtcataagcactattttaggcagtagaaaaatagcagtggagcaggataaacccttgactttaagaagtgcacattctggtggattctacagaagttagagaactgcaataaattttaaa

SEQ ID NO: 191029 - DNA, 579 bp, Homo sapiens
aaacattaataataaacacttatatttccacatagtctgtgcacctcctttcctcatccctcaccatgtcattataacttggcaagactctctgtttaccattcactaatgtctttttcccttcttgttttttgctttaaaattatttagcatttgtttatgaaagctacaacaatacatacaagaatgctgtctttttgattcctacrtgatttgctatattaaaacaaattatgtgtttattgtttgcttttaaaatcaattcactagaaatgcattagagatctattatgtgcaagaaaagtattagagggatgcagaggtttggcagtgagtatgaatgtataagggatgaatgcataagacatgatcccttctacttattcaggaataaaccaagtacctttgtgcatatggcttcctcatattggaatgccattctcctattctctaacccctggaatctctacatccttcagctgccttcttctctgtgaagcctttctggaattttataatcaaagttcattacccatctctactctcaagaggttatcatatgtttatatggcattaata

SEQ ID NO: 191030 - DNA, 579 bp, Homo sapiens
aaacattaataataaacacttatatttccacatagtctgtgcacctcctttcctcatccctcaccatgtcattataacttggcaagactctctgtttaccattcactaatgtctttttcccttcttgttttttgctttaaaattatttagcatttgtttatgaaagctacaacaatacatacaagaatgctgtctttttgattcctacatgatttgctatattaaaacaaattatgtgtttattgtttgcttttaaaatcaattcactagaaatgcattagagatctattatgtgcaagaaaagtattagagggatgcagaggtttggcagtgagtatgaatgtataagggatraatgcataagacatgatcccttctacttattcaggaataaaccaagtacctttgtgcatatggcttcctcatattggaatgccattctcctattctctaacccctggaatctctacatccttcagctgccttcttctctgtgaagcctttctggaattttataatcaaagttcattacccatctctactctcaagaggttatcatatgtttatatggcattaata

SEQ ID NO: 191031 - DNA, 407 bp, Homo sapiens
atatttaaatttaacatgctgggtttgggattttggttttattttggtttgttttttgttattatttttaaatctcataattgtgctcagtaagataggaacattaaatatttatataattttaaaatattaaatatatatatatttgcacagaaaattaataaaacatactatgttcattatgaagtttaaatgttgagtgtttatgtttgaccattgaggagtcaattttgcctaaacattgagtgtaccgtacatatttacacacatgtaaaaactcctgcttacagatttttgtttattttatccagcacatcataatctcccttttttgaaatmttcaaattacgtaaaataaagaataatagtagagttactgtcaagtaacatttacctgacatttacca

SEQ ID NO: 191032 - DNA, 575 bp, Homo sapiens
tgttttgtagggtttaagcaggttacttcactatgtggtactrcatttttctcaatcaattcctaccatattgcagtctttcaagtgatttattttcaaagagtctgctttcctgagatggtgtcttgccccatgtatttcaccaagctgtcatacattctgtaatgggtatttcaataggtcaagttcaaatgcatttaaaaggcaagattagtagttatgtgcttgcattcgctatgtgcactatttgctttgtgtcacaatggggtcatgagtgtatgctttaatagcacaagtgttgtaaaattactcgtcagcagcagccagcgagagaataacacaaaagataattggggaaaaaatatttgaaggatgcacaaatcagagaggcattgatgcaaatctcaattctgaagactaacagtttctctgtaatgtcttcccttattcatattgattcacctgtcaggaatgtgtctgctagggctaaaaaatatgaaaatgtgtgacagtaaaagtttctcatcagactttttattaggcaagaaaatctctgagaaatctttacaagtggc

SEQ ID NO: 191033 - DNA, 575 bp, Homo sapiens
tgttttgtagggtttaagcaggttacttcactatgtggtactacatttttctcaatcaattcctaccatattgcagtctttcaagtgatttattttcaaagagtctgctttcctgagatggtgtcttgccccatgtatttcaccaagctgtcatacattctgtaatgggtatttcaataggtcaagttcaaatgcatttaaaaggcaagattagtagttatgtgcttgcattcgctatgtgcactatttgctttgtgtcacaatggggtcatgagtgyatgctttaatagcacaagtgttgtaaaattactcgtcagcagcagccagcgagagaataacacaaaagataattggggaaaaaatatttgaaggatgcacaaatcagagaggcattgatgcaaatctcaattctgaagactaacagtttctctgtaatgtcttcccttattcatattgattcacctgtcaggaatgtgtctgctagggctaaaaaatatgaaaatgtgtgacagtaaaagtttctcatcagactttttattaggcaagaaaatctctgagaaatctttacaagtggc

SEQ ID NO: 191034 - DNA, 588 bp, Homo sapiens
actggtcagttgggggttacaaagatttggccccctgacttcaagacaggacactataagctatcatttcatctgcagagctcctgtcagatcttctgagacctctatggacctgtatcacatagttcaagttctgccttgcctttttagtcaatcgttattgactgttgtcctaagcatccttcccaacaaatctgctgcatgcaatatgcctgccagcctgttttcaaggaaacctaayctaaaacgtcattcatccttaaggctagaagaccataaaaggcaaataagtcatcagttcccctcaaatgactgtttctacaccaatctgtggccaaagcttagtcagttactacatactgaagaacgaggcaaaaaatcttaatttaatccatgtctttggtcccttagtcactatctgaaacaaccataactaaatccacttatggagagtttactatattccaagcaccacacataccacttaattatatgttttggattaatattcagagtaactccatggagaagttgctatcattaactgcacttttataaagaagtaaacaaaagattatgttaattttc

SEQ ID NO: 191035 - DNA, 488 bp, Homo sapiens
taggaatttaaaggtattcaattcctaagatacctggtgaaaacaaaacaaaacaaaaccatttcctctttccaaacatgtatagaactggatatctctttcctcattttcttttgaaaaactcagaaggagatgcatactgctattctcacttactgataaaaagagtattggagggaaaataaattacgaatgtcacagtctctgcttaagagccyaacccagctcctttcgaagaaatgtggagggaatgcattgtaaatgagatttggcaccttagcttctgcagtcttaccatagtcaacactcccactggctttagcttggagagtgctgtgtgggtggtgattgtattttatgtctttatttaactgagtgagagagactataatgtgataattctggaaatgatagaggggaaggtcctcctcaaatgtttggatgacaatgacagcacattaaaagtgtaaatatttttttgtgctagc

SEQ ID NO: 191036 - DNA, 538 bp, Homo sapiens
ctgactaacatcctgttggatatattaagtacgatatgaaatatgcataccttttaaagtccataaattctgaattctaaaaatgcatctaaactaagggctatgggtaagggaccatctgcctgcgactacccagcttttatcaagtaccatgtgtcacgggaagtgttaagtgatttattttcaaaatctacaataactttacagagttgtctttcatagataagaaaattgagtaattaaggcttaaaatattgacttgcccaataaaaagacaagacaaaatttggatccaggtctcttaattcttaattattgcaggtcactgtctctattaaartaaagatacataaaatgggtgagagttgcataagaaatcaaacgaaataggaggaaaaaaggcatgtgttgatcattagtagaattggtatgccacaatatgaattaaaaggaaataagggctgaagttatggcacaggtgaaagaaaacggcagtggaagggccctgtgattagcgattgggttacataaagcaagt

SEQ ID NO: 191037 - DNA, 538 bp, Homo sapiens
ctgactaacatcctgttggatatattaagtacgatatgaaatatgcataccttttaaagtccataaattctgaattctaaaaatgcatctaaactaagggctatgggtaagggaccatctgcctgcgactacccagcttttatcaagtaccatgtgtcacgggaagtgttaagtgatttattttcaaaatctacaataactttacagagttgtctttcatagataagaaaattgagtaattaaggcttaaaatattgacttgcccaataaaaagacaagacaaaatttggatccaggtctcttaattcttaattattgcaggtcactgtctctattaaagyaaagatacataaaatgggtgagagttgcataagaaatcaaacgaaataggaggaaaaaaggcatgtgttgatcattagtagaattggtatgccacaatatgaattaaaaggaaataagggctgaagttatggcacaggtgaaagaaaacggcagtggaagggccctgtgattagcgattgggttacataaagcaagt

SEQ ID NO: 191038 - DNA, 538 bp, Homo sapiens
ctgactaacatcctgttggatatattaagtacgatatgaaatatgcataccttttaaagtccataaattctgaattctaaaaatgcatctaaactaagggctatgggtaagggaccatctgcctgcgactacccagcttttatcaagtaccatgtgtcacgggaagtgttaagtgatttattttcaaaatctacaataactttacagagttgtctttcatagataagaaaattgagtaattaaggcttaaaatattgacttgcccaataaaaagacaagacaaaatttggatccaggtctcttaattcttaattattgcaggtcactgtctctattaaagtaaagatacataaaatgggtgagagttgcataagaaatcaaaygaaataggaggaaaaaaggcatgtgttgatcattagtagaattggtatgccacaatatgaattaaaaggaaataagggctgaagttatggcacaggtgaaagaaaacggcagtggaagggccctgtgattagcgattgggttacataaagcaagt

SEQ ID NO: 191039 - DNA, 538 bp, Homo sapiens
ctgactaacatcctgttggatatattaagtacgatatgaaatatgcataccttttaaagtccataaattctgaattctaaaaatgcatctaaactaagggctatgggtaagggaccatctgcctgcgactacccagcttttatcaagtaccatgtgtcacgggaagtgttaagtgatttattttcaaaatctacaataactttacagagttgtctttcatagataagaaaattgagtaattaaggcttaaaatattgacttgcccaataaaaagacaagacaaaatttggatccaggtctcttaattcttaattattgcaggtcactgtctctattaaagtaaagatacataaaatgggtgagagttgcataagaaatcaaacgaaataggaggaaaaaaggcatgtgttgatcattagtagaattggtatgccacaatatkaattaaaaggaaataagggctgaagttatggcacaggtgaaagaaaacggcagtggaagggccctgtgattagcgattgggttacataaagcaagt

SEQ ID NO: 191040 - DNA, 284 bp, Homo sapiens
tgatgatcttcttgctggtcttgccattcctggacccaaagtgctccatggcctccacaatattcaygccttctttcaccttgccaaagaccacatgcttgccatccaaccactcagtcttggcagtgcagatgaaaaactgggaaccatttgtgttgggtccagcatttgccatgggcaagacgccaggacctgtatgctttaggatgaagttctcatcttcaaatttctccccgtagatggacttgccaccagtgccattatggcgtgtgaagtcactaccc

SEQ ID NO: 191041 - DNA, 284 bp, Homo sapiens
tgatgatcttcttgctggtcttgccattcctggacccaaagtgctccatggcctccacaatattcacgccttctttcaccttgccaaagaccacatgcttgccatccaaccactcagtcttggcagtgcagatgaaaaactgggaaccatttgtgttgggtccagcatttgccatgggcaagacgccaggacctgtatgctttaggatgaagttctcatcwtcaaatttctccccgtagatggacttgccaccagtgccattatggcgtgtgaagtcactaccc

SEQ ID NO: 191042 - DNA, 584 bp, Homo sapiens
aaacctgggttgagaaatcttggggctctgggcacacagaaaatgcctggtggacaaatcatgggactgctaccaccatcttatcaaacgtgattaatgggaactggaatgtaatggagagacagtgtcacatccctgcagggtgtctctgtgtttttttccttcccaaacactgtctttctctctttcttttaatggattttcaaacaatactctggtagcaccttttgtgctacagcatctgccacttgcagcagatttaaaggatttagacctggagggtaaagagtaatttctccgaaaggatcttgacgtgttactgttataataagctaagcagtttgtcttttttttwaattaaaaatatgtttgtttggcttacataaacgatagtgtcttctgttaagaaagaaaaaaaggacaggagaagcacattattctggatttttccttacctttgatcaaggctttacatataacttcctgactccaggaaacaccagggatagaagaacaaggtcagcaacactttgagcaagcactatgctaaatctagaatttggggcatcctataggacagtgga

SEQ ID NO: 191043 - DNA, 585 bp, Homo sapiens
ttcttgtcctctgggtagatattctgttgtgggattgctggattaaatgatagttctactttttgttctttaaggactctctacactgttttccatagtgggtatactagtttacattctcactagcagtataatagtgtccccttttcaccatatccataccaacatctactkgtttttgatttttaaattacagtcattcttacaggagtaaagtgttattattgtattgaggttttgatttgcatttccctgataattagtgatgttgagcattttttcatatgtgtgttggccatttgtatatcttcttttgagaatttgctattcatgtcatttgcccactttttgatgggattatttgtttttttcttgctggtttgtttgagttccttgcagattctggatattactcctttgttggatgtatggtttgcaaagattttctccctctctgtggttgtctgtttactctgctgattatttctttcactctgcagaagctttttagtttaattaagtctcatctattcatctttgttcttgttgcattttcttttgggctcttggtcatgaactctttgc

SEQ ID NO: 191044 - DNA, 569 bp, Homo sapiens
ttggcctgtgtcccattctatcaagtttcatgcttgctactgtatttactgccaatcaatgttcagagtgtactagggcgctaatggatcttgatcagcgatctcaatttctcaaccttctcagccattatatgctgtacttttagaaacaggtatttatatttccaagctggcatacaggaaggcacattcattgataataaggagtcaaggagaagttaaaatagacttctgactgtcttttgcttttcagaagcaattactatcattggactcaattctgccagtagacagagttaagttagttttagaatagaagttgagtaggcagttaaatgcctggactttgcctttactyttttttccccctctaagatacagcagggacaaaaatgagagtaatcagtctactggattcctttgaacacattaactttcagatgggaggaagagaggtgaacggtcactggagcctctttgaagcttcatgctagagcaaagataggaggtggaaaaagaagtgggaaaaggggaaagataaggttgaagaaaaggtgattgattttatt

SEQ ID NO: 191045 - DNA, 569 bp, Homo sapiens
ttggcctgtgtcccattctatcaagtttcatgcttgctactgtatttactgccaatcaatgttcagagtgtactagggcgctaatggatcttgatcagcgatctcaatttctcaaccttctcagccattatatgctgtacttttagaaacaggtatttatatttccaagctggcatacaggaaggcacattcattgataataaggagtcaaggagaagttaaaatagacttctgactgtcttttgcttttcagaagcaattactatcattggactcaattctgccagtagacagagttaagttagttttagaatagaagttgagtaggcagttaaatgcctggactttgcctttacttttttttccccctctaagatacagcagggacaaaaatgagagtaatcagtctactggattcctttgaayacattaactttcagatgggaggaagagaggtgaacggtcactggagcctctttgaagcttcatgctagagcaaagataggaggtggaaaaagaagtgggaaaaggggaaagataaggttgaagaaaaggtgattgattttatt

SEQ ID NO: 191046 - DNA, 478 bp, Homo sapiens
ttcaaaactactaacttagtctctgtctgccccaacactccacactgtgattttcactctgatgccacccctcctctagtcggtactgtagcatattggtggwctcgcagagttctgaccagaaaatgaggcaaaagaccctctcctttggcttttcctcacatcctatcgatctactaatccttcgccacaagctctaagcctaaaagtgaagccattccacacatatctggccatctgtcctcttccctttaactatcttcttcccactcctccatccagaagggtcaggctttccttcataaggcaaagactacgttccaccatctctttagatatctctactatggcctatagtaatcttaactttcaacaaagcctgctgctcaagactattgccttcctaggggccaaaataaaatattatttaacagtcaaaacagagtaatgtctttatcattctaatttgcaccaccct

SEQ ID NO: 191047 - DNA, 478 bp, Homo sapiens
ttcaaaactactaacttagtctctgtctgccccaacactccacactgtgattttcactctgatgccacccctcctctagtcggtactgtagcatattggtggtctcgcagagttctgaccagaaaatgaggcaaaagaccctctcctttggcttttcctcacatcctatcgatctactaatccttygccacaagctctaagcctaaaagtgaagccattccacacatatctggccatctgtcctcttccctttaactatcttcttcccactcctccatccagaagggtcaggctttccttcataaggcaaagactacgttccaccatctctttagatatctctactatggcctatagtaatcttaactttcaacaaagcctgctgctcaagactattgccttcctaggggccaaaataaaatattatttaacagtcaaaacagagtaatgtctttatcattctaatttgcaccaccct

SEQ ID NO: 191048 - DNA, 567 bp, Homo sapiens
caagctagaaatgtaaacgtcagtgaaacattcctcggaccttagatgagaggtgttacataaacacgttttcagctgagcctgaaaaatttgtttacttacaaactttctatacaaccctgacggctttccaggaagtagcctctctcttcattagaaaattcttcacaggacttkcttcagagcctgcccgctcttgtttttcagttctcttgacatgtgacccattctttgagaagcttgtttgtttatgctgcagtgcatcatccattttcccactgccaaggcggctctgctctcatgtgaatcagagatcgctggactgctctgacctagaggtccgcacacggccccctccccagcttctcctaactgcagcatttgctcttctgttttctttgacttcctgtcttgcctccttcctcccctgtactctttctttagtcccaaacctccctactgtttgtctctctgcttgattcacctttattttttattgtatatatttaaggtatacaacatgatttttctatatacgtagtgaaattgttactacagtgaagcaaa

SEQ ID NO: 191049 - DNA, 662 bp, Homo sapiens
ataagatatcacctcaccttcattaggatgcccgctatcaaaagaacaaaaaataacaagtgttaaggaggatatggagaaaagggaatgcttgtgcactgttggtgggaatgttgattagtgtggccattctggaaaacagtatggaggttcttgaaacaattaaaaatagaactactatataatccaggaactccatttctagatatattgccaaaagaattcaaagcaggatctcaaagaaatatttgcacacccatgttcattgcagcattgttcacaataggcaagagatagaagcagtcaaawgtccattgataataaatgaatggataaagaaaatgtggtatggctggacatggtggctcacatctgtaattccacactttagtaggctgaggcaagaagatcacttgagcccaagggtctgagaccagcctgggcaacacagtgagaccttgtctctacaaaagaaaaaatacaaattagccgagcatagtggcacatgcctgtggtcccagctactcaggacactgaagtaggaggatcacttaaggccagaaggtcgaggctaccgtgagctgtgttcttgctactgcattccagcctgtatccctatcacaaagaaagaaaaagaaagaaaaggaaggaaggagggaagg

SEQ ID NO: 191050 - DNA, 407 bp, Homo sapiens
tatactgcagatatgtccagttgggtgtttatcacattattcaatgaactaaatgttaaaaatcttcactgaataggagaattagcttatccctctctgtttgaacatctagtattattttacatagaagggaagcttcagtagttcaggcacctaagaaaaaggaggacaaaaagtgtggcctctggtgcctttcctttcaaaagggtcacatatctttatgtgaatagctayggccaatgacattttggcagattttttaaagactaccatgtagcttaacatatttttccattaccagatgacagattgtctttccagtagagactacccagttcatcaaggtttggttaaagacgacaaggaataaagccacaggtgacccacaatggacattgaaagaggga

SEQ ID NO: 191051 - DNA, 622 bp, Homo sapiens
atacttactggtgtaatagtattaaataatgctaacttgtacacatttcaaaaacataagaaacatgtaggcaatctacaattcagatacattaaaggctgacaagccagagaagccacactagcagagaaaatgctaagtattaggtaggtacaaaagtaattgcagtctttgccattaaaagtacyggcaaaaaccataattacgtggacatgtctctatccgttctgtcattctaatggaaaatgatgatcatataataatccttttcacttttccatttaattttaagaagaaccatatatataaagtagtattttgaatgagagtatcacaatcctaagttacttttgtgtaagagttatttttttccaaaatgttataaataaaaaagattctaagcgtttgaagctcacagggaatacaccaataagttggatccagtagcatcacacgcacctattttataatgcattactttctagaaatcacaccttaggctacactgtcacaaagtggaatgctctacataagtaatgtatctgtttgaagatatttgatactaatgacaaaattatcaaataaatatgtaagtcaactttgatttagttgaccaatgaaa

SEQ ID NO: 191052 - DNA, 529 bp, Homo sapiens
atactaatgacaaaattatcaaataaatatgtaagtcaactktgatttagttgaccaatgaaaaatattggtttctttgttatggatgcatgcatcttatctgaaagaatggctacttttttaagagaaattctttcacactggagaagctagaacttctgaattctatgtcatttctccaaccaaagtagttgtcattagagtttagaatttttctaagtattccaaaaggatgaagtttagcatatgtttcgatatttctatcgtaaatgcaatataatagttacttatcacagaacagttaaaaataacattaatagcatcaaatgcacatagagtactaatgttacaggcaatattatatatactttaaacataataaatcatttacttcttaaaactataatagataggtgtgattattaacttccttttataaacaaggaaactgaaacagagtagttacaaatatttgtcattattcacacagctggcagaagggatttgaaatgaggaatatgcattacaa

SEQ ID NO: 191053 - DNA, 529 bp, Homo sapiens
atactaatgacaaaattatcaaataaatatgtaagtcaactttgatttagttgaccaatgaaaaatattggtttctttgttatggatgcatgcatcttatctgaaagaatggctacttttttaagagaaattctttcacactggagaagctagaacttctgaattctatgtcatttctccaaccaaagtagttgtcattagagtttagaatttttctaagtattccaaaaggatgaagtttagcatatgtttcgatatttctatcgtaaatgcaatataatagttacttatcacagaacagttaaaaataacattaatagcatcaaatgcacatagagtactaatgttacaggcaatattatatatactttaaacataataaatcatttacttcttaaaactataatagataggtgtgattattaacttccttttataaacaaggaaactgaaacagagtagttacaaatatttgtcattattcacacagctggcaraagggatttgaaatgaggaatatgcattacaa

SEQ ID NO: 191054 - DNA, 501 bp, Homo sapiens
ttatacagtagttttgtttttaattatttagggaaacttcacactgttttctatagtgggtgtacaattttggattgccaccaataagtattagggttctcttttgtctacatcctaaccactttttatcctttagtttttgataacaaccattcctaacagatgtgaggggatatatcattataagtttgattggtttttactgatgatttgkggtaagcatattttcgtatatctggttatcatatttatgtcttctttggagaaatgtctattttaatccccagcctattttaaaattaaagtattagtttgttttttttttgttattgagttacaagagttccttatatattttggaaattaacctcatatcaagtatatggttcacattttttttctatcccataggtgaacttgccactcttgattatttccattgctgggcaagaaacttttagtttgatatagtccagtgtgtctatttttgcttttcttgcc

SEQ ID NO: 191055 - DNA, 501 bp, Homo sapiens
ttatacagtagttttgtttttaattatttagggaaacttcacactgttttctatagtgggtgtacaattttggattgccaccaataagtattagggttctcttttgtctacatcctaaccactttttatcctttagtttttgataacaaccattcctaacagatgtgaggggatatatcattataagtttgattggtttttactgatgatttgggktaagcatattttcgtatatctggttatcatatttatgtcttctttggagaaatgtctattttaatccccagcctattttaaaattaaagtattagtttgttttttttttgttattgagttacaagagttccttatatattttggaaattaacctcatatcaagtatatggttcacattttttttctatcccataggtgaacttgccactcttgattatttccattgctgggcaagaaacttttagtttgatatagtccagtgtgtctatttttgcttttcttgcc

SEQ ID NO: 191056 - DNA, 501 bp, Homo sapiens
ttatacagtagttttgtttttaattatttagggaaacttcacactgttttctatagtgggtgtacaattttggattgccaccaataagtattagggttctcttttgtctacatcctaaccactttttatcctttagtttttgataacaaccattcctaacagatgtgaggggatatatcattataagtttgattggtttttactgatgatttggggtaagcatattttcgtatatctgkttatcatatttatgtcttctttggagaaatgtctattttaatccccagcctattttaaaattaaagtattagtttgttttttttttgttattgagttacaagagttccttatatattttggaaattaacctcatatcaagtatatggttcacattttttttctatcccataggtgaacttgccactcttgattatttccattgctgggcaagaaacttttagtttgatatagtccagtgtgtctatttttgcttttcttgcc

SEQ ID NO: 191057 - DNA, 564 bp, Homo sapiens
cccttctctcatttttttcttttctattttcttacaatccatgtttactatgtttaagttagtttaataaactgtcctgtcctattaagttgctatgagactctagtaagcatgtatttacaaataccaagagttaaccaaacaaaaaataaatttttataataatgyaaacatactatgcaagacttatttcggttgtcatataaatttataaatatagcactttctatggcaaagaacaccagacaatgctaatgccagcatattttgaagaaaatgattgttacattgtacctttaaaacaattatcacatttcataactagacatagtaaacatacagggttaatgaataagattcttagaaacaagacccatatcttgttcttttcaaaatgtgtttgatttgtgttttggtctccactttctctagcacagtatgaaaaacacagaagcaagaaataaaaacatcaattgcttatgtcaaatttttcaacaaatgtaattttttatatgtatagacttgaggatgatattttatttgattcctggcaacttaagatac

SEQ ID NO: 191058 - DNA, 616 bp, Homo sapiens
acaatagtctatgtaccaaaaattaagtgtaaatatacactcaattcataaatttacataaattataaaaatataaaatataaaaattgaaatcaaatacatgsattgatagtagctatagtctacaaattagaaaagcaaactatatgcaaaagatttagacattaatgacaaatgcattattgccaatatttattggaaatgatcaatattgtagaaaaaattcaaaatatttaatcttttattaatgaataaaaaaagtaattgaagtattgaatttaaaaacctagaaaaataaataagaaaataagttgaagaaattaattaagatgacaccatttattctataaatttagattagaaccaatttgtaaatgaggaaggaggaaaagaaaaggttgaattcataaatttacctaataatcagttgaagggaccaatccaatagttaaacttctggctaggttgatcaaaaactataagaaacaaaaatttaagcaacaataataggcatggaattgtttttaataaaactggcaaaaaggtagtatattatttgttgaattattcaataaataaatttaataaatatataataaatgaaaattagcaaatt

SEQ ID NO: 191059 - DNA, 519 bp, Homo sapiens
tattgtcaaccttcttaagatattgtttgtgtgggtatagcagtaactaacacatawtgagtgcttaccaagtgccaggcactattttaagtactttacacgtaattgatttaatactcacaataaccaaatgagtaggagccttattttcttgcagattaagaaagcacaaagagaagattcagaataaaactggcatatttgtgttagttggttttaggttttgttttttaatagaaatagagcttgtattttaataaaagtaaaacaaagaatttggacatgaaggcaagcaggtttatttctttaatgggaaacttctcctctaatggtatctatttgcaaagtatttcatgagctgagaaagaaggagcagggaagggtgagggttaaaaatgagtagggtgggagagagggatagctaggttctggtaactgctggaaatgtgagggtaaacagttatcttttgtcaaaagattatcttttacatttagatatacaatctgtctggattaatt

SEQ ID NO: 191060 - DNA, 554 bp, Homo sapiens
aattatatatagaatatagtattaaatcattcaactagatttattgagtaacaaacatcttctaggcattctcttaggcaatagggataaaatcaccaatactgtatacattattaagatcatttttgtcacaagtttagttctctgggaaacaagcactgagaaaaggtgggagtaaaacttttataatgaaataatactcgtgaagaaaaagagatgtatattgtgaggcttttcctgataaacagaatcaagagtgcactagtctgttttcaaactactataaagaactacccaagactaggcaatttataaagaaaagaggtttaattggcttatagttccacatggcttaggaggtctcaggaaacttacaatcatggtggaaggggaagtaaggcacgttttacttggtggcaggatagagagagaaagagaaagttccacayctttaaaccatcaaatattatgagaactcactcactatcatgagaacagtgtggggaaaccacccccatgatccaatcacctcacaccaagtccctcccttgata

SEQ ID NO: 191061 - DNA, 635 bp, Homo sapiens
tattgttgtgaatgcaaattgtttgtgtttctctctcctgattggaagataaagaaattcatttacttattaaataaatgcacatcatatacctgaggccatattaacctgttttagctaagataccacatatggcacagcagccatggtcatggctaatagagattgaggcttgcagtaatccaatgccatcacccaagacccactgagtttctttgggtatgagaatgaggaattacrtgaagaaggtatgatagggactattactcctgcgtctttcagatttttaagattggcattaatctctgccacttacatcctccaatgcctccaatgtgatacttttgattttggccagttccttgttttagagtcttcacttgctttcatcattataacataatgtgggtgtcaagccatctattaaatatgttcatctcagttatatactcataacatattcaacaggtaaatttgcagacagactgaaagccaaacctcagtcaggagtccattgatttctggcgtcctagatactctaattgaggagcgatggtgctgctgcagttctccaggtatcaatgtttactgaaagctagtgtccaaccgtaaaatattcattattcattgtaaaa

SEQ ID NO: 191062 - DNA, 635 bp, Homo sapiens
tattgttgtgaatgcaaattgtttgtgtttctctctcctgattggaagataaagaaattcatttacttattaaataaatgcacatcatatacctgaggccatattaacctgttttagctaagataccacatatggcacagcagccatggtcatggctaatagagattgaggcttgcagtaatccaatgccatcacccaagacccactgagtttctttgggtatgagaatgaggaattacatgaagaaggtatgatagggactattactcctgcgtctttyagatttttaagattggcattaatctctgccacttacatcctccaatgcctccaatgtgatacttttgattttggccagttccttgttttagagtcttcacttgctttcatcattataacataatgtgggtgtcaagccatctattaaatatgttcatctcagttatatactcataacatattcaacaggtaaatttgcagacagactgaaagccaaacctcagtcaggagtccattgatttctggcgtcctagatactctaattgaggagcgatggtgctgctgcagttctccaggtatcaatgtttactgaaagctagtgtccaaccgtaaaatattcattattcattgtaaaa

SEQ ID NO: 191063 - DNA, 635 bp, Homo sapiens
tattgttgtgaatgcaaattgtttgtgtttctctctcctgattggaagataaagaaattcatttacttattaaataaatgcacatcatatacctgaggccatattaacctgttttagctaagataccacatatggcacagcagccatggtcatggctaatagagattgaggcttgcagtaatccaatgccatcacccaagacccactgagtttctttgggtatgagaatgaggaattacatgaagaaggtatgatagggactattactcctgcgtctttcagatttttaagattggcattaatctctgccacttacatcctccaatgcctccaatgtgatacttttgattttggccagttccttgttttagagtcttcacttgctttcatcattataacataatgtgggtgtcaagccatctattaaatatgttcatctcagttatatactcataacatattcaacaggtaaatttgcagacagactgaaagccaaacctcagtcaggagtccattgatttctggygtcctagatactctaattgaggagcgatggtgctgctgcagttctccaggtatcaatgtttactgaaagctagtgtccaaccgtaaaatattcattattcattgtaaaa

SEQ ID NO: 191064 - DNA, 440 bp, Homo sapiens
agccagtaagttggtgtttcgcctggcctggtgttcgccttccttacagatttctctgckgcttgttgcatctctattcacaaacacttgattgctgatttccagtaactgcgagttattcatacccacaaacccagcctgtttctgcaattttctcctgctatctcccgtgctttgactaactaatgccatgtgctgattttcagggctatctggatcaaaaggagtgtacatatggtaagcctcacacagtctttcatagaattgtgctggactctcctcttttcattggatgacctcagagatcttatttacatttgtagccttttaagcccctttctttagaccttatatcaatgcctcatggtaccttcttagcctctccatgtctggtccctcatttgggtcccattggggggtctgttcccggcagctgaatt

SEQ ID NO: 191065 - DNA, 440 bp, Homo sapiens
agccagtaagttggtgtttcgcctggcctggtgttcgccttccttacagatttctctgctgcttgttgcatctctattcacaaacacttgattgctgatttccagtaactgcgagttattcatacccacaaacccagcctgtttctgcaattttctcctgctatctcccrtgctttgactaactaatgccatgtgctgattttcagggctatctggatcaaaaggagtgtacatatggtaagcctcacacagtctttcatagaattgtgctggactctcctcttttcattggatgacctcagagatcttatttacatttgtagccttttaagcccctttctttagaccttatatcaatgcctcatggtaccttcttagcctctccatgtctggtccctcatttgggtcccattggggggtctgttcccggcagctgaatt

SEQ ID NO: 191066 - DNA, 585 bp, Homo sapiens
  misc_feature (1)...(585): n = A,T,C or G
tgaatataacttaatgaaataaactagcatttgctttagatgtgcttatgtgccataaacgtttctcaatagtttaaggcatttgtgcatttaatacatatagaaagcagaaaactattttatgtatttttttatgttatagtatttctgtggaaatattatagtgaaatttcattagtttattaggatacaaagtaaattttaggttgtttaaaaatggctagtatttatatgttaggccatgctgctgtccatccccacttgagaattttccttactagctccagaatggtcaggggaaagaagctgtaagtctggcctcaagagaacccttcactaccaagcaatgttttaatctacttgtctttagtccttagagcaggtctgacctcataattttcttccctaaatcacaaggcagnatcctctttcagtgcaaccttccaatattgttctcagaagtgtgtgtgtrtgtcagtatgtgtttgtgtgtctttcttcctgacttccagaggaaagctcctaattcctgattcaactttatggcagggattggttaaaacatttaatggctgtcagtgcaca

SEQ ID NO: 191067 - DNA, 625 bp, Homo sapiens
  misc_feature (1)...(625): n = A,T,C or G
nnnnnnnnnnnnnnnnnnnnnnnnnnnnnnnnnnnnttttatctccaaaatctcagtatttttaaagattaaagaggatatgttaatcacatctatggtacacagaaatgtaccatttcattcctggatggatgcatggaaaaaatggaattgaaaactttccctagaactaatccatgataaaccctaaaaagaatgattccaagtgaatatcccacttatgatagaaatagggaaaacattatatcatgattgcctcaattattcactttcccttttacactttgttataaagtttcaaagcacattctcgtattctgtggccagtgtatctgttaagttaacatgaaagcaaacataaagcaatttttaaaattatgcctttacrtgaagagaacatataattatatgaataaaagcaggggttcataattaagagcatttttaaggggtaaaaagccacaaatgaagaaaaaaagaataaactaacttgaccttaagccaattgtatacatatatagttttattaatccttaatgaactaacttatttccttataattgtaattacactctaatagactatactaaagtgtattttccaaaaatgaaaagggacatgacca

SEQ ID NO: 191068 - DNA, 509 bp, Homo sapiens
ctgcagcaggtagccctagctccttgggrttccaaagaacggtaacagagcaagcccctaagcacaaccttttccagcttcttatatcaagttttccaatatttccttggcaaaactaagtcttatggccaactcaaaatttggggaaatggatttcacttttgactgaacaatctgcactatctccttgaaaggatatagatgtagagaaaatagtatttcacaactattttttatatctaccacccagtcctttcatatctatctagcaattattttaataatttttagatatcactatatgtatatgttaattctgctatgactcacacaatgttaattggcagagtgaaaataattttaactgttgtgcagaacaaaacaagtgttttccattccaaatatccaagattaagtatttgatatgctttggttctgtgtcttcagccagaataatccccacatgtcaacggcaggatcaggtgaagagaattgaatcatgggggcgg

SEQ ID NO: 191069 - DNA, 381 bp, Homo sapiens
caaataatttgcactgtgtagagttgtaatatgaatcttgttttcaaaataaaacagcagtatctttttcgctcaaaatgagtaatctgtagccttgaggtttatgtgaggcaagcttgcattccaacactattccttgactgaggtctcagaagtccactagagccttcctagcatttgcattagacacgtttgtgccttgcagccactcaggagctcagtgagagaaaagacattatgattatatgttggaggaataamaaagtaatatgaaggatggaaaaatactccgtagatcctaagataatacaaaggaaaagaaaatccgttttcaaatattaagtagcaaattcaaggaatatacaactaaaagtcatgttg

SEQ ID NO: 191070 - DNA, 525 bp, Homo sapiens
aaagagttgataactggagtttttttccttaagagtttaactatcccagcaataataaagccagccatggatggaggaagaatgtgctgaggatgtgaatgtcagggggaaggagcagtgcttcatgccttgttaatatttagggctctacttaataaaatatttcctgggatttttttttttgctgtttcccagtcttgcattctcttcttcaccttctcctactgagtgtacagaaaagaaacacaagtagctgcatttacttactcttcctttcactgtctgtcttagttcctgagtatccagggattccctgcaggaaattcagttgtacataaccctacagtatctctgattgcctcaggccaaggaaccctgactgagttgttagcctggtamgctgcctgtagcgtctttgtattttccttttgttggttagtgttatcttccaacattttagtttttacttcctgttttactattttaatattagttcacctacttattctcatagcagagttatta

SEQ ID NO: 191071 - DNA, 529 bp, Homo sapiens
ctgacattttaattttggattaaggatgaattgaattgtatcaytgtgttgtgtgtcattgactattggtcgagcacctactatatactaagatttttactatgcaatacagccgtaaaataaaaataaatattctgttctaacaaattttagactttttcattaaagacatacatttaaaaatgattgcattaacttgtgatgaatggtctaacaggaaacatacatggtgttacaggaagtaaaagtgaggatataatataatgtagggatcataaaagatctctcagtgaagcaaacatttagactgactcttgtaggaccttaccttccacaactcacctgctattaggtatcatccttaaataacagggtctatattattatattaatagtctatatttagataggattgttctgtgtttccatcaaaacctaaagttaaccatatataaaaaaactgtgacatctgtgcacgaccagtttagttatcttctaagcaaggaaacaagtccaaggtaaaaatcac

SEQ ID NO: 191072 - DNA, 628 bp, Homo sapiens
ttgctgatatattttatcattgttttaaagttgtatgtttatctttgtaatatggctgaagaatgacgctcagtagcagttgaagtgccaattttgccactgttgctcgcttgtgcttttgtagttggaattaacctgccttttctagtcagattttttacaagcaaaatgtctattggtagttttaagttattctatactaggtaatataatttataagcagaattmaatccttataagaaaaatacactatgttgctgtgctgaaaatgaatgaatgaatcagaacaccactaccaattctgttatgaaacacactttttttctcaaaatgaatcttccacaaggaagataaatgaacacttaacatgcaaagtggtgaagccaattttaatgcacataggaaatcttaacctccattttattcaataaaattaaccataactatcttcttcaccctgtgacatgagattatgttactctttttaaggtcatggatctagatggtgcttttactaaggatgagaaaaaagaaagttgcaacactacttcagtaattaaaataattctaatagcatgttgcagatatatttagcaactgttttgcttctttagtaaagtatttgttg

SEQ ID NO: 191073 - DNA, 628 bp, Homo sapiens
ttgctgatatattttatcattgttttaaagttgtatgtttatctttgtaatatggctgaagaatgacgctcagtagcagttgaagtgccaattttgccactgttgctcgcttgtgcttttgtagttggaattaacctgccttttctagtcagattttttacaagcaaaatgtctattggtagttttaagttattctatactaggtaatataatttataagcagaattcaatccttataagaaaaatacactatgttgctgtgctgaaaatgaatgaatgaatcagaacaccactaccaattctgttatgaaacacactttttttctcaaaatgaatcttccacaaggaagataratgaacacttaacatgcaaagtggtgaagccaattttaatgcacataggaaatcttaacctccattttattcaataaaattaaccataactatcttcttcaccctgtgacatgagattatgttactctttttaaggtcatggatctagatggtgcttttactaaggatgagaaaaaagaaagttgcaacactacttcagtaattaaaataattctaatagcatgttgcagatatatttagcaactgttttgcttctttagtaaagtatttgttg

SEQ ID NO: 191074 - DNA, 601 bp, Homo sapiens
agaaaaaagaaagttgcaacactacttcagtaattaaaataattctaatagcatgttgcagatatatttagcaactgttttgcttctttagtaaagtatttgttgagcgtgtgactttaaatcaaatcatgtaaatggtcagtctcagcatcaggaggtctgatggagaaccataaactgacctattctttttacatatacattttaaattcgcattttcatgatgaaactgttgcttttcagccttcatgattgcaaaaacaaacaaaatatacttctgatgccttgtttgaagaatggttaatcagcagaaatattttctaatagcatgagtcataataaaaatactggtcataatattttcaaaaattacttctaactttatccttttgaagacaaagtcagtaatctttggttggaaatgacgatataacccaaatttgaactaactagggcaatagggagaattttttgactcatatgtaatcacaragggtatcaaggaggtagatatggtaaagaatttatattttccaggctttcgctctgcccattttctctgtaatcgctgcattttttgtttcatcctgtcctactgcag

SEQ ID NO: 191075 - DNA, 470 bp, Homo sapiens
attgccattattaggcagaagcagtggagtattctagtttacatggatgataatgggtgccatactatatggacaaataaaaccgtttgtaaatatagaccaatatttaccactacctagaaagctcgcatgatattttattctgacaaagtacttggtagwttctttacgccattatttatgttcgttataatccgtgatgatactcttggcctacttttagttgaatacatatttttgaggattttacttcaatgttgattatcataggtgtgaaattcacagagatatttacgttatctgtatttgtcattttgcgaaaggtttataagatttctgactagcctttactccaatgtcatgaaacagtgagtaaccccataaccctggtcttattagcctcatggttagcaaaactaaattaactatccaagagtaagcttacgtatgtataatgttaatctaaaacc

SEQ ID NO: 191076 - DNA, 568 bp, Homo sapiens
gaattcattcatgctacctcatttctcctggacactagacaagagctcaggtgcaacgagtgtggaggcaaaaggctgtcacactgaccctttgccctcactggcagaccccagccacctcacgcaaaaaggaagagtgtccactgagctgttaacacttaagccgtctgtggatggctgagctacaagagctctgtaacacttcctttggagcttgaggggtcctgagcacccctcccagacactgcagcagggctagtacagagtttgttcctgccggcaaccaaaagcattctccctggsttctgcccccactcacctctatgctccctcccacaaggggtggaatgcagcaggttccagtgagtagagttcaccactgcctgtgccagaatggccggctgattccagcatttgtgtactccagttcccgcccacaaaggggtcagggaaatattctgattcaaattaaacatacaatcactaaaaatccacaatcaagcattctatatacacattttcaaaattaatgtgttcttcaaacacaaactaaaatatttaatttgat

SEQ ID NO: 191077 - DNA, 578 bp, Homo sapiens
cggctcactgcaacctctgcctcccaggttcaatctattctcctgcctcagcctcccgagtagctgggattacaggtatgcaccaccatgcccggctaattttgtatttttagtrgaaacggggtttcaccatgttggtcaggctattcttgagctcatgatctcaggtgatccatctgcctctgcctcccaaagtgctgggattacaggtgtgagtcattgttccaggccctgatatcactttaataatagtttcttataccctcaaattatctcacgatgcttagaatgaaaataattgcttaatttttctaaattagaatattattctaatagataatcaagatcttctttctaccctcttgtgcttattaagctgaatttaattccatggaaacccatctacaagcaacagcatcaagcaaaagagtacaaccaagttagcccaatgggttactcttctgaaaacaaaaaacaaaacaaaaaaaccctcacagctcatgccctctgcgtgttagatgaaaagctttatctttgtgtaatgtaaaaagggcagtcagtctcagggagggttttaa

SEQ ID NO: 191078 - DNA, 607 bp, Homo sapiens
ttctgatcaccctggctagtcttagaaagaatcctgtttgaatcatttagccagaatcccccttaccctgatccactgacctccaccccactgtactctttggttataagttcctaactgcccatgctgtattcagtgttgagcccagtctgtctctccccgacacccacaacccgccaggcagtggtcctacccttatgatgatcctgtgtaaagtcttccttaccatgctttaacaagcaacattaaataatttttttaacactactctccttatttcttctgttttctactgtagttttaagttagatctatttttgatcttcctccaatctgtttcttaaactgataatattccatattacaatcttttgtcattcaaagaagttcctcccacattacaattataagctttgtatttaaacacacatttttaaaaatttttttaaaaatttacatactattcttaaccaagttagtgacaaatttaactgaatcttgcctacatgaataatttcacaatgtgctaattgaagaacagaaaagaaaggatgtctactttycataaacataaataaaattcagataactattttttgtaaattat

SEQ ID NO: 191079 - DNA, 523 bp, Homo sapiens
tagcacaaaatacaatgtaaaaataatgagtccttgtcttctcatatttttttttcaataaaggatcactgattcaggaattctgcaacctctctctgtatttgaggaacaaagactacatctcacatttgctctacatgaggcaatgaataaaagatcatagataaaagaaaaccagtaaatcatcatttgcattgtattgatgtttcctgaggtataaaatcccctagaatttccatgtgctatcacattgttatggagaaggtrctcttaaaataacatgggattgaaaacacacgtgtgtgtgtgaggaataatctgagatgtatgctatgacaaattcctcagaaaaaagagaaaaatatcacagttttattataccataagagatgtggattttatataaagctttgttttaccttattttatcatttttagaaaacacatgccaacaaataatgactgatccctaagagtattatttaaatagtaaaagataaaaaataaaataagtaaatacctg

SEQ ID NO: 191080 - DNA, 523 bp, Homo sapiens
tagcacaaaatacaatgtaaaaataatgagtccttgtcttctcatatttttttttcaataaaggatcactgattcaggaattctgcaacctctctctgtatttgaggaacaaagactacatctcacatttgctctacatgaggcaatgaataaaagatcatagataaaagaaaaccagtaaatcatcatttgcattgtattgatgtttcctgaggtataaaatcccctagaatttccatgtgctatcacattgttatggagaaggtgctcttaaaataacatgggattgaaaacacacgtgtgtgtgtgaggaataatctgagatgtatgctatgacaaattcctcagaaaaaagagaaaaatatcacagttttattatrccataagagatgtggattttatataaagctttgttttaccttattttatcatttttagaaaacacatgccaacaaataatgactgatccctaagagtattatttaaatagtaaaagataaaaaataaaataagtaaatacctg

SEQ ID NO: 191081 - DNA, 510 bp, Homo sapiens
tggtaacttcctggttgccaggtcatagccatggaaaggagcagtaacttccaggtgttgccatggcaatgctaaactgacatggcacattggtgggtatgttttatggaaagctccttctccccatccctgtttcagctagtcttcaatttgatctggtgtctgaagcctgcctccagagtcaaatctcacctcctacctcrataccactgtttatatagccttcttttaagtggacattttacctgtttgaaggttttacctatcatgtctagaacttatataaacattcttgtccacctttttgttgatcataactgcttatatgtttttggtatataccatggaatagaattcttgagtcacaaggtaaatatatctttatctttagtaggggttttagaatttttttcatagtttttgtggcaatttatactttcaccaacattgtgaatatgttagtggctgcatattcttgccaatatttattattgttcttttcttattttg

SEQ ID NO: 191082 - DNA, 521 bp, Homo sapiens
gccatgcaaaactgggtcacagcaggaagactgtgggaatgaggtccctagaaccgcaaaagagtttggggagggaggccctttcccttaccactggggaaaagacagctttgtacctataggccacccagagcagaggtcaagagctaggggcatcagaacaaaagatccagaagccaggtgggcagttaaggaagatgccccaactgcagcccataccccagttctactcagccacccaagaggcagccartgctgttcctgtatttctcacctccttatgcaagactaacatcccagagtggaagaaagtcctcccgaatgagtgagtaggcagaggcctagacacacttgccctcctctttcccttctctcaaacctgacctaagaaggcctggggaacagctgtgttgcccagaacagttcttccaaaattctgccccccaaacattgccccaaaaaatcctgaacagagccctggatggtggaactctggacagagagaaatggttgaagccgtc

SEQ ID NO: 191083 - DNA, 468 bp, Homo sapiens
ttataaacactgcatacattttcatttcagaatcccgggccttcactactgatagaatccaaacaggatcaaacctttaaaaaaaaagaagtatggaccggacacagtcgtcacgcctgtaatcccarcactttgggaggccaaggtgggcagatcacctgaggtcaggagttcaagaccagcctggccaacatggtgaaaccctctctacaaaaatacaaaaattagccaagcatggtggcgtgtgcctgtaatcccagctacatgggaggctgaggcaggagaatggctttaaccaggcaggcaacggttgcagtgagccaagaccatgccactgcactccagcttgggtgacagagaatccatctcgaaaaagaaaaagaagtatcaacccatagaaactagtcaatgttcaatttccaagaagtgaaatttgtggcctgatacatttcttttctcaaacatttc

SEQ ID NO: 191084 - DNA, 595 bp, Homo sapiens
aggatttgttcattgtgtacattagtaaagtgtaaatgtcatagaaataaattattacttttacaaagatcatttgcaaactgaattatggatgagttataaatagaaggccacaaattcacacaaagaaagagagagcatgtatatatatggagactatttggcatcctaataaccaactagttcttcacctgaccatatcacacaaaagagccaccgttattgctgtaatgcttctgtatrgtactacttttcaatcactatggctttcattaattcattgagtctaagcctctcccaatacagaaatttcctttacaataatccagaaacctaattctaccctctgactgaatacattcatgttactttatcagcaaattcattccgtttttgattgtatatagttgcttctttttttactgatacaaaatattttatatatttctggggtacatgggctaatttttgcatttttggtagagatggggttttgccatgttgcccaggcaggtctcgaactcctggcctcatgtgatccacctaccccggcctcccaaagtgttgggcgtgagccaccgcaccctgccgaatt

SEQ ID NO: 191085 - DNA, 562 bp, Homo sapiens
agaattcttcagcaatgaagtcgttttgaggatttgttcattgtgtacattagtaaagtgtaaatgtcatagaaataaattattacttttacaaagatcatttgcaaactgaattatggatgagttataaatagaaggccacaaattcacacaaagaaagagagagcatgtatatatatggagactatttggcatcctaataaccaactagttcttcacctgaccatatcacacaaaagagccaccgttattgctgtaatgcttctgtatagtactacttttcaatcactatggctttcattaattcattgagtctaagcctctcccaatacagaaatttcctttacaataatccagaaacctaattctaccctctgactgaatacattcatgttactttatcagcaaattcattccgtttttgattgtatatagttgcttctttttttactgatacaaaatattttatatatttctggggtacatgggctaatttttgyatttttggtagagatggggttttgccatgttgcccaggcaggtctcgaactcctggcctcat

SEQ ID NO: 191086 - DNA, 507 bp, Homo sapiens
ttctaagaaataaaaactgagtaaaaaaaagacaaaatttaaattcaaatgggcaaatatatttttgtcaaatgtrtatttttacattttctgctagagttcagaaattttgtcagaatagcttgcaaccctgaggattctactttcagatattgtcatagtggtaggaatcacgcattttccaattagttgaattcttcatgaaaagataatattttaaaagtctaaaaactggagaaaagaggtacatatagagactggatttaggcatcaggatgaaaagatacactgcaaattcatccaaaaaaaaaaaaaaaaaagcagatacatcatcaccgaggagtagaatgaaagcaagtatcttctgataccttccatcttccgtgttcctaaaggcgtattttaaaatgtggttttacttaacacgagctcttgtgttcttttttccctacatatttttatacaatatagctaaatttcttcttcatgtgttacgggtaaaaaatc

SEQ ID NO: 191087 - DNA, 583 bp, Homo sapiens
attaaaaaaacccacagaataagagaaaatacaaatatttgcaaatcctatatcttaggatttaatattcggaatatataaagaactcttacaactcaacaacaaagagacaaaagtcccaatttaaaaatcgtcaagactctgaatagacatttctccaaagagaatatacaaatggtcaataagcacatgaaaatatacttggcatcattagttactaggaaaatacaaatcgaaacaacagtgaattaccacttacacccactagtatggctatcagaaataaaaggaaaataaatgttgatgaggaatggagaaattaaatcccacatacatttttaatgggaatgtaaaattatgyagctgctgtggaaagaagtatggttggttcctaaacaaagttggacccaagagagcagaaaacatatgtttaaacaaaactttgtacacaggtgttcacagcagcattattcataataaccaaaaagtggaagcaacccaaatgcctatcagctgatgaatgtgtaaacaaaaggtgatatatccataatattgaatactattcagcgataaagagggatga

SEQ ID NO: 191088 - DNA, 632 bp, Homo sapiens
caacattgatggaactggagaatattatattaagtgaaataagctagacacagaaagatatttatttgtgggagctaaaagttaaaacaatttaatccatagggaaatggagagtagaatgacagttaccagaagctggaaagtgtagtagagggggtacagggttatgataaatgggtacaacaaaatattagatagaatgaataaattctggtatttgatagcacaacaggatgactacatttaacaataatttatgatacatttataaataactaagagtacaattagcatgtytgtaaacataaagaaaggaaaaatgcttgagaggatggatacctcttttaccctgatgtgattattacacattgtatacctgtatcaaaatatttcatgtgccctgaaaatatatacacctactatgtacccataaaattaaaaaactttaaaactatatacagtatttagaaataaacatttttaaaagacttgtagtacctctccacttgagtcttcaaaacataactgagagaaattttaaaaggcctgaataaacaaagagacataaaacatctaccatttggaagagtgtcattatcatttcattccaaattgatctatggaataaacac

SEQ ID NO: 191089 - DNA, 594 bp, Homo sapiens
tattcatttagctcgcttccacaattgaaactgctcctaggcagctccttggctagagcatgatcagtgacaacagtatcacctaggtacactttagtgacactaatgggtgcagtaaatggagaaatgtttggcaaatgctgttacagggaatactccatttttcatttacctcttaagtcctgcttatctcctattttgtcacttagcccatttctcactccaaagcaaacaaccaaaacctagtgtctggcttaaaaaaaaagactttatgccartcgtgcaataaaagggagttccccagaggaaaaaaaaaaaaaaagcatacaggcacacacacaaccacccaacaagaccctccatcatttcttcacgatcttataaaagggacaaaggggaagacaaacatttatggagagggagatttttctcataatggccccaataaatatgtttgttgtagagaaataaatgtgaagggaagacatgcaagtctgatgttgaagaaaggcttgttcatgcttaatacattggagaaattttcaagagctgttcatccatgttaaaaaatattacccctgtaatgctgccaag

SEQ ID NO: 191090 - DNA, 618 bp, Homo sapiens
taatttggaatgtatagttcaacgcatcatagagtgaccatatattgtccaaactgcgacacttttgagagtgaaaagtgcatagggaataattataccagaaaaatagtcataaattgagatggttctgagaaaaccaggatgtctggtcaccctcaaagaagtgactggggctcattttaacagaactgacagactcctgaaggtaacctgcctgggaacctgcaacagagaaactggtcagcaggtgccccatatgtagccagattgtgagtcatcagtctgggagaaattgagttttcagtttggactttggtggtgtgttgtaatctgttccctagagatctgccaaactctaggttgaacacatggatccttagaaattatccatcttgaatcgtttggtataaaaatagatttcagaagtcccagggcagatattacamgatttctatgaaaaagaaataaagaatagaagtataaacgtacaggaatggtgaagcaaggaggataatggatgttagaaatactggcaaagagggcaaaaatgtgcagttagataatgattacatgaatataaatatggaatatttattaaataggaaaattaggccctaa

SEQ ID NO: 191091 - DNA, 519 bp, Homo sapiens
ctgctcccccttcaccttccaccatgattgtaagtttcctgaggcctccccagaagctgagcagatgccagcatcatacttcctgtacagcctgcagaaccgtgagtcagtttaacctcttttctttataaattacccagccttgggtatttctttatagcaatgagagaacagcctaacacactttgagttcttaaagatatgcaccatctgtaatttgcttgtgtgcacctaaaaccccttaaaaagcagattcttacatgtatctttctgtcctgagtacagatagtttcttattcttgtggtataaggtactgggtaggcctccaatatccccatttcctggtctacctgccctgtgtgatccccttcccatcagtatggttgagatgtatgaatatgatacgataatcattcccttgattgcgtaacattatttgacaaagataatggaataatcactcccataatgaatttgccrgaaaagctgatttttggtaaagcttagtgtaaagacca

SEQ ID NO: 191092 - DNA, 519 bp, Homo sapiens
ctgctcccccttcaccttccaccatgattgtaagtttcctgaggcctccccagaagctgagcagatgccagcatcatacttcctgtacagcctgcagaaccgtgagtcagtttaacctcttttctttataaattacccagccttgggtatttctttatagcaatgagagaacagcctaacacactttgagttcttaaagatatgcaccatctgtaatttgcttgtgtgcacctaaaaccccttaaaaagcagattcttacatgtatctttctgtcctgagtacagatagtttcttattcttgtggtataaggtactgggtaggcctccaatatccccatttcctggtctacctgccctgtgtgatccccttcccatcagtatggttgagatgtatgaatatgatacgataatcattcccttgattgcgtaacattatttgacaaagataatggaataatcactcccataatgaatttgccggaaaagctgakttttggtaaagcttagtgtaaagacca

SEQ ID NO: 191093 - DNA, 394 bp, Homo sapiens
ctaaatagagaagtctttaataaagcaaattttcaactcaataataaagcaaacaatctaattttaaaaagggaaaagatttgaagacatttcaccaaagaagatatgtaagtggccaataagccattgaaatatgctcacatcaatagttatgaggactaatgtcsttagtctaactaaggaaatgaaaactgaaaccaccatgaaatatcaatacattccctagagcagctgcgattaaaaatctgataacacccagtgttgatagacatgtgcagcatgtggaaatctcatatgctactggttggatgcaaaatggcacagacactttggaaaagagtttggaagtttcttataaagttaattatatatttaccttacaattgaacaattc

SEQ ID NO: 191094 - DNA, 314 bp, Homo sapiens
ggttcctgacacaaagaatcaggtacagtggcatagttggaaggtcagtcttgaggagtgccagcagtaagagtgcctccagtgataayactggactccaacgtgtggggctgaaattcttacttaagctcaacaatgacattccaacagtaaataggaattagaggtgggttagggagtaacctccatgtggggagaggagggatgaataggcaataaaccacacagattttgatagtgtgaaacatacgtggcaggttttattcatctttaccttcccactttcacccacccccgacaatgcagaggggtct

SEQ ID NO: 191095 - DNA, 590 bp, Homo sapiens
ggtggtactgaaattgatctttaaaacactgtctggatatagttataaaaggagatgaacttgctatatccccgtctatttctcacattaaccctgtgaggttaatctctttccataaatgaggaaacagctcaggcagattaagtcacttaccaaggtcacacaattgaggactatctaacacaggagagctgtgtaggtctctcctctacacagcacatctgttctgtaatgtctggattgctgcgtatcagaataatagccaaagctggccttttctggtctggtccctgcaccgtattagcctcatctcccaccatctctccatacggcctcagcttcagccacaccttgtgttttagaaagrttcctagcgggaaacacatggcacacttaaaaaggtttaactgaaaataatgaggaattattcttagaaaagtggatatctagggaaaccaacaaaggctggcaaggcacctagggactagcaagaacaagaagccattactaccccaggactgaagaggcaagaggaataaatactgataacaaagtctggagtgcactgacacaatggagtggggccaggc

SEQ ID NO: 191096 - DNA, 547 bp, Homo sapiens
ggttgagctatgaggagtgaagctggctgatggcccctacctataacatctttggacctcctactgtgttcacacaggcctggatttccccaggctaatcctagacagtactgaccagaaggtgctacagccaggtcatttctgctcaacatgagactcttctaacaggccatctttgctccagggcttcccaccagcctgtccaaggctttctcagagctgcattgtaatccgagatcctcctacccattcttcccttctgatcctcctcttacctgtcttcttttgcagatatcagacctgtattgctgtctgaaggctctacccacccacttctcctccctctcccctttatccttctaaagcattttcccttgtaaacctcttgcacatctaaatccatcttggcatctgctttttgggagacccaaactgacccagtgctaaaaagaaaaataaaacagggtcagggagctagaaagtgactcagagatacacagggcrtttactgaatgcctatttaataagatgagagaatttgttgatc

SEQ ID NO: 191097 - DNA, 554 bp, Homo sapiens
tgcaagtggtttgctattactagggcatgccatacaaaatggatagtagggggagcaaaaatggaagagagaagggggacacagtctaagaacattcttgaaagctggactaagaagcatggattttgcccacaggaaatgggaagccacagatggtcaggctgacttttaggaaaatgactctgcctgcaagatgagggaaattttaaaacagaataaaaatggagacagggagattaaaaggctactgtagcatttgttgaaaagataatgagctctgaactagagaaatggaatgggtgttgagaggagtagacagatatgagaaacatttagaaagtaaaatcagcagggcttgggcttaattggatataggattagtcygggaagaagggacagttcaaatcaaaatgtctggccaactccttcaatttaaaaaaactgaaagtcatttaatctagtggaaaaactcaattgactctttgttatggtggtcaaaaaaaaaaaagattagttaactggaatcttcatattttaccaagtagttggcatga

SEQ ID NO: 191098 - DNA, 555 bp, Homo sapiens
tggggtgaggtttgtagaaaaataaggttaaagtgagccttagaagacaaacacagtagccatggtttgagaatggctaatccaccatcttgagacaaaagttgactttctttttaatttaattccattaatatataataatacatgtaataaaaatgtaatttttattgtaaaaaggaaaccacagagacactgaagctccctagaactctcagatccttttctatgctatgtttgtacatgtatgcatattgtatatgcatatttatttttaatcatttttgacactgaattcataatatgttttctgagtttttaatatgcaacactatcatttggaaatcttwccatgttagtaagtatataactcttagttttttaacttttgtatagtattccataatatggctactctgtgatttattggccatctattcttggtagacatttatgttagttccattttttacactgttgcaaacagggctgcaataataacatttctaattttgtctccttttataagggatctacatttctcttggagttcatgct

SEQ ID NO: 191099 - DNA, 555 bp, Homo sapiens
tggggtgaggtttgtagaaaaataaggttaaagtgagccttagaagacaaacacagtagccatggtttgagaatggctaatccaccatcttgagacaaaagttgactttctttttaatttaattccattaatatataataatacatgtaataaaaatgtaatttttattgtaaaaaggaaaccacagagacactgaagctccctagaactctcagatccttttctatgctatgtttgtacatgtatgcatattgtatatgcatatttatttttaatcatttttgacactgaattcataatatgttttctgagtttttaatatgcaacactatcatttggaaatcttaccatgttagtaagtatataactcttagttttttaacttttgtatagtattccataatatggctacwctgtgatttattggccatctattcttggtagacatttatgttagttccattttttacactgttgcaaacagggctgcaataataacatttctaattttgtctccttttataagggatctacatttctcttggagttcatgct

SEQ ID NO: 191100 - DNA, 581 bp, Homo sapiens
aacttaatgaagcaatatgtatatatgtagggaagtttatgaatttgaggcttggctctgtcacttattagtctgtgtgaacttgggcaagtttcattttgggggctcaattttctcatgtataagataggggtaaaaatatctatctgataagagtaatgagagaattatatcaattaagatactggtaaaacacatagcctaatgcctggttacatggtaagtgaacagtaaggagcagatactattatgtgaaaactaaaaatcagttttatatattaatggcaycttgactaacttcaatattggcaatttgtagggagaatttcaaaataggatgttgccccatcaaatagcttggagacaaaaacctccaataatgtctaatagtcactgaatgcttactgtatgccagacattttcttggtaatctacatgtgttcattcatttcatcctcaaaacaatctgatgaagtgggtataactattattccaatttcagatgaggaaagagagatgaagagtagttcagttacttccctaggtcatcgcagatacatgagccagaattcaaacccctg

SEQ ID NO: 191101 - DNA, 581 bp, Homo sapiens
aacttaatgaagcaatatgtatatatgtagggaagtttatgaatttgaggcttggctctgtcacttattagtctgtgtgaacttgggcaagtttcattttgggggctcaattttctcatgtataagataggggtaaaaatatctatctgataagagtaatgagagaattatatcaattaagatactggtaaaacacatagcctaatgcctggttacatggtaagtgaacagtaaggagcagatactattatgtgaaaactaaaaatcagttttatatattaatggcatcttgactaacttcaatattggcaatttgtagggagaatttcaaaataggatgttgccccatcaaatagcttggagacaaaaacctccaataatgtctaatagtcactgaatgcttactgtatgccagacattttcttggtaatctacatgtgttcattcatttcatcctcaaaacaatctgatgaagtgggtataactattattccaatttcagatgaggaaagagagatgaagagtagttcagttacttccctaggtcatcgcagatasatgagccagaattcaaacccctg

SEQ ID NO: 191102 - DNA, 559 bp, Homo sapiens
taaaactctaataaggctctggaaaaatagcttctcctgaggttaggccttrttcagaaaaacagaatgctctgaagtatttcaaaatggttccttttcctttctccctgctgaacatacaaggggatttttctcagatattcactgtgagaacctggtagagttccaggaggaggaacagaaaaaagtgtaggggccaacctatgaatgaggtttttggagtctttaactctcagatttgtccacattgagcctccagcaatttgtcaattacagtttaggtttttctaccctggcactggttcctacagaggtttctactcctaagtacctgctccagtaagttatgattctcttaactgcctgtctctccaatttttgggacagttgtttgccctatgacttcatttctctggcagatctaagaagatttgtagatttttcagtccgatcagtttttttttttttttaacttgttgttaggaaagagtggtgacttctaagctacttactttccagactgcaatcattggcatttgcacagacattacctagctca

SEQ ID NO: 191103 - DNA, 421 bp, Homo sapiens
ctaacggcagccagactgtaacacaggtgttagttgatcctccccacaattgtacaagggctccactacacaataacaatgctttgcatccaggtggagcttttctctgtaaaggtcaaagtgctgtgagcaattcaaacataagcaggggtgatgatggcccatcaagctcagaaaatgacccagttgaccagttcctctccaaacacggagaataacaatgaagtggagaatccgtagtaataatgttggatgaatgctccgttccgttacattttctttttatccagaaaaaaaaaaaaacgcatttgtgaagtkaattattttggtaatgaaagtggtatttattaaacacactagaaactgcaaatccaaataagtatttcccttcaaaatagtcacttggggaagctatgtaatt

SEQ ID NO: 191104 - DNA, 632 bp, Homo sapiens
gaatgtaagacattatttttaacatcgtaaaatttcaagttttaattcagaaactaaattaaaatgaggtattacattcatgtgattagtgggctgttactggtgactcttaaagatgttacaagaagtcagcgtgctgctgacttttcccctattggagatcttcccatgaaccacttttcctaaggtatgrtgattccatgctcacagtcatgggtagaaagtaatgttggattttccaaaggatacatgaattccgagccttgtctagtctatagggtgaatccttggacatgactgttaccacagatgttatcatagttaactactttttttgtttttgtgtcagggtctcattctgtcacccaagctagagtgcaatagcatggtcatggttcactttaggctcaaattcctggctcaagtgatcctcccacctcagtctcctgagtagctggggttacaggcgtgagccactgtgcctagctcagtatactactattggttaaattggagagggaaacagtcctagaacaagagttttacagaaatagaaaagaaagaattaaggagctcatggttatcctggtagctaggagtcacattatagagaaagactttatttatatgga

SEQ ID NO: 191105 - DNA, 518 bp, Homo sapiens
gaaaaatagcgtgtgtgtatagaggagtgggtggaatgattggcagctacctttgcagacaatctgcccgacctcattttacacaggaggaaactgaggccaaaggaagttaggccacttgtttaatgtcacacagtcagtacatggcagaacttgaataaaaactcagttattaaagcccaagctcaatggtgataaagaggtaatggtgagaatactctttggaaaatagtcagagggaaggagacagtcaacactgaatagcccagttgtggagggatatagatacttagaaagactgctatatttcactggttgatgatactggaatggaagttataatactgcccatcaactggtattaaagtgttcacaagatgacarcctgtaggatttggaatcgcagttaaccctgacttctggattctaatcagcacagccacatggtcaaagtccatcacttccagtgtcattctagagaaggatttcatttaaataatgtatattttgcttcccag

SEQ ID NO: 191106 - DNA, 583 bp, Homo sapiens
tgataataacataattgtttggtagttaattactcaattagtgaatgaataagttattgaattttataggttagaaaatataaaaakaaaataaaagaataaaccccccaccccaccccacccaaaaaaggatgaaggggaaaagtacaaagaattgccccacctacctttggttcccactgcaactgatcatttgttgattgtgtcatatcagaagcaggctataaaagggagctccttcccagtgttgaacacccccaaccccagttacatagattcgatgctcactgtttggctgtttttacacagagggatttttagattgacatttttgatgactgaagactcgacaaattaatattcatcaaatctcagaagatcattggagtagacagtcaaacttatctttgctcacattttaatcatgacaaggactgacattatgaatgactcactgagtgctcttaaactggtgatgcacccgggtaacactctgggaacaggctttctccatgagagtaaagggtgtcattatgaactgggctactaggtggccacagcgagtatctcagttcctcgcaac

SEQ ID NO: 191107 - DNA, 628 bp, Homo sapiens
cacaattcaacccataacagtgtgtgtaggaaaataattttttacatcaaactttatggtraaaatggctaacatgtcattcttgatcaaaaatgttttagtgataatctctttatatcattgagtttatattgaaaatgagtttgtataagttgatgataggaaaagtaaaacatttataacttcaaagttgaaaagagttgaaaatatattgaaataatcaagagttcttcactttccttcattgaaaaatgtaatgtagactttttgtaataatgcaaattgttgtagactctcatcaaagcattttataacaagtatctgaaaataataaggcttcaagtatacacataactatagtagtcacttgcagctagcttggactccactaaaagggtccatccaactgaagtgacaaaaaatcaatcatagaggttcagggctgctgcctggagctggacccatcagaagtcccagctcttttgctcatcaccttcctgccatctcctggctttggaatgccagttgccatccttgaacacctgaaataactcatttaacagtaccatggattccttcttcacaaaccacagagtgctttgctgttggcatcattctttgatgacat

SEQ ID NO: 191108 - DNA, 628 bp, Homo sapiens
cacaattcaacccataacagtgtgtgtaggaaaataattttttacatcaaactttatggtaaaaatggctaacatgtcattcttgatcaaaaatgttttagtgataatctctttatatcattgagtttatattgaaaatgagtttgtataagttgatgataggaaaagtaaaacatttataacttcaaagttgaaaagagttgaaaatatattgaaataatcaagagttcttcaytttccttcattgaaaaatgtaatgtagactttttgtaataatgcaaattgttgtagactctcatcaaagcattttataacaagtatctgaaaataataaggcttcaagtatacacataactatagtagtcacttgcagctagcttggactccactaaaagggtccatccaactgaagtgacaaaaaatcaatcatagaggttcagggctgctgcctggagctggacccatcagaagtcccagctcttttgctcatcaccttcctgccatctcctggctttggaatgccagttgccatccttgaacacctgaaataactcatttaacagtaccatggattccttcttcacaaaccacagagtgctttgctgttggcatcattctttgatgacat

SEQ ID NO: 191109 - DNA, 628 bp, Homo sapiens
cacaattcaacccataacagtgtgtgtaggaaaataattttttacatcaaactttatggtaaaaatggctaacatgtcattcttgatcaaaaatgttttagtgataatctctttatatcattgagtttatattgaaaatgagtttgtataagttgatgataggaaaagtaaaacatttataacttcaaagttgaaaagagttgaaaatatattgaaataatcaagagttcttcactttccttcattgaaaaatgtaatgtagactttttgtaataatgcaaattgttgtagactctcatcaaagcattttataacaagtatctgaaaataataaggcttcaagtatacacatwactatagtagtcacttgcagctagcttggactccactaaaagggtccatccaactgaagtgacaaaaaatcaatcatagaggttcagggctgctgcctggagctggacccatcagaagtcccagctcttttgctcatcaccttcctgccatctcctggctttggaatgccagttgccatccttgaacacctgaaataactcatttaacagtaccatggattccttcttcacaaaccacagagtgctttgctgttggcatcattctttgatgacat

SEQ ID NO: 191110 - DNA, 509 bp, Homo sapiens
ttcattaaagaccccattctatttctttatttgagaaactggtgaccagagggctcaaattacagagaatgctgcatattataatgtagaaagcagatctattcttagtgctaaaatagtgcttaaattacttcattaaacactayggaacaaaaaaaaaatccacatactgtaatcattttcaaatattcactttcctgccaatagctatattttgccaggttgtggagacaaagcaagttggcaagatgatgagaaacctgtaactggcagtacaaaaatctttctgctgccaatttcatgggcaggtgcctgagatttgataagataggagcggaaaatttgttgcgatgactctgaattttatagaaagccacttcctgctattttaatgttcgtggttccaaatctatgttggccaaatttttcaggtagatatgctatttaattggacccaccaccataccacaactctccaaatttgagaaataaatataataattaaacag

SEQ ID NO: 191111 - DNA, 393 bp, Homo sapiens
acctctaaatagaccctacaccctcctgaacacctaaggggcccctggtatgctctgctgcacacatccttaaattgtgaagcacgctgagaagatcaaatacacattctaggctcccctttcccctggatgcaggaaggtcttgcagttagaatcaaatctacgtttcaaccttagccttggtacttactagttgtgtggcctcagacaaactacttagcctctttgaaacacagtttatttttacctctaaaagggtttggtgatatccccttcmcaaagctctttccagattaattgaggcaatgtatgtgaaagtatataataactggagggtagcacatgtttacatgcttagtacatttcaaattctcttctcattccacagagatt

SEQ ID NO: 191112 - DNA, 393 bp, Homo sapiens
acctctaaatagaccctacaccctcctgaacacctaaggggcccctggtatgctctgctgcacacatccttaaattgtgaagcacgctgagaagatcaaatacacattctaggctcccctttcccctggatgcaggaaggtcttgcagttagaatcaaatctacgtttcaaccttagccttggtacttactagttgtgtggcctcagacaaactacttagcctctttgaaacacagtttatttttacctctaaaagggtttggtgatatccccttcccaaagctctttccagattaattgaggcaatgtatgtgaaagtatataataactggagggtagcacatgtttacatgcttagtacatttcarattctcttctcattccacagagatt

SEQ ID NO: 191113 - DNA, 393 bp, Homo sapiens
acctctaaatagaccctacaccctcctgaacacctaaggggcccctggtatgctctgctgcacacatccttaaattgtgaagcacgctgagaagatcaaatacacattctaggctcccctttcccctggatgcaggaaggtcttgcagttagaatcaaatctacgtttcaaccttagccttggtacttactagttgtgtggcctcagacaaactacttagcctctttgaaacacagtttatttttacctctaaaagggtttggtgatatccccttcccaaagctctttccagattaattgaggcaatgtatgtgaaagtatataataactggagggtagcacatgtttacatgcttagtacatttcaaattctsttctcattccacagagatt

SEQ ID NO: 191114 - DNA, 503 bp, Homo sapiens
accagtcagaatggctattattaaaaagtgaaaaaataacagatgctggtgaggttgggagaaaaaggaatgcttatatactgttgtggaaatccaaactagtccagtcactgtggaaaacagtttggaagtttctcaaggaacttaaaatagaactaccattagacccagcaatcccactactgggtatatacccaaaggaaaagaatgtattctatcaaaaagacacatgcatccatatattcaatgcagtgctattcacaatagcgaagacatgaaatcaacctaagttcccatcaacartggattagataaagaaaatatggtacatatacaccatggactactattcagccataaaaagggatgagatcatgccctttgcatggagggaggtggaggccattattctaagtgacctaacataaaaatagaaaaccaaatattccatgttctcacttataagcaggagctaaacactgaatacccatgactgtaaagat

SEQ ID NO: 191115 - DNA, 549 bp, Homo sapiens
catttgtttaaattagtttgggttgtgtttctgttactcgcaactaagaatcctgactaatttcctcagcaacagagaggcctattgtttgtggaatgggtgatacctacactatggcagaacatatggaagccttccacccattctaactatattctcaactaatggcaacatagcttttcattrcaaagagaacctaagaaaaccttagtctggccttattagagggagttagaaacttggtcaacagtctcttgagatgctcacttttagttccatgagggaggctaaactacaaggaaaaggaacatcccagcagacactgagcaataaggaaattagccccattatgcccatatataactgttttttggtttattcattatcaactctcactcaaaaacactcaaaaatggtttgaatctgtgtccccacacaaatctcatgttcaattgcaatcctcaagatggggcctggtgggaactgaattggatcatgggggaagatttcttatcaatgattagtaccatccccttggtactgtccttg

SEQ ID NO: 191116 - DNA, 609 bp, Homo sapiens
ttttttggagaatttgttctaatgttgtttaaggagagttactgcctggtcctaatttgacctgtccctgagacaaggcattcaattttatgatttcacattctcctttttcagaagtccccttgctttgctgataaattctgtttgagttctgccccaaatgaggtgtggaatcttaggaccagatttcttagtttttaaaataaagggatgaattagatgattctcaaccattctgaaagttagcataattcctgtaacatcatcaatgatttttttggtcatgaaagaaacaatcyattatctgtacatcagttttgtgcatttaaaaaataactaataatgcatataatttgatgtcatttttgtaatgatcataatccaaatatttgtttaagctttttacactttagcattcaaaggttctcagccactggcctttataaatgacatggtggtgtacagtactgctcctctttcctgtaacttcatttttttccatttcttttttggttaaattcacacacacacacacatgcacacacacacacatacacgcacaggtgcacacacacacatacacgcacacacaggcagtggggcagggag

SEQ ID NO: 191117 - DNA, 526 bp, Homo sapiens
ataatatacataaaagtgctttgtgagcttcttaagcactatctacatgtttggtatcattatcatcactttattggaaaaatttagtcaatagagcaccaaacagtaaagagttgcgtcttaaaaatcactttgtccttttcatttccattattcattcaaaaaatatttgttagcttactactatgacccagagactgtttggcgccagggatagagataaaaaaaaacaaacaaataaacaaaaagtgacccataccctascattgcttttacactaatgcccctgtgaaaattaatcctattagaaaagaccaaatgaataagagcaactctattttatccatctaattgggagacaactaaagttcagaaagatgagattctcaggtcactctgcaactcagtccattttgcatgaaggctaaaacttgtgaatcctagttcacatccatgctctggccagttcattattttgtttttaaaggattaatggaaattctcacagagtccttgatcttacctc

SEQ ID NO: 191118 - DNA, 505 bp, Homo sapiens
atatacataaaagtgctttgtgagcttcttaagcactatctacatgtttggtatcattatcatcactttattggaaaaatttagtcaatagagcaccaaacagtaaagagttgcgtcttaaaaatcactttgtccttttcatttccattattcattcaaaaaatatttgttagcttactactatgacccagagactgtttggcgccagggatagagataaaaaaaaacaaacaaataaacaaaaagtgacccataccctagcattgcttttacactaatgcccctgtgaaaattaatcctattagaaaagaccaaatgaataagagcaactctattttatccatctaattgggagacaactaaagytcagaaagatgagattctcaggtcactctgcaactcagtccattttgcatgaaggctaaaacttgtgaatcctagttcacatccatgctctggccagttcattattttgtttttaaaggattaatggaaattctcacag

SEQ ID NO: 191119 - DNA, 523 bp, Homo sapiens
aggattgctcttaaaggcaaaacaagaatccggctaattctcacaactgtgcaaagttggccagtcttgtttatacaagctccacaaaccaaccttcaggatgtattttcaagtttaatggccccatcctcagaactttacgagctgccatagtcctatagacctcaaaacaattcaacattctacactgagaatggaggactttgaagagaaatgaaaggaaggagggaagtcttccatattcaaacgtccaaacaaatcaccactgaacagacctttggcaaagagtcyacaaaggtaagttttcagagtgaatataaatattagtctttttctgcagtcatgaagacagcagctcctcttgatattaatatatcactactctacaaatacacagggaataagattatgattctctaatattaaatacacctaaataaacgcctgtcttcaatttcaaaaggccaaagtcagagcctaacaaactgtgtcttcaacattccttccaggttccaaaaccata

SEQ ID NO: 191120 - DNA, 621 bp, Homo sapiens
agatctacaacacctataacgtgctgtaaaaatgtgtgacttctattggtgacaaattcgcaggtattgctaaaactaatgtggtttgttgccttattcctaattgaaagaaatgttcaatttcagtgagagattattgaaaagaaagatgtaatttwttccccatccatgctcagggactcctgtatcttaaaaatcttttaatgtggtcttacagtacagacatacaagtcttcaacagtctgatttggataaagcaatagtgatatatatattccttgtttaggaataaaatgtgtctacatctccttcttctgttattgatacgacttacgtaaatctttacaatgctgaacttaaacagaaaaagcaatgcttaaagttacacattttaagataattcatgaaattgtcaaggacaacagtaaagcaatgaattgtttgtagacctcgtgacacacagagagaatattagagaattaaatgataaaggaataaaagaaaaggggctttgatatatatggatattttaatggactagggaaggcccaaattaaatgatgattatgcagtggtctggagatttcacatacaaagatattcactacccagtgtttccaa

SEQ ID NO: 191121 - DNA, 610 bp, Homo sapiens
acctataacgtgctgtaaaaatgtgtgacttctattggtgacaaattcgcaggtattgctaaaactaatgtggtttgttgccttattcctaattgaaagaaatgttcaatttcagtgagagattattgaaaagaaagatgtaattttttccccatccatgctcagggactcctgtatcttaaaaatcttttaatgtggtcttacagtacagacatacaagtcttcaacagtctgatttggataaagcaatagtgatatatatattccttgtttaggaataaaatgtgtctacatctccttcttctgttattgatacgacttacgtaaatctttacaatgctgaacttaaacagaaaaagcaatgcttaaagttacacattttaagataattcatgaaattgtcaaggrcaacagtaaagcaatgaattgtttgtagacctcgtgacacacagagagaatattagagaattaaatgataaaggaataaaagaaaaggggctttgatatatatggatattttaatggactagggaaggcccaaattaaatgatgattatgcagtggtctggagatttcacatacaaagatattcactacccagtgtttccaa

SEQ ID NO: 191122 - DNA, 610 bp, Homo sapiens
acctataacgtgctgtaaaaatgtgtgacttctattggtgacaaattcgcaggtattgctaaaactaatgtggtttgttgccttattcctaattgaaagaaatgttcaatttcagtgagagattattgaaaagaaagatgtaattttttccccatccatgctcagggactcctgtatcttaaaaatcttttaatgtggtcttacagtacagacatacaagtcttcaacagtctgatttggataaagcaatagtgatatatatattccttgtttaggaataaaatgtgtctacatctccttcttctgttattgatacgacttacgtaaatctttacaatgctgaacttaaacagaaaaagcaatgcttaaagttacacattttaagataattcatgaaattgtcaaggacaacagtaaagcaatgaattgtttgtagacctcrtgacacacagagagaatattagagaattaaatgataaaggaataaaagaaaaggggctttgatatatatggatattttaatggactagggaaggcccaaattaaatgatgattatgcagtggtctggagatttcacatacaaagatattcactacccagtgtttccaa

SEQ ID NO: 191123 - DNA, 484 bp, Homo sapiens
acacatcacctgctaactgaaaagcctctgggccctaaataaccagcagcgatacttaagtactatgtggagggctttaggtgagaccctgagaatttctggcttcaggtgagactcagcatagtcccagctattgtggctatgggtcaagattccttctacttgagaaaaacagaggaaaaagcaaagtggactttgtcttccagcttggtcacagtgaggtagagcacagagtgagcccttgggttcccaatttcaggacttggctcttggaatacatttctggaactgccctaggcaagaggggatcccactgccctgaagggcaagtcccaggccaggcagcattcactacaagctaactgaagagccttggggccttctttaargaaacattagtggtagtccggcagtactccccataggcctatggtggcagtggccatggtgggaggcatctctgcttttggaaaggggagggaag

SEQ ID NO: 191124 - DNA, 569 bp, Homo sapiens
agactttgtcaaacaacaaaaggtttgcacgatccactccacagagcaattaggcacctccatgtctgggtagacagaggccayccaagtgatccttccaagaatgaagaataaaagtcactgtcaaaggtgatttttggtctccatctgagtgagaagtgtctggaaacttttaaaacaatgctttaggttttgtttgtttgtttttcgtgtttttttgtttttttgtttgtttgtttttgagacggagtcttgctctgttgctcagcaggttagagtgcagtggcacaatcttggctcactgtaaacttcgcctcctgggttcaagcctttctcctgcctcagcctcccaagtagctgggattacaggcatgagcaccacacttggctaatttttgcaaaaaatagccctttctttaaaaaaaaatcctctttcccataaagagaaagtggaaaataaaacatactggaaaacattaaagaagatttaaaagaatggagatatattcaatattcatgtattggaggactcaatattgtaaatttgtcattctccaagattaataaat

SEQ ID NO: 191125 - DNA, 517 bp, Homo sapiens
attgcctgaccaaagatcacatttccctttttggggagaagtcacattgaagttcctgctgttaccttgagcagctccttctcttggcatgcataggaagcttccagctgttgtaacttaacctaaagaaagcaaaagagactgctaacttggcaaggtaaaagctgtgcrggaatggaatgctgtcaccaaggtggcctcacgagctgtgaggagcctcagggccatgacttcacacgtctcctgatagaggaattaagccacccagcaccgtttgcagctgcttggtaaacttgctcttttatattccttaccttttagtcttcatctggtgctagcttcacccctaaacttcaattctgagcttcctactcttacttagccatttctcttaaaaataataccagttttgaaaaacttcactcttccttttccttttaatatagtcagtcagactctaaggtgtttgttcactcctttctccctccctgtatgccttgctcacccttttatttcc

SEQ ID NO: 191126 - DNA, 513 bp, Homo sapiens
tctaaataatattgacccaaagaactataaatagatcaatggacataatttaaaagtccaaaaacagattcacatgtatgtggttatttaacaaatattatactaaaggcaatggagaaatcctagtttttcaagtactgttaggtcaattggatgtccttacggaaaaaaaaaaattggtcccagactcacactatatgtaaaataatcarttccaggtcaacagtagatttaaatataaaagtaaaaacaataaatccttagaagacaacataggatatcttgtggaagaaaactatttttaaaaacagtaaacaaaatgctaatcataaaatataaagttgatatactggacattaaaattaagaatttatctttatcaaaagacaccattttgaagaggcaagtcacagaatatgagaagtatttgcaatatacacctgatagctaatttgtatcaataacacataaataactccaacaaattgattttaaaaaataaagccatggggg

SEQ ID NO: 191127 - DNA, 513 bp, Homo sapiens
tctaaataatattgacccaaagaactataaatagatcaatggacataatttaaaagtccaaaaacagattcacatgtatgtggttatttaacaaatattatactaaaggcaatggagaaatcctagtttttcaagtactgttaggtcaattggatgtccttacggaaaaaaaaaaattggtcccagactcacactatatgtaaaataatcagttccaggtcaacagtagatttaaatataaaagtaaaaacaataaatccttagaagacaacataggataycttgtggaagaaaactatttttaaaaacagtaaacaaaatgctaatcataaaatataaagttgatatactggacattaaaattaagaatttatctttatcaaaagacaccattttgaagaggcaagtcacagaatatgagaagtatttgcaatatacacctgatagctaatttgtatcaataacacataaataactccaacaaattgattttaaaaaataaagccatggggg

SEQ ID NO: 191128 - DNA, 623 bp, Homo sapiens
agaattgacttggtgcggttagagaggatgactctgaggaagatatggttgagctgagatctaaaggttaagtaggaattaagtaaagccaggaggactcagggtcgggggacagaaagcatggctggtgaaagagaacatcatctgttaatgtcttgaagcagaagggagcatgataagacactaagaagctgtgtggcagaaggaagatgtggattgttcagaagacaatgagacagtggctcaaatctgtaggtgttgcattgtgtatcatcccctaaagtaatgctatggattttagccaggattcaaagagagctggaaagyaacagaacatcctatgtaggaagctgtcatcatgatgtctaatagttcttgagcattttcttttcctataatattgaatttttatgaagaaatatatacaacataaattttagctataaagcattaaatataataaagactcatgacctcagccaaatgaagaatgagaacattacctgtaacttgtgtctacatatgtgttctggcctccccttccagaggtagctcacgttttgaataccatactgcatatcttctaggacttccctttttttccctgtcatcattctatttct
